United States Patent Application Publication US 2006/0134663 A1 - sequence listing, part 77

SEQ ID NO: 204475 - DNA, 1000 bp, Homo Sapiens
aggggagatgggaaatagagaacttgtagaaggggagaaagtatggaccgagacccaagtgggattgtggctcaggtgcagggcaggcctggccctgtggacagtcgtggggcttcctccagacccatttccctagcactcttcattcagttgggctgcttggagaatgcattgcttaattaacatagaaattacaaaggctgacatcctttctaagtatatttatgtactattttgctgcagtcaaaaatatattgaaaatacttttgattctggatcattttcagtctgtttttagagtggtgttaaaggcacactgcatgtaagtgtatataaattcttaaatgctggccgggcgtggtggctcatgcctgtaatcccagcactttgggagacggaggtgggcggatcacgaggtcaggagttcgggacaagcctgaccaacgtggtgaaaccccgtctctactaaaaatacaaaaattagccgggtgtggtggcgcgtgtgtataatctcagctactcaggaggctgaggcaggagaatcgcttgaaccaggaggtgtaggttgcagtgagccgagagcacaccaccgcactccagcctggacaactagagcgagactcggtctcaaaaaaaaaaaatcttaaatgctgacactaagatgggatcttgttttttcttaccagttgcctcatcttaatatgagcactaaaactccatttatttgggtgtcttcctattaatcaagattttactctaataatagcatgtgtagctgtctcatttccagaacatggttaaggaattttcagcacaaattattgcttggagaccatgaggactaaaggactgtactttttccttcatctgccaatgtcgtgggctaaagtttgttcatttacagggatcaaacttaacgtaggtgaggattttttggaagcctccgcacagcttccgctcgacactcttgcttgactctgcttcccccagatgacttgca

SEQ ID NO: 204476 - DNA, 1000 bp, Homo Sapiens
tatcctattctggggagcacattcctttctcaagaccccaaatatgggagtgtcccttttctctatagttttgaaaactgggcggcacaccccctttcttaagctctagctctggaattttatctaaatttctaaaagccctcccccccccaaatttagggcgtaccctcttccgtcagcccccaaagtgggagcacattccttttttcgggcctccaatttgattctgcatttccgttccaatttagaggttcaccctgttatcgggtcctcagatctggggtccattagctaaagttttgggatactttcttgtatcccctctactccaaggaagaattccccttttccaggtcccaaatctgacagcatgccttctggaatttcttacatttaggggccacttcctttcctcagcccttcaaacctgaggttgggccgaaaacaatgtccaaattttgaagtttatgggtacttatttccagtttcacaaataagggaattcactgccttctcccgagactgtattattggggttacacacttttcacgtgttccccaaatcaaactaccttatttcctgaaggagactcattttcatatctgggagtatatttgtttcttgtgccccccaaatgtacgaggtgaaccccttttagttatacaactctcagagtgcagccactttccagatgcttcttaaatttggggggcacacctttttgtgagtcctctcatttccaggtggcgagtggtctgtggttttgagcatgccttcctaccctgtttagcttttctgtcatccaagacattttcattcctcagtttccttccctttttggagccacactccccttgaggtgctttccccagtctggtcagtgcacccatttcctcttcctctggcgagtgcgtatctttgttcagcacggcacttttctctgtgcttctgcgggcttttcttctgagcacacttcccagagtcacacctcctgaattc

SEQ ID NO: 204477 - DNA, 1000 bp, Homo Sapiens
gaggtggactgtgggttggtggccggctgagtggtggcagacctttgagacactgtgcatacagcccatcccaaaatcttgtctacaagatgaatattggaaccatttcagtcttttccttttttgtcctgttacttataatcccaaatgacttatttattagtacatttgagaaaagtatattactctaaccaacattcatttaattaacttagatctccagagtcttattttctgtgataccaatgtaagccaattagtaatagaaatttattcatagtattcattgtgtgtattggtagtatattaggccattcttgaattgctataaataaatacccgagactggataatttatttttttttaaaaaaagaggtttaattagctcaaggttctgcaggccatacaggaagcatggcactggcatctgcttggcttctggggaggcctcagggagttttactcatggtggaaggccaagggggagcaggcgtgtcacatagggagagcaggagcaaggggcggggaggtgccacacactttcaaacagccaggtgtcatgactcgctgttgtgaggatggcaccaagccatgaggaatccgcccccgtgacccgaacgcctcccaccaggcctcacttccagtatcggggattacatttcaatatgagatttgggtgggggcaaatatgcaaactatatcaggtagcatgagtgtaaatttttctatttcaacttgttctgtattggtcctgaacctggggtaatacctgacaggtgtataggatgatgcctgatcacacttgcttagcactcacatttgctatgaatattattacatgctggcagcatctttttaacacaaagcatgcactcaacttatgtaattatattaaatgtgatcatcttgttattgttgttatgatttagcttaggtacagaaagcgtccgtttaattcagaaaatgcaaagaaagcaccggattgcctaataaaacttt

SEQ ID NO: 204478 - DNA, 1000 bp, Homo Sapiens
atactatgcagccataaaaaggaatgaggtcatgtccttttcagggacatggatgaagctggaagccattatcctcagcaaactaatgcaggaacagaaaaccaaacatacacgttctcacttgtaagtgggagctgaacaatgagaatacatggacacagggaggggaacatcacacactggggcctatcagggaaggctgggttggggagagcattagggaaaagaactaatgcatgctgggcttaatacctagatgatgggttgataggtgcagcaaaccaccagggcatatattcaactatgcaatagacctgcacatcttgcacatgtattctggaacataaaaaataaacaaaaaataaaagcaagccatgtgtaaaaaaaaagtctgaactatatacacatttttgctaagttgtttaggtttaggtgtttttttatgtacgtatcttcacacatatattcaatattaagttgtctactgaagtgcacatagtacggatttgaggtaggagattggtaggacttgttttttggtcacaaccctgctgaccaaaacaggatttggtccctaggcaatgaagtgaagaaatcaaattggcaggaaccagcagacggcaatgaaagccatccctagctgctctcattgctctttagcataaaacattcccactagcatcatggcagtttacaaataccatagcaacaaccaggaagttatcaccccattccacagccatgacccagaagttgccacttctttcctagaaagttctaaataatgcatccctcaatttgaattaacctgcctttgaatttacatgtaattaaaaatgaatataagtaagtataaatacagttgccaagagcccatacattaccaaatctgggcacattgcctgtgagttagccctgttctgcaaggagtagtaatgttcaataaaagattgctgtctcatattactggctcacccttgaattctttcctggtgaattc

SEQ ID NO: 204479 - DNA, 1000 bp, Homo Sapiens
gctgaggcaggagaatggcgtgaacccaggaggcggagcttgcagtgagccgagattgcgccactgcactccagcctgggcgacagagccagacgctgtctcaaaaaaaaaaaaaaaaaaaaaaaaaaaaatttccaattataaatatgtgctactttgaaaattaagagtgggtctttaattttaactatacataaagagagttattcaaacacgcttttaaacaaaacttgttttaacctcttcttagataatcctaaaattaatccagaaccaaatgtcttccttttcttaacatagactctaatgctttgtacatgccagtgcaaatgggatgctatttctgaggctggcagaagggcttaaaaacaaaaaggtggccgggcatggtggctcacacctgtaatcccagcactttgggaggccgaggcaggtggatcatgaggtcaggagatcaagaccatcctgcctaacacggtgaaaccctgtctctactaaaaatacaaaaaattagccgggcgtggtggcacgcgcctgtagtcccagctacttgggaggctgaggcaggagaattgcttgaacccaaaaggcggaagttgcagtgagctgagattgtaccactgcactccagcctgggcgacagagcaagactccatctcaaaaaaaacaaaaaacaaaaaacaaaaaaacaacaaataggtggtagggttcctaaaggcaaagtgtttgctttttcttttgtcactcattagttatagcattatcataaaaatgataaagcacttctctgccacttggtggtgggtgaagataatccctctcatgattaagaatacggtaacgatgaatgacagagccttgggagaagccttgggagaattaaaaactaaaaactttaaaaaaaaaaaaaagaaaaaaatactgtaacagctcatctaaccagaaaccagcaacctggaacattaaactaactatatacttcctaatctgtcaagaattc

SEQ ID NO: 204480 - DNA, 1000 bp, Homo Sapiens
ggtgggaggtgtttgggtcctaggggctgatccctcatgacttgatgctgtcttcacaatagtgagtgagctctcatgagatctggtcatttaaaagcgtgtggcacctcctcctctctctctccctccctctcttctcttgctttcaccatataacatgcctgcttcctcttcaccttccctcatgataagctttgtgaggcctcccttgaaggtaaacagatgtcagcaccatgcttcccataaagcctgtagaaccacaagccaattaagcgtctattatgtataaattatgctgtatcaggtatttctttacagcaatgccaaagcagactaatagaaattcttttcggcatatacctaatagaattgctgggtcatatggtaactcttacgtttaactttttgaggaaccaccaaactgttttccactgtggctgcattcttttatactgccccagaaatgtccaagagttccaatttctccacgccctcaccaaaatttattgtttttttgattctaggtatcaagtggggataaagtggcatttcattatggtattgatttacatttccctaatgactaatcatgctgaatatctttctgtgtgcttactggccatctgtaggtcttctctgaagaaatgcttattcaagtcctttggccatttgtatttgggttgtgttttgttgtttggttgtaacacttctttatatattttgaatactagactctcagagatacaatttgcaaatattttctcccattctgtagggtgtctttccactttttgggagtgtcctttgatgcacaaaagttttgaattgtgctacagtccgatttatctaatgtttcttccattgcttgtatctgtatcatatttaagaatccactgccagatccaaggtcataaagattgactcctgcatttttttcctgcgtttcagagttttggctcttacatttaggtctctaatccattaatttctgtacatgatc

SEQ ID NO: 204481 - DNA, 1000 bp, Homo Sapiens
aaaaagtataggaaatggagtagattattgtattccattaaacccagagggtatttaagctcctaaatttgggaaagaatggtccttaactggaggatattaattgttgttgatttgttttgaaactgggtaatttataaaaaatgaaatttatttcttacagttctggaatctgggaagtccaaggttgagagcgtttatctggcaagagctttcttgttggtggggatcctctgcagaatcctgaggcagcacaggacattacatggtgaggtggggctagatgtgctagctcagatccttctttctcttcttataaagccaccaatcctatttccatgataaattttaaacgagtttgaaggggacaagtattcaaatcatagcattctgtccctgccccacccccaagcctatgccctgctcacatgccactcagaattattccagtgagggctctctgcagtggcttcctcctgaaacaagtctctgcctgggccactaggagttcaacaacatcctttgaaatctggatggagctgccaaatcttcacagctctttctttctgcaagcttgcagaattagcaccacatggatgttaccaaggtttacaatttataccttctgaagctgaagcataaggcatacatgggacttatttagccacagctggggtagctgtgaagcactgcactgtggtacaggattagaatcccaaggtggccctgggcagtgatctcatggagaatgtgatgtccagtctctggaaattattttgctctcctaggcctcttgacctgtgatgaaaggggcaacctcaaagttttctgaaatgtctttgaggtctttctcccattgtcttgaggtagagcacctagctcccttctattcatgctaatctctttggcaaatggttgctgggcttggtttcttctcctgaacatacttctctatactttaagtgtcagactgagagttttccaaagaattccgcggatc

SEQ ID NO: 204482 - DNA, 1000 bp, Homo Sapiens
ccaccttggcctcccaaaccaaagtgctaggattacaggtgtgaaccactataccaggcctgtattcttttttttttttttttttttttttgagacagagttttgttcttgttgcccaggctggagtgcaacggcacgacctcggctcactgaaacctccacctcccagattcaggtgattctcctgcctcagcctcctgagtagctgggactacaggcgtgcgccaccacccctggctaatttttgcatttttagtagagacggggtttctccatgttggccaggctggtctcgaactcctgacctcaggtgatccacccacctcggcctcccaaagtgttgggattacatgcgtgagccactgcacccgaccttttttttttttttagactgagtttcactcttatagcccaggctggagtgcaatggcgtgatcttggctcactgcaacctccacctcacgggttcaaggactctcctgcctcagcctcccaagtagctgggattacaagcatatgccaccatgcctgctaattttttgtatttttagtagagatggggtttcaccatgttagccaggctggtctcaaactcctgacctcaaataatctgcccacctcagcctcccaaagtgctgggattacagatgtgagccaccttgccaggctctgtattacttctacaactaaaaaaagaaacacatgatttaaacatatttaaaagttttcacctgaaaatacggaatcttctcaattacacactttgtggttctttaaattatttttgaattctattcaatttggttcaataaatatttgttgtgcactaacactacttggtgctgtggttcaaagatttgtgaaagactatctgacctgtctgaaaattcctacactagccaaggagattgaaaaccattctactgaccataaaaactgctataaataaaatatggaagcctagcggaaggatcagtaaaggcttcagagaagtgaattc

SEQ ID NO: 204483 - DNA, 1000 bp, Homo Sapiens
acgcctcttatggggtgaccaggcaggattacatcagaaaggccagacacgtcttttacaagccctccttgttcaacaaccattactttgctgattcttacataaggtgtaaacaataggtttttattgatgaaattcgtgtcttggtagttagttttcactggcaaaattaaaggaattcaagatgcatagattagagcttagaggtcctccttccttcttgactgaagaggacctcagaatgcactcaaccatggatctgttccctttgaggatattttcttagcttgagccccagttagtcttacagccattggttaagagatgagataatgcagatggcaatgttttgcaatgttttgcatcttgctgagaattgttgctgtgtctgtggtgagcagaccttttataggatatgcttggagcacctaaacagagagctgagagctgggactccaagtttacaggactgcttgatgaactgttctgagcttgttttggtcagggacttgcttttttttttttattacctgctaacaaggtggtagaggaaaactaattatttgcccactccgattttcttgaagcccactgcgatctaccaaaccaaagcaaaccaaactcccaaagttggccatgaccaaattaaaattaaatactttgtggtaatgttatttttcagagggtcattaatcatacacatgtaatgtagaatttgcctacgtggattctcaacatttttttactcgagagatagcatgagggaaaaggctaccatggaagaggactgaggaagaggatttcttcctccaaagaggtttaggaagaggaaacgaaaggcaagttcaagaagacagctcggggtgaaggtcctggtgaggatttcagagtgtagatgaagatctcacctaaagcactggtggggagtccagagggatgggttccttgtctctggagggaaagaatgaaagcattggaaagacatgcactcctcccctat

SEQ ID NO: 204484 - DNA, 1000 bp, Homo Sapiens
ctgttgagattttgagttccttatgtattcaggatattaaccccttgttagatccatagtgtaccaatatttctctaattctttagattattcctctacttgtttattgtttcctttgttgtgcagaaactttttagttggatataatctcacttgtccgtttttgcttttgttgtcagtgattttgagttcttatccaaaaaattattgcccagatcaatgtcatgacacattttctcatattttcttctagaagttttatagttttgaggcttacatgtaagtccttaatccattttgagttgatttttctaaatggtaaaagataggggtttagttttattcttctgcatatggatatccagttttcccaccaccatttaaagactgtcctttccccaatgtgtgttcctagcacctttgttaaaaatcaattggctgtgtgtgaatttatttctgtgttctatattctgctccattggtttacatatctattcttatgtcaatgccattctgttttgtttacatttctgctttgtagtatattttgatgtctggtagtgtgatgtctctcactttgctcttttcactcaaaattgctttggctatttgggatcttttgtgtttacatacaaattttaggatttttttttcctattttggtaaagaatgttcttagcattttcataggtattgcattaaatctgtagattgctttgggtagtatgaacattttaacaatattaattatcccaatccataaacaaagaccatcttcccatttattcatagtatcttcaattcattttatcaaagttttataacttttattgaaaagatctttcttctctttggttaaatttactactagacattttatttttttggtagcaattgtaaaggggattgcttttttagttctttttcaggttcactattagggtatagaaatactactgattttgtgtgtcgactggtatcttgtaactctactgaattc

SEQ ID NO: 204485 - DNA, 1000 bp, Homo Sapiens
gtctctactaaaaatacaaaaaaattagccgggcatggtggcgggcgcctgtagtcccagctactcaggaggctgaggcaggagaatggcgtgaaactgggaggcggcgcttgcagtgagccgagatcgtgccactgcactccagcctgggcgacagagcgagactccgtctcaaaacaaacaaacgaacaaaaatgttaaatatttcccaagaacctgtgactagattatatctacataatggtctgtatctgtgtgtttgtgaagaattctccccgtagaggtagattcttgtcttcctaagacaaatctgaatcagtcctaagatcacatcatcagtgacttgatgtcctcctccccttcgtccctgtttagattccatggtcagagtcctctctccagtgtgtacacctttatcaacctccccctctcacttcctcacactccctgggcaaaaccacaaccctggtgataattccaatttgctgcctggtaggcatctgcacctgtccagccaaatgaggctggcatcacactaacgagtttcactttcaaattcacaaccacaaacctcacgtggagtcttcacgccccttggcaatcatacaacacttatccaggttaatttctcccttcattttccaagcagttattttataacctctcctttctgctcaaacctccaacacctcctcccttcccctcacttccagttaatggctttctttcggttcactgtgaatgttgacacaatcagcagagaagctgtgtgatctcccccctccccacacctatctatcattctctaaatccccacgctctgggctcctgcctactattatagacaaagcatctctgctattagagcccagccctctgcctgtgcacttgatccagtcccctctgattactcatggatatcactcagaaattatcccctctctctgctacatcagggttttattttttattttttattttttttgctctctgctggatc

SEQ ID NO: 204486 - DNA, 1000 bp, Homo Sapiens
agtggagactgagtgtagctgctcagaaccgaatgctgctttaagattaaggaaagttgagaactaagaaaagatttaaattggactgtggcattagcattaactattttaagcacttggccaagctcggtggctcacacctgtaatcccagcactttgggaggccaaggccagcagatcacttgaggccaggagttcgagaccagcctggccaacacaatgaaaccccgtctctactaaaaatacaaaaaattagctgagcgtggtggcacatgcctatagtcccagctgcttgtgaggtggaggttgccgtgagccaagatcgtgccactgcactccagcctgggcaacagagtgagattctgtctcaaaaaaaaaaaaagcacctgctttgaggtaactttgattacagctgaaatacagggaattttactaaaggacaaataccttccctcccagtagcttgtttcagattctggcacactggtaaataaaaactagaatcttgcaggctaaccttgcacatatgtatgtaagacagtcagaattccagccaggctttctcaaaactagggcagaattttttttaacttgtacttaactctcttctcccaggttatgttaaaatatgccttgggtcaggatgatagatgcctgtttttttctggagattcttagacattcagtcactcaatatcaaactgacaattaataaaatggttgtcatttcctcttccttctctgccataatctaccatcagcatatgaccatagaaagatgacaaatttttagataacctaaccaacccatatatgattaaactgacctttccttactaaaataaaatacacttactccatgtcttcactgcttttatcccctctaatgtgaaaatagcctcaaaatgatcttctaagacacaaaagaggacttaaacagtgtcatttgtcacttgctttatgcaaacattcgagtgtacctctttcaccacagggctag

SEQ ID NO: 204487 - DNA, 1000 bp, Homo Sapiens
tttctaaaagaacctagagatatgttagtggaaagtttagggggagatctgccctaggcctagtatgaccctaagccaaataaataaatccttggcttgtttatatagccaggttgaagagataatagttacatctattaaaaaagctttcttatgacctttgctacacttaggtcaagaaaatggtattttgagtgactagatgttttattttggatgctcgatcagtctccttgtttcttttactatctgtaagataacacattcttctcagttgttgaactttgacatctcaccatcatatgctctgcccatcttattccgtagcagcacacataaagaaaggccaaagcagactcctgaacccacagtacagctggaaggtttctactgcagagattctgggactctttaaaaagaaaaaaattaaaatttcaaaaaatcaaacccccttacacttggatgagaattccagaataaaagagggtgtcccccagcatcccctgaatatttctagggtggtgtcaagtgaattcaaaattcttgagcacatagattgttttcaagctcttgttttcatttcatcagtaaatagaattttaaaaacaacaatatcctcccatcagtaaatttggcacaatggatactagcactccgttctcgtacattcttgtcaacattttctttctgcatcccccacccccaagcctgggcctgcttcccactatatctcccacaacccttctgttagctgtaatgaccctgcaaacactaaatggcatttgagtgcattaagcagcaaactctctggtgacatagcaattatggctctgaaatagatttggtgcgtcacggaagataagggttttgaaagtttctattgtgattatagcctgtaactcccacaaataataggcttcaaaataagaggctgccaacggagcctttgtggctttgtctcagtgatggcacgtaaattgctattaatgtcctaagtgta

SEQ ID NO: 204488 - DNA, 1000 bp, Homo Sapiens
gactctatacatatatggataccgatttataacaaaagtggtactacagagctgtggggcaggacaactttttttattatttttttcatcagtagagacctcagagaaaaaggacaactttttatttatgtattatttttttgagacggagtcttgctctgtcgccaggttggagtgcagtggtgcgatgctggctcactgcaacctctgcctcccgagttcaagcaattctcctgcctcagtctcccgagtagttgggactacaggcacgcaccaccatgcccagctaatttttgtatttttactagagacggggtttcaccatgttggccaggatggtctcgatctcttgacctcgtgatccacccacctcggcctcccaaagtgctgggattacaggcgtgagccaccacgcctggccaggacaaccttttaaataaatggtgctgtcacgtggcaatccaatgtatgaaaaacgaaacaatgtaatacaatacaccaaaagcaaattacagaattgaatgggaaacaatttcacaacaaagcttctaaaaataatacaggagaatatcctcatgtctttgaagtaggaaaatattttttaaataggccactaaaaaggaagaaaaatactgacaacctgaaccattaaaattagaaatttgtttataaaaagacaccattaagaaaggaaaaaggcatgcctgtggtcccagttatgcaggagctaaaattggagaatcacttgagcccatgagctcaagtccagcctgggcaacacagagtgatcctgtcccttaaaaaacaaaaaaaaagtaaaaggaaatccacagagaagatatctgtatcacacataatcaaaaaagagcttgcatccagaaaatataaagaatccttagagatcaataaaaaagtaaaacagcaggtgcagtggctcaagcctataattccagcactttgggaggccaaggcaggtggatcacttaaggtcaagagttca

SEQ ID NO: 204489 - DNA, 1000 bp, Homo Sapiens
aaaaaaaaaaaaagaagaagaagaagaagaagaaagaaaaaatgattcactaaagtattataaaactcatttattcaacattctttcaattttccctccagcccttgctctaaaacataatgaccaagttttaatctatcaaattgtaaggtttattaaaaaggtgaacacagttcttcagaataaaatataaaaaccaagaagtttttaaatttcaagtatgggggaagaaagctggcaaatatgatttgcataatagattaaagcactagcagtatgaagatagcatttgaagtctggtatcttctctgtagtattatagctttcatgactcacttctcatctcaagccataccttatattttgaaatattcaagtcactaaaaatagataaaataaattattacaatgtgtttctgacacggacatcctggcaagtaattattaaaaataaaactatcctggctgggcacagtggctcacgcctgtaatcccagcactttgagaggccaaggcagacggatcacctgaggtcaggagttcgagaccagcctggccaacatggtgaaaccccatctctactaaaaatacaagaaatagttgggcgtggtggcgggcgcctgtaatcccagctactcaggaggctgaggcaggagaatagcttgaacccaggaggcggaggttacagtgagccgagatcgtgccattgcactccagcctgagcgacagagcaagactctctcaaacaaacaaacaaacaaaaactacccctaattaatgttccaataaacaggaaaaatctctcagcttcactattcgagtaagggcaaattgcaacaaaaatgaagagtttgtctatatcatttgcaaaaaagcaaaggattgacaatatgtagtattgatcatagaggagataacaacaggacaactggtactttgagggcaacttggtttcatttaccaaagttgttaatatacttgccctataatccagcatttt

SEQ ID NO: 204490 - DNA, 1000 bp, Homo Sapiens
tagaaaacacttttctgagtcagggtgggagccagagtgactcaggcagtgagactgtaatccctcgcgcatggctgctgataaacaaggcaagatccaccctctacatggatttgtttcttgagcaatatgtgcaaaaccaaaacaaagcaggatggttttcattcttcgttttcctttctggaacaactgcacgagatgtttcctttggaacggagcctgcctgtgttgcagcgctttgagcagagtttcttcccccggggtgcacagcagaatcacctggagagctttggctccaggtctgcaatgcccagacccacctgtggcccacagaatcaacctccaggggtggcccaagaaactccgtttttaacactctctccagatggttctgatatattctttggttaagaattagagccttttttttttttttttttttttttagacggagtctcactctgttgctcaggctggagtgcagtggcgcgatctaggctcactgcaacctctgcctcctgggttcaagtgattctcctgcctcagcctcctgagtagctgggactataggtgcctgctaccacacccggctaattttttgtgttttttagtagagacagggtttcaccatattggccaggctggtctcaaactcctgacctcgtgatccgcccgagcctcaaagaagctgatgaccacatggaaccccttgcggggaaaatgcacagatacaaaagcttagctgcactttcagtcctctatacacctctcctgggtttgtgaagtctaagccacaaacctttcctttagagtcatgcctctccagttccattacggtggattggtctgtcagatcctgttcttgagatgccatctgaaagcaggaactggggcctcagagagcctctcctctctcctgccaccaggctggtttatctaggcagctgtgccaagaggcagtgtcgggtggtggggtctctttgttaaggttctttgaact

SEQ ID NO: 204491 - DNA, 1000 bp, Homo Sapiens
ctgagttgcagcgtcagcatgaagcccagtgaatgtgactgccaggcccttagaagcaaggcaggggcgtgggggaagggtgtggtctggcatgagcctgtttgggttctacaccacccatcttcgtgacttccggcaagtcactttacctcactgagtctcagtttcctcatctgtcaaatggggtgagaactgaatgagattatatctatccgttgaccctccggattcacatttgatagctgatgtcactgtggtccttatcaagtaacgccaggagtttgagggatttctgtcattaaccccccagctggcctgcctgaactctggcttgcctggaaatcgcctctcagtggcaggaactattactttgatgtgctcaaatagaagagcaggcaccctggggccatgaggcacagccagcctgggtgaaggaaggcccggccctggacagtgccctgaactcctcattctattttaattgtcccaaagagaagccattcagtggacgtaggtggacgttgtaaagggaagaactagaagctgcctgggccgtgctgttccttacactccacagcttctgatttgttttccttgtccccttttcctctcagaatgatgccaaggtcttggagcagcccgtggtggtgcagagcgtgggcacggatggacgtgtcttccatttcctagtgtttcaactgaataccacagacctggactgtaacgagggtgtcaagaatttggcctgggtggactcagaccagctcctctatcagcatttttggtgtctcccagtgatcaaaaagagagtggttgtggtaagttgagccatctcctgcctgacccaggagggccatgcctcctcctacctggtgtgagcctcaggtgggattgctggggtgctctgtgaggagagccctggccctggggacttcccacccgggatctctgcctggaggactccttcagtcccgcccctacctaaggccctgcccagtgc

SEQ ID NO: 204492 - DNA, 1000 bp, Homo Sapiens
gtcatccaagtttcaataacaattatcattacttccttactttgaaagctacaaccatatttccaagtattaaaacaacaaaatacaaataatcctaagaaatccacaataaagatttatctattaaggccgggcgcggtggctcacgcctgtaatcccagcactttaggaggccgaggtgggtggatcgcgaggtcaggagatctagaccatcctggctaacacggtgaaaccctgtctctactaaaaacacacacacaaaaaaacaaaaaaaatcagccgggtgtggtggcacgcccctgtagtcccagctactctactgtttagaatcgttttcaatgtccaaaaatgtgactgctttagagatgccaaataagactaatttaaataacctaagattgctccaattaccgctggtttttcaggtggtacaatgtataaaccaaagaaaagaagctggtgcataaaactcagctggctgaagaagttaaaaataaaactccacaatgatatgtggtttggggaaaaacatcagagttccatttagacatgttaagtgttaggtgcttactggacatgtgagtggagctatatcttctgagtggagatacaaggaaggcagctaagtaggtctggactaaagataacattttaaactctttaggtaatttttttttttttttttggaaacaaggtctcacatccatcacccaggctggagagcagtagcacgatctcagctcactgcagcctcgacttcccaagctcaggcaatcctcccacctcagactcccaagtagctgggactacagatgcacatcaccatgcctggctaatttattgtatttttagtagagacggggttttgccatgttgcccaggatggtcttgaactcctgggatcaagcaatccgctcgtcttggcctctcacggtgctaggattacaggtgtaagccactgtgtctagcctgcatttaggtaatttttaaagccatgcat

SEQ ID NO: 204493 - DNA, 1000 bp, Homo Sapiens
gattggtccttagggtcagctgtttgccttgggggtctgtgcttctgcagttgggtctatactgagctcctctgcctcctaccatccatagcctactgcatttcagatcaatagtatctaagcccacctcatccctctctacccatgaagcacagccatcttccactctgcccagcctgacaacactggagatcctccagagttctctcctccaggggtaatcgagactagccaccaccaacctgcttcctccctaagagtaacctgccaaagggaagccaatggctggggtttctggagagtaggcagacccctgagcctgaccaagccaaactgaaacgtagatgaataatggaatgtgaatgacaccctgttgtttaacaacaatcatctagcctttctcacttctgtctcccatctttgccctgcgctcaccttctattgtctactgtgatggcagaaattgcctccagactctagccattgagaagtattcctgctccagggccatgctaacctcagagcagagtagaagcatcctctgggactctagtggtcccacctggcccctccacagaaatgtatcttacctttggatgtttggcttcagttgttttctggtgtccagaaggatgactatttgtccagagagagagacatttgtcacagtgccctgacttgaagctgagcatggggaagttgttctggatactctgatgaactcctatcctttatcccttagtattttatgcaagtgtgaaggggttccagggagataaaagtcatggaccaggagggttttagctagtatgatagacttcaaaatgtttttaagacaccatggtgtacaaatgaccggcccaaagaggccagctgacatcctagagagagcctggtgaagttcgcctgagctatcccattcacacctgcttttccctggatttgtgtttaattcttggctttcatcctcgatttgcactttggcattggtcctgaattc

SEQ ID NO: 204494 - DNA, 1000 bp, Homo Sapiens
tttccatagccactgaagacctagcaggagaaactgggcttaatattccaccagagagaatggaactagacataaattccagataggctaattggatgctataggttactaagagtgacattttctagaatcttcattagatatctcatggctttagcaagttctacatgaaggcaggagaatggaccttccaccatgggccttcccaactatatgcttttgagatttgctaatataataaaagatattataataagagcagtgaatgtttaagatggcccagtttaatcctcttttctcagtagttatacttctaaggatatcactcataagatgaaagtgctaggtctaaacatagtcaccctgttacttagtatattgccataagatgatgtattttggaaagccgttataggtgtattacaatgttcaaaacctctcatatcagttaccttcttcaaacttcctatgatggaggtaaggcagggattattcccattttacagaggaaggcagaagttcagagaggttaaatgacttccacaaatttgctccactacttaataacaaagcaaggcagacctagaatttggatcccccaactcctagtccagtggtagttgaagactatactgcttacataaaatgagagtagcttgttttgtaaacaggtttcagccaatggaatatgcaaaaatggaatttttacagaagcaagtagaacccaggtgcctcagtggttacaacagtagtcatacctttatcctgacaagtttttcctcctgagggcctaatttgctaataggaagtaactagcttttgtaaaaaagaaaaatatggaatattaaaatagaacacaggagtggtgcacctatcatccctccccttagattcattcatgatccagaatgtaaaagatatttgggccgtcttactcatttaatgaacaccttccttttctgctcagaatcaatatgtattcgcccaagatgctaagttt

SEQ ID NO: 204495 - DNA, 1000 bp, Homo Sapiens
gatttaatcgaaagctatctgactccaaagttcccaaccacaggagctatttagacggtgattcactccactcacacaggccctcaggtatacctgggggacggtgcctgttgtcaccacaattggtaattatcctatctcctgctatagacgtttaatttccttggactagagcaaatccttctacccaccagatgttattgctacacactctcaaagggaaagagaacagctagactcattgagaaaaaaaaagaccagcaggtccttacaaaatcacatgtttataaggaaacgacttttgaaaaaggtgtgaactcagataagcaaatttaaagtaaccaattaagatggagaaatcttcaaagaaccttctacagttgatatacaggccttgaaaaagaatcctgaaatcaaaagtatcacccaggaacactgaggaacaccagttttgaccaagctacccccttagtggttcctaatcgcccacagaattgagtccaaattccccagcatggagtggaaggcccatctcaaagtggctcaaatctgcccatccaaccgcacacacatcatgcaccgacctgaggtgcctggactctatcttctttagttttattttttgtatatttgctgttttaaatatttagtagttattaatgataacatgaatttccacaagctttagtgactctggttggaaatctcttcctaaactgtgtatgatgagcaaagccgcgcacgttaagatccaaatgaatgccggccacctctgtgtgctataggattctgtgagtcctggtcttcactgatgagagtcacctgctgcaacctttgctaagcacctcctctgtgctgtgcattgtactcaacttatctcattttaattttataaaatcatgtctccagaacatactattatccttaatttataaatctgaaattgagacttaggagaaaaaaagtttaattttcccatagttatatcataagtgaattc

SEQ ID NO: 204496 - DNA, 1000 bp, Homo Sapiens
ataaaagactgaggccccacagcctattttaaattaactgtgtaggaaggccatgttatactgctagcaatccaaaatttcgtgctcactatcttagcataaactgggaacttacatattgaaattctagtaggatttggtgtcatgtaaatggcacagattttttttctagctccagttctcctttgtccagagttcttaacctttcaggttctgatgaaagttaagaaccctttcctcagaaaaatacacattgtcagaattgtgagctcaactttggggggatcctccaaagccattacactttttttccctactgcacagtggacccattaaatctcctagtctaaagaaattacttgtttaaagtaatgcttaaataagttattcaaatgactgataatttaagaaaaatgagactcaaatcattaaagcatatcttttacaaatattatcattaaaagtttatataactctgccttgccctgatttgaggcggggggagaaggaggaaggaaatgaaatatgctagtttaaatcattaaaatgcattcaggatacattattcagcattatacaacacccattgtccatggaattttgatggtggatggagaaaccatagtgaattagtccacgataaacttgatgtgtttgctttgtgctcccctcaactatatacacattgtctgcatttcttctatctttaagtgaatttggctagtttttattttgcctttgtggtcattgggtctaattgtttggcaaagaacacttttttcttgtatttggaaatagaaagaatatataaatggaatttatgatctatttttatcagactccagaaatgtaaaaactataccagggagtgaacaatttcatttgcctaatttagtaattgaattcttgaaaaataactgtagtgttttgatgtttttaatttatgtgtacgagtctcagaaaatttaaaactagttttaccatagttttctgcataact

SEQ ID NO: 204497 - DNA, 1000 bp, Homo Sapiens
gatacaagaaaagacacaactcaaactaccttaaccaaagacaaattttaatgattcaggtgaacaaacaatttaagtgtattaccagtttcagatggagttagatccaggtgctggaacaatgttgtcagaaatctctctctcccattctctctgctctgctgtctccttcattggcatcaattttagggatgttcttcccacaagaaaatgagatggccactaacaacactgagcttgtaacctactagattagcggctccagcagaaggaggtcatccaggaaaatgttctgttggcttagcttgggggatgtttgcatcactgtgactagagaaaggggctgaggtcagcaccacctacaccacataaacagagagtgtgggcagagatagtccccaaaactaaattcagagtgctctaagcagaagagggaatgaatgttatcagacaacaatgagaaatatccactataccgcttcataggaagaaacattgaatacattggagaagacttggcagggacatgattggcagatctaaaatgtgggtgtgcaattggatgatctgggaagagcacagcagaactgggatcagtgggtgggccaggtctgcccactccaaagaccatgttggttcctctacaccttgccaagctacacaactagacagcaaaaacaataaccagacagacctcaggttgaagcccaaccctgcctctcagtcactcagcccacttatttaactttcttggatgtcagcttctccataagtcaaaggatcattggaaggaaaaagataagcccgagctgaggttacagccagctcagtgcaaagcactgggattcattgctcagtaagtgttggtccccctacctgttttcttcacttctagcatgttttacaattttgttttgggatcgtcttctaggatggaagagtctaatttcataaaacatgcaataaataattcctaacactttctaaagcttttgaatca

SEQ ID NO: 204498 - DNA, 1000 bp, Homo Sapiens
gcactcctgccctctgacttcagccgctacttccaatatgaggggtctctgactacaccgccctgtgcccagggtgtcatctggactgtgtttaaccagacagtgatgctgagtgctaagcaggtgggcctggggtgtgtgtggacacagtgggtgcgggggaaagaggatgtaagatgagatgagaaacaggagaagaaagaaatcaaggctgggctctgtggcttacgcctataatcccaccacgttgggaggctgaggtgggagaatggtttgagcccaggagttcaagacaaggcggggcaacatagtgtgaccccatctctaccaaaaaaaccccaacaaaaccaaaaatagccgggcatggtggtatgcgcctagtcccagctactcaaggaggctgaggtgggaagatcgcttgattccaggagtttgagactgcagtgagctatgatcccaccactgcctaccatctttaggatacatttatttatttataaaagaaatcaagaggctggatggggaatacaggagctggagggtggagccctgaggtgctggttgtgagctggcctgggacccttgtttcctgtcatgccatgaacccacccacactgtccactgacctccctagctccacaccctctctgacaccctgtggggacctggtgactctcggctacagctgaacttccgagcgacgcagcctttgaatgggcgagtgattgaggcctccttccctgctggagtggacagcagtcctcgggctgctgagccaggtacagctttgtctggtttccccccagccagtagtcccttatcctcccatgtgtgtgccagtgtctgtcattggtggtcacagcccgcctctcacatctcctttttctctccagtccagctgaattcctgcctggctgctggtgagtctgcccctcctcttggtcctgatgccaggagactcctcagcaccattcagccccagggctgctcaggaccgcct

SEQ ID NO: 204499 - DNA, 1000 bp, Homo Sapiens
ttggtgaatctgacagtatgtgtcttggagttgctcttctcgaggagtatctttgtggcattctctgtatttcctgaatttgaatgttggcctgccttgctaggttgtggaagttctcctggataatatcttgcagagtgttttccaccttggttccattctcccagtcactttctggtacaccaatcagacgtagatttggtcttttcacataatcccatatttcgtggaggttttgttcatttctttttactcttttttctctaaacttctcttctcacttcatttcattcatttgatcttcaatcagttataccctttcttccacttgatcaaattggctactgaagcttgtgcatctgtcatgtagttcttgtgccatggttttcagctccatcaggtcatttaatgacttctctacactgtttattctagttagccattcgtctaatcttttttcaaggtttttagcttctttgcaatgggttcgaacatcctccaatagctcagagaagtttgttattactgatcatctgatgccttcttctatcaactcatcaaagtcattctccatccagctttgttccgttgctgtagaggagcttcattcctttggaggagaagaggcgctctgatttttagaattttcagcttttctgctctggtttctcccctcgtttgtggttttatctacctttggtctttgatgatggtgatgtacagatggggttttggtgtggatgtcctttctgtttgttagttttccttctaacagtcaggaccctcaactgcaggtctgttggagtttgctggaagtccactccagacactgtttgcctgggtatcaccagcggaggctgcagaacagcaaatattgcagaacagcaaatgttgctgtgtgatccttcttctggcagcttcatctcagaggtgcactgccctgcgaggtgtcagttgacccctactgggaggtgtctcccagttaggctcctcaggcatc

SEQ ID NO: 204500 - DNA, 1000 bp, Homo Sapiens
gagcatgttatttggtttccatatatttgtataatttccaaagttcctcttggtattgatttctagttttgttccattgcagtctaagaagatactcgatatgattttggtttttaagaatttgttgagatttgttttgtggcctaacttgtagtctatcctggagaatgttccatgtgctgataagaaaagtgtgttctgcagttgttggataaaatgttctttaaatatctgttaggtccatttggtctaaagtccaacattaaatctaatgtttctttgttgattttctgtctagctgatctctttaatgctgaaagtgaggtattgaagtcccccactattattgtatggagtctacatctctctttatatctgataatatctgctttattaatctgggtgagtccatatgtatttaatctcattatatcctcttgctggactgatccctttatcattatttaataaccttcttttttgcccctgtttttgacttaaagtctgtcttatctgatataagtatagatattcctgcttgattttggtttccatttgtgtggaatatctattttccatccctttcaatcagtatgtgtttttatgggtaaagtgtgtttctagtaggcagcatatagttggataatgattttttatcctttcagccagtctatgtatttttagtgataaatttaatctgtttatgttcaaagttattattgatatgtgaggttttgtcattttattattgttaattgttttctggttgttgtgtatattctttgttcttttccatttctcttattgtttgtccttgtggtttagtagttttctgtagtggtaccatttgaatcacttctcttcttcattaatgtgtttgctttaacagtgagttttatacttttgtgtgctttcatgatggtaacaattatccttttgcttccaggttcaggagtcccttgagcatttcttgtaggaccagtctggtggtgatgaattc

SEQ ID NO: 204501 - DNA, 1000 bp, Homo Sapiens
aaagccatgggagcaggtctggtggcagagttcactgaggtgggcccaatactggggttgatggtgaagctgggtgctcgcttcagtctcctttccttatgtaaaggttatctttctttgtactctgctgtgtgggcttgggggaggagtggctgaggtaatgtaaaactgtccttcctactctctttaatgcatattttcttatttctgtgcttcagccaggtgctgtaatttgtcacctggattccttaactcttgtgaacgtatttttaagcatggatgtttgttcaaattaatgcttctgtgaggagataagccctggatactcctgtgctaccatcttggtgacatcactctccaaatgtaaattattttaattagttacattatttatagcaataaaatttaaattttttcctcagggcacaatgctgataaagaaattgaaaaatatcagactatataaactaaatgaggggtgcttaatccccttcaaggaggtagtagagaatttagtactagtttatctctccagatagtgattcaattttttttcaattacagttattctagatataagaaaagggacaggtttggaagattacattattatttggagacattgatcttagtcactattactgataaaattcagcctagtttatgtctatagacacataataagactgcatgaaagctattaggatctaagttttctacattggataacctctccctttcacccttaccctagcctaagttttcccatatcattatcaaatcctcaccatttgtagaactgtctaccccctctcactagccatctactgcaaacacacgctaatacacagacacacacacacacacacacactcaaaggtagggggaaagaatggtggctgaaaatatagcaatgacagggcttctttgtgaatgggctcagggaaaagatgtactgtacatgccaaataatttcactaagttcttgatggatgggaag

SEQ ID NO: 204502 - DNA, 1000 bp, Homo Sapiens
gttagaaaatctggagaaaactaaaagctatacaagaaagtcatagttaaaacataaggacaactaaaatgtagcatgattttacgcagttgatgtctaagaaaagactgggcagctgataaaatggtagcgtcactgaatgagtcaagacattttaacataaccgcaaaatagatgttgtaatattgatgggaatattttgtcatagttgttttgatatatacatatttcaaaatagttaaaatgtaaaatcactgctctcttgtttattaccaaaaaatgtgctgaaaaggtaccactaacctttaccccatcccaaatgcccattaagtataagggactctccctatctactctattcatttctgtattgttttaatattttacaagttatgtgttaacttttatgatttttttgtgattataaaatgtgtcaatttgttagaattaatttagcttctaactataatctattgtataaatccatcatacattaccatccttataaaattattaatgtaagtatgatgagtatggaaagctattcaaaatttaattgtgaatttcttgttctatctgaaatgtagaataagacatcttattattgccctgtcttctactcctccaagtgacttctgtaatacccagccacttaatgtttgacattcaggaagctttcataaagcagaggtgtccttttagatatttagatggaaaataaagaatatcattaatcttagttgaaagcaaatggctttttttttttttcttgagacagagtctcacgttattgcccaggctggagtgcagtgttgcaacttctgcctcctgggttcaaggtattctcatgcctcagcctcccaagtagctgggattacaggggtgcaccaccatgcctggctaatttttgtatttttagtagagatggagtttcaccatgttggccaggctggtatggaactcctgacctcaagtgatctgatcacctcggcctcccaaa

SEQ ID NO: 204503 - DNA, 1000 bp, Homo Sapiens
tcatgttttatacttcctctgccccgccacatctttatttatttatttatttattatttatttatttttgagatggagtcttgctctgtcacccaggctggagtgcagtggcacgatctctgctcactgcaacctctgcctcccgggttcaagcgattctcttgcctcagcctcccgagcagctgggattacaggtgcgtgccacagtgcccaggtaatttttgtatttttagtagagacggagttttgccctattgaccaggctggtcttgaactcctgacctcaagtgatctgcccacattggcctcctaaagtgctgggattacaggcatgagccaccatgcctggtcccacatatgtattcataggcaacatacagttttgttttgaaattttacataaataggatcatgtatgtatccttttgtaactttttttctcaacattgcttttcagatgtgtctacaggtagatctagttcattcagtcacctaaattttaaacctgttttctccattgccctccccacttgtcctgtttttttgtttgtttgttttttgttttctttttttaagacagggtcttgctccgtcacccaggctggagtgcagtggtgccatctttgctcactgcaatatctacctccagcgttcaagtgattgtcctgcctcagcctcccaagtagctgggactacaggtgcgcgctaccacacccggctaatttttgtattttttagtagagacagggtttcctaatgttagccaggctggtctcgaactcctgaccccaagtgatctgcctgcctcagtctcccaaagtgttggattacaggcgtgagccaccatgcccagctcccacttgccctgttttgttttgttttgtttttaaacttacccattcttaaagtcccagtgtaaactatctcttccacaaaaacgttcctgattttcttttttctccagcaggatataatctttcccacaactggcttagaattc

SEQ ID NO: 204504 - DNA, 1000 bp, Homo Sapiens
ccatgctcaaggggaggctactacatagggtgtgaatagtaggcagtgggaccattggagccttcttagaggctgcctaccactctgggtgaaagggtatacatcatccattttattatttaatagatattatgaaatattcctattgtggctattctaatgtatactttcctaaaaagtaagaatttaagctttactagtgtttaaaataggaatcaatattggtggtttgtgtgttagaagcttacttagagcattcaggattgagaagaaatagtgggagttccaggtttgttttgatagattaccactttctgttcctggttgggagtatttgtattttgtagatgtaactaaactgatgctcatcaaatggacaagttatctgaagacatctgcaaagaaatacgtggattaaaataagaggaataatgtaagtgtataataagaaagtgggagaaatgatacttctactcttgatataagctcttagtcaactgtgtatgagggaaagataattttgatctctaatatctgacagaaagccatccaaagcattaaaattgcagagactatttctttctttctttcttttttttttttttgagacagtcttgctctgtcacccaggctggagtgtggtagcgcgatctcagctcactgcaacctctacctcccgggttcaagtgattctcgtgcttcagcctccctagcagctgggactacaggcatgcaccaccacgcctggctaattttttgtatttttagtagagatggggtttcgccatgttgtccaggctggtcttgaactcccgagctcaggcaatctgctcgcctcagcctctcaaagtgctgggattacaggtatgagccaccgtgcctggccaactatttctttataatttaatttaatttttttaaaacagagtcctgttctgtcacccaggctggagtgcagtggcacaataataggttattgcagcctcaaattcctgaattc

SEQ ID NO: 204505 - DNA, 1000 bp, Homo Sapiens
aggagatatacctaatgctaaatgatgagttaattggtgcagcacaccagcatggcacatgtatacatatgtaactaacctgcacattgtgcacatgtaccctaaaacttaaagtataataataataaaaaaaagaaaaatacataatcaaattaaatagtattaaaaatcaatgaaaacgaagatataattaccaataatatcttagattctaatggctattattttcaaattgtaccacattttcctaaatatcttcccatgaatgcctaattaggattatttttgcttacaaattattttaaaattatttttcttcggaaaaaaaacacagtaaatgaggacttttcttcttttaaagtattggttatgaaatgaagagaaaggttgagcagttggtgaaatcccatttattcttttaaaacctgtctcctgttcccaacacacatatacacacacacgagaagaaaaagaattgctgtctttaacatgttctcttggctgttcatgcataccacatggtactgtcatgctgtttcataatgagctgtctgtctctacagctacactgctgggcctagtgagtaaagaggctctgtgtctttttcttttctttttttttttttgagacagagtttcacttttattgcccaggctggagtacaatggcatgatcttggctcaccgcaacctccacctactgagttcaagcgattctcctgcctcagcctcccgagcggctgggattacaggcgtgcgtcaccatgctcagctaattttgtatttttagtagagatgggttttctccatgttgatcaggctggtctggaactcccgacctcaggtgatctgcctgcctcagcctcccaaagtgctgggattacaggagtgagccaccgcacctggccctgtttctttcctcaaatgctaagcctagcagaatgcctcctatacagcagatgtcagtcaatgtttgttgactgtttgaaaatgtatgatc

SEQ ID NO: 204506 - DNA, 1000 bp, Homo Sapiens
ataataaaatggcttaaaatcaatgacatataaataggttttgatatctaacagggaaaactctttcatcatgatgattgtttttttaagccactaaattttgggagtgatttgctatgcaacaaaagccaagggatgaaatcgttgacaaagtaactggaaaatgcctgtctgtaaaattaattatacaaattcctcattaaataaaaagttggacgtctatctgtacaacatcaattggtgactgtacattttttgtgcttatggtaaaagtagagataacttctgagtcattctctttagtttaatgtcaacttgttctttctgaaaataactacctagcttgggaaagctgaaagtcacccagacttaggccagacaggaaagacaggtgagctcagacaaaccaccactcacatttgtggctgagaactcaggctgatatttatggattcagtcatttaaaaatatgtgcttttagtgatgagtaatacacctttccagaattaaaaggttctccctgttgtcacttccattccagtccctgtcctctcttacagaggaataaaatgtcatttgaataacctagcacttacatttttaaacagaatatcattttgctatggatagaatttgaagctgggtgatggcacattgggattcattgttcaattctctctagtctgtggaatgtctgaaaattttcataataaaacatttatttaaaaggctgccaggccaggtaccatggctcacgcctgtaatcccagcactttgggaggccaaggcagttgaatcacctgaggtcgggagtttgataccaacccgaccaacatggagaaaccccatctctactaaaaaaatgccaaattagcagggcgtggtggcgcatgcctgttatcccagctactcaggaggttgaggtgggagaatccctggaacctgggaggcagaggttgcggtgagccgagatcacgccattgcactccagtctgggcag

SEQ ID NO: 204507 - DNA, 1000 bp, Homo Sapiens
gttgctgtcccatgcctccgcctccaactgcagcaaagtcacttgccttttagccaggccctggcattccccagactagtggtgagagcctggaatcaactaattggcttcagatcccagctctgcagcttattaggtgtgtgggcttaggtaagttgcttcatctctttgggccttagtgccctcttctgtaacaagtaatagccacaggtcttggatgtgtatattggagataaaaatggtatactccattataccaggcagggcttggagaagtgatgcccagagacccagctgtcctgcatcagggttcgaccttctgactcgcaggtagagttgctacctgggtctggactgtgatttttgtcagggcacccctgaactattttcattcctgcatggacacagactgtgccttactgcttgacctctttctccaattgccacagctacactccacaggcttgggctttgcagggccagaaggcctgtgatgccttctgctttcacatgtgcattcaggagagacataccaggaagcccccttggccccaaatctaatccatgttcttcaatttagctctattaataagactgatttttttttttttttttttttttttagacgaagtctcgctctgtcacccaggccggagtgcagtggcgtgatctctgctcactgcaagctccgcctcccggggtcacgccattctcctgcctcagcctcctgagtagctgggaatacagtcgcctgccaccatgcctggctaattttttttttgtatttttagtagagatggggtttcactgtgttagccaggatggtctctcgatctcctgacctcgtgatccacccgcctcggcctcccaaagtgctgggattacagggacccaccgtgcccagccaagactgattgattttaaaaaacgtactctgcctcaatttagtcttttttttttttttttttttttttaaatcatgtttctcctctcagaattc

SEQ ID NO: 204508 - DNA, 1000 bp, Homo Sapiens
ttggacaactgtactttggactggggacctggtctgagatatctttctctatagtaatctttcattcaatcatttactcatttgacaaatacttgctaagcaccccttgtatgccagacactagcctagacgctgagggcagaaacgagtaagtcaagtttctgccttaaaagtttctgcctttgagagaaatagagtcataaataaatacaacagaacagatgatgtgcacagatagagatataaatagtaatttttgtctgggcatgcattttcactgtaaactctataatagaggacatatattatgggtttcttgttcctggcactggtcagagatcatagcagtctaggcaaggaacttgtttaaaactgagcttggtaagcagattcagggtgatatcctacagctcttggtcttacttcatttccataagcattttaaaagtgtgggtctctgcttattgcgaaggtatgtattccataggatcccttttctgttttgacagtttctgtcttagtccagaaaatgtgattagactgatgagtttacagcctactgtgggaatgcagggccttatcataggtaaaataggcagtaattgggtacaatagcagagttttgctccctctctaagtacatgtctgtttctaccctcataccgctaccatgtcagaaaattctgttgtagaggtttcattccattagcttaaattttcatttttgctttgttgtaattcacctcctagtgtgattgaacaacagattctttctttagaacaaattatagaaatgagattaagaagaatataggaaggaagaaggggttatgttcaatggggagcctgcaaaagtacatcaactggacttcataagggaggcaggagattatactgaagaagctatatgacctagctagctgccgatggctagggaagatcttcgggattggattttgaaggcgtttgatcaagggagtcaatatgtatgtatgaattc

SEQ ID NO: 204509 - DNA, 1000 bp, Homo Sapiens
atttcttaatggttcctcttcctgtttaaaagtttttaatgttaatgtagttatttactcaatcttttcctttatggtctgtatcttttaaattctttcccatatctgagttttaaaaatatttgctgtattttctcatatgattgttaaaatcttgctttccatatttaggaatgtaatctactttgttttttttttatatagtgagagatgaataccaattttgttttatcccattgtcccagcaccatttattgaataaattgtttcctttgtttatagtgacacctatatggtgtatcaagtttatgcatgcaggtcgttgggctacgtgattgactgttcatgtacttagatcacactgtcttaaaaattagagctttatactaattattgatatctgcctggcaagtctttctagcatgttcttctcaaatttaacatttactttgataaatagttacatagcaacaattcatgtaatcatcacatactcaaaatacaagatattaccagcatagtgaaacccatgctctcaggatgttgcacccttgcagtaaccttctccttctcccaacagttgggccttatcctgacttttgtggcagtacttccttgattttctttgtagttttgtcactgataacttctcctaatctatattgtctagttttccttttttttttttttttttgagctttatattcatggatgcatccaggagatataattttgtatacatcaggcttccttaataaaacattataaagctgtggttcatttttttgttttttagttgatgtgggatattttattttgtgactataccagagtttattcactctgctctaagtgagcattttggctattgttaaccagtgtttctcttaatatgcatgttttgggttaatttcaggtaatacatgtaggagtagaattgtttttccctatggtatgtttatcttccactttaacatggaatggcagactcttttttctt

SEQ ID NO: 204510 - DNA, 1000 bp, Homo Sapiens
ttagacagaaaaagagaaattaacctgaactcttaatagctagatttggtctactctcacggaggaaaccatgattgcttctgaaaatgtgttgttgcagatctgaggggtccaataaatagccttccctttattcctggtggtggttcttagtgtgctttctcggccctggggacccctttcttcctgggttcatcctcagggcccgcaggagcagccctggtcctctgctttgttctcttctctcgcatgtagtcattttgatcaatcacatcctgtctgtgagtacagcagacccatcagataggaaagacctgattttctctctcaagtttatgttacaggtcagatttgattaccacttccctctaagaccccctattttaggtggcaggagagaagttggtggagaaataagagtggagtcatctttagtgatacgtagtgcctcagatttcccaagcactcaagagtgagtgcataaaaacccaacaccagagggttgttcatatatcatatccatataaaaacatgtcaatttgttgaatttctctaatatagtaattaaaataatattgatactgtttctgaagattgccatataaaaagaatgaattatagtttttaaaaaaacataaaaatatttaaagttcaacaacagttttgttgttgttgttgttgagacaaagtctcgctctgtcgcccaggctggagtacagtggcgtgactcagtgcctcccaggctcaaatgatcctccctcctcagcctctagagtagctgggaccacaggcatgtttcactgcacccggataatttttgtatttttttgtagaggtggggtttcaccgtctctacaaaagcctgttacccaggctggtctccaactcctgggctcaagtgatccacccaacttggccttccaaagtactgagattccaggcctgagccaccgtgcctggcaacagttttctttcctttttttttttttggaaactttct

SEQ ID NO: 204511 - DNA, 1000 bp, Homo Sapiens
aatatacaaaaatcagccaggcatgttggcacatactataatcccagctactcaggaggctgaggcaagagaatcacttgaacctgggaggcgggggttacagtgagtcaagatcgcgcactgcactccagcctgggcaacaagagcaaaactccatctcaaaaaaaaaaaaaaaaaaaagaagagcaacccagaggttatatagatgcctgttaatctataaaaaatgtgatattttcccccatttcagaatttttccagcatttaaatctatagcacaaaatgtaaaccctgcttattgattccaaacatagcctaaatggctcttctgtcttctctactcctcctctcactgccttagatcagggccccgctcttgaatgaactactgtagtaactttttccctgttctcacatctctctcacatccaaacatttcagagtaatctttctaaaaggcaaatctgtccatggcactctcttggtaaaatcagctagtagaattgtttcagttaacaagcatgctaaaaattagtaagcaaaggatgaggagaaataggatatttacatagtatcttcacaagacatttattacagtgcaaaggggacacccatcctcaccgagtaattaaaattatcaccatcagtaatggggacaaatcaacggcaagtgcctcctgatataacgcactaagaaaaatatgacatcgcttctacggtgttcttgccaaaattgcttaaactgaatccaatcatgaggaaaccaaacaaaccaaaattgaggaacattctacaaaataactgaccagaactctttaaaaccatgaaagacaaagcaagacagaggaactgtcagagattagaggatactaagatgacagttcacctcgacatcatgtgtgatcctaaactgaaccctgaaccagaaatttgaattggacattagcaaggcaacaagtgaaatttcagtaagattgagagattatagtattacctctgt

SEQ ID NO: 204512 - DNA, 1000 bp, Homo Sapiens
ttttgcaaatgatacactccttacccaccaaacgagctgtctgcactgcacaatctacttaccagtttacatccgaaccctgcacacggcagctcccgcctcctagccatgccctcctcatcctcagctcctcaggagggcagcagccaagcccacaggcctggaagactctgccccccgccaactgtgtcacgttacaggacactgacacacctcgcggaaccccacatctgaaactgaaaaacagtaccatttcccgtccccagaagtctggaaaggcagttggctgcacaccatggcccctgctcactcccttctttgccctgaaagtgttaaaaaggaaaacataaagtcaacaccagctcctccctgccggtgaaaattggcacgaatgagtttactttctggctgccggccctcacaaaaccgttacccaaaaaaagttcaccatgctaaactgctccaaatataaatgtgagacgcgccggcccacccccaccccaccccacgttacaggaatggcctgaccaggatgagcccagagacggctaaatgcacatcaaacatttcagatttgggaacttcagtggttttggggaaaagacctggcaaagcccgatctgaaacttatgacagttgagcacatgatctccgccatgaagagcaaataagaggcgtacacaaccctccataagaccgcggtggctgatctgccacaaaccctcctacgagaggaccaggacggcaaggccggagcccggcccggggggaggttgacgattccgcccagccctccccgcgcagcgcccgcgaacaatgggggtgggatcccccgggccgcgccaggaccgctgcacggcctgagccaccagagatcgaacccggggtccaacgacaagtttcgcattgaaatctggccgggcgttccaggccgaacccgccagcgaggaggtggcgcgcaccgcgctgctgcaccaaggacgccgcggctccagcgcag

SEQ ID NO: 204513 - DNA, 1000 bp, Homo Sapiens
acgtgatacagaatagaaaagcaatacagaaaaatcgacaaaatcaggccgggtgcagtgtgagcctagcactttggggggtcaaggtgggcagaacacttgaacccaggagttaagaagttaagaccagcttgggcaacatggtgaaaccctgtctctactaaaaatacaaaaaagaaaaagtttacccaagcatggtggcacatacacctatagtcccagctatttgggaggctgcagtgggagaatcgcctgagtccaggaagttgagggtgcaatgagccatcatcataccactgtactccagtctgggagaagggagtgaaaccttgccttaaaaaaaaaaaaaaaaaaaaaaaaaaaggaggccgggcgcagtggcctgtaatctcagcactttgggaggccgaggcaggcggatcacgaggtcaggaggtcgagaccatcctggctaacatggtaaaaccccatctctactaaaaattaaaaataaaaaaaattagccaggcgtggtggcggatgcctgtagtcccagctacttgggagactgaggcaggagaatcgcttgaacccaggaggcaggggagcttgcagtgagcagagatcgtgccactgcaatccagcctgggtgacagagcgagactccgtctcaaaaaacaaacaaacaaaaaaaacagaaaaaggaaagggaagagaaaatcaacaaaaccaaaattgatttaatgaaaatatcaaactaatggacaaaccaagaaaacagaagacctgaattactaataccagaaatgaaacagaagataataatggtcaaccttacagaaacaggattataagggagtctcatagacaattagccaacaaactggataaatgaaacaaaatggacaaactcctagaaacacataacctactaaaaatgaatcatgaagaaacagaaaatataaatagacctataactagtaaggagattgaatcagtaatcaaaaacctcccagaattc

SEQ ID NO: 204514 - DNA, 1000 bp, Homo Sapiens
aatgccagtgttaattattttggaaaaacagaatgaactctcccctttgagtttgaccaattttatttatttaaacatgtaaattttgtgaactttgctgctttgttcatattgcataggttttgatggaaagttgaagagttatctcgttttttattcaagcctaaatgtaatttcagttttgatttgtcttttttttttttaacccaaatctattaagggtattttaaaaatctaaatgaatcagttttgtaaatcactgttaggctttctttttgtttctaattttcttggctttttggaattagaatttttattatctctggatactttgtcgatatttttgggatatttgaaaataatgtatttcctgttgggtacaaagatctctgtcagtagataagcttttaaattatttaatgaataattatgtagtatgtcttttgtatctttatttgatttagcattttctggcagatgggattattttatagcatagttcatttcatttctcatttttaaaagcactttttgctttgtgtgttacatatgtttgcttaaagatttcggacttttggccaggtgcggtggctcacccctgtaatcccagcgctttgggagggcaaggtgggcggatcacctgaggtcaggagttagagaccagcctggccaacatggtgaaaccccgtctctactaaaaatacaaaaattagctgggcgtggtggcatgtgcctgtaatcccagctacctgggaggctgaggcaggagaatcacttgagccctggaggcagaagatgcagtgagcctgggtcatgccactgcactccagcctgggcaacaagagtgagactccatctccaaaaaaaaaaaaagacttgtaactttttttgtgaatcgtaatctaagactttgcacattgggaaatgtcttcattttgttttcatgtctgaataaattatcttttggctatattaaaaaatcatttatcctttaattttt

SEQ ID NO: 204515 - DNA, 1000 bp, Homo Sapiens
ctgcttcctttggaaaagctcatcagaaactcaaaagaatgcaaccatttttctgttaatctacctgtgacctgcaagccccctccccacttcgaattgtcccacctttccagaccaaaccaatgtacatcttacatatattgactgatgtctcatgtctccctgaagtgtataaaaccaagctgtgccctgatccccttgtataataaacatgtcatcaggacctcctgaagctgtgtcacaggcgtgtcctaaccttggcaaaagaaacttcctaaattaagacttgtctcaggtaccctttggtttacagaagtcacaccctagaaaccgtagaatctcatcagatgggttttagttcacctgatctaatgtggctcacttttcaacctgactccaacgtaacatcgcatgacagataaagaaacagataaagaaggaaatccgtcaagcgtgatgactcatgtctgtaatctcagcactttgggaggctgaggcaagaggatcgcttgagcccaggagttcaagaccaacctgggcaacatggtgaaaccctgtctctataaaaaaaaataaaataaatagccaacatggtggtcccagcatgtctgtagtcccagctactcggggaggctgaggtaggaggatggcttgagcctgggaggtggaggctgcagtgagccctaatcacccactgccctccagcctgagtggggaaatctgcatctgtaaagaatctctattaacataactaagtttttacctccttctaggccctcccaatcctgaagagattaactgagagtcttgcacattttaaggatctgagtaggaaacacttgccatctactgtctctaagggcactcacccaggagactttattagaagcttggtctccacaaccccttaccttgacccagacactcctttctactgattccaggtttttcgataatataactctttcaaccaattgccaagcagaaaatctttgaattc

SEQ ID NO: 204516 - DNA, 1000 bp, Homo Sapiens
agcaattaattgtctatacttcagtgaaaagtctggtagcaggatgcaggatgtttggaaggggtggatcactgaagtcagggaggccccaagagaaggcagttgcaacatcccagttgagctataatcagggcttggcttgcagagtgaagagtaagagatggagccaaggtgctaagaaggaagaagcagcaggccctgggaaaaacagcagagcaatgaaaaacagcacagttgcattttgggatctggtgccacattttctgagcctaacacagggtatacgtacatgtgtatttactgaacaattgaggctgaataattgatgaagtcactgcaaatctgagatttacggggatcacagtttatagccaggcagagaacaaacgaattgggaaagaatatgaagagaggagtgtcctctccaatcttcttttagcttatttctttaatgaatctgtatgcccagtgtgtagaaaattaagacctaaaacattgttttaaaacattggttttaaaattccaggactggaatcatctatttgcctaaatgtatcctctatgcatctctgtggttcttgagggtaagaaggcatcatgtttatatacaatgactacattgattaggggagtcttatgtcctatctacgttcatatcctgacaccgtacatctagctgatgtctctgagtgagttcctgagcctgtctatactttagtttcctcctgggtaaaatgaaataataatagcatctacctcacaatgatattgtgaggcttaagtgagctactacatgctaggtgcttagagcagtgcctggcaaatattagatattacctgggagaaaccataatagtagctgtagcagtggtggcatgtcacggtgtgatggtgagggtgatagctcactttacctcagtgaatgtaaacattgtaacccattgttcaataaatgctcctctaaaagatatgctgaaagcataattgtcaaagggaattc

SEQ ID NO: 204517 - DNA, 1000 bp, Homo Sapiens
tgtgtaaaattctctgacttactaacaggtattttttagaccatttttgcctattgctatgctctgtgtctaaaaccccttaatttgtatattgaagccctcatcttcaatgtgatggtaactggagatggaatctttcagaggtaattaaatttacatgaggtcatgagggtgaggcccttataatggaattagtgcccttataagaagagacactagagagcttggtttccctgcctgccttgtgaggacacagggagaaggcagccatccaaaatccagaaagagaaccctcaatggaaactgatcatgctagcaccttgatcttggacctctcaaccttcagaactgtgagagaataaatttctgttgtttaaacaacccagtctatgatattttgttatggaagcccagctaagacactgagagagaataatttttgctctatagtgatgcaaattatttctaaagtagaaaagataaccccaaagatagcagtttattgccctgtaatagttttgtatctaattagcaatcatatttctccatttatttttgctttcactgactatatatatacacacattaaattctcttatcatcatttgaaatagctttgccatctttttcttttcttttttttttttcccctgtaacagggtctcactgttggctaggctggagtgtcagtggcacaatcatggcttactgcagccttgaactcctggggtcaagtgatcctcccactacagctccctgagtagctgaaaccacatgtgtgtgccaccatgcccgactaatttttgtattttttgtacagacagggtctcgccatgttgtccaagctggtctcgtactcctgggctcaagcgatcctcccaccttggcctcttaaagtgcttggattacaggtataagctgccagcccagcctccccatcattttaatgagttaaaataaaactttgatacatgttcactatgtatttgtataggaattc

SEQ ID NO: 204518 - DNA, 1000 bp, Homo Sapiens
gcatgagccactgtgcccggctgttgcagatattttcaaatatcatttatgttcatcactacttaaaaatgatgttatgccaggtgtggcagctcacacctgtaaccccagcactttgggaggccaaggcaggaggattacttgagcccaagagctcaagaccagcctgggcaacacagcaagatgatgcctgtagtcccagcttgcaacttcacacacagaccttcttgctacttgtagaaatgctgtacttctatctcacgtgattcccattaagaaagaaaaaatgtgtcttagctcaggctgctatagcaaaataccatacactaggtggcttaaacaacagaagtttatttcccacagttctaaaggctgaaagttcaagatcagggtggagttttggtcagggctccctagctggcttgtagacaggtaccttcttgcttatatattcacatggaggggagagagagaggaggctgtctgatttttcatatgaggatccaactctcatggcctcatctaaacaaagtcacttcccaaaggccctgtctccaaataccatcacactgggggttagggcttcaacatacgaagcgggggttgggggagagcacaaacatttagcccataaccatgcatttataatcataaatgctgcattctctaatatgttcctgagagggaaagccttctgtttcgactgtgccctgagaaccaaatcctcctattacaattttattttatttttattatgtattattttttgggttttttgtttgttcgtttgtttttgtaggcatctcactctgtcacccagcctgtagggcagtggcacaataatggctcactgcatcctcaaacttgggctcaggcagtcctcccacgtcagcctcctgagtagctaaaactgtaggtgcaggccaccatgcctagctaattttttaatgcttttgtagagacagggtctcactatgttgctcaagctggtcttgaattc

SEQ ID NO: 204519 - DNA, 1000 bp, Homo Sapiens
ctgatggcagtaatatggctatttatattcagagcctgatttaaccagtggcattcctgtaataagataataagcatgagctgtttactagaaaaaaaggagagtctgtggtgctggtgttcaataaaatctcttaacaggcaaatgagtctctgaaattggttggcaaatacatccagaatgagatgtgctaattagctgctgttactgattttctaaaataaagagtttaaacttagattagtcctgaaatttagtacaataaaaaatactggataaatgatattatgttgagtcttacagattatgtttaagataagtccaacaatacaattaagaaaaaagaactctgcacctaaatcattagattttttaaagactaagaggttgtaaatgtggagaattataagcatagatatgtgaatctcaggttcaatttttttctgttcagagagcatctgtaggtgattctcttggccacaatggcagggacatctattactatcagaacttttgtttttaaataggaagagcaaaggaatgcaagaattagcttaatagtatttgggtagccattaaaaatagattaacctattcagaaccaagatcacagaggttctaggtaagcgtgtgggagacaattattctgaactcagaaataaatgatcaaggccatcaagcttgtaaggcctctcccagcatcttcccccaaataagagcagcaggaactttcacctgcttcctttctcctgctatcgccctatgcagcaacttccagctgctaagcattcatctcaaacctccattttagctgctttcttcaccaaacgggaatgaactatctattgggacttcctacttcaagcagtgagaaaatcttaggagatttccaagtattttgtttttattcatatattacttctaaagagaaatggatgggtaataagaggattcaagttgtgtctcgatcataattttttttcaaaacaagtttgaattc

SEQ ID NO: 204520 - DNA, 1000 bp, Homo Sapiens
ttatttctcatagttctggaggctgggaagtccaggatcaaggcaccaacagacgtagtgcctgataaaggcttgccttctgcttccaagatggcatcttgttgttgtgtcctctggaggggtccaacactatgtccttacatggcagaaaggatgaaagggactagggagatttcttcagcctcttttataacgtcactaatcccattcacctaaacacctcttaaagccccacctctaaatactatggcatgggtgattaagctttatcatgaatttggggggacacattcaaaccacaacattacatatatgcttggcagtttggagagaaatgagatggttacctgcctatcattctttgaaagctttttccctggagtaagtcaccagagtagttaagactcttatggttcattgttttactcatctttgcaacagtgagactgagcagtcagggccgagcaccatggctcccacctgtaatcccagcactttgggaggctgaggcagggggatcccttgagcccaggagttttgagaccagactgggcaacaaagcaagaccctgtctctatataaaaatgaaaaaaaattgaaaaaaagactgagaattcagttaagttaataatagtattcatcttggattatcctcagatatcttttgtttgctttgtttattgtaacttcagtcttaataataattttgatctgttgctttgcaagagtgaaaaagaactaggattactaatagtttagttaaaagtggatctaactagatagatttacttaacaaaatgactttaaataatggtatactttgtggtatataaagtgattaattagctaacagaattagaaaataaaaggccttcagttaaaaatacctaattctcttgaaactgtcatctgtatacaaagtagtattttgtcatatttgttaaatggagaagagtgctggaaaaaaaaatcccctttttattgtcctttaagagaattc

SEQ ID NO: 204521 - DNA, 1000 bp, Homo Sapiens
gaacccggaaggcagaggttgcagtgagctgagattgcaccactgcactctagcctgggcaacagagcaagactccatctcaaaaacaacaacaacaacaacaaaaattagctgggcatggtggtgtgtgcctgtaatcccagctactcaggaggctgaggcataagaattgcttgaacccaggaggcagagggtgcagtgagccgagatcgtgccactgcgctccagcttgggcaacagagtgagaccctgtctctaaataaataaataaaaataattaaaaataattcaactgatagagataaaatatatttattattcgtatcagtgtagctctaattagttcctcaaaattgctaaccatagatgatacttcaaagtttcccttccttgaattcttaaagttgggaaaccaaatatcctaaagtctacaaaacaaggaagtgaattataatgataatgtgattgcaaataatgtgaaataagctcattactacaaaaagatcttgtttagttcgtgaactgctggaattcttggatgagcaaattgaaacctctgggtatattttaaggataataaggttttagaaaaaacaatcatttgatcaataattagaattttcctatttagtccataaactaaattcagcagaatctgaaaaggaatggctggaagtacaaaggatttggagtattacactaaagaaaatgttataaaaaactgttttcctacttgttcccctaaatccaggcattggatccggtagatgtactggttctgttttctcttagatggcagccacacttgtgctattccaatcttctctgtcttctccgcattcaattccaaaaaaaatcgggagggctccaagatccatggacgaggacccccttcaaataccatttccttcacagactgccatgtcaccaatgccacttccacaggatttaaagcctgatgatatttaaagaaattaattcctgataggttagggaattc

SEQ ID NO: 204522 - DNA, 1000 bp, Homo Sapiens
tgtgtccctgccagtagaggtggccccacaggtgttaactcccctgtgtccggactgtgcatctgtgaatccctctgctgcttcagagaaggagttccaagcactgtgaggtgacccttgcaagatgttgctggaggtctgtgtagaattggtccctgcagcagtggctggagaaggcatggcaggggcagtgagaggatttgcagaggggtagaatccgccagtgtccccggcttttttgctgtgtgctgaccaaaaatcagagtgccttgacccacggcctgtgaccaggccagcttcaatttttttcacagcacgtttgaacccaaactaggaccttgaacattcctaggcactgcaaaagatatctagggttactagaaagaaattggcccagccctttagccaaactccttaagccctcatgtaaattccatacctcaccccctcgctgctgacataacctcagtagatgccccttttctctcacggtccctcagaggattgtcatagcactctgtaagttccctaatgagtactttgcacggactaccctggcgtttagggcttctttctttggaatctctgccctgtcctagtacagcttggggcactcctttgcgcgaactcccctgccattgttttttggggtgattccagctatggatttgcagggacgaaacaataggcgtgaaggagggtgcacacctgcatctctgcctcgctgggtcactcagtccccaacccctggcctgggagtgctgaggggtaccctgcagtaatagtccctctcggtccctagactccaagaccacagctggacttccatgcttttgtgtcttccatgttttttggagatggagtctcgctctgtcacccaggttggagtgcagtggcacgatcttggctcactgcaacctccacctcctgggttcaagtgattctcatgcctcagcctcctgagtagctgggattacaggtatgtaccaacaggcctggt

SEQ ID NO: 204523 - DNA, 1000 bp, Homo Sapiens
gtctgctccaaccacccctagttcccccaacctgcccatgctgaccattcgcttgacctggcctctggggtcacatcctgcttccttccccagtcctccccgggtccccataatcccatgcactgacattgtcctctacccatcccagctgtcctttgtctccacctcctgaaatgtgctgggaggcaggaactgtgtctcattgttctaatcttatacatttagtccattttcacatacctctccagcctcccctggaatgtacatgtagtaggtgttctctggaagaaatacttcttggggccaattgacaccatttaccttatgtttctccagcttacatggtgccatgtttttctttgaaaagtgaaactttcatccttgaaaaatctcagcggccgcaagcatacacggctgtggtttaacagcatgtcacattcctgaaaccgacgctccacgggtatttgaccaaacaagctttccttcctttgaagtagagtcaactcgagttagaaccctgagacagggatgaagattcagcctgggactgcatggtgggttttctgggtgagacatatcatgttgcaatattcataaccacgcaccctcagcacagaagctgccccacactgtaagatttctcactgctgctgagccctccctggtacgttgaggagttagaaacctgttcacgcctttaggatggtagatgcttcaggatttttgtttgtttgttttgttttgttttttttgagatggagtctcactctgtcgccaggctggagtgcagtggcacgatctcagctcacagcaacctccacctcccaggttcaagcgattctcctgcctcaacctccccagtagctgggactacagggacgctccaccacgcccagctaatttttgtatttttagtagagatgggatttcgccatgttaagaaggatggtctcaatctcttgacatcgtgatccacccgcctcggcctcccagagtgctg

SEQ ID NO: 204524 - DNA, 1000 bp, Homo Sapiens
ttttctttctgtatctgtaggtaaatctcaagggtaaaatgttaggtgtcagctttcagggctctgaaaccccattccctgctctgaggaacagtgtgaaaaaaagtcttttaggagatttacaatatctgttcttttgctcatcttagaccacagactgactttgaaattatgttaagtgaaatatcaatgaaaataaagtttactataaataatatttcctatggggtcttcattgccagagctgtctagttcatagaatgagatattgctagcagcaagatatagaaacatgaaagtattttgttaatatttagaaattacctattttgaataacttaaggaccaaggaaacttatttgattgtacattgcattgaagcttgtttcaaaaatgacctctgaggattttttttgtttttcaagagacaaggtctttctctgttgcctaggctggagggcagtggtgcaatcatatgtcactgtagcctcaaactcttgggttcagtcatcccacctcagcctcctgaatagctggtactactggtgcataccaccacacccagctaatgtactttttttttttttggagatgcagtcttgctctgttgcccaggctggtctcaaactcctggtctcaagtgatcctctcgctttggcctcccaaaatgtactggagtaataagcatgacctactgtacctggccactgaggttttcttcttttttttttttttttgaaacggagtttcgctcttgttgcccaggcaacctctgcctcccgggttcaagccattctcctgcctcagcctcccaagtacctggaattacaggcatgcgccaccatgcccggctaattttgtatttttagtagagacgaggttttccatgttggtcaacctgatctcaaactcccgacctcaggtgatccgactgcctcagcctcccaaagtgctgggattacaggtgtgagccaccatgcccggcagccactgaggattt

SEQ ID NO: 204525 - DNA, 1000 bp, Homo Sapiens
acctcggcctcccaaagtgctgggattacaggtgtgagccaccatgcctggcctcagattagattctatctattgatgtagcttcaagttcactgactcttttgtcatctcagatttgttgttatgaagcttgcctagtgaaatttttacttcacatgttgtatttttagtatttaaaaaattctttgtttttttgttttgttttttctttgttttttttttttaatttgagatcaagtcttgctcttttgcccaggctggagtgcagtattgctattatattactgcagcctcaaactcccaggcacaagtgatcctcctgcctcagccttctgagtatttgggactgcagactggtgctgccacgctcggcttatagtttcttttttattgttgttgctgagacatcctgttttatttattataggtttatcttcagtgggcagatttaattagcatttagtgacatttttccgtaaaacttgacaatataacggaaatggtataatttggaatagagaaaagaaatcactcataatcttaccatccttatcacagtcctattaatatattttgtgtattttttttttttttttcgagatggagtcttgctctgtcacccaggctggagtgcagtggcatgatcttggctcactgcaacctctgtctcctggattcacgccattctcctgcctcagcttcctgagtagtggggactacaggcgcccgccaccacgcctggctaactttttttgtatttttagtagagacggggtttcactgtgttagccaggatggtctcgatctcctgacctcgtgatctgcctgcctcggcctcccaaggtgctgggattacaggcgtgagcctccacacccgtcctattttgtgtattttcttttctttttttttgagacagagtcttgcactgtcgcctgggctggaatgcaatggcgcgatcttgactcactgaaacctctgcctcctgggttcatggaattc

SEQ ID NO: 204526 - DNA, 1000 bp, Homo Sapiens
attccagctgatggagagacagttgcaaggagtcagccctcatctagtgctgctacgatgggggtgtgtgacagcgacatggaggggatagggatggaaaccaagaaagagcacgaaagagtgacagttgagccataccctgatggatgggaggtgtccaggcattgcgggcagagggacagtcagaggcaaagacatggaggtgcgatcttcagagcacagtccgggaggcagggagcagccccacgttggggacaagggatgtgactgagagtagtgagggctaggggccaggccgaaaaggatcccaactgatgctgacatgtgcaggttggcaggtcattgctgagcccagggctcatgaagtttgtccctttgggagtctaaggctgatgaaggggctgtctgggatgtcctctggacccctaggctttcccttctggctgtgtcttggaacgcagcctctgctcgcgggctgtaggcagagctgcccactcctgccactggcaccgcttgccccaggggacctaagctgcagatgtgcatggtgattgaatcatttctgcacaccactgctcacacagctccccggggacccccacttgcctgtgcaagctgtcatgagatgtgtgtgctcaagtgcatctgtgttggcatccagcatgtgcacatacctgctgtgaagtatgcaaggggtcacatgtgtatgtgcctatgcacacgtgtgctgtgcagacgcctctctctgggtgcgtgtgcattatgtggactgatgaactagtgaggcctcaaaggtgggaaataaaacacttgtgttgggacagctgactgttcggttggctgccacccttgggagctagctgcctgtggagctccacatttctgtggggcagctagaagcacctcatccctgtgtccagtgaggagccccctgagggctgtttgcctcccccagccgttgagaccgttgagatgcttctctccttgctgacttggcagc

SEQ ID NO: 204527 - DNA, 1000 bp, Homo Sapiens
tacattctttatacgagtttgtataaggtttctttgctgaacaaaggcctcctcagttattacatttatgcagtctctctctcatgtggattctttgaagtcaaataaggccatgtggctgaaaactttcccacattccttatggtgacagcatttttccttgtggtggttcttctagggggaaaagagggttccactataaacaaaagcctttcaaaaacttgttgattgcacagattgaaaagagattctcttcatcgtggactccatgatgctgagtaatgactcaccataaactaaagcttttactacacttactgcattgatgttgcagttctacagacattccccccaacaaaattcagcatctccagattttgttttgttttgttttggagccaagtccttagtttccttctcagtaacaccatctaaaacaaaatgcacagacaattcaaatgtcagttgtctcttctgaaatgagatttatgatagggtacagtgattaaaaataaaatccacttttacctaaagtgcatgccttttctaagtctctaaacaagcatctcatttttgtgaaggcacgtggcagggtaggagtaggggggtccaatttgggtgagaagagacagctaggcagaaagagactggaagtgcatggaagacttttcacaaaaatgtgacaataaaagaaatcaggaaagtataatcaaaaaagagaagatcagtttgaatccaaagctgagaaacaaggaatatcatgaaaccaagagaaagtttaatttgttaaggacagttaaaaggactatttctactcactttaagtatcttggctactactataaacctacagaatgttcaataaatatttgttgagtggatcagtaaacaacgggatatgatcaaagttaacttgaaacaatagctaaaccagtttcaaaatacacactaatctgatgtggggaaatcaataaactggaaaattaacagtggggaaata

SEQ ID NO: 204528 - DNA, 1000 bp, Homo Sapiens
aaagacaggcaataatgaatgctggcaaagatgtagagaaagaagaactacgctgctggtgggaatgtaaattagtacaaccactgtggagaacagtttggaggttcctcaaaagactgaaaatagaactaccatatgatccagcaattccaccactgggtagatcctgaaaaggaaggaaatcaatatatcaaagagacatctgcactcccatgtttattgcagccgtattcacaacagccaaaacatggaatcaacctaagtgcctatcgacagatgactggataaagaaaatgtggtacacacagtggaatattatttagccataaaagagaatgaaatcttgccacttgcatcaacatggatggaacttgaggttatgttaaatgaaataaaacaagcacagaaaaatatcacatgtactagttcatttgtgggggctaaaaacgtggatctcatgaagatggagaacagattggttgttaccagagtccaggaaggtgagggggtggtatgggtgaagagaagttgattaatgggtacaaatatatggtttgatagaaaaaataagacctagtgttcaatagattagtggggtgactatagtcaataaaatctatcgtagatttcaaaatagctggaagagaataatgtttctggcataaagaaaagacaaatatttaaggtgatggatattccacgtgtactgattaatctttacaaactacataaatgtattaaatgatcatatgtaccctgaaactacgtacatctatgtgcatcagtagaaatttttgtttaaaaataataaagagtgcttataagaatttgtttagagattataaaaggaattgatcatgtgatattaatagctttaaaagtcacatagagaaatatctgaatcatagtctgggctttggagtcagaattttgagcactcagccacttacagcttcaatcatttaaccatgatgagcttctgctgcagcagaaggaattc

SEQ ID NO: 204529 - DNA, 1000 bp, Homo Sapiens
aaaactctgtctctactaaaaatacaaaaattagacaggcatggtggccaaggcctataatctcagctactcaggtggctgaggcacaagactcggctgagcctgggaagtggaggttgcagtgagcctgggaagtggaggttgcagtgagccgagatcacaccactgcactccaacttgggtggcagagcgagactctgtctcagaaaaaaaaaagggggggggtgttttgtttatttggtttattgggctttttggcatttacaaggagagggtattagctttttacttgtccttctgaactctcagttccccaaaaagatgttgagtaatgggattgggctgggcaacttagcaagaccccatctctaaaaaataaaaattttatatttttttatttttattttttttcaagacggagtcttgctctgtcgctcaggctggagtgcagtggcatgatcttggctcactgcaacctccgcctcccaggttcaagtgattctcctgcctcagcctcccgagtagctgagattacaggcacacaccaccacacctggctaatttttgtatttttagtagagacgaggtttcaccatgttagccagggtggtctcaaactcctgacctcatgatccacctgccttggcctcccaaagttctgggattacaggtgtgagccactgtgcccagcctaaaaaaaaaaaattaaaaaaaaaaaaaaagaatcatggaaggctgcagaaacttttcagcttaccaactcagggaggcccagcagtagcctcaacaggcccccacccccacatccagccatgcatagctgaaaagggcatggctttgtgccaagacagccccagagcctgctcctcctatttattcttggcctttacttggatggctccagggaagcagctgaggtagtcactcattctgccatgttaagatgggaattgtattaaatgagtctggcaaggtatgggaactgtctatcctttctttc

SEQ ID NO: 204530 - DNA, 1000 bp, Homo Sapiens
tatacataagttgaaaaaaaaacactaaatcaaaattttattgaacccattagagagctgaggttgcagggcaaccaagtagtctgcaatctaaggaaagacagactctcctaaggagtgacaggacatgaacactggctccctgtggcagttcaagggagaaagagataccaggcactatacaaatgggaaagaagtattcagacataaaatgtaatgcactgctgatagctggatgtgggccagtgtgacagtacagaacagcgtaaagccacagacacaaaaagaacttgcacacattcacagactcaagttcacagacctccaacaggtgctcataagaaagactgagagcagagcaggaaacgggaagaaccattccctcagaagggtaggcttggaggaggggagccactgtcatggtcgaaaatgcgtaaagccccacttagacctatttctcccagaacaaaagccttacactgcaggaggaggagcagcaatccctgctttgtataagtgtatacccactgcagttggaaacagagcaaacaaaatccatctattcctggagaaggtgcagaaaacagtcctaagcccaggatttaatgccattattattacaaaactcctaccactacactaagtgaaggggaggaaaccttctccactgtagacttgccaaaggtgtcaggcagagtctggatgccatgagaaggggtagtatcactaaccaagcctgtcactgaggaccagggacagaggacctgcccaaggctgagaatggaataggacaacaaagaatgacttggccctccctccccaggcacgcaagcaccagtctactgctggaagataggcaggagaaggaaagaaagcccttctaaagcacaggcacacaggggaggcctaaagctgaggacgaaacaggaagagaccaaaaataaaaactccttagcaccccagctgacaccctgcgcacaagctaaatcctaaggaattc

SEQ ID NO: 204531 - DNA, 1000 bp, Homo Sapiens
ataagcaattattctagctgattctaatgtaggtctaaagaccacatttacagaaatgcttcttagttacattgaaaattgcatcttgcacataaaatatatacagtaaatgagtactgaatacaagagtagactaaggggttagcaacttcaagtattactatttttggagatttgtgttttttgtttttgttcctttgttttatttcaaacaattcttaagcataaattaaaatgaaaataaaatgccattgattgagtgcctcctactttgtgccaggaactttacaataatcctgccaggtcatttgtgaaagagaaaacaattttttgctcaaagtcaaggaatagaacctgactgcacactgttttgtttgattttaaaatccctgctctttttattcctccatttaccccagggtacaaggctcagacataagggttcagaaacaacctctttcagtggtactaaaacagttatttatctcctgtgtgccttaatttaccatctgcaaaataaagtcaaaaagatgtaaataaatagggtgtattattagaattaatcaatgaagttttggaatgggaggcgaaaatataaaagcaacatcagatcacatgactattatgaacaataacatcatcaacatttaattcataattttatccatgaaacattgacccatgagctctggttattattattgataattaataaggacaagtcatgaggttaatgagggtttttcatagcttcaaatctttactgggtaaaagaagggaaaagttaattcttttctttataccaatgtaactgattttgggtttgttttctatttgtgtgtttcttaatctctcccttaaaattctctggggagcacttgggataatggagtaactgagtcagtctgcaaaaatgcattttaaagtccacagtggtggcagctgcaacaggtggtagtgagagaatggcttatcagggaagtgttggttcaacccaaaa

SEQ ID NO: 204532 - DNA, 1000 bp, Homo Sapiens
cagcctgggcaacagagtgagatgctgtttcaaacaaaacaaaacaaaacaaaaccactaaacatagcattattgtataactcagcagtttcactcctatgtatacactcaagaaaatggaaaacaggactagaacaagtgtttgaacaccaatgctcatagtagcccgattcccaataccaaaaggtgataacatcccaattgttgacagatgaatggataaacaaaatatggtatatacatgcaatggaatattatccctccattaaaaggaatgaaattctgatccatgctacatgaaagaaccttgaaaacttgatgctaagtgaaataagaaacacaaaagcccaatattgtatgattccacttataagaggtatctagaaaaggcaaattcatagagacagaaagtaaaacagaggttactaagggatggagcagaaggaaatgggaagttattgctaatgggtgtggagtttctgtttgggatgatgaaaagttctggaaagcatgatatagttgcacaatattgtgaatgtacttaatttcacagcattgtacacttaaaatggtaaattttatgttatgtatattttacaataaaaatgtaagtggttagatcaatcctataataaaaagcttataaaaaatgagtagaaatggccagtcgtggtggctcacgcctgtaatcccagcacttgggaggccgaagtgggcggatcacttgaggtcaggagttcaagatcagcttggccaaccagatgaaacccccgtctctaccaaaaaaatacaaaaactagccaggcttggtggtgggtgcctgtaatcccagctactcgggaggctgaggcaggagaatcgcttgaacccgggaggtggaggttgcagtgagccgagattgcaccactgcactccagcctgggcggcagagtgagactttgtctgaagaaaaaaaaaaaaaaaagtaaaaaggagaaggagagtgagagagaaaaggaaa

SEQ ID NO: 204533 - DNA, 1000 bp, Homo Sapiens
tgcttcccaggttcaagtgattcttgtgcttcagcctcccgagtagctaagattgcaggcacaggtcaccacctgtggtaatttttgtgtttttagtagagatggggctttgctattttggccaggctggtctcgaactcctgacctcaggtgatccgcccacctcggccttccaaagtgctgggattacaggtgtgagccacagctctcggcccctctatttatcagacagatgtatagaaagtttattgtgctagcaacagtatgaagaaaaggattctctgagttgaaaaaacaaattggaatataaattggtaccacttctatggaaggcaaatttacagggcttattaattaaaataaaaaatgtgtactgtaaccactatgatacagcagttgcgcttccagaactctaccctatagaaatccgtgtacaaatagcaaaagatatttgtacaagaatgatgactgcagcattatttgtaatcgtaaaatcatggaacaaacttaatttaaaaaacaacatgtaaagggttagatgatggaataaacaaaagaagaaatgccttcatcaaaaataatgcagaggataataataatcttgagtctactgataacattattgatcgagcaattattaaatctaggcacatcctgcaaatgcgatattattaccatcctcatattacagttgaaaaaatattgaggtacaaatagcttgtcaatagcccaaaggcacaaagagaagcaagatttcacccagaacccgtgaacagatcacacaaaatttctcttgttccctggtccaaggaacttctgtaccttccaactacatttctttccaacagagaccttcttggaggatgagaagcagccactagttgacaggaggggaagtgaggcatgtagtcttcaagggagcagaccaccgtgggagttataaaagatcagcgacgcctctgggtgggttcaaaccaccaaccttttagttaacagccaa

SEQ ID NO: 204534 - DNA, 1000 bp, Homo Sapiens
gattacgggcacaccccaccacactgggctaattttaaaatattttgtagaggcggggtcttgctatgttgcccatggtggtcttaaactctgggctcaagtgatccacctcagcttcccaaagcactgagatcggaggcgtgagcccccacgcctggcttctccccaagttttaacagtgatcttctggcagttgtcagagaccaaatacaatttcttaaaaatcaccattctggtacttttccttcttgaccttaacaacccaccctttggatatttttttccctattactatccattgccactggctctacacaatacctattatcatggctcaagtgtttcattagagaatctgctagtgggacagaactagttaagtaacacttttagcagcaggatgtggcagaaaaattgggccaggaggaagcaagaaacctgtgctctagtcccagatgcaccaccaactgcgaccttaagcaattcacaatttccccaaatccatatcgccaacccagacttatcctgcagcagcaaatctgccatggtgccctgaatacacagggccaccaaaactcaaatggccccaaatccaacccattccccacctgggtctgttttggttctgggctgaccatcccatcacacagagtattaactgaaccatcacagctctacttacgtaaaatgaagagggttagcctaagtttctgtctaggtcattccaaatctcacttttctgatgtttctaaaatggctcttagtgtagaaggggctcgaggtggaggttgggaaagggatctttcaagggatggcaggtccctcctgccatgctagatgctcactgagctggctcggaggtggaagacagcaggggctgggggataggtatcatctttactcaactctgatgcttttttaaatatatctgtaactgcccctcccatatgtcccccaagtatgttctttgtttgctaccttctgctggaagagagaattc

SEQ ID NO: 204535 - DNA, 1000 bp, Homo Sapiens
ataatctctgactctggcaggctcttaggacatcataattttaaaattgagagaatttttaaaaatctagatttctgtctttccttggaaaattgagatgttgaactaccctactatgctattaaaattgccaggtatggtggctcatgactgggaggctgaggcgggtggatcacccaaggtcaggaattcaagaccagcctggccaatgtggtaaaaccccgtctctattaaaaatacaaaaatagccaggtgtggtgatgtgcatctctaatcccagttacttgggattagggcaggagaattgcttgaatctgggaggtggaagttgcatgagccaagatggcgccactgcactttagactggatgacagagcgagactccatctcaaaaaataaataaataaataaataaataaaattgcagtatccatgacatcttgtcctaaaccccatactttgtgcttcccttacattgctttgcttcctctctttccatagccccaagcatctcctaacttaccatatagtttacttatttattctgtttattagtctgtctccttctgctggaatgtaagttgcatgagggcagggccctttgttttgctcaatgatccatcccaggtcctgaatattgcaacctggcattgaatagttgtatgcatgttgaatgaatgtagcctgaagcctacattcccaatttgtagcagtcacattgcctgcctgggcccctgaaggcatgtgtatttgccatgcctgcccctactgacctgcatgccagcttctgccttccgtccccctcaggcttgtttctctggccacactggcctggcctctcctgccccaacactggccctccgcacttgctcagccagaacgctcttcctgcccctctctgcctggctagctcctgctcctgctgtgttctcagctcaagctgtccttgatccctctgcctaggtcactcccccaagcacagagaatattctgtccttag

SEQ ID NO: 204536 - DNA, 1000 bp, Homo Sapiens
cacgccgccagaaagacaggctctacccagccaaacctgcacctccgaggccgaaaagcctggggctcttcctgcagcaccgggcgcggccaaccctcgcttccccagggcagggctcagctcgggtcaatgcaaccagccaagtcaggcccggagcgggccggctctgcccgccagtccaaacctctggaccctcgccagcggggatgggcgtgggccccggcggccaccgccccgccaactcgagcactggaggagcgcacccgctacgccagccccggacctacctggaggggagagcagagctcctggacagcggccacgggcctgagggcggacgctgaggcggccagagtccgtcccagcaaccccaagtatccctggtggggcagagcggggagacgaacgggggggctgccgcgggccagcgcggcccgtcccaggggtcgtgaggacctggctctccccttaacaccaggccaccgccgccgccgccgccattttgccttccactcagtgtcgccgccgccgcactccgctgcaggtttcccggatgtgggcatttcccggcgtcgcttgcgcgggggccgaggactgggggcttttgcccgcccggctgctgcgagggagcgcgcagcctgcggcctccgggcttcgttgcgtcgcccgcagctctgatcgttcgtgagcgtcgccccacgtcgctcccgcctgcccctgcccatacgactcgcccgcgcccgtgggttaaggctgtctcccgcccagcctacttggttgattcaatccttttccccattgatctatttctctggaccgagtagggatgtgcatttcacggagctacgttctcagaagggaacaactgagttgctctgggaaacctccctgtggacctcagaattccagatttttggcgctttgaaataaaattttattcttgcttagcgttctttccccgaacaagccggtgagcttccagcatctgtattttctgaat

SEQ ID NO: 204537 - DNA, 1000 bp, Homo Sapiens
caaattttcatctatataaattctttaacatctcatgtaccctatgaatatatacacctcctatgtgctcacaaaaattaaaaataaaatcaaaataaaatctagtggtggcataagggagtgtcaggggaatcttgtaagggggagaggcagccagtggtcagttgagaggattaaatggcagcacctcacatactgctttccagattggaggctttaacaagttgatagaaactgctaccaatataaagtgcagggctcagagggtcagtatgataggatattttgttttcttgttaggctttagtatttattatttttttttacagcttgcctgggataaaattgacctacaacaaattacacatacctaggtacatttgacacatgtatgcacctatgaaatcatcactacaatcaagatattgaacatatctaccaccctaaacattttcttgtgtaccctttcccttttctcttttccttttctttctttatccttccttccctcccttccctctgtccctccctccctccctcctttcctccctccctccttctctctctccctcctcattcgggtaaatagcaaggagtgcagttgctgaatttgatgtatgggtatgtttagttttgtaagaaacatctaaactgtcttccaaagtggctataagattttgcattcccacaagaaataaataagagttcctattgctccacattgtgccagcatttgctgttgtcagtgttttggattttcaccattatgataggtgggtagtggtatctcattgttgttttaatttacaattccctgatcacttatgtattagtcatggttctctagagggacagaactaataggatagaggtatatatgaaagggagtttattagggagtgttgattcacatgatcacaaggtgaagtcccacaataggctctctgcaagctgaggagcaaggaagccagccccagttccaaaacctcaaaagtaggga

SEQ ID NO: 204538 - DNA, 1000 bp, Homo Sapiens
tgattaaaaaatttaggaagattaaccccaaaccaacctatgaggtacagactattatttctccaaactttataggtagaaagctaaaacatcagagaatttaagtaatctgcatttttttagttatctatagctgcataatgctaaacttacagatcaccttaaactgaaaaagtcaactatgtatttgcctgtaaatctgtatgttagcacttgggtttatctggaaggttctgccggttttacctggggtcactcatgcaacttcagacccttggcagctctcctggggcttacttgtctcacgtggttgtacatacataattgtcagttgattctggctgtcatctgcagctcctttgttcttctcaacagggctgctcatttctagctaactagttctagattttctagaaggtaatttatggaagtgttactagaggatgagagtagaaactaagccttttgaagcttaggctctgaagtttagcaacattacatattttatattctctttttccaagcaaatcaaaatgcaaatccagatatatgggatgggcatatagattacaccttattatgcagaattcctatagctacattccaagggaatgtgcacataggaaacaaggaattattgtggccatttttgcagacttctgctacaccaaacaaagttacatagctgatgattggtagaagaagtcttggagtccatgattttaacattatattgtgatgctttcagtgtaagcccgtgtcctcacttagatcccatatttcccttcattaaaagaatatcagaaatgatctagtgtttcaatatattttgtttaacatgcaaattaaattatattatgtaattattaagttatgaaattatacacatgtgcaaatagagtacttttattattttacttatcttttttgagatgtttataactatcagtccatatattcaattgatgtattagaattgtgtaagaatttacaagaattc

SEQ ID NO: 204539 - DNA, 1000 bp, Homo Sapiens
tgttaatggtgttattgtcatttttccaaacttcttatcagttgaatttgtttctgttgccatttctattcccatactccttcatctgctctatctgcaaatctcttgcgtttctgtcttgttttccaatttaattaaatatgattcgcatttaaaagtaggaactatatattatttttatattcatttatattccggattgtatatgtatgttttagatgactttatagaggatattttatttattcatttatattttttgagacaggatcttgctctgttgcccaggttggagtgcagtggcatgatcatagctcactgcagcttcaatctcccagactcaagtgatccttctgcctttgcctcccaagtagctgggatgataggcgtgtgccatgaagatatatttaaatagccgtttgagtcagatattcattccaacagttatttgatgttattgagacatgatacaggctgagtgaaaacattttatgtgagtgccatatgattggtttgtcctgggattactgaatgtgtttgagagctctagtctgtatcatattatattgctttagcaacagggaataaagcacatttcaaagatctgtttattattttaggaatcaaggccagaggtgtgaacaaggtgtcagctctgaagggaaggtttttctaaggatggacccacaccagaaggtccctagcatatataatggggatactttacaaactcctgagtatgaaaaagtctctcagtatgaggaccagttagaaaggcatgagggtaggcacatggaagaaagacggtataaatgcaatgaatgtggaaagaagtttgcccagagctcaggccttgttcgacatcagagaatccacactggagagaaaccctatgagtgtgatcactatggaaaagcctttagcgtgcgctcaaccctcactgtgcatgaaagaatccacactggtgagaagccttatacttgtaatgagtgtaagaaag

SEQ ID NO: 204540 - DNA, 1000 bp, Homo Sapiens
tgaggaaaataatcacctttgggttatagccaacaagtttgcctcctatagttgttaattatcaaaaatctgacctaatttttaaaggaaaaagcatgttgttggattcctatagggaattcttgcctctgaacctaatctcactcttaaataaggtaaagaaaaactcagtttttattttccttttataaatagaggttttataggcaaaataatggatttaagttctgagcatatgaaatagagggttttggtacatatcttccctctcggtatcatggtaataggcatgatagaaatcataatctatcaaaatgcaaacttagggctgtttagtacagtaggaacatagaaattacttgtaacagaagttacaaggtggaaacagtaaaattctcaggtaaaaaaaaacataaaagaacataaaattttgataaaatagttgtcaagtattctaaatcacaaatgggaaagctgcattaaactgtaaggttttgagcattatgaatagtgtatttgtgaaggctcttagaatgatttagcaagaataacaaatcattactttctttatagtgtggtcaatcttccagccacagaggaaggcttggatagttattggaatccactgatttcttcactgatttatctgctttagattcctatttcctattcccatttgaagccaactatatttaactgttatagccatattccacagaggtcacatcagaacacttttatacaatcaagaaactacgttataatattctttcaacttttctgaagacctaaagctttaaaaattaatttaaaaggttaatttctactcagaatttctctacacaaatattcagaagctgaagctcaagctgatgcaagaacttcagaccctctttgaggctaactgaaaaagggaaaaaaagagttctcattgaaaaataaacaggagtcctacctctcctggggctgtatcagttgggtcaggtccatgatggaattc

SEQ ID NO: 204541 - DNA, 1000 bp, Homo Sapiens
tgattcccgaataaatgccaggaacattcatgtacattattattccatttaattctcgaacactggggtgttgaaatcttattttacagatgaggaaactgacgttctaggtggttaggtagcttgacaagggctagtaagtgtcagagcaaagacttgaacctaagtctctgactccagatcccactctcactctgccacaagagtgagacgtgggagaagagagagtgttctacctggattgactcataaagatagaagacagattccagaccagagagaaactcgtgggcaaatgcatccccagaaaaattagctttgcaggggcatgaaggtactagttattttggagtaattcaagttatcgatttctgtaatggaaaagtgattgggaaccagctatcacctgagaacagtgctgagtgaggccccaagaagggggcaatgttacacacaagcttacacacagcttacaagacctcagagattgcgagggtccttttccctgctgcccacaattaatcagtacacttctcaagggcagggagcctgtcttactcactccccacccccacccccacctccccctatcctgagtgcttgtttcagggcctggccctggccaggtgaatggaagatgctgcccatctcaggttggcaggaagaggcaggcctatacagatgtgtcatctgcagacccctagggcaaggtgccactgagaagcagctcagtaccatgcagataggcagtggtcactgaaggatacaattcacctgcaagtggtcaccttataactcaattaaaggatggatgcagtgaccccaggctaccccctgagctgggcagcagctctcagtgatgttgccctagctgtgacattgtggctctgctcatgacctctacctatcctgggagaggaggggaggaagcgtgtgtcccaccccagtcggccctgcctgacactccccaaacaccattttgaggtggggaaaatccttc

SEQ ID NO: 204542 - DNA, 1000 bp, Homo Sapiens
aaaaagagtacctccaaaaacatataaagataaattccaaatcagttaaagagttaaataagctagtaaagagttaggataaatataaaatatttttataattttgggatggagagagcctacttaagcaagcctcaaaacccagaaaccattaagaaaaaagacagatatgaaattttagcacatcaacggacactacagatgatgcaacagattgtagaaaatatgtgcaatatatgtttaaaatacagggatacacagagagagttcctattagtctaaagagaaaagtggggagaggtgtggatagttaatgggtacaaaaacaaatagaaaggctgggcgtggtggctcacatctgtggtggctcacatctgtaatcccgtcactttaggaggccaaggcagcagatcagttgaggccaggactttaaaactagcctggccaatatggtgaaaccctgtctctactaaaaaatacaaaaattagccaggcatggtggcatccacctgtaatcccaactgagtatactcaggaggctgagggacaagaatcgcttgaacccgggaggcagaagttgcagtgagccgagatcacaccactgcactccagcctgggcaacagagcgagactcttgtctcaaaaacaaaaacaaaaacaaaaatagaaagaatgagtaagagggaatatttgatagcacaaatggataattacagtcaataatttaattgtacatttttaaataactacaagtataattgtttataacacaaataatgaatgctgagaggatgaattccccattttacatgatttgattattatgcaatgcatgcccatatcaaaacatctcatgtacccaataaatatacacacctactatgtatccacaaaaaaataaaatatttttttaaaaataaagctgggcatagtggctcacacctgtaatcccagcactctgcgaagctgaggcaggcagatcgcttgaggtcaggaattc

SEQ ID NO: 204543 - DNA, 1000 bp, Homo Sapiens
tatcttcacattaaaatctgggttggctctggggagataccactggtgtaagttcaagtaggattaactgcctcccagcaatgcaaattggtttccaacttttttgttttgttttttcttcaatattttttgggatatttttcttaaatgataataatttgcaaaaaccatgaaatattatttttggttctacaaatgtcagaacaccaaagaaaaacactcttcaggaatccagatctattaatgaaattaaaaattaggggacttgagttttaatctcaatctcctaagtagccatgtttaggtaggttgcttaatacaattctatgcttaattttttttttaaattctctaaatgatgattttaaaatactggttctacttatctcacagaattattgttcaggttgtgaaagtattttctttctttcttttcttttttttgagacagggtctcatgctgttgcccaggctggaatgtagtggtgcaattatggttcactgcagtctcaaactcctggactcaagtgattctcctgcctcagcctcctgagtagctgggactacaggtgtttgcaaccaggcccagttaatttttttctatttttttgtagagatgagggtctcactatgttgtccaggctggtcacaaactcctggggctcaagtggtcctcctgcctcagcctctaaaagcactatgattataggtgtaagccaccatgcctggcctgtgaaagtattttatttttaagttatgaacactagataaatttcagacatactattacttaggcaattagataatgacctgctgctagtctggggtcaggatagggaggtgaagcagggaccagtatctggaacgtttggatttaaaaagtaggattattgaaaatggattaaagacttaaatgtaaaaccccaaaccataaaaaccctagaagaaaatctaggcaataccattcaggacataggcatgggcaaagacttcatgacta

SEQ ID NO: 204544 - DNA, 1000 bp, Homo Sapiens
aattagaaagcttttggcaatttttttaaaattattaatgtccttctgggtgccaaggaattttattgtgtggtcaggcggtagaatcatccgtaaaggtgaccctagacacctgacagtaaaggggaggtgaggaatgggtgaagtagggaagatgcagagagtttgatgctagagtttatcctttagtacttgaagattgacattaaaatacctagaacaaatacatttggacttagtgttccataaatggatatatatctaagagcagttttcccagggaaccctatctaaaagttgaattcgttctcaactgtttttacagtatctagtttccctccctcattactgtgctatgtactctaggggaattgagaaaaacgaaggcattatctttgtaagaagaaaaaatcaagatgatctggcacacctggaggggtagtggaatgggagttgatcactgaacatgtatgcaatgtgcataggcacaggggattgggaaagacatcccaggcgagaagtaagagtaatcacaaaggtgggaataaatatggcatgctacagtgtggcatgggctttgtgttcctattatttgcagaatgttcgcatagctgggtgtcttagtctgggatgctataccaaaataccatagattggtttataagcagttctagaagctgggaagtccaagatcaaggcaccagcagattccatgtctggtgattctgtttcctggttcatagacagtgcctttttgctgtgtcctcacatggtagaagggacatgggagctctttggggtcttttttaataagggcactattcccaatcatgacctaatcacctcccaaaggccccacctcctaataccatcaccttgtgggctaggatttcaagacaggaattctgggaggacacaatcatttagtccacagcaataagaaatatgcgaaatcaggatgggtaggatcagatcatagagatctctagattctgttacc

SEQ ID NO: 204545 - DNA, 1000 bp, Homo Sapiens
tcccaaggaaaataagcaacttacagtaaagcaacaaaaataataatatttaaaataaagaaaacttaaatacacaaggaaacaagccaggaatcctgaaaacagaaatttaaagactgcagataataaaattattacctacagactgttttgtatgtttgaaaaaaattaaaaatataataactgaaataaaaactcaatggatagaactaactaaagagataaataataaactggaatatacagctgaagaaattagccaaagtgcaatacagtaagacaaattagaaaatatcaaagaaagattaagagataagaagacacagtaagatggactaacatatctctaaaatgtggtcccagaagaatagaatggaacagaggcagagtttgaagttataacagctgagaatgttctgaaacctgatgaatgatatatacccacacaccagaagcccaaaggctcccaaacagaataagaaagaacaaatcaatactgaaacatatagcaaaattgcagaacaccaaacaaaaagaaacaaaaaaacctcaaaagtgacctgaaaagattactttcaaaggagtaaaaaggctgaccactgacttttcaaagcaacaacagaggataaaatatagtaacattttacctgtattatgaatgaaccttccctgaaatgtgacatccaagtggacacatagtagtcacatctgtgctgagaagtaggctcttttgtgtgtatgctgaaatgttgaaggagcagaggctcaagccctacccaaaccccttcattaacagagtccccgggggctgggggaacgaccctatgcaaggcctgcaacctccaaataaaagcaatcttttgaagaggcattctccctttggtcaccagagtattcttcaaattagttgagacttataggtcttaggttctaaagaaaaataagtacttttattacttaggggttatctgaatttttgcatccatgccagtctgaattc

SEQ ID NO: 204546 - DNA, 1000 bp, Homo Sapiens
tattcttcagtaattctcacctccagttctgtgttcttatcatcccttctgcatgaatttttccccatatatcctcataactcccgcattcacttccttccaaactttttttttttttgagacagaacctggctttgtcaccaggttgaagtgcaatggtgcaatcgcgtctcactgcaacctctgcctcctcacttcaagcaactctcatgcctcagccacccaagtagctgggattacaggtgtgcaccaccatgctcggctaatttttttgtatttttagtagagatgagggtttcaccatgttggccaggctggtcttgaactcctggcctcaagtaatctgcctgcctctgcctcccaaagtgctgggattacaggcatgggccaccacacctggccccaaacttttccaaattctccttagcataagagaccattgtatccccacataaaataccattcttcatctctctttccctgctttaaccggctctattattgttgtattactcattatcactaattagtaaattttatttcttcatctgcctctcctcactagcatatgagtgtcttgtaattaaattattttttcaatgttatatattcagctttgctagccatgtttgtgaaagtatactcttaaatattaatggaaaggaatagaagatgaaaggcttcccttaattctcttttacgccagactttctataaccccttccatcagaattttgaagtgtaatgttccttacttgcccaatttcttatacccaatacttgtgcaataaatccgtcagtgtggcaagaagatctgaaagttatgcagatccaaaatataacttatctacgtttactcctcttcttactgccaaatgaggttgtcttcttgtcatcactgtttctcttttataatgctattctccaaggtatccagatggaaaccttggacaattcccatgttaattggtcctgatcagctcacacccatcttgaattc

SEQ ID NO: 204547 - DNA, 1000 bp, Homo Sapiens
acttctccattttaaaagggtggatttggactagactggtgtttattaagttttatgttaattaaagtgttctttaaaaaaggagttcccaaggatctagaactagaaatgctatttgacccagccatctcattactgggtctatacccaaaggattataaatcatgctgctataaagacacatgtacacttatgtttattgcagcattattcacaatagcaaagacttggaaccaacccaaatgtccatcaatgatagactggattaagaaactatggcacatatacaccatggaatactatgcagccataaaaaagaacactgcatgttctcactgacaggtgggaattgaacaacgagaacacttggacacagagtggggaacatcacacaccggggcctgtcgtggggttgggggagggatagcattaggagatatacctaatgtaaatgacgagttaacgagtgcagcacaccaacatggcacatgtatacatatgtaacaaacctgcacgttgtgcacatgtaccctagaacttaaagtataataaaaaataaaaaataaaatggagttccactcttgtgcactgttggtggggatgtaaaacggtgcagctatggaaaaaaatgtggtcgttcctcaaaaattaaacatagcattaccaaagcatccagaatttccacttctgagtatatatccaaaagaatcgagagcaagatctcgcagagatatttgtgcacctgtgtttgtagcagcattattcataatagccaagaggtggcagcaagtcaaacgtccatcagtgaatgaatggataaataaaatgtagtatattcatacaatggaatattactcagccttaaaaaggaaggaaattctgacaaatgctgtaacatgaatgaaacttgaggacgttatgctaaataaaataaaccagtcataaaaagataaatactctatgattccatgtgtgcgaggtacctagagtagtagaattc

SEQ ID NO: 204548 - DNA, 1000 bp, Homo Sapiens
ggcatccttcccaacagtgacggggttgcgtgccatgccccccaggcctatcacttaatcccctaggccctcagttctcctcattacccaagggaaagggatggtctctttgtagcccaggggtcctctgaggtcatactctgctgagtgaccaaggaactatctctgaccacaaggctgggagttcagggaaggattccagagcagttctgacctaatatcaagaccccatgggctgagagatccagggaggtgtcgtggggagctgggagggactgtgtctctggtccgagttaggggagcctctcacacagctaagcacttttttctgtcttcctcgtttcctctttgctcttgccttttcctccctttctccttcaccctctgctttgccttcccacaacctccttgtctctcttctccctctctttctcaccccttcccccttccagaatctggagcgcagcgggaatcagcataaggcagaagtggaggccatcatggagcagctgaaggagttgaagcagaagggagaccgagacaaagagagcttgaagaaggccatccgagcccagaaggagcgagccgagaagagcgaggagtatgctgagcagctacacgtgcaactcgctgacaaggtcgcaggcccgcggtgcccagctcctcacctgccctgaggagggctgggtgatggcagaggggtggtcagccagatgggtagcggggaggggtgggtggatgagggatggtagtggtggaaaggatagatggctggggaggagggagagggagttaaggggatcaaatgggtaaaagctggagggatgggtggctggagatgattggaggctttgtaggagagttcagccacatcagctttgtgggtgagaataatggttaaggaaggatttacaaacaggatgcatttgattgctagaaatctgggagcactagctgggctcccactgttgcttccagcgccctctagaaaggtgaattc

SEQ ID NO: 204549 - DNA, 1000 bp, Homo Sapiens
cacactgcattagtactttgtagactgtgagcaggggaatcgaggaacctctcagggctttgtgttgggacgctgacacactgcattagtactttgtagactgtgagcaggggaatcgaggaacctctcagggctttgtgttgggacgctgacacactgcattagtactttctagactgtgagcagaggaatcgaggaacctctcagggctttgtgttgggacactgactcactgcattagtactttctagactgtgagcaggggaatcgaggaacctctcagggctttgtgttgggacactgactcactgcattagtactttctagactgtgagcaggggaatcgaggaacctctcagggctttgtgttgggacgctgacacactgcattagtactttctagactgtgagcaggggaatcgaggaacctctcagggctttgtgttgggacgctgacacactgcattagtactttgtagactgtgagcaggggaatcgaggaacctctcagggctttgtgttgggacgctgacacactgcattagtactttctagactgtgagcagaggaatcgaggaacctctcagggctttgtgttgggacactgactcactgcattagtactttctagactgtgagcaggggaatcgaggaacctctcagggctttgtgttgggacactgactcactgcattagtactttctagactgtgagcaggggaattgaggaacctctcagggctttgtgttgggacactgacacactgcattaatactttccaaactttatgttcttcagagaagacccctccttgctgggggtgaggaggtggagaagtgggtcaggcgtgtgccttggctggctgccgcttcatatacagacgtatgatccctggttttcccccgccctctgtgtctcactcccttcctccactgcacttgccatcttcatgtttggggctcttctgggcagatgggcttgatcctcacctgtgaattc

SEQ ID NO: 204550 - DNA, 1000 bp, Homo Sapiens
ccagagtgtacacgtgttgctaaggctaatattgaaagaaaatgttgacttcatttaggtgagagtgttcttctctagaaaaaaacacatcaaaccaagaagtgggtgactttctgcagcccctccatgtagacctctctctttagtcagaaaccacttcttactttcataaaagaaagtcagttctcaccatggtctgggactcaaagcacatgacgctccattgagctattattcctgactgtccatatttcagtttctcactggaaactgaattgcccactcaccaggtgttttccaagacttgggtactctagggggcttaaggaaaggctgatgatagaggtgatggccaggcaccctgcttcagggtttcctcctacagtgaataagctttgtaccacagcaagtaaaatcctccgaaaattttatatctgggtcttattaggtgggttactgatgctcctaaccattcaatgccaagacacacacagcgacatactgcatcaccagcactaccgtcatcagtatcttcatcaaattaacagctgtcaatgagtgtcaaccgtccatgaataacaattgttgtaaattgtcgatgaattgtgcttgatttttcttaagtgttgatttaacgaagatcttcttcaggatatatttacatatatttttaaatttctgttgcaaaactttgttctgtatgtcatttagtttctttgaataaggatgtaagccatgaaagattcaattagatttttttttttttttcgagacatagtcctgcgctgttgccgaggctggagtgcaatggcacaatctcagctccctgcaacctccgcctcctgggttcaaatgattctcctgcctcagcctcctgagtagctgggattataggcacccaccaccatgcctagctaatttctgtatttttagtagagatggggtttcaccatgttggtcaggctggtctcaaactaccgacctcaaatgatccacccgc

SEQ ID NO: 204551 - DNA, 1000 bp, Homo Sapiens
tcttgaggccaggagtttgaaaccagcctgggcaaaccccatctctacaatttttgttttttaattagccaggcatggtggtgtatacatgtaatctcagctacttgggaggctgaggtgggaggatcgcttgagtccaggagtttgaggctatggtgagctacgatcatgccactgcattctagcctgggcaacaaacaagaccctgacaaaaacaacaacaaaaacccataaaaaattgaattctcaggtgtctccactaattagacagtgacaaagggaaaaatccacatttccgggtgatcataaagaggagtatttatttttgttcagacaaagtggtgcctcccactgtgtgccatgcccacggcagaggggtgcaatgtccagaactctgctcctcgcttgctcccttctgccctgtgtcagtgggttgtcctgcctgggctcacagggactgcagggggtatgattcctattcccataccagctttgtcaaagcacttgtcccagaagtggatcccatccctaaaacccattttaggcagagttgtgacacaggtgactggcattgccccttcccttctacacaggcccactgtcctcattatcttttgggaaacactagatttctccttagtgctgccttcctgcctacagcccaacagattcaaactgcggtcctggctcaatatatatttgatttgagtttaagaaaagcccttgaattcattcatctcgaggatctaaaactgattcacgctcaataaaaacaaaataagacttggttacagtacccaggatgtgacaaagaatctgtagtttagccttctttgggacttaaagtttaaaaaaaaaaaaaaattaatgaggctctccaggcagaatcaagtgagacaaagctaagggcggaaagaaaagggaaagcttccaagtccactgaacacatagcagttggaccacctggtccaagacacagaatcccaactggaaacgctca

SEQ ID NO: 204552 - DNA, 1000 bp, Homo Sapiens
cgccactgcactccagcctgggcgacagagcgagactccatctcaaaaaaaaaaaaaaaaaaagatgttgtagatgaatatttaacaacataaaaatattcaaaccatgggataaatggtgtgattaagattctggaaacaggtttatagaaaaaatatggcacatactgaaatgttaactgtgtttccctctggatgaaaggctttaggtattttaaattttgttctatggcttttagaaattattttatatatgaaaaataatgaacatatgttatgtttatatttagaagacattattttcttctaattggtttgagtgagttggggacagatggtcttcatggtagttctctcactgcctaggattttaaaaatccttcaataataataacaatgataatcaccatgtattaaatgctcacggggcacttgacatgcagtgtgtcgctgaacccttaggacactctacaaggtgggtctgttgctctgcccatcttaacacataaggaaagtgagacagaggttgggaaactcactccaggtaacacagctagtaagtaacaatgccaaggacatgagtcgcgttaatgtctgggctattcgtctctttgctattaatagtccaaacataccatatgcatcgatatgagctaatttcttaaatcttcgagttctagttcattttatattttggcaactttctttacatgtataattgcttttcatttagttataacaagatcagttttgggtataaactgaccttccttttgtaattcagctatcctccctttgaaaaaacaggcctatgcaattatgtgctttagtaagaacagaacatatataaccaaaaaaatatatagatgattatatataaatcagaacacgctagctgcatgaataggggctgagagtcaaggaggaaggcactgttgtgttactcaaatttaattataacatctatctgcaacaacaagctcacagtctttcttccccg

SEQ ID NO: 204553 - DNA, 1000 bp, Homo Sapiens
acaaaaagtgccagttaaggtagagccaggccaaatctgtttaatggttatttttcccagttggttgtatgggtttataggtgactagctggcattgtccggaacgttccaagtcaaccgtttgccccaagcatttccgggtcattctgatctatccagccttgcacttaagcagctgtactgcctctcgaacaggcatcggggcattgtttttgtttgtttgtttttctggctcaagaacaagctttttctgttttctttgaaatgtgagagatttaaataagtttttctaagccattttcaattcataagtttacatgtaaattctcttggatacagatgaaaggaaggaccatagcacaaatgtattttttccaaactgttctaagaattttgaaaaacttatgaaaatgccaagctctgcccgagatccctattaatgtcattcaaataaatttttattttattgaaactctgcattaaaagaaatgtatgacttggcacttactcggaggcatacagtacaatcatagtatccaaaaatgcccaaatttttcaatttcatgaaacttgagagttaattacccaggcactgcaagataagtgctaatataaacacaaagacagatttcaatgctttagtattactttagaaaataaagttgtttttaaagcgttcttacttctgggcagaactgatgaaagttctgtttctgttaagagggagatgaacttctaccctgaagaagaaaatgtatccagttagtttcaaaaccaccatagttcattatatctgggggagttgttgatactgagaattcttttaagcttctgctattaaaaagttttacaaccttatgctttcttaattttttcagaagcattgtaacaagttataaccttgagctaggactatgaaattggaaaaagtccaagcaaatcttttaaaatctataatttcagagaaaatatttacagttttaagtactgggaagaattc

SEQ ID NO: 204554 - DNA, 1000 bp, Homo Sapiens
ctatagcaatctgcatgtttggtgaccagggtaagtatagtccatgtggactacttaatagtaggaaagaaaaaaataaagacaaaggtaaggtctgtcttagctctctagctagcatagtgctggcacgtggtagaagcttaggaaacatttgtcaaatggatgaaaaattcaccaaggtgttactggtccctggcaaaatttctactcagttgccgtatatccataatgcaagtttaataccatgtaatgccccccaatgcaattcatcttcaatagccatgcatgatagtacaatttaatagctgctaaagtgagacaagatttttaaacctccgcattcatagaaactgtgatcctatcatagtattccaattttacttcctcttctcatcagctctaataatccttgtcttgctcagagtttgcattgtattttgcacatatataatgattcagattcttatactgacattctcagggaaatagaaaggcccagatttgaagtcatgtcatggattaatgttttttcactctcttttatccagaggtaggtgaatgacttctggtaaccctactgattttaacatagggaacagccccaacctccaattcattgtgcaatggggaagtggtttgctgagtgggtctacacagaaaaagcaataactgtattgtgcgttatatatgtgagtcatatcccttgctccttgctcaagaagaattatatcagaaacaaatgatggaatgcctgggccaggcactgccggggcttctgagatgaataagaggcagttccagcaatcatatgacttgggggctgtgtgaggctggggagggtaaattaaaaagaaaagaaaaaacaaaaaacactcaccagtaactatgattcaaggcagaatgtggtcagaccactcttagttctcaccagagggaaaaattatttccagctagaggatcaagaaatgtcatgagagaagggtcgtgaggactggaattc

SEQ ID NO: 204555 - DNA, 1000 bp, Homo Sapiens
tcaactctgatttatgattagagacactgctgaggagggacagtggctaagtgggtgtgtgtcctttgcaggtccccactgttacctcacagaaacaaagccaggctggaagtgagcctctgtgtccctgcccaggtctctgtgacaggtcctgtacagatccttgtcccatggcctcaggtgaccagcttgaggtggggatgaggctactatggggaagggctggagctggggtgagatcctgggagcctgagaggtggagggtccttgcctgagcctcagtgctggctgcgatcagggtcagagccgaagccacgcctcctggccctgggccccactaacctgaaccacctctccatgtcccttaacaaggatgaaagctgctcattccctgtacctccttactagagatgggaaagcagagagaagggtatccctggatgccatttgtcaatgaaatcaaatacataatttatttctatggtgacagtaataataaatcgattgttgttgttggtttcctgtgtgcccaacactgttttctgcatgggatctcagggagccctcaccaccacctcctggggtagccactcttgtcattcccatcctacagagacagacactgaagtaggacagttacatggcatgcccaaagctagtcaaagggatggagccaggattaggaggcaggcctggggtggcacgactttttgacatgtagcttcacttctacctgcaaagtagaaataattatacctgccttgcaaacatcgtagtgaggattaaagtaaatgagatcactcacgtagagtgctcagcccgggtcccaggataagtgcttgctcaggagatggctgtggctgttgtttgtgtgttcatccctcccgccagactaagcaaggactgagcttggtcatctgtgcatcctcagcaccctgccccaggcctggcgtatggactgtgctcagtgtcttttgagtgaattgggtgaatggaattc

SEQ ID NO: 204556 - DNA, 1000 bp, Homo Sapiens
ttcatatctacatttatcctccaaaccgtctattgagttttatttcttctttttcctgaaggtctttttttgttatctgaatgctccttttaaaaatatatatagcaactgttactttttaatgaagcaaatatcttcaaatatatcctgagcacttagtatgtgccaggccctatccctattctaatctctgaggagacaacggagaataaaacctagtccctgtccttgcacgatttatattcttagggacaaagggaataacaaatttaaaaaaaaaagatgtatatatatatatataattggccaggtgcagtggctcacacctgtaatcccaacactttgggaggctgaggcaggcagatcacctgagttcaggagttcgagagtagcctggccaacatggtgaaaccccgtctctactaaaaatacaaaaattagccagatgtggtaatgtatgcctgtaatcctagctactggggaggctgaggcatgagaattgcttgaacccaggagactgaggttgcagtgaggtgagattgcaccactgcactccagcctgagtgacagagtgagactctgtctccaaaaaaaaaaaaaaaaaagtgtgtgtgtatatacacacgttgaatggtgttgaatacggtaaagggaaaagaggatttgatcccccctcagcatggaggtgggggaatgttattttatgtaggatagtttgggaaggcctcatggatgatgtgacattttagcagaagcctaggtgagccatgtgaaaatgtaggggaagagtgttctttgcagagggaatcttgaggtagatagatgcttgtcctgtttgaaaaccaacagggaagccagagtagctggagcagaggggagaggaggagattgggaagatacaaggttggaaaggtggcagatcaaatcacatagggccttggaggccattcctaacacttttggttaacattgttactcagagtgagtggggacaccactg

SEQ ID NO: 204557 - DNA, 1000 bp, Homo Sapiens
gaacacgaggtagtcagaaaatagaaaaagcagaacttggtgacaaaatggatacacagagtgagggaaggaggcagactcattaggagggctcccaggtttctggcttgggcagctgggtaaaaaatagtgccactgagagaatgaacagaggagaagcagatttttaggaaggaggaaggtggtaagttcagttttgtacaagctggagatgagagctgatgcctatggaatggagaaagaaattggaagccataaatatataggtggtaattaaaaccattcaaatgtgtgcccagaaagatcatgcaggccaagaagagatgaaaaacagacagtcctaaggggacacaaatatttaaagggtagacagaggagagagatgtctaaaggaaataaaacatggatggccctgcgcagtggctcatgcctgtaatcccagcactttgggagtccgagacgggcagatcacgaggtcaggagttcaagaccagcctgaccaacatggtgaaaacccatctctactaaaaatacaaaaattagctgggcttggtggcaggtgcctgtaatcccagctactaaggaggctgaggcgggagaatcacttgaacccgggaggtggaggttgcagtgagccaagattgtgctgctgcactccagcctgggcaacagagggagactctgtctcacaaaactaacaaacaaacaaacaaaccccatggacaaatggataaaaaagaacaagttgtcttagaaatcaagggaaaagagcatttcatcaagtatgtacaggatcggctatgtaggagttagctgtgtgacactgggcaagttaacctctcttagcctcagttttcttattcgtaaaatggagatagtactagtacttacatccagggttggaaggattaaatgcaatcatacatgtaaaggcttggaaacacatacacataagctacaaagaaggaagtggctaactatccaatagtgatctaaaaag

SEQ ID NO: 204558 - DNA, 1000 bp, Homo Sapiens
acatgttgtgggagagacctggtagcaggtaattgaatcaaagaagcatgtctttcctgtgctgttctcgttatagtgaatacatctcatgagatctgatggttctataagggggagttgccctgcacaagctctctcttctcttgtctgccaccatgtgagacgtgcctttcaccttccaccatgattgtgaggcctccccagccacacggagctgttagtccaataaacccctttcttttgtaaattgcccaatctcgggtgtgtctttatcagcagggtgaaaatggactaatacatcttgcctctaggctagcaagcgaggcatttatactccctcttggaccagtcattggatgtaggatgcctttgggaagggcactcgatcttggacaaagcaacactctttggctgagctggggtagtgagtgcctcagccgctgacaagggatctgcgagactatcacagcatcctccacagagtctgtctttttcgtagtgatgtgcaggcattccctatacattttatttatttatttatttatttatttttttgagatggagtttcgctcttattcccaaggctagagtgcaatggcgtaatctcggctcactgcaacctctgcctcccgggttcaagcaattcttctgcctcggcctcctgaggagctgggattacaggcgcccgccaccatgcccagctaattttttgtatttttagtagggatgggatttctctatgatggccaggctggtcttgaactcctgacttcagacgatctgcctgccttggcctcccaaagtgctgggattacaggtgtgagccaccgtgcccagacccctatgcattttaaatattagcttcttgtcagttttagacattgtgaatatcctccttcaatctatcatcagcctgttagctttctcttagtgttatttcttggaacagaattccttaattttgatgtagccaagttaataaattttcctccttaaggat

SEQ ID NO: 204559 - DNA, 1000 bp, Homo Sapiens
gtagtgaacctgaatgaatacacatgtgtaaacatttctctaggtatggaactaggagcagaattcctaagaagaaagtacattttcatttttactaagtttttgctgaattattcttcaaagttattttatcaatttacattctaccagtagtgtatgtgagttcctgttcacatcattttcaactgttgatatcaccatacttctgattttttttgcagtttgttggtattaaaagatactccatgaatataatttgtattttcttgattactaggaatgtcaagtatcttttcatctgtttattggtcagtttttccattctgtgaatcatgtttacattctgttcctgttttcctcttgattgcaacttttttaatgatttttaggctttttgagtgtggtggttataaaccctttgtcaagtatattacagatatttcccagcctgtagattgtcacttttatcatataaatatttaaaattttgatttttttctgtgaatttttttctactatttttatctaaacaaaaacttatctttaaacaaattagtccctatcctaaaatcaaaaagatattatcttattcccctgtaggatgcttaaagtctgtttttgagattcctattatataaaactatagagatttttcttgtatgttttaggataaataatatgtttgtttcttttctaatttatataagcaagatgaatattgcctgatagttcctttgttaagatagttacatggacatattttttttacacatctttagattcttagattaatgatactaaatattatttgtttttctttcccagataagaaatcatttttcagtcccactgtctgtttacgaaggggataccttattgggaactgcctcacctgaaaatgaattcaacataccattaggatcttaccggtattttgtctttatcattttatttactctaaaatctcttgtagaatttttagtttctgatttcacatgga

SEQ ID NO: 204560 - DNA, 1000 bp, Homo Sapiens
ggctctagatctgcccttggacctaggctccaggctcacctctgcagacccaatcaatacatctacctcagtggatccaggatccaagctcaatcttatgaacccaggcaccaggtcttcccacttgctaacccaggcacaaggcccactcacccaaggacaccagcagcaagtacgccaacaggccacgctagatggactgcccagaatctctggacatgctgactggtgaaggatttcccaaacaaacctagtttgcaaagactggaataagtctccacttcttaaaataagcagacaccagcaaatggccacaaagatcaagaataatcagagaaacatgtcatcaccaatggaagaaaataaaacatgagtaactgacactaaagaaatggagatatataaactgcctgataaataattcaaaataatagttgtatagcaaacttcaataaaatacagagaaataattcattgaaatcaagaaaacaataaatgaccaaaacaagaaatttaacagagattgaaattatgaaaaagtaaccaaattctggagctgaaaaatacaatgaattaaattataaaatgcaatagagagcattgacagcagaattgataaacagaagaaagaacctccaaactcaaagacaattatttgaaaatatgcaacaagaagagaaaaaggaaaaaagaatgaaaaggaatgatgaaagcttatgggatttatggaacagtatcaaaaaagcaaatgttcaagttataggagttaaagtagaagaaagagagagagaaatttatgtttatttaaagaaataataacagaaaataaattaaatctgagaaagaaatatccaggtacaggaaggtcaaaggactctgattagactcaagccaaacaagactgcaagacatattacaatcaaactgtcaaaaatcaaaaataaaaagaagacactgaaaacaggaagaggaaagaagcaaatcatctataaaggaattc

SEQ ID NO: 204561 - DNA, 1000 bp, Homo Sapiens
tttttggctttttaatcatagccatttggactggtatgagagagtatcttattgtggttttgatttgcatctctctgatagtggtgatgttcagcatttttaaaatgtttgttggctgcttgtatgtcttttgagaagtgtttccttatgacctttgcccacttttaaatggggttttgtttttttcttgttgtttttttgtttaagtcacttatacatcctggatattagttctttgttggatgcatagtttgcaaatattttgttttccaaaatgagagttaatacttcttaagactcccaaacatgagccaaagttgtcatgtataaaactcaggggaacaaagctgggtagacctgagtgaggaaggcagcagtaatatttggcaaagtagttcacaggtgagtgtgacataatcaaaatatatatctggtccctgcccctggttctgcacacagaactctttcaattaatttatttattttgagacagggtctcactctgttgcctaggctggagtacagtggtgcaatcatagttcactgcaagctcaaattcctgggttcaagtgagcctccctccttagccctcccagtagctgggactacaggtgtgccaccatgccccactatttacgtggttttttttttttttttttttgtagcaatgaggtctcgccatgttgctcaggatagtcttgaactcctggactaaagcgagccttctgccttggcttcccaaaatgctggaattatgggcatgagccattacgctgggtccacagaacttgtaaatctcttgcaatttgctgagcaataagggctctaggtgcatcttttgttctgtatttggtctctgagctcagttcctcacacagaactcctaatcccttggaatttcctgggtgatgagagcatcttttgttctaatgaagcaactcttggtgggctcctggatgggggctggtcatcagaaaggccagtccatgattagaagctt

SEQ ID NO: 204562 - DNA, 1000 bp, Homo Sapiens
aaatggtgtatgtgacttgtcagtaacttctcaaaagttagcaactttatgttaacacgccataaaatgctttccagaataaacccactggaccagaaatacttaagagcaaaggtgtgtccagtgagacttgtactttaagcactgcccaaggtgccctggcatctagtagagcaagaagatcaggtgtcagctttgcaaacattcttctctctgtttaggctaccacgtcctattgaaatctcaatgggtgcatatttgctgtgagtgattaaaacttccatggggctagacaatgaaaatagtccattaatctgcttagattatgacaaagattcttttttgtgggggttattttataggtagtcataaaacagaccaatgaacaggatgaagaaatagaaaatttgaaacagatcttaaataattattcagctcagttctcccttgaacatatgtcaccagaccaagctgacaagctgccacaactacaggtatgtttctttcattcataaaggtatgtttcatttgtccatcagtgcatttatttaatacttactaagcctttggtgtctaggagcctttctagtggtgcagtgtaacacctgtttctctgtaacaattgaaggtatttctgtgtgtgtttactttccatccctatttcataaaatagatgattatataattatcattactaaaaagtgacaaaattatagcccctgatgtttgatcaagagaagccttatctgtttgtagcctgggcagtcctaatcccagaaactgagccagggctgccgcatctccttctttaatggagggctttttaagtgcccatggcctcagcttgaagcattttgatgtgaatttgctctggtaccaaagaacctgatataacacacaggatatttggacaacctgactttctgggatagagtcaggcagtgtaggcaggctgggcttcagcagtgaagaccctgaatactattgtaatgaagaattc

SEQ ID NO: 204563 - DNA, 1000 bp, Homo Sapiens
gttcattgaagagaactaacatattaaactaaaaatgaagcacagtgttctccactcatgggagtactgttagcaggtttaagacagttactgtgagaagttcacaaggtgaaagtgtctttgataattagggcctaatcaattgggatttgacttactcaatttctccaacacatggaattgtactggtacctgaaggagaaaaatatataatagaagttgtattagtttttatgtcttgagctctctgaataactacttgattcattcagttgccaaatgtcaaaagattgtaattttgagaaagttgattctttacaattagaactaagccagggtaaacaatttgctttctttttctaagttttaggtttttctttctctcttaggaagtttagtgaaactctaggggttaggcaggttgtaactgaaattcttgaggccaaaaggtcctgtcttatgcttggtaaaccgaccccctcaacagcgtgagaaatgtagatgtactgataaccctgattgcttcgtgacataattacagacatccagccctctatcaactaaaattccgtttatttttaaggttcaaatattagaagtatctgcttgatacatctcataggttgtcaagtgtgcatacgatgagagatataatgttacttttaatttgtaagtaaacaaacacacaatattatgttctcaatgctgagtaagctgaaaagatgtatacctactgaggatgcaccaaataataagcaacagaaacctggtaatgtgcaattaggaatagttcctcttaataataataaaaaaaagattagtgtttaggttttaatggcataaagatgtaatgaaaataaaattaccaaagaagtctattttggagaaatttttgtcagactagataacaaagaaaagaacacatcctttttttatttttattttttattttattttagagatgaggtcttgctctgttgcccaggctggtgttgaattc

SEQ ID NO: 204564 - DNA, 1000 bp, Homo Sapiens
ggccgagactccagcctgggtgacagagcaagaccctgtcccaaaaaaaaaaaaaaaaaaaaaaaaggagaaagagagagaatagtgtactttattataaaggcttatggtcaacttgtgacaggctattagtattgtttcttatgttacttaagaacataagtatgctatgttactattgatttcagtgagaatttacaagtgtactattatctttaaagcaaaacctattcttaaactaagaatgctttttgttctcaaaatatcaggacatttctataagttctgggtctttagttagttagcatcattaactcagtccctcaaccataaatatcttgtgaccaaaagtgctcaaccccctgggaatgtcacccagcaggtttggctttatctggcctttattcaagatggagtcactccggttaggacaaaggatattcatgaccaagtctccagacccactaaggatgtatctagcttgacaagccacttagtatggatccaactgtaccctagaaatattttgtcagttttattttacctcaatatacatttgtacaggcaataattaaacgactattacacaacaattcagtgagtttacttgctttcaagaataatgcatgtagttacaaatgagaggcagaaacactgtattaaagacctaaaaataagaacgggtgccgtggctcacgcctgtaatcccagcactttgggaggccgaggcgggcggatcacgaggtcaggagatcaagaccatcctagctaacatggtgaaaccccgtctctactaaaaaatacaaaaatattagccgggcgtggtggcgggtgcctgtagtcccagctactcaggaggctgaggcaggagaatggcgtgaacccgggaggcggagcttgcaatgagccaagatcatgccactgcactccagcctgggcgacagagcgaagactccgtttaaaaaaaaaaaaggctaaaaatacattaattctggaattc

SEQ ID NO: 204565 - DNA, 1000 bp, Homo Sapiens
gacagacttttaaagtaattgaagaaagaaagcagcacactttatgagatcctttccactgacatattttgatcatcgatacagcatttcgaagctaatagtgctgttactacaatgtcagtgtactacaggatcaaaaggaatgatatgagacttagaactcttttcactgtgagtgcacttgattttgattttctcagaggataatacctgtagccatttttaaaaatgaataaaattagcaaaaaattaaaaagagaaaggcctatatcagaaatgcattgggctaacaaacagaaaacctgacaagagtgacccacacaagtggagagccctttttatttcatgcattaagcagtccaggtctggtgtggtggcactgtgatatcactggggtctacctcttatcttcgttctctgtcttcattagcttgcagatcttggcttgtagcatggccctcatgcttcttgcctcatggtcacaggattgcttctgcaactctaggcgtggtgtctgtgttccagggaggagaatagaatggaaagtcaaggcagaggactgaaaaacaatgccagaggaatctgtctgtcattaaaaattgcccaagaggccaactcagcagtgttcatttataactcattcatttgttgaatgaatggacagaactccatcactctatcactcccaacttcaagtgagtctagggtgactatttttagctgggcatattgttacctagaatgaggtcatggttcctttaggaagagaggaaagtagatattaggtaagcaactagcagaatctgctatagggggttgtcatttcaaaatattctatatagttagtaataggtttgaaaaaatgtttttttttcatattgaaggtgaggactctatggggatgaaagaaagcaattaacaatacaataatggggtatatttaccttctgaatttaaaatattctctgaagacattactgctggagcatggtaagaattc

SEQ ID NO: 204566 - DNA, 1000 bp, Homo Sapiens
tgtaaagacaaaaatgggctgtaggtacatgaaacttggcacattattctgaatacttctgtatgcctgcaacattagcaaagaaatcattatctttcaaggttcaggtcaagatgtccaactgctcatctacttctaactcctcctgtacttacagtaaaaggaagcaaactcaaagcccccttccttctctctaccctttttgttttcataaaaatgaattagaaatgatctagctgactttacctactcaaaagttacacatgagaaaaacgcaagttaaggctgagtctttagccatacaaaggtgagaaaaggaaatccatgtttctagactttcagtacaatgtattttctatttcatcactctccctcaaattcatattattaacacacttagtaatgaaagaagagaccatatttcatctttccatcctctacaatacttggctcactactgagtgaatacatagtatctgtgaatggttgataaggaaaatttcctttcctgggacctgaattaacatttcacagatactgtttgggaatggtattccatacctgctctaaacctaggctactcagaacatgtttgaaatattgcattccgttgtggtaacaaaatttgcaaaagaaattatacaaactgaagcatgttcataggaaactaaaagattagggaggtaaggagactagaaactaaattccttaagcaagtgttggaatagagaagaatttttagccttgcttttttttttaatagtagaaataattttaaaatttgatactaaaatagccaaatgtgtaagatggattttttaaaaaatgagacaaatatttatttcggatatagaattcataatgagattattaatttggtgagtaaaaagtgagagaagagaattctttaacagccagtggacaattcacctagaactctagtttctcattccctgatttctttaacctcaataacttcaactttttttccagccactca

SEQ ID NO: 204567 - DNA, 1000 bp, Homo Sapiens
acacacacacaccatggaatgctactcagccataaaaggaatgaaataaaggcatttgcagcaacctggatggggttggagacattttttctgagtgaagtaactcgggaatggaaaaccaaacatagtatgttccctcttataagtgggagctacgctatgaggacagaaaggcaaaataatgatataatggaatttggggactgggaggaaaggatgagaagtggtgagggataaaagattgcactttgggtacagtgtacactgctcagtttatgggtacaccacaagcttggaagtaattattaaagaacttgtccatttaaccaaacaccacctgttccccaaaaagcctattgaaataaaaaaataaaaattttttaaaaattaaaaaattccacaatccattgctattattgtttatacaatcgattttctttttattttccttttttttttttttttgaggagtcttgctgtttcccaggatggagtgcagtggtgcaatctcaactcactgcaacctctggctcctgggttcaaattattcttgtacctcatccaagtatctgggactacaggtgcacaccaccatgtctgtgtaatttttgtattttagtagagacagggtttcaccatgttgcccaggctggtctcaaattcctggcctcaagcaagccacctgctccggcctcccaaagtgctgggattatcagcatgagccactgctcagggcctcaattttcttttaaagagttttaacaaataagaaaatgaaatgtgtgtatttgttcacgtgttaccatttctagtgcttgacattgttttgtggacacccagatttccatctcatacctttttccttctgtaggaaggatgtcctttaacatttttggagcacaggtctgctggtgatgaattctttcacattttatatttttgaatgtatctttatttcacctttgttttttgaaagctaattttgcagcgtatagaattc

SEQ ID NO: 204568 - DNA, 1000 bp, Homo Sapiens
tgctgctcttgcctttgtggttgccagagtaaccataaaaatattactccacatgctgtaggaacaaaatgtcagtgcactttactattgttttaatttaaaaactaacgtgtgaaaataactccagcctgggagaaatgctctctctgccagatgattccttttggaaggagaggtacaaaatcattgtgaagaactcaggggtaggaatgatacctaggtttaggataagagcctaaactcctatgtcctatggtaaatgtcccctaaatgtttgtctggtgaatgaatgaatgaatgaatgtgacacaaactttgctgaaaaatttaggaatatataaatggtatatataaattttaaagtaaaactcttaattcctattataaattataatagaaatgctattataaactttaggatggtgagtgaagcaggttgaatagtgtgccccccaatttcatgttcttccagaacctcagaatgtgaccttatttggatatcagagtctttgcagacgtaataagttaaggatctcacagtgaaatcattctggacttcggatgggccctaatccaatgaatgatgtccttataagaagaggagactgccaggcatggaggcttatggctgtaccagcgctttgagaggccgaggtgggaggattgctcgaggccatgagttcaagaacatcctgggcaacacccccaggacacccccacctccatatctacaaaaaacttttaaaaattagcaggacatggtggcacacagctgtaatcccagctatttgggaggctaaggcaggaggattgtttgaactcaggagttcaaggctgcagtgagctatgattgcaccactgcactccagcctgggtgacagagtaagaccctgtctcaaccataacaaaaataagtttcctaaaatatagtgagtttatttgttcaaatcttttgccttaaaaaaaaagttgtcttattattattatcctagaagaattc

SEQ ID NO: 204569 - DNA, 1000 bp, Homo Sapiens
ggatcatctgtgtttgggggagacttcatggaggtgggatttgggggagccttgaagaagtgagcaagttttggataggtggaagtgaacttactggctatacccggaaaagagcaggatgggaataaaggaaaagagagcctgttttggtgaataagtttaatattgaattgtgatagtcaaaaaaataggtaggatgatgggctaggtttgggaggaggctccaaagttaagaagcgaggcttatccttgagatcatggcctttaccacaaccagcaccatcatcattatgagcagctgtgtcttgcattcttataatgtggttctgaggactttacatgtagtatcttatttaatccccaaacaaccttatggaacagataacaattgttatgtccactttatagcagaggaactgggatataaagaagtcaaccaacttccagcgggtaaggtatgtgggcaagcaggggttcagatgaactgaatcaggcagcttgctttcagagtctgttcttcaccactgtataatactgtctcttggtgcttgttgaaagcccctgttgagattaacatagtccccctcaagttctaagggagccccgcctttcaagtcagacagacctgggctcacattctggctctaccacttaccagctgtgaccttggaaattacttctctgagccttgatttgctcatttatgaaaaaggaagaatatttacctcaggttgttgggagcattaaatgtgataatatatataatcatttagcagaatgcctagcagagagtaagcaggcaggaaatgatagctgctatggcttatatttcacagatatatgtagggttataatgcagtctctgagaatgagaagcagtgagggtggacatgatttaggtagagtttacttggtagtcacctgcaatgataattagctaacggatagtgggcgctggatttcttcttctggagcatcccaggaatggactatgaattcc

SEQ ID NO: 204570 - DNA, 1000 bp, Homo Sapiens
taacaaaacaaaacaacaacaacaacaaaaagcaggcagccaggagcagtggctcatgcctgtaatgccagcactttgagagggccaaggcaggaggaactgctcgagcccaggagtttgagatcagcctgggcaacagagcaagacccagtctctacaaaaaataaaaatgtaagaattagccagacatggtggtgagcccctgaagtcttagctacttgggaggctgaggcaggaggatcacctgagtccaggggttcaagactgctatgtgctatgattgcaccacttgcactccagcctgtgccatagagtgagaccctgtctctaaaataaataaaaatagaaataacaaattgttcttcatgataatgatcattttaggaagtcttgtgtcctatggaaaaaaaaaaaacacattttgctggtcttttccagaaaggccattctccaaataaaacataccataaaatatctcaatgactcatttatatctttgaggttgtaaccaagttattacatttcacattctacttgaccaaagatgcatttgttgaggccagaaatagacgccagagtgtaagaccagactttttaccccaatcctatttcctctcagatttgtgtaataagcttacttttgatatgaatctctggagggaaaattctccagaaaagatgctggaaggtggttgagagtgctaatgaggatgaaaagaaagaagtgaataaagtctgtttttcagttgtctttatctgacccttttgctcttagcctactggggctctgatttccaggaccgaagtaaagattagccattgtactgcaaatattggcccattgttattagggagaattgaaattaaatttgtaatgataatgatggaagggggaaatggtgaacttttagggatacatgtacacggtgacataaccatctcttacagtgagagaaatacaaactcagaagagagggaaaatgggcatttcaatgaattc

SEQ ID NO: 204571 - DNA, 1000 bp, Homo Sapiens
atgggagaaaacatttgcaaactatgcatttgaaaaaggtctaatatccagcatctataaggaaattaaatttacaaaagaaaaaataaacaacgccattaaaaagtgggcaaaggatatgaacagttctgcctaattttaatgcctatattctttgcatactcattatcatttattcaccatttattgagaatctactatgtattctatgttaagctaagcatcagacatagaaatatgaacaaaacttaggcattgggactattgttaaacaaaatcagcataaaaccagggaagttttatgtcagcctcagagtataaaaaagatagtatcatagtgagtaaggcagcaataattttactagctccaaaccccaacatacgtggacttataaagcttgatgtaaatcttgatttaggtaaagagctgtaaggcctggagtaacttactctcttaacctcaccttttgctcatctgtaaaagtggatttacctcaaaaaggttattctgaattccaaatgaattaacctatacaacaaaacactggccattatagtagttgctcattctacgcaaactcttatcttcaaatacattctaagtttagttgccatcctcagaaatatacaaggcctatcttcttcatttaaaatataaaattaggccgggcacagtggctcatggctataatcccagcactttgggaggccgaggtgggtgcatcagttgaagtcaggagttcgagaccagcctggccaagatgatgaaaatctgtctttactaaaaatacaaaaattagcctggcatggtggtgggcacctgtaatcctagctacttgagaggctgaggcaggagaattgcgtgaacctggtgaagggaggctgcagtgagctgagatcacgccactgcactccagcctgggcgacagagagagaatccatctcaaaaaataaaaaacaaaataaattaaaataaacaattacctgatatctagaattc

SEQ ID NO: 204572 - DNA, 1000 bp, Homo Sapiens
acattctatattcaaatgcaagagtataagtcaggattttacattcactaagatgatcagaagacataaacaaggcaataatgcgcatctcaaatgtgatcctatcatgaagataataagaagatgagtatgaaggaccccttaagaaaaggacaactttcctatcctgttcatttaggagcactaggtaatgcaattcactgaatgaatgactaacgtgacttctcaacctcaataggcttggggtgaggagattgaagcataaaaacccaagggcaaatgtggacatcttcctagagcgctggtttaacttagggagggtgaatggtaatatgacttggcaaattacccttctatgaaaacaatgacatatgacagagtggaatgcaatgtttacatgaactttttgaataaacaggctaggtgcagaggctcacctttgtaatcagtactttggaaggccaagatgggaggattgcttgaagccaggagttcaagaccagcctgggcaataaaatgagaccctgtttctacaaaaaaaaaaaaaaaaaaaagccaagcatggtggtgcacacctgtagtcacagctacttgggaggctgaggcgggaggattgcttgagcccaggagttcgaggctgcagtgagctatgatcacaccactgcactccagcctgggcaacagaatgagaccctatctctaataaataataaattaataaattaaataaatatttccaaagaaatttcaagcttgctacagttagtagcagatagaaatccactatccttcagcagtttttcaaaaagtccaggtagtgcaggaaagggacaggaatactacttacagagaatggacatgctcaaactttatggagacagtgcttccacgcacaggcaaacttagagatctttatgggattctaatgccagagggcaggaccaacattctttagatcactgaagtcactctgaagagaaggctgccaagaagagggaaa

SEQ ID NO: 204573 - DNA, 1000 bp, Homo Sapiens
gaatttgaaatctgaaggcttttaagatgaccataaagcagtaataatgaatgctctttgtttttagtgtagctaaaatctctccctaaaacttcacctctactatacaaatgggtcagaaactccctcaatttccacaaactgaaacgtatacatctacataaaattgtaccaaccctttcctgctttcctttttccctaaggccagtttctcctgctgtgctctggattccaccccacctgtcttctctcttgcatgttcaattcctgctcctcctggccccccatactggatccttcctatcagctttcaaacatattcagttccataaagatactccctaaccccacttcctccttttgctgccaccctatctctgtcctcccctccacagacaaacataaagagtgtgtctactctctgccttctttttctcactacacttttttttttttatttatttttatttttgagacagagtcttgctctgccaccgaggctggagtgcagtggtgtgatctcagttcactgtaatctctgcctccaggattcaagcagttctcctgcctcagcctcccaagtagctgcaattacaggcatgcaccaccactgcaattacaggcgtgtgccaccacacccggcttatttttgtatttttagtagagacggggtttcaccatgttggccaggctcatctcaaacttctgacctcgtgatccatcctccttggcctcccaaagtgctgggattacaggcgtgagccaccgcgcctggcccacatttctttttaaactcactttgatctaacttccatttccacttgcctgaactgactgtcactaagatggccacatggtctccaggttgttaaatcccatggatatttagtcctcagcttacctgacctttcagcaccctccttgattaccttctaccattctttcttagtttcttttgccaacttttcctcctctcttcagcctttaattgttggaattc

SEQ ID NO: 204574 - DNA, 1000 bp, Homo Sapiens
gccaataacagcttaattactcactgtcctgaggctgcgtgctctgatccagagatagattctagcagtgggttttaggtacgtttctcagtatcagtcagtacctgggagaaacttaggattcttatttctctcccccttgcttccacgtggcccatatagacactttattactaatcaagggtgagttgggtggcaagtaataacactgcccatcccacatgcttttcttacaatgtaagcttaactcaccagccatggaatgatggtgtctgtcccctctcattcagtctggctggatctttgcgactgccctgattaacggagtacaatgagaaggacatgattttacttccaaggctagcatgcgaaaggtgatatggcttcagcctggttctcttgggatgatcactcttagaagaaatttgaagaagcccaaatagccacatggagaagccacaaacagatattctggctggcagcccagcagaggtcccagccagcagccagcatcaactgccatgtgaagaagtgtgcctgcagggggtttcagaccccagctgccaagctgcttccagcctcccggtcttccaagctgaggatgcagacagtgtggagcagagataagccaccctacagtgctgttctcagatccctggctcgcagaactcaagagcactataaaacagttgctattttacattgccaagtttggcattgcttgtggcatcaaggacaggaaattccaagctctcggtcaatggttagtcatattgtcctgggtttgttttcagagaaagcacatgacagagtggccccttttctctcttacctctccagtgactgcaacgagaagtgccaagggccagacaggctttctctctgaaagttctcttttcctaatacagcaaccaggcttggctggttctgcactgagcacttcagacaagcagggtcccttgtgctgtgactccatttcctcctgctattgtaggaattc

SEQ ID NO: 204575 - DNA, 1000 bp, Homo Sapiens
agggattgggtgcagccctgggactggggacaaaggagcagagctggcagttgcaggcttctgatacaatcagtagcagagccagactagtctctcatctttccctccctccaaatattgacactttcttcccaaatgctgccagcctagggatcatggccacaagtcccggcagaaggccatgatgtgacagctgtcttgaggatggggagtagggagccctcagcctcacatgacttcctaacacatgcgccccagagatggtcaagaccagtgttgtgtatggcaactatcagccacatttggctattgagctcttgaaatatgactagtcttgaaaagtgactagttggaattaagagtgctataggcatagaagacccacaggttacccagacttagtgtgaaagaatgtaagatacctcattagtaattttttgtattgattacatgttgaaatgacaatatttttgatatattacattaaaaatatttcgtccaaattaatttcatatattctttttctgatgtgattactagaacattttgaattacgtatttggcttacatttgtgccttgcattatatttcttttggactgtgacgggctgttcagtacagtagataatagtcacctttggttacttaaacttgcattaattcaaattaaataaaattaaaaggcagttccttaactgtactagccacatttcaaggctcagtagccacatgaagttagtggctaccatatttgacaatgcagatacagaacatttcatcattgcagagagttctatggaactgtgctgctctagagaatctgttgctgggagctggcgggcacagtggatttcctgtttgggatctggactcccagtatatggacccagccattagttagattgtgagtctgagtgggattctgaagggagccaggcatttcccctttgggaaatcacctcagggctttggcactggcagctgcccctgccttgaattc

SEQ ID NO: 204576 - DNA, 1000 bp, Homo Sapiens
ggtggtgattaatattttaggaagtaactagagccggcatttgggggtgttgcggacgattcttacgaatccagacaatttgctcttttaaacgcggccttgcggttgtctaacagtgagaatagatgactaactgaatttgtcagactccctgccttctgtcataataacgacgcagaattgccaccgttatgtgtcttggaaatcttaaattctttagctctcacacacaaaaaattgaacggaagatacttggagagccagggtccattcagcacagcgcggctgggtcggcttccattcctgggtccgcagcgccctcgtgtggtaggtgcccagccttcctggctgcatctcaggccagggtacccattgatccttacttcccagtacagtagctgccttcctgggtcacaccccatcggaggtcacgatctaccaggaggttagccacccgctgtggttgtcttgtagttcttcgcaataagttactggctaggagtgcttgtaataagtcctgagtaggacatggcgattccattccttacacatgttgtgtacacgcagttatcctcaactggttggttggaccgtggcgtttatttccacaaagcagcagtttcctaaaggatggtttagaacccagtgcatccatggagacctccttactttagtctctagctgtggtcatgccctgtaggagatttctgagttttgaagacccggttaggtactggagaatcatttgcatttgctgaagcaccactataggcccgggagggggttggaggggctggcttgccactgaaggaggaccagacatggcctggtcatcagcggcagagggagaaaagttatggggctagtccctaccccctgccctgctctgcctcctgcagagacttcagacctcttatgcctcctgcccaagcgaagcagccaggggagtaggaataggtttctttagttcctaagtcaagacgattgtttctccgaattc

SEQ ID NO: 204577 - DNA, 1000 bp, Homo Sapiens
gctcagttgaggaaccctggctgagaaacccctgcctgaagagatgcaaacagcattttatatttgaggcaaatgctctagactattctctccctccccccaatctcctgcgccctgaaaggaaacaaactgatgtcatgagaaattcctttctaataacaaaaacaaatgggaggtctcccgggattgttcctatggagagacagtggttgtgtaagaatgagaaaacagtgactcctgctcagggttctggttaagtagcaggtagaatttttccaacatcattttgaatcaagagaggcaccgaaatcactgtagtaaaatcttcgagtgggaaaaatataaagaaaacaaaatccaactaaggccgtttttccccaggaaaggcattagtcaggcagccgctggagccagccacctctcaagagcctgtttttcagtgtcactgcggtgactctccatgctctgggttttaattctagcctctaatctcagtcgcttctgtgataaattaattgtaataatagaggccccagttacgaggtctgcaccgtttgcttgtaatgtgagcgacaggtttagggcctgctttatttaagatgctggggtaattacatgggagttagcatatgcaggcagagatatgattcattcttccagccacaagcatgacacagctgtttgcgggataaaataggggaaccgtgttgttacaaaatgttccccttattatacctcattaaaaacaaggctgtgataagtcaggactggcaatgaagaaaatctattgcccctctgtaaaacctgataggagagggcttagagctatgctgtgtcattttattttttatttatttttacttttttatttttttgtcctttctctgactcttttctccctattattcagcaactctctgaatacttggggaaggaacagtctcccagaccgtcttcctttcttcttatgaaataggggctgccctttccttgcttagct

SEQ ID NO: 204578 - DNA, 1000 bp, Homo Sapiens
ctgccaaaaaggacagggcagaaacagaagccagttatttcggagtgtttttcagggcaatttaatgtgggcatcgtggtaggattcaaagatcttaacagtctagtaacagcaacacacacataagaagttcacaagaacgaacaaaatatgtgccgggctgcttatgtgagagcccagggaagtagcagtaagtagaatgcacgtttccagtagaaataatctgaggcatggtgagcactgtagtctccttagacctctggtttagccatcctgcatgtgaaatgtcttcacacacttccctgagaatgacaccctctgttgttaaacacaattttcacaggaaatttgagttctgagttcacatacatagatttctaaagtcatctgggagctgagaactgcctctgtgcatgtatctatatactggattcagtctacatatacagtcagtaataaccctactgactctggaaagattgtatgctcagaggtttccacttgctctatgtccccagaaggtgtggcatctactggcttgaggagaatgaccattccaattcctcccttggggactcctagctcatgaagctccctcagagaaaaaaatccctgtctatccaactgtgcagtagctggaggttagaacacttgcacattggccccagctaaatgctttggactctattggattgccaaccatcctcccggagagatttccaggagcagtctcacctcacctaatatccaaggtccccttgatcactatcaaaagtccatgtttcccagacacttactatgctttctttttcatttccttgagatggagtctcactgtgtgacccaggctggagtgcagtggtgcaaactcagctcagtgtaacctctgcctcctgggtttaggcgattcttgtgcctcagcctccccagtagctgagattacatgtatgcaccaccacgcctggctaatttttgtatttttagtagagatggggttttg

SEQ ID NO: 204579 - DNA, 1000 bp, Homo Sapiens
aaaaagacctcgcaaaaaccccattcagaggtcagcaacctcaaagatcagaggtagataagcccacaaagatgagaaagaatcaatgaaaaaatggctgaaaactgaaaaagccagagagcctcttgtcctccaaatgattgcaacatctctccagcaaaggcagagaactgggctgaggctgagatggataaattgacagaagtagcttcagaaggtgggtaatcaaaaaattcactgagctaaaggaatatgttctagcccaatgcaaagaagctaagaatcatgataaaatattacaggagctaaaatattacaggagctgataaccagaatagccagtttatagaggaacataaatgacctgatggagctgaaaaacagaacatgagaacttcacaatgcacttacaagtatcaatagctaaacagaccaaacagagaaacaaatctcagagcttgatggctatctttttgaaataatacagggtgacaagaatagaggggaaaaaatgaaaaggaatgaacaaaacctgtgagaaatatgagattatataaaaaaaaaccaaacctacaactgattggggtgcctggaagagatgaggagaatggaaccaagtctgaaaacaaacttcaggatatcatccaggagaaattccccaacctagtgagacaggaaaacattcaaattcaggaaatccagataactccatgagaagatcaacttcaagacgtataatcatcagattctccaagtttgaaatgaaagaaaaaatgttaaggccagagagaagggccaggtcatctacaaagggaagcccatcagacaaagagcagacctctcagtggaaaccctacaagtcggaagagattggcagccaatattcaacattcttaaagaaaagaatttccaaccaagaatttcatatcctgccaaactaagcttcataagcaaaggagaaataagatcgttttcggacaagcaaatgctgaaggaattc

SEQ ID NO: 204580 - DNA, 1000 bp, Homo Sapiens
agggcaagggcacctcccctgcaatatcccaggccgcagaactcagctatccgaaagcggcaagtttgcaatggcaaactattcttggctccaacctgctcgctgctgctaatttcatgcccctgtgatccaggtaacgctctgctgccttgagctgccacccccaggcttgaatcgcttttcctcgcccgcccggtaggagcccagctgcctctgctgctgcttcctggaggtgggggctgcacaaagctgcctcgcagaagccactcagcagcacggacactgagtctgccgcagctcgtgactaatttgctgcacttatttcaaagtgcccaaatggcattcagggaagagaaagcttaaccagggtctgccagagataaacgggctcatttcggggcctccctgcccgaagaaacctctttacctggactctgagcctggaattgaattcttccagaagagacccttagcacggagcctctcagtgtggcggaggagaggaaatgtggcccgtcataaaatgggcctcacatctggccagctggctctggtgggcttttaaattgtgtttgaagagcatctctcccctttcctggtgttcgcaaactgggtcagtgtagcaaatggaaatgagtttccttctcaccatagcgagcaactcaagtgcccccctgcccaggccagcagtggctcatccacattcacccaccatatgggggtaccctggcgcctggcacccctgggccagggcctgtccacagtctgggtgaggaacccccatgcccaccctgggccagtctgggtgaggcccccatgcccactctggggctctttgcaggggttgcagagtaaggcgagagcttggaagcctgccccatgctgcccacccacagacactctttaacatggtctttgcttagctgccaaccatgtccgtcaattttgggtaactgacagaggtgggggcttttctcttaatctttttcttttcttttct

SEQ ID NO: 204581 - DNA, 1000 bp, Homo Sapiens
caaaagaaaaaataaaataaaatgtttagcaggtaatgcacgcacctgaacaaaattcaagtggttaaagggggtgtacagtaaaaaagaagtgtccttcccactcctatgccctaatcaccaagctgcaaccagagttagaaatattccttcaaagatagtctgtacatacacatgcatattatcttatgtacatagcacatacatacaatttttaaatgcgctgatggcctgctttaccaattcttcagcaccttgcttttttaatttaataatttatcatggagattgtttcaaatgggtacttacaagtgagggttatatcattttttttcccttttagagacagggtgttgctctgtcacccaggctagagtacagtggtgcgatcacagctcactgtaacctcaaattcctgggcttaagcattcctccttagtgccttagctagcaatgcactaagcacatacagaggatgctctgctgttatctcttcaatatgtgactctctaaccatacccattcttgatggtttaaaatcttgttgggttattgaattaaaggcaaaagttaatatgttatatcaataagtaactttaaaaatcttgttgcattgtctaaaacatgctgttttgctttagagcacagatagctataaacaatatattgaaattcataaaaatacatgattgttgaaataattatgtaatttgattctgagtatgtaaattattacttgaattcaatcaaaccatctgttttaaataataattgttttcctcattcggcatggcaaaagtgttccccaaatgttcatgattaaccagttgaattgaaaactaatcttaaagttatatttccttgagttacataattaaaataactaaattactgttttcagatacactaaaaatctgaaaaactactcaaagtagtatacctgaattgtaaaagaaacaaaaagataattataaaaaatgattcatactttttaaaaaca

SEQ ID NO: 204582 - DNA, 1000 bp, Homo Sapiens
ggaggttccaagaaaagagagttgagaaagatggaagaaggagaagttgatcagggaaggggaaacaagagagctgagctctcaggcaccatctgctcagattccagtccaaaagatccttgggcattgatggaagtgtctgctgcagcacccaggactaagtgaaccacattgcccacagtaccaaggcaatcaccttctattctttgataagcttacttccaccccaaaacctgatcttgcttaaccaaatccacttattccaatcactcatagttgcataaggaaagaagacttacattaggctttgcttaatgtagttcctttgttatgagtcatggcactaattaaacctaagaatttttaaaatatgaattcatgtagtgtgaagcaagccatttcaaatgttattctcagggatagttaatcatttacatgtgaagtctacagatgaaacaaatgacttgagtcgtttagagggagtaattgcaacaaaagtgcctcatcgtgatcaaagtgatacctctttttaatcattagtatcccttggtaagacacttaaggattctcaaccctcagttctctcatcttaaaaattagtccagttaatctctaaataattctttaattttaaaatttatgaaataaccaaaatatgaacagtagtctttaggaactgggacaattgaaaaacatattttatattttctacaattttaaactttttctactggacaaatattactcttctaacaggaaaatctacctttatttgaatccatggtagtgattccgtggccagaaaaatatcccccagtccaagaatacatcttgacatcattgactattttcctaaagttttgaaaattctaagtgtatttatacttaaaaaaaaaacactacaaaaaccaaatacttggtgctggcctgatacttcattttttagtttattccattgaggcttatttgatcattaggattctttgtccatttccagagc

SEQ ID NO: 204583 - DNA, 1000 bp, Homo Sapiens
atcattatcacacaaagtcacacaatgtttataacaatgttagggttcatttttggtaatgagcattttatgggctttgataaatgtataatgacgtgtatccatcatgatagtatcatacagaataatttcactgtcctcagaaacaggtattttagtgctatttatcataggaaaattttaaaacaatctaaacatagaacattgggtgatagggtacatattttattatatgatataatactatgcagccattaaaaggacacttaacagaatatctggtaacatgagaacaccttttaaatatgttattaaatgaaaaaggaattaggttgtgaaatatacaatacaatatcagtttttatacacatacatgcatacatacaaacatagtttagacaaaagactggaaatgtatacatcaaagtgtaaaagactattacaataagtctgtaataaatagttccactaaaaatgttttggtgttttggattactttaagagagaatctaaaagtgggatgactgaattaaagggaatgacagcttcatccttatgtttacttagtattttttattttctttccaattggattgtatattccttgacgataagtccaaatcttattcgtggatgagttatcttcatcactgaaaaagtagcttgtgtgtcgtagatataagggccattgcttcaactttcccgaggttggctccacttctccatagaggtaattgacaatttatatctctattattggtgtctggtctataatagatgctcaaaacctgttgaatgaatgaatgatcctagcttaagacttcgttcaactgtgtttactgtgatcaggaccatgagcctatgccccttctcttcaacttgattgcttctaggagccaggtggatacgttgagcctggtaaaactttaggggatgggctatttctttaaatttcctctcttgatgtttgcctgagttagacaatcatcgccatgaattc

SEQ ID NO: 204584 - DNA, 1000 bp, Homo Sapiens
ccccagtggaaagaacggaattgtaaacagtcatctctgtggtataacagtagatttttggcttctatggagtggggatggtaaaaatgtggatattgcaaaacataattactggcctggaaattttccttctgtgggcagatggtatgatcaagagcaaagacagacatgtcctttcacaaaccaagggcgatggttacacagtagtcttaggtagcagccactataatatacagctttaaataaaagtcagtgatgtatgttaaaagtgcttccttgaatccagacagctcaagtgaaacactttttgaggacattgggctcaaatctcactacaaacacacggcatgaaacagagtagatgtatcaggtttgcctatgtcctaaaacaactgaatcctagacatccccatatttcagagaaagagtttaaaaagaaagaaaacagcacccaaattgagagcagaacttgggcataatgaccttggaataacatttattttctgcctccagttttctgaaaacagctttcaactgcaaaaatattttttgaagttgcctattagagaaatctgtcctgaagcttatattacagtttcattattgctgtaatgccaaccggtatatggtatctcaaggtgcatgtttgtttatatcgatctcatgtacaactgctacactccccagcccttattcaaaaatagagcattttcctgagtattagatgagacacgctgtggagttcaattaataattttttttctaaatacaaaatggtttttttttcaagcactaagccaagtaacacatggaaaataaccttttatgttttgtagaaaacagttcccatttggtaatgcacactgcaagttgaaagatggcactctggctttcccaattgcttcaaaaagacaccctatttcttatttattgttgctgtttggcaaagctcagattcctaaaagaaggaggaagataatttcctaaagaaattgaattc

SEQ ID NO: 204585 - DNA, 1000 bp, Homo Sapiens
tgcctgcctctgtagactccacctctgggggcagggcatagccaaacaaaaggcagcagaaaactctgcagacttaactgtccctgtgtgacagctttgaagagagtagtggttctcccagcacgcagcttgagatctgagaacggacagactgcctcctcaagtgggtccctgacccccgagtagcctaactgagaggtaccccccagtaggggcagactgacctctcacaaggccaggcacccctctgagacaaaacttccagaggaacgatcaggcagcaacattcactgttcaccaatgttttattcttaagcttattatcaataatatgccttatatttatttagcattttatactttacataacacttccacattccatgaatcatttaatcaccacctcaattctgtaaggtaggtggcttttcagtttttacgaatgatgaaactgagactcagatactaaaacagggctttgagttcaggtctccaaactttggctttccatagtaatagctgtcttattagaacattgcacatttgtagcaattaaaaattgaagcaaataaaatactctccaattgcagaatttctgatatcacttgtctacagtgagctgtttttctctgtttaaccatgtcattttttccatgatcacaggctcacaggcagtagaaagaaatgacagattactaggatgaaagcatgggggtagggaacataccatttaatttaggggaaaataactctatgtacttcaatagtctcttaagtttactacaaagaattatgtaatggttaaggcaatgtagtatggtggaaggaatatggtctttggaatcctgcagacatggaatttgaaccctatctatcctagatatgccacttaccagctatgtgactttgggtaaagtaattgaacttctcctgagtttcattttcttcatctgtaattagcgctattactacctgtttcatgggactgttgtgagaattc

SEQ ID NO: 204586 - DNA, 1000 bp, Homo Sapiens
tagctctgaatgtttttgatatagtggtagacattagagatcattataaatctttgttttcaagattaagaatgcaggacatagagaaattgagttgcacctcatggacccacaactatttagttggtccctgaaaggagcatggacacaggcccccccattcattgttctttccatgtcaaatgactatttctgaaagagaaaacaagaacacctgtctcatttttaaaacttataacatccatgcacatgcttcaaggagtataccaaaaactggtttgagtctaacaaagaactgaaaagcagttatgaatctaatctatttcagttattatcattcattatttaacaatgaatttttcctcctcactttttcttaaatcatggcttttaatgcttgtaacaggttccaaccagcaagcatttaacctgattgtaacctggataaattggattatatagtagcttaaaaatcttgcttgttacttacctgtatctgggtttaaaatgtgaaaaataaattaaaattggagccttttgggcctccttaattcaatagatttagacagaaaaatccaatattcagagcgatgttcatatttcaagagaatcaatttttaaaaagttaagaaaagaagtgcccttctgagccagtgatggattggaatactgcaaaaatcacacgcaaaaaggttgtggtggctgatggtagccaggcatgtagtatttgctttctttcagtaaaagtagctgaggtaaaaagaaaaaaggaccttatgctttgatgagacattaaaaaatgattgagcatgcttacagctgtatctcagtggtattatgtaaattaagctatagcaaagaatctgttttctaatgtttctgctattaaaggatatacacaatagctctacaataaatacaaacagcttaacagtatatgaagtattcacaagatgtaaggcttatttggcggggaagacatcataatggacttgaattc

SEQ ID NO: 204587 - DNA, 1000 bp, Homo Sapiens
cgcttgcattcccgcagctcctcagcctagccgctgaggactgaccgggcccagggcccccggccccatctgccatcactgcattggagcccagggtaactctgcgagtagcaggtaagccgatctctttttaaattgatagcggggccacctactcagctttgcctgaattttcaggacccactcatccctctcaggtctcagttgtgggggctgatggactcatcttgcgtccacgcgccaccagaccccttacttgctctctgtttgatactgttttcccacactctttccttatcatgcctcgttgccctacccccatcctaggccaaattcaaagccaaattcaaattcaaattttggccaaattcaaagcttctatcacctttttctccctccctcaaccggagtccctcctactcctctatgcgagtccagcccctgacccctctccccagtacccacttcccacctcttttgtaaacccaatagggtgggacaccaccaccccttccctagctactcaccacgaccccatcaaaatccagttaaaagacctctctaaatttcccagcatccccaaaaaccctatctccctaacccaccaaaaaggcttacagcccatcacaaacaagctctgttcacgccgtcttcttaggccaacacgttcttcatataacaccaccatcctcctggttaaaaaatcagacggctcataccgactcctgcaagacctccgagccatcagtcaggctgtctttcctattcatcccatagtccctaacccctctacacttctctgtctcattccctccaacaccacctgctacactgctattgacctaaaagatgactttttttactattcccctgcaccctgattcccaaaacctctttgctttcacctggaccgaccttgacaccctccagtcacaacaactaacctggactgtcctccctcaaggcttcagagataaccctcacttctttggacaagctt

SEQ ID NO: 204588 - DNA, 1000 bp, Homo Sapiens
gctgcatctttagaagcacattgctggttatgtaagatgttctatctgaggaagtgtgctgaagtgtgacgactactaataataagcagaaagcacgtggtgttgatggggatgttgtcaatgctgatggcagcagcgggcacttgctgggcatcaaaccctgttctgagtccttggaatgactttccataaacaaacccatctcccatgtcaccacatgcccctcagccctgggcagtgactcctgttagggtgatcatctcatccaggtttgtctgtgactttcccacttgtagcactggaagtcccaagacccaggaaacccctcaatcccaggcaaatcaggagagttggtcactctactccatatccacaatccattttatctatttatttgttatttttgcctttaaatttatatcctagaaaaatactttaaaagctgctagacatgtccagctgaaagaacattcttcaaagattaaaaaaaaaaaaattctaagaggctgaatagttgcacaaaaccccaaaagaggaaccggtttcaacatctttctttgttctcttaaatttgaccatgatttcatcatttgtcatgagtttgactcttgtgattcagcgatgatggaatgtatcctacagtcttttggttaagttttttttttttttttttttttttgagacagagtcttgctctgttgcccaggctggagtgcagtggcactatctcggctcactgcaagctccacctcctgggttcacgccattctcctgccttagcctcccgagtagctgggactacaggcacctgccactatgcccggctaattttttttgtatttttagtagagatggggtttcactgtattagccaggatggtcttgatctcctgacctcgtgatccgcccgcctcggcctcccaaagtgctgggattacaggtgtgagccacctgcctggccagttaagttcttgttagtacagatagacccattatcttt

SEQ ID NO: 204589 - DNA, 1000 bp, Homo Sapiens
ttcccgataagttgccattggctttttcatcacctttagtacctacccacttttgctgggataacactacccaagataaattcaaaaaaattgtcctaagtgttagtgtgtttctgttttggttgaagtctattattgctatatggttttctactgtttctacttgatggaagactattaagggttaagtaggctggcctaggaagctgaccaccatttataacatacttttgagtgggaaaatgcattcagaggcctgtaatcaatacttaggtggactttgggaatatagtatttattttatgagtgactagaatattggtagaaccatagaaactttgaatgtggagctggaaagcctcctccttcccccactgagatcaattgattaacaagctaggttgtagaaaccaagtgaaagaggcaaaaacttggccaagggcatgtagtcggggacttctgaagattctgctgggctgggggcaggaaaggggtcacagacggtcttagggttgtctcactcagcaactcactgtgttggccttgggaaatgtaagtcactgtgttgggctgtaatggaaatattgagaaagcagctcagctagtggcgtggggagaggttgtctagtcctctggcttatctgtaaattcctggcatgtgcttgttggagcagaatgaatggggctgctgtgttttacctgcagctaggagcatggctggagtggtggagacactccctgtggtctgttctaaaaatagcagtgggaacagagctgaggggaagaggagggggctccttcgggagctgggtggggaggcctcacccccttcctcttcctgccaggcccgatgtgaggaagtcccatggagtcacataattccatctgggagagtcctggagccatcagccctcacaccccctcctcatacaggcgaggaggccctggaggcccggagagcagaaagcactggctggtgtcaagcaagcccagagagaag

SEQ ID NO: 204590 - DNA, 1000 bp, Homo Sapiens
actcctggcctcaagcactttccttttggttcatggaaatgttcattttgtttgggagcctgaggtttgtctttgtttcccttcatttgtttctgtggttgtcttgtgtggagcagaggtggcctctgcaagcatcatcttagtgacagatgaccaggtgtaccctgaactgcagccacgcaggtgcatttagagcatgagagaggtgggtgggcacagaagcccccttcatgccaagccttagggagttcgtcctgagggcactggggagccacagcaaggttgaagctgaagaagggtagaatcggattagagggttttcatttgtgtattttaatgctgcttagtacagaaggggcatagattgagaagaagatagtttgcaaacttgtcaggagggtctccagattatgtgaaataacagaagtctgtacctcgggagtggcaggagggatggagtgggtgaggtgcccacttggtaagagcttggtaactggaggtgacgcctgggcatcccatttcctaagttggggcacggctggcagagctgggggagttgggcgttgggtcgtgtagatgtcacctctgtacatttcacaggggcatctaggctcaggagagaggtgtgggctggagattcaggtttgttgctgtccagctctgcaacagtgaccgtagccataggttgagagtggggtcatccatggggaattggaaaggagaaaagggccatagatggaaagagcctgcgtggggagaagcagaggaggaggaggaagtggtccacgggctggcagcacctcccccacacagcaggcagaaggcaggcgggagtgccccaggtcagcacctcagggctgtgtgccttgctgaggtacgtgtgttgagttggggagtggggtgcagaggggagatggctctggaagtgggttggggagggcgtggcgtttcttccctgagcggacatgtagcacttatttattttactgggtctgaattc

SEQ ID NO: 204591 - DNA, 1000 bp, Homo Sapiens
ccccaatgttttcttgtagtagtttcatagtttcaggtcttagatttaagtctttaatccatttttatctgatttttgtatatggctagagataggggtctagtttcatttcttctgcatatggatatccagtttcctagcatccatttattgaaaaaactgtcttttccccagtgtatgttcttggcacctttgtaacaaatgagttcagtgtacgtgtgtggatttgtttctaggttttctattctgttccattggtctgtgtgtctattttatgacagtaccatgctattttggttactatagctctgtagtataatgtgaagtcaagtaataactccagttttgttctttttgcttaggatagctttggttattccaggtcttttgtggtttcacatagcaaaaaacaattttagaattgtgttttctatttctgtgaagaatgtcattggtattttgatagggattacattgaatctgtagattgagtagtatgaatattttaacaatattgatttttccaatccatgaacatggaatatctttccattttttggtgtcttcttcaatttctttcatcagtgttttatagttttcattatagagatctttcactttcttggttaactcctaggtatttaattttatttgtggccattgtaaatgggattactttttaaatttattttttagattgttcactgttcgcatatacaattgctactgaatttttttttttttttttttttttttttggtggagtctcactgttgttgccctggctggagttgcagtggcacgatcttagctcactgcaacctctgcctcctgggttcaagcgattctcctgcctcagcttcccaagtagctgggattactggtgcccaccatcacgcctgggtaatttttgtatttttagtagaggtagagtttcaccatgttggccaggcttgtctcaaactcctgaccttaggtgatctgcctgcctcagcctccc

SEQ ID NO: 204592 - DNA, 1000 bp, Homo Sapiens
gcaggagaatcgcttgaacccaggatggaggttgcagtgagccaagatcacaccactgcattccagtctgggcaacagagtgagactctgtctcaattaaaaaaaaaaaaaaaaaaggcatagtgcttagaacatatcaggctaggtattatctaaatggattacctgatacactgatgggcttagtcgcacttccttgggaagcagtggcctggacaggatctgtggtatggtaacctgtacgggaagatctggaaatcgcaccccattttgagatgatgggtccatcactaaagggaattattggatcttcttcttttgtccttctctgggtttcaaataaatgtactcttctcttaacatcaccactgtccaggtcctatgtaaaccaaagaaaatcaataaaaggactgttggcaattacttcagctagtaaatatatgctatcaaaagacatgtaattaggttttttggttaatttaaaactagctctagactcaacgataatccaacaaactaccagtaaaccaccaatgttcaaataacttaaatattaaatataatttatttcagacttacctaaatataaccctgctgctactgagttataaggcaacaatatgaatgaatgaatagaaaacattcattctacaacatgagtgaacatgcatcatctctcacctccaacccctgcaaccccagcaaaatcataccattaacacagcatttgaattagcaatgacatctttgggctctgaatcaatggcatttatacaggagcctatggtgccacaagaccagggagaataatgggaaagatgatcttcttcaaattttgtaccactcacactctctgagaactggttaaaaaaaaataaataaagccaattagtaagaagcttaaatttacaagcttgtaactaatataaagtaactattatagaattcagaggacttcatagcaaacaattatactttttcaataactaatataaaaaac

SEQ ID NO: 204593 - DNA, 1000 bp, Homo Sapiens
ccctgactgcaggcatgcgccaccatgtctgggtaatttttaaatgtttagtagcattgaaatctcactatgttgtctgggctggtgacaaactcctgggctcaagcaatcctcctgcctcagcctcccaaagttctgggattataggcgtgagccaccacgtccagccctaagtggtcattttaggtcataaactccataagggccaaaggccttttgactctccacatatggttgagtagagtacctgcactccacatatatcggctgaactgacttgtatagtgttcagaataactttatagcaatttcagaaatacaagatgagaagcagatttgctgtgattttagttataaataacaaggaaaaaatgttttgctcctggtaaatgaaaggcaccagtttatccaaaggactaagaaaggaaactgacgccttgatttgctaaatccaaatccttttggtacaacaggggtggacaaatggaaaaacctgccctagatggctttgtgatatttcgttatgctcagagtaggtgctctataaatacctgttggatgaatgttgcatgactgcagttcctctatagctttaatgagttcctaagagcagctagccatatcccttaatagtacctttctgctgacagcagcaagctatgtatggtgttagtacggttgctagatgatgaagcaggagagaggtcaattctgaataaacatctaggaatttagtaagagaagttgagcaaagagctgtataaaacagctctggattccagttaatgtaaacttcattcagttaggtatactaactttttaaaaaacaaaggctgatgtctggttacctgagcactgactcaggcccacacgtgaattttggacaaaacattttaatttgaattcttttttgacggggctgatgcaatccagttttccagagtttctaacactccctattatcttgctttactcatttacataacctgtgaatctcctg

SEQ ID NO: 204594 - DNA, 1000 bp, Homo Sapiens
gagtgaacaggcaacctacaaaaggggagaaaattttcgcaacctactcatctgacaaagggctaatatccagaatctacaatgaactcaaacaaatttacaagaaaaaaacaaacaaccccatcaaaaagtgggcgaaggacatgaacagacacttctcaaaagaagacatctatgcagccaaaaaacacatgactcttttacttttaaccactttgtatatatttgaagggaatattttgtagacagtatagttaggtcttgctactttatccagcctgatgattgctgtctttagaatatttagatcatttaaacttaatgtaattatttatatggttggatctgaatgaattatcttgttatttcctatttctcccaatctgttcttgttcccttttccctttttttcctgccatatttgaaattgaatactttttagttttccattttatctccactactggcctattataaatatacttgtatctttgtagctttagtgattgtgctcgtgtttaaaatatgcacatttaacctgccacaacataacttcaaatattataccacgtcacatacaaaatataaaaactttgtaataaaatttatctatttcctccttcctgtcttttgtgctactgtcatcataatctaactactgtaggactgttatactagagaagctacatgcaagtcctctggtagacagtcccagataaaactaggttttgggttatctttgccaaagtgacagaaatgtgattacagctgtcttttatcctccagaccgcattgagctcattctcgagttgaaggccaccaagtgacctcaggtgatgctacatgaaaaagaataaccatcagctgaacctgcccttttctctggcccacaaattgtgaggtacaataaaatggctgtgtcttcaggggatgtgtttaggtattttcttacacagaattagagaaccataacagaatctagtaaagggaagtggaattc

SEQ ID NO: 204595 - DNA, 1000 bp, Homo Sapiens
tctactgtttgtcagactgcagtgaattctgagattttcttctgttcaatatcttgttgaataaggaaatgtcacaatttaatactgtaatctcttcactcatttttatacactccaaactttaacaacactgtaccagaagattttttaaaaggaaagagaaaagtgcataagttacacatttactgagaaaaatatgactgagatattgtgttacacagaactttatacctagattttattttcttgcaatctccagtttccccacaaaagttctttgttttcctcccacagtaagatatttcccaaaggccttcctgaggagtactcagtagctgccatgtttcgagtacgaagaaacgccaaaaaggaacggtggtttctgtggcaggttttaaaccagcagaatattccacaggtaaagtaccattagagttgtgctcattagttttccttgtgtaattaagccaggtgaattatttgaactggtgcacaaatttgcgagtagatctagtatccaaatgttctatcctttagagggatcatcaacaagaaaatgcaagtattctcgtagttaggatggccttgctgagatccataatatgagagtatagtggtaaacatagtgttagtttttgtttttattttacttctaggtccatattttgtttaaagatgtaaaactgccttctctttacaactgcttcattaactaattctttctaagtaacacattcttcatcttccttctgtcgtctctaatgttatatattatttttaaagcagtttatcatttcattggacaactcttggtgaataaagagttgagacttaaatatttatcccatcaataaaaatttatggaacacatactatatactaggtagtgacaagaaaagagatctgaaaaacagaatttgtattatcagggagcataaggcgtaaggagatgacatctaggagaacaacataatatagcataattatgttgaacaagtgc

SEQ ID NO: 204596 - DNA, 1000 bp, Homo Sapiens
tgtctcaactagactgttgaaataatcttctaacttttccctccaccttccatctctctcccctctaactcattccttggactgctgtcagagtacttttcataaaatataaaacagatcttgtgattccccagtctaaagcctttttattagttcccattaccttttagaataaaatatgtactgttcatcctgacacacaaaactcttcatgataaatactaattgagtgcctagtatgtgcctgcccttgtgctaaatgttgagggtacaggggtaaacaaggtgaacagcttccctgctctccaagacctttcagtccacaaatgcaatgagtttacagaggagaagcacaagctccgaaaggagctggggtggggttgggggtcagaacctaatttagaaaattgaggaaggtctcaacctcccatcttgcacttacaatagtaatcagcaggtgtggtaccaaatatggaaccaacaattttatctgcattatctcatttaagccatgagtgccattattgttagcctcactttacagataaggaaactgagggctagaaggttaaataagtggcagagttgggatttcctccagattcctgtgagacccagacatcttaatccttttggaacctgtgcttctcctttgtagtactcactacacttgtggaactacatccaactacacttgtggaactacagccagctctgcaaacatgacagtctacttcactccaagtctttgctcatgctgctcctcttgcctggaatgcctatttctctcaaaaatcttcctgctgaatattttgcgatctaattaaggtgttctctcttccatgtacactcctccctcagatagaattagccactgtcttctttgtgcatacacagcatttcataaatactgtcacagtccctctagcacttcaaatacttatctgatgttctcccctaagaaactgtaagtcctagaggatgacaatcgactgaattc

SEQ ID NO: 204597 - DNA, 1000 bp, Homo Sapiens
taacaccaccaggtcgcccttgaattatttcctggttgaagtcaagaaccttcctgggataagccccagtttgggggcttgcctgtcctgcattgttggtattttccgtttgctgagaaaagttcagttagtgctgcctgagctggctgaaggcccttctgggctgggtccatatgcccaagagggtgacactggctggtctcgggggtggtgtctttgagggaatgagattggtcctacgagtgctggagaaactgcacactgaaatggtgtagcctagcattgttagggagtggcagataggagcaagaagctgaaagcagggagcagacaggaaggagcacatcccctttcctcctccagccttgcagtctctttggagctggcagcaaagtcagaaacatggttggtctacagaggtccagcctcagcatcacaaaacagaagataaaaagatatgtttagaggggagagacaatagcttaataacaggcacagccccaaaataacattttgcttttccatgttatgaaccaagtgagagataacatgaaggcatgaagaagatggaaatctaaatatcagcatcgttcctgataacataacattatggaatgtggcttgggtatatggcaacagtgggcttcctaataccaaaccccagaacaagaattgcccatgcagctgtgggcagtgatgagctgcaggcaccttttttttgaggcctggccttgtaaacctgagtttctggaggagcagagcaaatgagtgctgcccaaggtcacctggcctccaccaaggagggagagaggaagcactgagttacacatgctcagtcttaggtcccagtttaccagtggggaaattcagtctatctccctggacaggtgaaagcagcggggcaacagggaaagcccctcctcatggatacctaagggcagggaagacgggctgtattccctccctacataatgtaaaagacaatattctcaaaagcagt

SEQ ID NO: 204598 - DNA, 1000 bp, Homo Sapiens
tccttaattgtgtatgcacctaacagcaaaatatcaaaatgcatgaggcaaaaactgatagaatggcaaggaaaaatagatgcatcctctattatatctaaatgacacctataggatacttcatccaacaagagcagaatacacattcttttcaaatttgcacagatcattcaccgagataaatgacaccctgggccataaaacacacctttacaaatttttaaaaatacacatagcacgaagtatgccctaggcaaaatggaattaaattagaaatcactaacagaatgacggtaggcatatcccaatgattaaacaacatgcttttaaataacacatgggtcaaagactaaagagaaattttaaaatattttgaactaaataaagatgaagatacaatgtatcagaatttgtgggatgcagcaaaagcagcacttaaaaagaaatttatagcactgaatgcaaatattagaaaagaaagatctaagatgaataatgtaagtttccatcttgggaaaatagaaaaaaaaaagcgcaaaaaaagtgcaaattaaatccaaagtaagcagaagaataaaaattggggcagaaatcaatgaaattgaaaaaaggaaatcaacaaaaccaaaagctgcctcttggaaaagagcaataaaattgctaagtctctagtcaggctaatcaagcaaaaaagaaagaagacaaactactaacatcagaaatgaaaggcaggccttcagtactgtttctatgaaaattaaaagataattgagggatagtatgagcaactctagtccaacaaatttgataacttagatgaaatggacaaattccttaaaagatcccttcctatagaagatacattgataaattgaattggtctgtatctattaaataaattgattcaataattaataaccttccaaaacagaaagcactggtccaaatggtttcactggtgaattttactaactacttaaagaagaaatgatgtgaattc

SEQ ID NO: 204599 - DNA, 1000 bp, Homo Sapiens
ttgctgagaaggctgtgctggtggctaatgtgtggactctgaaaaatgctggcatgttgtacacttgtgccttaagctcaatgcatatctatggggaaggaagcccatttcttactgacaatataaataaggccttgaaaaacaatgcgatcctgtcaactgttggaaagttctccacaaccaacccagtctatgtgggctgggcccacattctggccttgaggccctgtggggccccaagaaggtcccaagtgtctgaggacagttctactacatctcagatgacacgcctcaccaaagctatgataaccttaattacgccctgagcaaagagttcggcctctgccttgattccagatggaggcttcctttagccctgaggtactgaattggcttcctgctggaaatagtgagcttcctgctcaggtcaatttatacctattgacctcccttcaactgccacacagtgacattgtccaacagcatggtcaccttctcttacaagaaggctcagcgagatctggcgtataagccaatttacagctgggaggaagcccagcagaaaaccatggagtgggttggttcccttgtggactggaacaaggagaccctaaagtccaagactcagtgatttaaggatgacagagatgtgcatgtgggtattgttaggcgatgtcatcaagctccatcctcctggcttcatacagaaggtgacaagggcacaagcccagatcctgttgcctccctttcacacaatagccaacttattatcttcctgtgccatcaaaacctgtgcagtcagtggcctaaccaaaagctttctgtcctaatcacatgccagaggacacacaaggtgatttgctgttaccaaatctcgtggcctgattctgaacaatttgggatctcttttaacttgagggtctctttcgactactatagctccatttcccctcttaaatgagaagggatttcttttcttttaaatctcctatttcttcac

SEQ ID NO: 204600 - DNA, 1000 bp, Homo Sapiens
aggagctgtcgccttgttttcaacaggtcagatgatcctcactcaaagctgtgcaggcttgactccaacctagcaagacctttgggggcaggacccctgcctgtcagagccacaggatagggactgcagcctcagtgggtgtggaaggtgagactgccacacagcgggtcccaaaggcaggaccgtttctccagcaggcctggagggcagagtgcagagctaggagacttaggaacccatggagtttgccttgctagatttgggcttatttgggacccgtcacaccttccttcttccctatttttatcttttggaataggaatatctaccctatgcttgttccaccattgtattttggaagtacataacttgtttggttttataagttcacagctggagaggaaatttgcctcagtatgaattatatgtggagtcttacccatatctgatttagataatacttcaatgagacttcagactttagattttggagttgatgccagaatgagttaaaaattggtggtgaggctggggagctgttggaatggaatgaccaagtgtattttgcatttgagaaggacataagttttcaggaccatgagcagaatgtgacagactaaatttttgtgtcctccagaaattcatatgttgaaatctaatccccagtatggtggtatttggaggtgggaccttattaggtcatgagtatggagccctcattaatgaatgggattagtgcccttataagaagagatcagagagctagcttgctctctctactccatgtgaggatacaaaaataagtcatcagtctgcgagccagaaagagggtcctcaccagaacccaaccatcctaagcttgaactttcagcctctagaactgtgagaaataaatttctgttgcttataagcacccagtctatgttattttgttaaaacaggaaggtgacgaagacaccttccttttttctcaaactctctcctagctactaaacagatc

SEQ ID NO: 204601 - DNA, 1000 bp, Homo Sapiens
agccagcatttattaccactcattctagaaggtgccagttaggtagctatccaggtttacattttaaggcagtcgagaccttattcacgtggtatataaacaaccacatttctcttttatatggaacaagacttttcatttgcggctggccttctcactagcttatgctttttttttttaagacctttcttagcactcgctgaactcctccccctcacaatcaatctcagcaactcagcagagtcgcttcagttcacagctcttaatccttcactccagactaaagctaatcttatgtcctcaaacagctacaactcactgttatcacagttccgactgcagagactccatttaagaggaaatttaaaaaataaacaatgctctatttctgtccacatcaaaggtacctctaacagaaacttgtctttgcttctgtctctctgctactggactctcagctcaaggtaatgtaagatgatctcatagatgcactttagcctcttgatgttagcagttgagtcctccctgcgcacaaaatacatttgtggtaatgaatgcccagaatctcactggcacacccaagagtagttaaactaaaattgctactaacacaacattgtagaattcgttgccttaatggatgtgatcttctaggcttactgtgtcttaacaagcagtcttatatatatttatcttgcccagaaagtacacttgtagaatttaacatttgctcctttctccaaacagattaaaggttatgcagctgattgattctgtgtcccattttaaaggtccaggctatcccctagatttagattagttcctaaaaaatcttccagtctgaatcctgacaaatggatagctaaattaatttccactcctcttctctcttgcactgtttggtacattacagccaccattagccttaaaagctgcagcagccaaattcggtgacagtaacataaagcctgagcttaaaaaagaaaaaaaaaaaaaaaaa

SEQ ID NO: 204602 - DNA, 1000 bp, Homo Sapiens
ctcacagtggctacaccattttaattcctaccagctgtgtatgaaggttctagtttctctgcatcctcaccaaaacttgttattttctgttttttttttttttttttttttttttgagacaaagtcttgctctgtcgcccaggctggagtgcagtggcacaatctcggctcactgcaacctctgcctccagattcaagttactctcctgcctcagcctcccgagtagctgggattataggaacctgccaccatgcctggctaatttttgtatttttttagtacagacagggtttcaccatgttggccaggctggtctcacactcttggcctcaggtgatccacctgcctcggtctcccaaagtgctgggattacaggcatgagccaccgcaccaggccaattttctctatcttcgattctagccatgcttatgggtatgaagtggtatctaattgtggttttgatttctgtttccctgatgatgaatttcattgagcatcttttcatgtgcttattgaccacttgtatgtcttccttggagatgcgcagtattttcatattcaaaaatgaaagcacaggtccacacaaaattttgtacatgaataattacagtagcatcactcctaataacccaaagagagaattaatccaaatgcccatcaccagatgaagagatacacctattgttgtctacccacatggtggaatattatttgatcacaaaaaggaggatagtacatacgctacagcgtggatgaaccttcaaaacagatgaaagatcacattctacatgatttcattcagatggaaatctacagaaataggaagtcgattagtggttgcttaggggtggtaggggcatgggaggatgggggtgttagctaaagggtatgaggtttctttttgaggtcatgaaatgttctaaaattgactggtaatgtttgtgtatatctctgaatatattgaaaaccattgaaatgcaaaaaaaaaaaaaaaaaaa

SEQ ID NO: 204603 - DNA, 1000 bp, Homo Sapiens
atagcaactatttcttaatacattaatacaattttgcacattttgccatgttcaactctcaagcttcttatcttaaacaggtaagaagctgaattatatatcctgttttattttaagccaattgtgacttacaaccgaacatgttgcttctctttgtgctacaaacaaaacaaaaaggtaaaagcaatgggaaaaatggcagaagaggagacgtggctgtcagccattttcctttctcagagttttctttcttgttagatctattatctgggagctgggctgccctgctggctttccatttgccttgctaataacagtaaatccagcagcttccactgcagttcctgtctccttcagctgactcccaggccaatcagcatttcctctctgctaatgtcagatgttccctgggaagtcctgctgaaaagaaaatttatgactaaagtttctccagcttttaacccttctgcatatcctgctccagatgcagggtgctccagaggaaggctaggtcattcctacacgtgcactcctatgttcttgctgatgctctgctgctctgacaaggggcctcggacccctggaaaagcccaaatgagcagctgcgcagacagatgcacacattctgggctgtacctaatacatggactcaatttgagctgggttccttagcagctagagtctcttttgaactataactcaaagcagtcatattcatacaaaaagagcattagatcacaaaattgtgagtctgactaggtttcatgactgaaactgaaaggaggggacaggactaacatttactgagtgataagataataacagcaaagacttactgggtccttggtgctttgcaaggatcgctgcttaattctcacaataatgctatgaagaagacattattattattttcattcataaatgaggaaaacgaagttcaaacaggttaagaaacttatcagagagctagaaaaagtaacaggaggccgggcgcggtggc

SEQ ID NO: 204604 - DNA, 1000 bp, Homo Sapiens
ttgtgaacttttcatctagccctccttttgttattttttaatggttgctctagtctagagactacagtacacatctttaacatattatagtatgccttaaactaatattacattacttcacaaaggaagaatgtcacaacagtataattccattcaaaccacctcccctcaatatttgtgttttgtcatatattttatttctacatatgctgtaaacttcataattcatttttttgcttttaataatcaatagtatttttaataatttttaaaataaatataataagaaggtcttgtctatttacccacaaatttatgccttccagtcctcttcttcccttccttaccaatcttggtgcccattgggtattattctcttcagtaaagaatactttttgtgaaaaaaatcatttctagagggtcagatgtgcagtaggtaaatactctgagcctgtttttcttttttctgttgaaaatgattttcattttgtcttgacattgtttaataaatttattgaggcataaattaactatcataaaatccgcacattttatgtgtataactcaatgattactagcaaatttacagaattatacaaccatcatcacaatagttttagaatagttctatcttccagaaaaactcctcatgcccttttgcaggcagttctttctctttttcactcccagttccaggcaaccattattttacttttatggacatttcatatgaatggaataatgtaatatgtggtgccttgcttcttttaatttagcataatattcttgaggttcattcttgttgtagcatgtcagtagtttattccttttaattgatgaataaactgcattttgattatctgctcaccagttggagagcattcatattattttcattttttggccattataataatgctgctataaacatttaaaaacaagcttttgtatcaacatatgtctttgttttttcttcagtagatacctaatagtggaattc

SEQ ID NO: 204605 - DNA, 1000 bp, Homo Sapiens
ctcattgcagccttgaactcctgggctcaagtgatcctcccgcctcagtcttttgagtagctgggactataggcatgagacatgacacctggctttaatctatcttttgtcagttgattttcagccagcattcagaaggcaaaggggaagttttcctttggcccctccaacatgaaatctggatgtcccataatatattgaacttgtcccctctttaatgagcatgtacattgtttctggtcttttcctgttactaacagtgcttcagtgaaatacatatgtacacacgaaagtgtgggatcaagttctagaagcagagttcttaggtcaaaactatttcttttaaaacattgatagatattattttattgccctccaaagagtgagcctttttttcaaagatggtgggaatattgatctctgtgtgttgattgtcttttggatttgtttgttataatttttgccatgaaaaaatgttggatttttaagcaggtacattactgtttatgctttgcaggtacattcatgtaggccttttggttttgtttcttgcttaagtcaggtcttgcccagtgaaggttttttttagttgcctacactttcttatagtccccttgagtttcgatttttgtatttttttttttttgagacaaagtctcactgtgtcacccaggttggaatgcagtggtaccatctccatagcactcccatagaaaactcacaaaaatcagctcacacgtctgcctctcgggttcaagttattcttatgtctcagcctcctgagtagctgggattacaggcatgcgccatcacacctgggtaatttttgtatttttagtagacacggagtttcactgtgttgcccaggctggtctcgaactcctgacctcagatgatccacctgcgtcagcctcccaaagtgctaggattacaggcgtgagccaccgtgcccagctatatttttcaatttatctggaatttattttgagaattagaattc

SEQ ID NO: 204606 - DNA, 1000 bp, Homo Sapiens
aattgtgtcaaataaagtgtaaagtgacatcagttgacaaataaatggcaaaatgttcatgttcaatattgctgaaggtcaacgcaaggaactcatcaagcttacatgttttttacttgcttatgttaaaaaaatttacagagcaaatatttacattctaaaatatacttgctaccaagtgcataaataaatcatgctatagttttagacatttttacttcttagaaacgtgtagttgccttagtaaaaggaatttagtggaaaaatactgtaaacacttactctggtatcttcatgttagaaagcattaaatcctttactgatattaaacttgtaatattgttttggggctcagtttttcaggcaacaatcatttattaattgactgccgtgcatcagaagctgagatcagcattgatatccacaagagaccagaatggcgatcttgccttccagggattcacactgcagaagaatgtgtagatagataaagatagcacggtgctgcatggcatcatagacatattaaaaaagaactacaggagaagtcgattcaatttatactcagttgcacatagatgcagatatgtgccttattttcagactgcctaagcttcaacagttttatgtgattacctcttataagaatttttaaaccactaatttgctgtttacttcttcgtagtattgtcacttcttcagcttattagtatcttttctgattgactgcccgtactatttaccacccaaagggaaggacatttgaagctgcttctttaaacacattttcaaatgcccataccccccaccccacccattccgctgcacgacaaatggcagcataagccagtgtgatggcatatgccgctactcccagttactggggacgctgaggggagagaattcagcctaagcaatacagtgagaccttgtcaaaaaaaaaaaaaaaaaaagtctaattatcaagatgaaagaaaaaaatagccattttcatattcgt

SEQ ID NO: 204607 - DNA, 1000 bp, Homo Sapiens
aataggatatatagaagaggaggctggaagaagcattttgaagtcaccacatcaaaacaaagcatatatgtgcaattatgcatcatttaacgatggggatacgtctgagaaatgtgttgttaggtgatttcatcattgtgcaaacatcatagagtacttacacaaacctaggtggtgtagcctactacacccctagcctatggggtatggcctattgctaccaggctacaaacctggacagcatgttactttacagaatactacaggcaattgtaataccatgtcaagtatttgtgtatctaaacatagaaaaggtatgtatacacacacacacacacacacacacacacacatatatgcgcatgactgcatttatacaaaatttcttcccatcacattagcccatgagaattagccactctaattatgcttgacagttattaaaatcaattataacatataacaatcacgctggaaaaatgtgggtagatgctaaattaaaatatttaacatatctttaaaaagttgcttcatctactaatatttatcctatttttcaccactttttgatatatttttggtctgttattttgacatggctcataactagacttaaccttcttgttaagtgtgtctaacaagaaagctactgctcctcaaccttgatcaatagaagtcaaaagttgtatgctcataaaagacaaaaacctaactccatttgcttaacatgtggagtacagggaaaaactgcaatacctgacattgagctgtccatgctcttcatccatctcagaagaagctgcagtcaaatggtgaatgacagaccgggggctgaactcactgtggcttacagccaggaagacgtcttcttcaatccaagtgagaaggcctagtttcagcgggtttacatcttgatcttcattattctcaaactggattctattgtaaatattgaagaatatccaagacatgaataaaacttaaaaaccactgagacgtt

SEQ ID NO: 204608 - DNA, 1000 bp, Homo Sapiens
cttttgagtctctacctttgggcattacaatagacacatatgacttttcacagcctactggtatcaacaatttgccgcctttactggagtgtgaaatcttcatttccatttcgagctctttcccttccccagatttaaatatagttcttgtgagtatcatatggtattctaatttttatttcaatcattaaacatgatttataaaactcatgaagaaacttcatagtctattaaatatactcatattttgtcattttctattattttcttttctcctgatgttccaaggttcttcgttttatcctctcctttccgtttgaagcatttatttggccaattttaagactagatctgctagcaacaaagtcttttactttttccttcatctgagaatgcttttatttttccttcattcttgaaggagagtttatttatagaatttgtgatagttcttctctttgagcatttgtcactttcttagagcctccatggtttcagaagaaaaattcactgacatttgaatttgcattctcctgtaggtaaatcatcatttctctgtggctgctttcaagacttttttctatgcctttcatttcctgaaatttaatgtgtgtctttgggtttatcctacttgaaatgttgagcttgttgaatctgcaggtttgtgtctttttccaaatttagaaagttttcagtcattatttcttggagtagtctttcagctccattctttctcctcttttcattttggaatgtgatgatgtaattgttgaatttttttattgctgtcccataggtccctacagctctgttcatttttctaagtctatattctcgctgttgttcagactgaatgaattctgttgatctgtcctaaagttcacttattctgtgctccatgatctccactctacgattatgcccatccaacaagtgctttttgttgtatttttttatttctataatttccatccagttctcttttaaacatctatttctt

SEQ ID NO: 204609 - DNA, 1000 bp, Homo Sapiens
cctcctgacattatcattgtcatgactgccactacatcttcagtaaagcaataaggtgggacctttggggtcttccaaggagaaaagcatgcttggccctcatacctagcagctgcaactactgagttgattgagctttcatcactgctttttacatttatacctcctaattcaacactgggggttataaatgtagcaacagttaactaacacagggtccaaactgtcatttcaattcgaatttctcaagtcatcctaatccaagagtcacatgctgtcaactctctgcacaattctcactgtattatcataagctttcataaatttaaaaggataggttacaggttgatttcttctaaagaaccactaccgtaaaccaatatccctcctcttctctagtaatgaggtcatcaccatctttatttatcagcactgcaagcatgcctccctgaagcagccttctccctccttctaaaccttctgagcttagaaatcaaataaaaacttgctagaattgtaggtaaagtaagagctgctggccactgaaggagagactaagggctctcctctggaggaaaaaacaagagctttgtgtgtttaatatctctttggtggctcagaggctctttagcttctttctaggttccacgcagtgcattagaaggcaagtcttctatttacacaatgtctggtatatagttaccatttcctatttctatctaggatctcacctggtgcccacccaccggtgttgatgtgtatctgcatgtctaatacacaacagcaatgagaccatgggcattccactcttaaattaggaatttcccccgtatatatactcgatatatatacgggggaaattccttatttgatatacagaggaaattcctatttaagcatgatcatcatttccacactatttattcaccattttatatatgttacttcatgttatgctcacaaccatctaatgagataggcactattattcccatttgct

SEQ ID NO: 204610 - DNA, 1000 bp, Homo Sapiens
aaggaaagtgattaaatagggaggcagcttgaaactctatttttataagggattagagataagaagactggggataacttcataactaccatacaatatctcaaggtttattacaggcaagaatgttgtaaactactgcatatgattccagagatgaaagttttgactttggatcaatatgaggaagaagccaggtgtggtggctcacacctgcaatcctagcacttcgggaagcccaggtgggcggatcacttgagggcaggagttcaagactagcctggccaacatggtgaagccccatgtgtactaaaaatacaaaaaattagccaggtgtggtggcaggcacctgtaatccccgctactcaggaggctgaggcaagagaattgcttgaacctgggaggtggaggttgcagtgagccaagatcacaccactgaactccagcatgggccacagagtgagactctgtctgaaatatatgaaatatatatgaaatatattatatataataatatatataaatatataatataatataatatataaatatatataatataatatacataaatatatattatatataaaatatatataatatataaaatatatatataatatataatatataaaaatatataatatataatatataaaaatatataatatataatatataaaaatatatattatatatataaaatatatattatatataatatatataaaatatatataatatagagaaaatatatatatatattttatatatatatatatataagaatttcctaataattaaaattacctgaaaatgaaatcggctgattttggagatagtattcaagaagaaaccacgtggctattctttaaggtatgttctaaggtatggctattctgtaaggtatgcttttgaatccaagcattcaaaagaggatgaataagataaattgttttcaaccttttttccctcccatttttcatggggggggggtgaattc

SEQ ID NO: 204611 - DNA, 1000 bp, Homo Sapiens
cctcacatataattcagttaggaaccccctaaatcctgatccatgttgggagccctctgaaacttcaatgtgcattaaactctcaaaacttcccagtctctgaagttcctcaattgttcagcattccctacttgaaaggcagaggaccacatcctcaggtctcctttaattgcatttacctgagacttgaattcactaattaggtatgtgggtgtttagacaaaagacagaaaattagaaatgtgtttggagaactggctgcaggttctgtactagcactaaactctgtatgtttgcaatatttgatattttcagttttttctatttttagccataataggtgagtggtggtatctcatggtggttttaatttgcatttcattgctgattggtgattttgataatcttttctaggtcttatctaatcattgatgattttaatcatcttttctaggtcttattatccatacatacaactgctttgatgaagtgcactgaatatgtgtgtgtatatatctatatctatatctatatatatagatatatatatggtcctagatttcttaacaatgggggtacattttgagaaatgcatcattaggtgatttcatcattatgcaaacattgtaaagtgaacttacacaaacctaagtagtatagcctactttacaccttggctgtatggtatagcctattgctcctaggctacaaacctgtacagcatgttactgtactgaatcctgtaggccattgtaacacaatggtaggtatttatgtatctaaacatagaaaagatacagcaaaaacacaacattataattcataagaccaatgtcatatgtgtggtcattgactgaaccattattaggtagcagatgaatgactgtttatatatatcacctctctctctctatatatatatacacatacacacttataagtatgtatacatatatgtgcatataggaatgtacacttatgtatatacatatgtatatgt

SEQ ID NO: 204612 - DNA, 1000 bp, Homo Sapiens
aaaagaatgttaaaaagaaacaaaaggccaggcacaatgcctcacatctgtaatcccagcacttcaagaggccaagacaggaggatcacttgagggccaggagttcaagaccaacctgggcaacgtggcatgaccctgtctctacaaaaaaataaaaattaaaaattatctgggcatggtggcatggcatgcatctgtagtcccagctactcaggaagctaaggcaggaggatcacttgagcccaagagttcaaggctgcagtgagctatgaacatgccactgcactccagccagggagacagagagaccccatctctaaaagagaaaaaaagaaagcaataaaattctgcagaactaggtaggaaagacaataaaagctacaagggtgcatcattgttttgagatctagacaaatttcgagaacctattcaagaatattgaaaagtatttcaaagttcattttcatatctctgattacttaccgctgtcctgccctttaaagcacttccatttgttttctttatgatggggtaatgttggccaaacaggctatatgataaagtatttagtcctagttttatcttcatacaatcagagctctgagatgaaaataaacttgttccttttttatcactaggtacaaaacaacaaatgaagttgcttatgtatataatatgatgatttttgtctttttaggtaatggctgaaagcaacacattttgctaacctaaggataaataatactataatacctaattcacactacacacttaacaaaagcaatttatcatcagcctaagattgctaatttttataacaggtacagacataattaacttaatattgaccagcaaataaatctagaaattgtgcttattctttagtattcattttaactgaatttaaattagtgtttttccctaacagccttgtatattgcttaataaaattgtcatatttgaaaacagagattcttaaagtttaaaatgcttgcagtca

SEQ ID NO: 204613 - DNA, 1000 bp, Homo Sapiens
tttaaattctaatggctggctgtcattagaatctttaagagaatggatttacaggcaacctcctatttaatgatacaatctaaatgattcctgggcaatagtccttaattgaatcataaaaattgaatttatttcctatgagtataaggctaggaactagggtactgaaaacccatttcataccacaaacaacaaagacaaaaatttaaccttgaaagtaaaagatgacaaacccaaatacatactttaagaaatatccagtggcaggaatacattcctgccaatattagaacatggcatagtccatgagacaggatgaactaccttgatggtaagattcctagagaataagaaggtattttccaacctatttcacacactgggttttggatttcttggcttcactccatcccttagaggttctatgaaatttcaactacatatagaaccttctaccaccccagtcatcccttgcccctatactggggtgttacttcatttaacaggacccaagagtatgtggtgtgatgatgtgactcagtcaatgggcctcccagtacagagtgtcactccttccacactctctctggttgtcactgaagatttgaaaaggcagctgcaagagatttttctctaagccttatttgtgagtggggcagtgttaatgctattaacattatctccatttgggccaaatcaaaccgaatgagaaaaacagataggaaacagcgtcaggacaatgaaattcataaaacttgcaaatatttagccccccatttcctcatctgtaaaatgggcatcattatagatttatgtatataaaacataggtttgctatgaaaattaatggtgatccttggataaattgatctacaatactacacgatagacaatatttaatattatttatttattttaatatctaaaaaggagggctgggaaatgctgctttatgattttatgatttgtagatttacaagttgcccctacagaggaattc

SEQ ID NO: 204614 - DNA, 1000 bp, Homo Sapiens
aaaggcaagtttgtgaagaaaggaatgcttttgatgcttttgcaacaaatgatgttgaaactaatggacatccatatgcaaaataaatgaacctcaacctaattctctcaccttgtattagtgtgttttcacactgctgataaagatacccgagactgggtaatttataatgaaaaagaggggtgtgtgtgtgtgtgtgtgtgtgtgtatgtgtttgagatggattcttgctctgtcgcccaggctggagtgcaatgccatgatcttgggtcactgcaacctccgcctcccgggttcaagtgattctcctgcctcaggctcccaagtagctgggactacaggccagtgccaccatgcccaactaatttttgtatttttagtagagatagggtttcaccatgttggccaggttagtctcgatctcttgacttcgtgatctgcccgccttggcctcccaaagtgctgggattacaggcattagccactgtgcctggccagtgaaaaagaggtttaacggacttacagttccatgtggctggggaggcctcacgatcatggcagaaggcaaaaggcatgtcttacatggcagcagatgggagaatgagagcgaagtgaaaggggattccccttataaaaccgtcagctcttgtgagacctattcactaccaggaggatagtataagggaaaccacctcatgattcagttatctcccactgggtccctcccacaacgtgggaattatgggagctacaattcaagatgagattttggtggggacacagccaaatcatatcacacctcatacaaatattaaaaggaatcatagatctaaatgtaaaacataaaactagaaaacttttagaacacaggagaaaatctttatgatgaggttatgcaaagaattcttagacacctaaaacataatccacagaagataaaaaatggcaaatttgatttcaaaatgaaaaacttttgttctgcaaaagacactgtcaagag

SEQ ID NO: 204615 - DNA, 1000 bp, Homo Sapiens
atacactatatacaatacttatccaaatatttttaaatgacatttttacaggtgtgaatattatataaatagatctacaatatacatacccaaaagccacaaattttctatctagataaggagttgcttgcagtgtgatatagaattgtgacccgttgctgtgacggcctttgttggccattccaagtactcctcttttattatgaggaactgaaaagttttcatctaggaaagacaataatcagtaggtcattagcacatttctattatctcaatttattgtaacatataaggaacaaatagaacccttggtaacactctcaatcatatttatcaatggattccaaattgtaaatattctattcatttcaaattattttcaaacatgcaaatgggctgtttaaaaaaacctgtaaaaccttattagaactattggaacattcagctttagtttgtctttaccataaacaagtgtgctaagaaaattaataatgtacaaggaaatatatacagtattctaatcaagaataaaggtcagcaaactttctcgtgctgttttggtatttctttcaaactaccaccatactcattaaaaacacctcctctgagaagtcttttgtggacctgacctttcccccgaaccccccaagcatcttacacatcgttcttggacagtccttataacactcgatgtaattattggtttacatggcatttcttctctagtaggtgaaggcaggaaccttgtctcctcatggctttagctccaggcttctcagcacattaattggcataaatgtggccctaaatgtttgggcagatttccattccatgtactttcccattccatgtagtttaaaaatgttgatgatgaaaggaaattaattgtttatttttagtgatcttcaaataaaattttttttttgttttttgagagggagtctcgctctgtcgcccaggctggagtgcagtggtgcgatctcagctcactgcaagctcc

SEQ ID NO: 204616 - DNA, 1000 bp, Homo Sapiens
tttttttaaaaagccttcatccaaacttccagaaaatagtcacttttatatacttggggttagttttgtatgttgttgttgttttgttttatttttttatttattttgggggcttagttttggttgaattttaaaatcagaggaattcctaacattctctttataaaactgtcatggtataccagcttttaccatatgaagttacaatatttaaatcactataacagctatctgcttatatccttctgatgtgactagattacaaaagaaatctgtaagaatttatctccaagaacatcagagctttacaaaaattccatgaaacaatcctttattgttgtgattatttagtaaaccgaaagttccttgtatttaaacatatttgaccaagtgtaaggagatcatttcattgttacaataacttaaccattaaattaatgcttttggccaggtgcagtggctcatgcttgtaatcccagcactttggggggctgaggcaggtggatcgcttgagcccaggagtttgagaccagcctgggcaacatagcaagaccccatctctagtacagaaaaaaaaatttttttaatcaaataaattaatgcttttgttgatgatgaattcattgacaagcaaggtgctaacaagcaccatttaaaacagttgcagagggctgggcacagtggctcacacctgcaatcccaggactttgggaggccaaggcgggaagatcacttgagcccagaagttcgagatcagcctggtcaacatggtgaaaccttgtctctactaaaaatataaaaattagccaggcatggtggcgcgcacctgtaaccccagctactgggaagctgaggcagagaatcacttgaacctgggaggcagaggttgcagtgagccaagatcaagccactgtactccagcctgggtgacaagtgagactctgtctcaaaaataaaataaaataaaatgaaataaaaaacagttgcagaatgattgaat

SEQ ID NO: 204617 - DNA, 1000 bp, Homo Sapiens
gtaaggaatttgagaacattctcctccttcatctacagagcatcaagcgcttcacacattgtgaaagtttccctttgtgttatgacaggaacccaagataagttggtatgagttgctctctggttagcacaaacaggctataccttttttgtgtctttcctttcttcatcagtcatgttagaaacttactggtcttattagtctttttgaagtgccaacttttggctttgttaaatctttacatggtacatatatttgttaatgtattaatttctatactttatgctttccttcactttttggaaatttctgtcctttttctaatatataatgcttaatgcttcgctggttcattttcaaaattttttttttttactataagtatttaaggctacaaatttatttctagaaacattattgtgtgtattgtactaatatttggttgctgtttcattctaaatatttttatttccattagcgttattttaacttataggttatttacatttcttagtttcaaaagcttggagagttttagttgtgtttttgttattaattctaatttatttaaattgaagtcttaatgtataatctatatgatactgtgttttggaattttttgagttactttatggtcaagtatgagatcaaatctcctaaatgctttatgtgtccttgaaagaatgcgtgttctctaccttgatgaaatgttctgtgtttttccattacatcaaacttatcaattgtgtttgtagcaaagactggttaaaggttcaacaatcctatctctttttcttggatgcaaaggaagactgcagttctaagtcttccttcagttgagttaggattctatgacagcattctgtccatgagaataacgggcagaagtaacataaggcacttttgtctttgtctttacaatgtcatgaaagttcttccttctttctcatttctttttggccagtttaatgcagaggacctagtaggctcaatagaattc

SEQ ID NO: 204618 - DNA, 1000 bp, Homo Sapiens
tggtcaccaggtcactgtctagaccaggtcactgtctagcgcagtgtcacatggaaagggtatggtcctttaaccctaccctccccagcacaactatcacagatgtcagggaacctctgctcacagaactgctttccagggattgtcttttttttctttttctttttctttcttttttttttgagacagagtctcactctgtcgcccaggctgaagtgcagtggtgcgatctcagctcactgcagcctccgcctcctgggttcaagtgattatcttgctacagccttctgagtagctgggattacaggtgcctgccaccatgtccagctaatttttgtatttttattagagacggggtttccccatgttggctaggctggtcttgaactcctgacctcaggtgatctgcccacctcagacaggcatgagcaccgcacccagccccagggagcgtcttattagtggttggcaactgaatggagacgtgggaattgtaaggaactgattctacttgatcctgggtcccctgcttctccatcttcacccacccatcagctccctttctcctttaaacaggcacctttgctctctgcttatccatttttgttgtgcattgctatttgggagcctaagaaacacaacatcctctgaatgctccagctgttgtgggtctgaagggtgagcctgccctctgtcattggaggctgcagcctgtggctttttaggtacagggactcccagaactgctcctccagtcatagcagagataaatcacaggagcttaagaggcatgggaagaacagagggaggagatcgtagcttccctgttcattcacacccaaaacaaaactgtcatactagaaaaggaggtattaaaagagccacctgtacagcctcgtatctcatccagcacactgctgcagatggaatattatgatttagcttgagaaaatgcagcaactctttgttgtggtgcccctctttgagtaagagtgaattc

SEQ ID NO: 204619 - DNA, 1000 bp, Homo Sapiens
ttgggttgactccatagcttggctattgtgaatagtgctgcaatggacagggagtgtgcacaactcttggatgtactaattttctttcctttggctctttacccagtagtgggactgctagatcatatgctagttccatttttgtttttttgaggaaactctatactgttttctatagtggctgtactagtttacattcccaccaatagtgtgtaagaattcccttttctccaccttctcaccagcatttattatttttttgtatttttgacaatagccattctaactgaagtgagatgatacctcactgtggttttgatttgcatttatctgatgattagtgatactgaactttttccatatatttgttagtcatttgcatgtccttctgagaactatctgtttgaatcatttgcccatttttaattttttttttttttttttttttttttttgctgttgagatgtttgaattccttgtatattctagatatgaatcccttgttggatgaatagtttgcaagtatctctcaccctatgcgaaagttaactcaaaatggatcaaagacttaaatataaaacctgaaactataagaactactagaagaaaacacagagaaaatgctttacgacattggtcttggaaaagattttatgaataagaccttaaagcacaggcaacaaaagcaaaaataaacaaatgggattacataaaagtaaaacgcttcagcataccaaaggaaacaatcaatatagtgaaaagagaactgacagaatggatgaaatgaagactttcagaaccaaagcatcctgagagagtgtcccactgaagacctacacacaacagcccactaagaggtacactttgaccaaaagtaaattgaacctgggaagatggaataagatacatgaagctcgggtgagcaaagaaaatgcaagataatacaggtaaatctgaaggagcactgagtgtgtaaaataataataataataactaataa

SEQ ID NO: 204620 - DNA, 1000 bp, Homo Sapiens
tgggaggtgtgttggtcatgatggcagatctctcatgaatgtctacgtgtccccctcatggttgtgggtaaattcttgctctgttggttcatatgagagctggtggttgaaaaaagcctagcatttctttggctctctctcttgcttcctctctcaccatgtgatgcacctttttccccttcaccttttgccatgattttaagcttcctgaggccctcaccagagcagatcatggctccattcttcttgtagtctgtagaattattagccaaaataaacctattttccttataagttacccaggctcaggtattcctttacagcaatgcaaaatgaaataatacatatccaaatgaaataaattgttttaccaataagacacatgcacttgtgtgtttatcgcagcactgttcacaatagcagagatatggaatcaacctaggtgcccatcagtggtggattggataaagaaagtatggtacatatatatcatggaatcctatgcagccataaaaaagaatgaaattatgtcctttgcagcaacatggatgcagttagaggtcattatcctaactgaattaatacaaaaataggaaaccaaatattgtatgttctttctctctctctttttttttttttttttttttgagacagagtttcactctgtcaccaggctggagtgcagtggcatgatctcggctcactgcaacctctgcctcatgggtttaagtgattcttctgcctcagcctcccaagtagctggggttagaggcaagcgccaccacacccagctaatttttgtatttttagtagagatggcttttcaccatgttggccaggatggcctcaatctcttgaccttgtgatctgcccaccttggccttccaaagtgctgggattacaggcttgagccaccatgcccagccttatgttctctcttataagtgggaattaaccactgggtacacatagatataaaggtgggaccaataggcactgg

SEQ ID NO: 204621 - DNA, 1000 bp, Homo Sapiens
gaaccagcagagaaggagcagtattattgggagccagctatcgggttttccctatgatgacattctgggttgactggccacactagagtctcttgcaggctcagctgttgcaggtctttgtaattgcttttctcttatgatttccttgatgagtgagacaaactgttctctggaaaacaatactagaatcaaaccatctgaggcagttggagaaatctgcctagagtttggatttctacttttcttcatttcaaaagcgaatagaatgttttttaggtttctcacttgtctgtaaaaggccaagtattcatacttgggggagggctgttcactgatgctgtatttaaattttcatgaggacaggattttcgtgcctccctgggtaggtggttctgatgctaattagcgagaaggtgtttgctctatgcatgggagcacatgtgagcacggagcttgtgtctggtacgacacggtgccacatttctggtgctgattactgcactatctcgttgttttgaccctgtgagcttaaatgtcagttgaaccatggatcaccataagctgtttgactttttcttctctcttgtgaaattcaggtatcagagcatccttttcctgactttcaagtagttggtaagcacaaatgcttatacaggtgtccacggagagcatgatagtagcgaagagctgtgtgccgcctcgagcttcttgttgtgtggtctttgtgctttttattattggtgcttatggcatctgtgcttcttgggttagaaatattctgtatctaaatactaaaatgactgattcttggttttaagccaggtttcagaagttattctgaaatggtttgagataaatacttacatttattatgaactcttttcatgtagttatcttatcttaaagatgcctttgtataagatttagagcacggttgccaagaatgggttttagataaagtatatgtaattttcatgttaacttgtagtagtttgaattc

SEQ ID NO: 204622 - DNA, 1000 bp, Homo Sapiens
gcagccaccacatggacacagcttggtggaccaccagtcccttgctgtttatctctgcaacagcatcccacaataactgtgctcaatgtattcaagggattttttttttttcattcacaaatgtggaaaatgcacaaacactacttcctggctgtgggatactacttcaaagtggtctccattccttccttctcctgcttcccccttactttgcaaatgcttgtgtttccagagaaaaaagcctcaggggcaatgaaagaaacaggagccagttttgatgctttggctttcaaagtgcagtttggccaatacgaggctgtagacagattattcatacttattctgttccacattgcctcaatagctattatgttcacaatggactatttcttttttgatgttagtgtatccagggagcttccatattgcagaatccctcccattctttacaaaattccaagattgtaaggtagcatatctttaaagttggaaggaaagatggctggagatgggctcaggatgtagcagagttcagcttgatgaattgtttgtaaacagactattaaagcctattttctgactcctaaggaatctgatcacaccctccatataagaaatacaactacagaccccaggaaatgcatgataaatttcaaatctgagtatcctgccacatctggatacaaacaactattttagttcccaaaagtcaccatgctgccctctccagaagtaactagtaagttcttgtgataagacccctattctgaggcagagcttggtcatcttcaggccctgtgatgaaagaaagaagcttgggaacagagtaggaacatggccaagcctttactgggcaaggcattacttgtgaccactgcaacttttcatttcatacccacatcaactgatctttggttaaacacacttgaatttggacctgccccctttaagtatctaagcagggtcctaagcttctctgagtcctaggggtggaaagatc

SEQ ID NO: 204623 - DNA, 1000 bp, Homo Sapiens
ccagcatggaaacctggaaagctggggtaaatctgatgaagagcacaggagccttagtaaatccgggtgatctgaaactggctcttagttgagccagatgataggatcttaatgacaattgtgcaccacttctcatttcttgcgactctttgcaggtttgcttcttgctgtcttattccaactaaaaaattctgtttacttttcatgtattttctctacctcagaattgttgcttattcataaattctgccttcttatcacatggttctgcttcctcatagttttggtttgctataatcctccatggctccactccattgtatgccatcctttcagcttcagctcccatggctaactgcttctttctatccatgtttcccaattcaaatcccagaaggagagaatctgattgatcaaacttaccttttccactcaagccctggtttttgggaaggcagcccctaatgtcaagggccaatcactggtccaatcaggagccatccctgggcaaagaacaacctacctctgcttctcaaagcagggggctctgggtggggcactttcatctcaaagaggaagttgggtgtggcaggcactgtgttgacatatccagtataggagtgccctgggagcccatctctcatttctgaaagagatagcattgtagatctggacgtttcatcacatattcccaggaaagcccagccaaatgcagctggtaagttgctgaatgtggaattcctcttggccttccaactccttgcactcttccttctgggactactttggtttttcagtttattacctgtttggagttggcttgtttctggactctctcttctgctcaggtgagcagacttctaactggaacgcctggctcttggacaaggtgagtgtttggatccaactttggttctgcaccattctttcaacttggatgacattgcctcacctcttgtatccttgtcctctcccttctactcaatccactctgctctgg

SEQ ID NO: 204624 - DNA, 1000 bp, Homo Sapiens
cagctctcattttgaccatctatttaacaaagatataaatccaattgctacataaactgttgaggaagcaggaaaagaaatttctttgctgagataagcttcctttgagaattgaaaatacatttttatcataaatgagtgtagccgtctttataggagtgttgataggaagtatgccaacttcataaaactatttgcaagttaatacaataatttgcaacatttctgattataagcagaaccaccaattagtccatttttaattggcattttaattaaatatttcaatgttaaaaaaaaggtctctcttctctccccctcatgagaacaaaaagacaaaagggagaggagactatttcagagcatttctactgatgttcatggtattcttcagctgattcagtatcagcaaaagagaaacacgagattcccttccctagtcaccagggcggtgtgaagaattgttctataaaaaatacctttactgtgtgttcccttccctgctggagggggtcatgttcatttcattccgatactgacacagccacactgaaaggtggctgggttgcttgtctgtccaaattcaagtgtctggattcaaaaagaaaaaaggaaaaagagatgtgaaagaaagttctaatttaagaaaacagggtttaagagcccttctcgccttgcctgactttgaggagaaaatgtacaaatctcctttataatacaattagattttaattgctttttcctataagccccaatttaaattaaacatttgtacttcaccaagaatctgtttgtggtggcatttgaaaagtgatttttaaatttaacattaaacgttgattatgcttctaatgaaactatcacggttttgcataaggtcatcttcccctttatgccatgcagagaaatttgaccaaccacagcctttgaaatgtttctcttaatacttcattatcaaccttttatgtaaggacctcaaaagcatttaacaaatagagaa

SEQ ID NO: 204625 - DNA, 1000 bp, Homo Sapiens
ggggccatttctatgtttatcccaaaacaactgtttatggaactgttgggcccatttcatttctcacagaaagttccagaggtaggtactcaggctgtggcagttctgctccatagtaccttccagcttgctgcctctccttcccttgggtgtgatcctcatgttcatagtccaagatggtagccatcatgtctgtattccaggctataggatggagaaggcagcaaacaaaaagggagggcaaaggacatgtgtttcctccctcctgaaaaagttcttggaaactctcacatgatacttctgtttacattccactgtacagaactttgtcacctggccacatctaactgcaaaagagaggacatgtaatcagcaatcactattttaatcaggaagatgaagagaatgtaaaattgggaggcaatcataggatgcatggtagagagtatcagaggaggtagctgggatgatgggcaccagatgggaaaggacttgatatgacaagccaaggtgtttggactttatcctactggcaatgaagaatcatcagataggtttaaagagcagagagatataaactgagctgttccactgccatctctctgacagctatatgaaagggttctggcgcagtaataccaaaccccagagacctgttagaaagcagttaccccaaaatgacagtttcttcaataaatggtgctggggaagctggatatccacatgcagaagaatgaaactagacacctatttctcaccatatacaaaaatcaactcaaaatggaatgaagatgtaaacggaagacctaaaactataaaactactagagtacaacataggagaaatgcttcatgacattggtctgggcaagaattttttggaaaaaacctcgaaagcacaggcaacaaaagcaaaaatagacaaatgggattacattaaactgtaaagcttatgcacagcaaaggaaaccatcaacaaagaggcaacctacaaaattgga

SEQ ID NO: 204626 - DNA, 1000 bp, Homo Sapiens
ctatatatgcatatctttctagaagcactacttgggcttcaaaatgttattttttgagtttgtacaaacaagttttggaaagcgatcaatgtcaaaacatgataaattcagtgaaagaaaacaacataacattttggtttttgggaaaaagcttgcatttacctttcagggatagaaattctcattttttctgagggcattttgtgctaaaaattgtgttttaaaaaatatttgacaatatgtgcccgtgaaaacagcccttagttaatatatgttgaatttggtgtaagaaatacagcatatcaaatattatttgtgtgctatatcttgcttttagcatttagggttgtatatgcatgtcttcctagatgtgatatatccaggtctaaaaactgaaagcaacctttgtgtgccaaagaaaaaaaacaaaaacaacaacaacaactgtataatgtgctgctttgtttcaccgaattcaacatgttttgcctgagaacagttttttaaaatttgttttgtacaaactcagatcaaacatttctgagccctgtaggccttcataggaagatatgaatttccaatcccaactgctaaaagcaaattttgggctaaaatactttatgacgtgctgttttctctaatagaattccacacatttttaattagaaatgttttcaaacacttgtttcatagaaactaaaaaatgacactcttgagcccagtgagatcccttatgaagataagaagattcggccttaaaaatggaaaacaagattttttccaaagaacttgatgatgttttgggtttgtttttgtttttcactgaattcagcatctttttacctggaacagttttcaaatacacattatgtagaagctcagaaaagacatgtctgagcccagtgggcactcaggaaaatacagatatccagccctaaagctaaaagcaagctttgtgccaaaaatcctttatgatatgctgttttctttcactgaattc

SEQ ID NO: 204627 - DNA, 1000 bp, Homo Sapiens
tttgagacagagtcttgcttttttagccaggctggagggcagtggtacgatcttggctcattgcaacctcctcctccagggttccagcaattctcctgcctcagcctcccaagtagctggggttacaggcgcccgccaccatgcccggctaatttttttaaatttttactagagacagggtttcgccatgttgaccaggctggtctcgaactcctgacctcaagtgatctgcccatcttggcctcccaaagtgctaggattacaggtgtgagcccccatgtccggcccctaatacaattttttaaagtttctttgtccactttactgtgcttcatcctctcccctagccaggagcccacaagatcccctataaaaacagtgtgctaaaatgagttagatgttctcagttaacccccatgttaaaaattttataaatctacatttgccaaaccctaaaagtagagttcttttctattaaaatatggtttaaagacaaatcagctggtaagctatcatgtgcagtgtataattatctctaccctaaccgtctggtaacatctacatcttaatgagagttttctgaagatgacaacttggccctaataatagttatcattatctaaagtataatactctctctactaaaggaaagacatggttcaaaaaggtcaataattcaaagaattatcacagcatgacataataggaaaaaaaagaaattaagtctgtctacaacatatttactattcaaataacttactcaacactcagttttttctgcctattttgaaaactgctattcaaaactttaaagggaaattaattgaaaactaactagtaaacaaagctaacactggtagattttaatggcatgctgtataaactcctacatggaacattttttaaaaggcaaataattaacattataacttcagaaatatacttaaaacacatgtttgatggaaaaatatcatttctaactttaaattcacaagaattc

SEQ ID NO: 204628 - DNA, 1000 bp, Homo Sapiens
aattttgtctttttattttactatactatgaatacatggaacatgggtttttaaagggacaatgtagctgtttcccaacatcttttattaaaacatttgcattttactgccagttttttgttcttttcctcagagagaactcctggtggccaatgttagtaaattcaactttctaattcaggaacttgaaaaacagaataatgtaatggggtctaatggtgtttacgtacaacacagtattggtaaaagaaaaagacacttatattgcataataaggtactcaataatgctttgtatttctattaagaaagctaatttatttcttcttaggaatgatgcagttccaaagcaaagatttgatgtcctcctaatgagtccgctttcagttgtagagtacagtgaagccctagcaaagagtagtaagaaatctattttactggagataataaatctgacaaggaagctctcagcatagattgaagttgatttggcatagagttgctttataaatagccctttcagcaaactctacagttctgtatgtggttttaaatccctgtaaatttgtaggcaggtacatattacaattgtctgtttttctttttagggttcatgtaatcaaagaagtttctttgttgtgtgtatctttacagaacacaacaggaattgaaaatgaatcaggtgagtttaaaaatcagaatttatacaaatacatgacctagatgttagaccagctcttgatttttacaagatagtagcacacacattcatttctcctggattctcatttttgtttcttaataccattaattagttcattgtgttcataccgtgcatttgttcgtgcagtggaatgtgcattgtttgggcgtgggttggcatttctgtggttccctgaggagaggactcattcttagggattttcattaagactttctttttgacctctcccttgccacactctagtgtgagttttttgtgtgtgtttgttttgaagctt

SEQ ID NO: 204629 - DNA, 1000 bp, Homo Sapiens
tttaaaaatgaaattttgatgtagtgaaactttgtcttttgtggaagtgcctatgagtctgcaacctggtggtcattgccaaattgccattggttcacacttgtaattaccagtagccaagagagccatgtgactactgtaagccctactgaaaccactgactgttaaaacaagtgtgtttgtttgacacattgtgtgtgatccttgtctacagcccaaatgactgttttgggtaactcaaagttgaatttaaagatgaaaaaagataggtttcatagtatagggggaagtgaaagagtgagagagttggaaattgttaatctgtagctaaattctttatgaaataaatgtgaaaggattaagctcattccgtgtagttcctagggcggacaaaaggtggagcagctgtctgaaccagtgaattccttgtctctgaaaatgttccagcccatagtgaataaacacccttggggctgatccagtactgggagggggcgagtggaagactcacaggatccttttcaattccggaggtctatgaagtaaaaagcggaagaagttttgggaggaatagagagggagggggacatcatttaaaagtaagtttgggcactcataccaattctcatacttactactttgtcatatgctacccagtggttacaaacagtaaaatgaagtaaaagtgcagtactaagtattaaaaataggcattcaaatatttttccaaatgcatgttttcagcattacctccaggtagaatataccagaacaaccaattcatttctaaaaggaaaattgcataccaattttcctatcccaattttcctattcctataagaaatgaaagagacacaacgagttttgtcaataaaactttaggaatatctgcacatgtacatttacattcaagttgataacactggtggtttcatttcaatacaaattatgctagagaactgacatttcagacatggtcatatatatgctatttgaattc

SEQ ID NO: 204630 - DNA, 1000 bp, Homo Sapiens
tttccagtagctttttttttttttttttttgagatggagtcttgctctgtcgcccagttgggagtgcagcggcgcgatccctgctcactgcaacctctgcctcctgggtttaagcaattctcctgtcccagcctcccgagtagctgggactacaggtgcctgccaccatgcccggctaatttttgtgtttttagtagagatggggtttcaccttgttggtcaggctggtctcaaactcctgacctcaggtgatccaccggcctcagcctcccaaagtgctgggattacaggtgttagccaccatgcccggctccagtagctatttttttttgcctaattagcatccctagaaaggtctttggctgctggctgctcctttgtaattctctatgctgccctttctattgcccactgtaacctgcttgcttttctggtcctatctctagtcccatctaggcgtactcagtgctcacagccagagcttaatacaaccttgttaatgcccagataaatcaaaaggatgaaaccaatagctaaaaatggactgaaggagttttccctgggttctctcccttgtccctgggtgtgagaatgtgcattgcgttgtggcatatctttgcagatggcaacttgcgggaagtaataaactgcgttttatgttaagcagagagggggttgagtgagccagccagactggattgtgttggatatcttaggcttcaaggggactaagtctccttgactggtcctgagtagaagggtgggacctcttctttgttagttactatcttgtgccaattgtgtgctaggtgacatttagaatttataaaggacatggcccctctttgtgagaagcttctgtgctgtggtggggaactcaataccatcccttgagaggaggatccgcctacggagaagccatcctagaccccaaaaccctggacttctactcagctaaccaataggataaaactctgcttatcattttgggtaccaagcg

SEQ ID NO: 204631 - DNA, 1000 bp, Homo Sapiens
tgttcaggtgaggactgatgctgctatgtccaggttctagaagtagtgtccagtgtccaatagcacaagctgtagtgtctgtgcccagcattgttgcagacagtataggggctaccctctactttccacagggatccttctcttatacttccaatcttgagtaacagcatcacatcatcctatttgcagttgctggtgtctgtcttcacccaatgagattaaacgaaccttgaacatatctcttgattttgtctcctcccctgtgtcccaccaccactatgttagtttagggtctcattagtgctcacctgccctatcaaaacagcctcctagtgagtttccctgcctctcgtctctcccattccatataatttgagctgctaccagaactgtctttcctgaatgtaaattggaccttgttactttgctctttagaatctttcagcacctctctattgctttgaggataaaatctaaaccctttagcatgacactcaggttccatctcctgccacttcccccagtgtgctatgctccagccatacccaactgcttgtgtttcctgtacatgccacactgatgaaaacctctaggcttttgtttactatgatcctggagagtcctgcctgctccaacattacctgccagcagtaatgacccatcaagtgcctctggtcccaactgagaaccaaccctggtggttcattggaaggccctcacctttagtgagtagaaatgtctgcttccctgagccctggatctaatgtccctagagtaaacagagtcctaggtgcctcctttcttcctcatttcctaattcattcatttatttattcaacacttctttagtgaatgcccactcaatattaggtactgagctaggtgctgggattgagcatagagagatagccattgcccatcttggagggcagagtcagctgaatgtccactgtttggggctagcttgcttgcctgggcttttgcactgtcttctgaattc

SEQ ID NO: 204632 - DNA, 1000 bp, Homo Sapiens
tactataaaatattaaaaattctagctcctgaagttaagcaccatgtgaatttttacaatcatcttaaagttctgtctttcatactgtagttggaatccctatgatttagggcttaaaatggttaaagtgtaaagccctatgataacaaagatttttaatactgtagtataaaaagtatcaaatgagtgtgtaggtctataaaaagtaagaaataatttcaactcaaaatccttttgaaaattcctcctacccactattgtaaaaaaaaaaatctagcatgtatttttctttctttacctacaggttcctgatgtcagtgccataaactggttcaggaaattgttataatataggcaaaacttcatactaatgaagaaattattattttcccaaaactgtggtaagctatttgtatacattattccatcaaatactcacaatggccctataaggcaataatcttattctaataaaaatttaaaaagtgggtagttaatctccccaagtgttgaaaccagtacgtgtcagataaggcctcagacttatctgaaatgaaattgtcttttggaactaataagttttaatccccatcctacatcctagcataccacacaaacttaagtactgcgcaaacatgtcgatctgtttttttttgttttttttttttgagatggagtctcactctcttgcccaggctggagtgcagtggcgtgatctccgcttaccgcaagctccaccttccgggttcacaccattctcctgcctcagcctcccaagtagctgggactacaggcgcctgccacaatgcccggctaattttttttttgtatttttagtagagacagggtttcaccgtgttagccaggatggtctcaatctcctgacctcatgatctgccagccttggcctcccaaagtgctgggattacaggtgtgagccaccgcacctggccatgtcgatctatttttaaaataaatactgtatgggacattgtaagag

SEQ ID NO: 204633 - DNA, 1000 bp, Homo Sapiens
tctttattagcaatgtgaggacaaactcatacagagccactacactggaactctgttgaatttaaaagaaagccgttttcatattgcataccagaaaagaagtatgaaatttttctctctgaagggggtgtggacgtaaagggtaaagaagcagtggacttacagatcttcacttccctgatagctccagaatcaaggagtcagggatatctgcagcagtcctggaaaggttgactgtgacctacaaggacaaggggtcactgttttgggaccaagtaagttggggtgtctgaccatatttaggtatccttttgcatttagggctgtggctccaagatgatggtgtgggcttcttattcatccatttgaaatttatttatttatttatttatttttggagagagtcttgctttgtcgcccaggctggagcacagtggtgcaatctcagctcactgcaaccttccggattcaagcgattctcgtgtctcaggctctcaagtagctgggactacaggtgtgtgacatcaggcctggctacagacctggctaattttttgtatttttagtagagatggggttttgctgtgttgcccaggctagtctcaaactcctgagctcaggcaatccacctgtcttggtacttccaaagtgctaggattataggcgtgagccactgtgcccagccttgaaatttatttattgagcactgcagagagagtcaaaggttggataagatgcattttctgttgccttttattttcttggctaggggtcaccaaactccttttaaattttatgtttttaaatttatttttgagacagggtctgtctctgtcacccaggctagaatgcaatggcatgatcatagctcactacagcctcaaactcctgggctcaagcgatcatcctgcttcagcctcttaagtagctgggattacaggtgtgcactaccatgcccgactaattttttttttttttttttttttttttgtagaggcag

SEQ ID NO: 204634 - DNA, 1000 bp, Homo Sapiens
attagatgtgaacaataaacacaaactgaattttgagagactgaattaaactgaagcccaggatggtgcatggaagatttacaagccacagagattaatatagaaggttctcctttcaagatttgattaaaaagtcgaagagacagcatggggtcacgcagatgcagaaaagcagacccatgaaccacaaagccgagccccagcttcgtttcggggagaatgacagtctcgccagacagtggactgctatactcataattttcctgtagcatgtgctggaaggataaaataaaagaaagcagtgaaatgtcacgcagtgtgaaaggcgtgtatgaaaaggtacagagctgtctttcagtagacagtctacaaaagcttttcaaattgttgcctcataacagctgcagtggtttgattccctaaattcaaaagactttctcttgtgtattatcaaagacagaagctgacttcgctaacccacaaggaaaatagacactgagtctgagggtccaccaggtttcctttccacctgtctggaggtggactgtgtccagcatgttaacctgacactggggagcgagcccttctccttggctccagaacaggacattcagagctgaggtgtccctgcctgcagctccagagaacgccttcctgacccacatccacaggtcagaaccacgtccacacatcaggggctacggcaaagcagcagcaaattttcttcggaagtagctctcttaaatggatcttttagtttaattatgttcttctaagccccctctcccttcagtaagtagaacatttcacatacggattatcctctgcaggaaatgaacacaaacaaatggtttttagtctttcagaacacaatcatatacttgggcattgttccattctgaattcattacacttcccctctatcctgttttaagggctctgatattttttactgaatataatgatatcaacatgtaatgatatggctcatatttctggc

SEQ ID NO: 204635 - DNA, 1000 bp, Homo Sapiens
gtcccctataccagctctagctccaggagaaattagatgcagtgagaataatgttatgtttcagttaggtagccaattaattttgagaggaagttagaaaaccaaccaacctctctcctcctccttctttcctatcctccctgccttcctccttctattcctctctcccaccttccttccctgcctcccttcttctctccctctaaattatttatggagcaattacatgtcaggcatgatgtaaagtctgaagaacaaacatgaataagggccagtccgtgctcttggggaactcacaatcccttggaatatttcaggaacccgaagcagctctttacgcgcccctctctatcagttgttttttccttcctgtctttacttctgtacttctgcgtccactatcaggcccagcaaacctcttctccctccagccccagatccctctgttttgagaaggggaaggtcaagctcttgacaagcccctcccgtcccggggctacactagagtgggcagtgatgccacaaacaaggcttctaaaagccccgagcctttgagctccttgcactcatctggacgcagctgggcccgggacagcccaaattctgcaggtcataagtcacgctgacttccaattctggaacaaatgaacagttccttggcttccatcctcttcccctcatagccactgaccgactgtctcatatgcccagagccacccaccacaccccattcctctctgctactcattgcagagacacttagagccccatcacccacatggtccagtctcaaagtggttgtcaccaaataaactcagtccagcaaccaaaaaatatttcagaaaaactcaagttattggtacaccttctctgatgcaatgaagaggatggggtaggccagaacagtacttctcaaggtcctaatttttctctcccatttatttctgtacatatcagatctgatctggcacctctcctttccaaaactcccacctcccaa

SEQ ID NO: 204636 - DNA, 1000 bp, Homo Sapiens
actctcagagcagctgataaggtgctagagaagtggggtgccgtggctcacacctgtaatcccagcactctgggaggcagaggcaggtggatcacctgaggtcaggagttcgagaccagcctggccaacatggtgaaactccatctctactaaaaatacaaaaattagccaagcgtggttgtgggcacctgtaatcccagctactcgggaggctaaggcaggagaattgcttgaacccgggaggcagaggttgcagtgagccaagattgcaccactgaactccagcctgggtgacggagtgagactccgtctcaaaaaaaaaaaaaaaagaaaagaaggtgcaagaggccgagatgctactaagccgacacagaaaacaaataggtctcagctatgagctccaaatttcagtattgattgctaattaatctgcttctcacatgagcaactctgtgttcctgggtcagcagcagggatttgtttgtatcattcaattatttaatgatagttacaaatttaacttaataataatatacaatgatatgctgaataatggaggtaattatacttaacatcataattttaatatagattgtatctgcattcaatgtaaggcattgtttcctagagtcaagtcccaggactatgtgcatcagaaacatttagtgatacttattaaaatgcagattcctaggctctggctcagacctgatgagaaactctgggaggtgaggtccaggaatctacgttttagcagaaccccatgtgatatttatgtacattaaggtgctagaaccccatgcttctgtaattaaggaagctcaaactacagagtattggaaaagcttttacagggagaagcatctgaatcagaaagttattcccaaggggaacccagcctggggacagagggacacaataagtgttcccagctgccttaggagcctaggagctgcaaccctctccttccctggagctccctgtgctgggaggagaattc

SEQ ID NO: 204637 - DNA, 1000 bp, Homo Sapiens
gccaccccgtatgaacaggattcttcatacatagctttctttcactttctcatcctgtagaaaagatgtgagaactgcaacgtccactactgtctggtttttgtgtaatgagaggtcttttaagtggtcatcatcactttggtccttggcaaagttcacaaatacctgttaaaagattaagatggacctttataaataccactcaacttgctcattctttattctagttctatttttccagatgttgaaattaggtcaagtaggagcatacagaattacataaatggattaactagaaaactgtgtgtgaaggagggaagaatacttgaaaaaagcaataacaacttaaaaatagactttttttccccccttgaaatggggtcttgctctgtccccaggctggagtgcagtggcgagaccttggctcactgtaacctccacctcctgggttcgagcaattctcctgcctcagcctcgcaagtagctgggactacaagtgcgcaccaccatgcccagctaatttttgtatttttagtagagacggggtttcaccctgttggccaggattatctggatctcctgacctcatgatctgcctgctcctcagcctcccaaagtgctgggattacaggcatgagccaccacgcccggccaaaaactgactttctatatcgccccccacccctacatcaccaactgctcagtcatccatttactttggcacatacggtcttgattaaagggaagagggaagaaaatatttactgagtacttcttaagtgtcaggacctatttggtacttttttatctaatttaaataggattaggcaccaagtaaaatgcctggcccatggtaggtgctcactaaatggtagtttttatggttattattacagtaaattctcacaataatcctatagagtacataggcatcatctcccttttcaggttcagagaggtttagtaaaaagcatagctaggaatagtagatcaggaattc

SEQ ID NO: 204638 - DNA, 1000 bp, Homo Sapiens
ttctcaatcaccctctcttggcagaagtgacaggatttggtaacactcttggatggtgtttaataattaactgcaagtcctaattcaacaaaaagaatactatattccattcactttattgtgtttaattaatttcagtataacatttccaggaattttcatttgtattgtcattaaaatatttttctatcatttgtaagactggggaataaatggagccagctactatgtctttaattaacttcctcctgtttaatattttaatcatcttttccttattaaaattgtttgcctacttcatttgtactactaagtcacaacggatagatttatctctttaaataaatgaacttctgcttaccctaaagcaaaaagttcctgtacaaaaaatttattgttctaaaatgtttcatttaaaataattattttggccaggcgtggtggctcacacctgtaatcccagcactttggaaggccaaggcggatggatcacctgaggtcaggagttcaagaccagccttgccaacatggcaaaatccatgtctactaaaaatacaaaaattagctgggcatggtggcaggcacctgtaatcccagctactcgggaggctgaggcaggaggatcacttgaacctggagttgggggaggctgcagtaagccgagattgcaccactgcactccagcctaggcgaaagagcgagactccgtctctaaataaataaattaattaaaaatgaaataaaataactgatttaggaacccagtctcaagagcacaggatttccagacctagccctaatagttaagtgtgtgaattaatgccatttaatctgaattgtaatttttcgtgtttctgtcgttcccaataaatgacaaattccctaaagatagtcttcctcattgctggcacacgtttgataagtaaatgaattattaagtgtattctttgttttaatcatttcttttcttaccggtcttcttttttgggtcactgaattc

SEQ ID NO: 204639 - DNA, 1000 bp, Homo Sapiens
ttaaaatcatctagaaaacaaaagctactgcaaacaaagtaaaatgcaaatcacagagtgagactagatacattttaaaaattagcatctggaatatacaaaagttatatccacaattcagtgagaacatgactcaataaaatggaaggtaaagggtatacattgaaaggtcacaaaagacaaaatacgaatggcttctaagcatataaaaaatgtttgacctcattagtaatcagggaagtgcaaagtaaaacaaggagatcttttcattccgatcatgcctggcaggaaccttctccccagatgctacaggcaggaagccaaggtggagaaatgtccaaggcccataacatgctttgcactagatgggcaaaaattaaaaatgacaacatcaagagttggtgaggatgtagagacataggaattcttacaccctgtccatggaagagcatggtttaatttacagcggaatttggcaatatttagtaacactagagatgttcatgttctagttttcagcatttccatttctaagaatatacggaaaagactcccacgagttcccaaagtaactggtaaagccaaagagtatttactgcagcactatttgtcataggaaaaaaaaaaaaaaaaaaaccttttatagtggtgggggagaggaaggagccaagaatccactaaccaaaaaataaatgagtaacttgtagtgtactcacataatgtcatacaacagttaaaatgattgaaccaggaccacatgcatcaacatggatgaaactgtagaaacataatgcttagcaaaaaataagtttcagaatgatttattcagcatgatgccaatgtagtaagtttgaagaaatgtaaaacaatcttgcatgcacataccgtgtgtgtgtgtgtgtatgtgtgtgtgtgttatacgtatgtagcaaaaatagaaaaccatacatagggatgataaacatcaatccctctgggagagttggaggagaataagatc

SEQ ID NO: 204640 - DNA, 1000 bp, Homo Sapiens
caaaaattagccgagtgtggtggtgcgtgcctgtaatcccacctactcgggaggctaagacaagagaatcgcttgaacccaggaggcagaggttgcaatgagcccagattgtgccactgtgctccagcctaggtgacgagcaagaccttttctcaatggaaaaaaaaaaaaggcaaactgaataaatcataagcaatgagatatttacactttagcttttaatatatgaactgttgaaaattgaggcctgtcatgcattgtaaaataatgagcaaaaaaagtttaggctccagaattctgatactgtgcctggatttgaattccagtcctagcacttaccatctttgtggcattgggcaagtttcctaaaatctctaggagtttctttaatcataaaattggaaaaatggttataatctcaggttgtcatgaaaactaaacccaggatggcttatgttcttcacttgtcatttagtagatccccaataattattagttatctttccttctttatatattaactttttattctttcattcagggactttttttccttttaaatatatgcaatagttaaacaagtccctatggccctcatgagactgtatttacccattatgtttctctattggatcttttctatgttgttgtttatcccatcctattaaaaaacatgttatgtattccatcttaaaaacgcttttgacctttacatctctctgtagctactgcctctttcttttcccagactattgtctaaattcaattttaacctcagttcctatcctcttataacaagatcctcagtgacttccacattactaaatccagtgattagttctcaggcctcattttactttatttttcaggagcatttattgattctgccctcttttcttgaagctttttctttatttggcttctgggacacttcgtttgacaaatttacctcctacttctctggccacttgttctcaatctgtttactatttgtttcctt

SEQ ID NO: 204641 - DNA, 1000 bp, Homo Sapiens
gcctacagtgcactttaaatccagtatttgttgattcttttttgcctaggatctgtctaatgttgcgagtctgatgttgatgtccccaaatattattgaccccttttattattatataatgaccttcttgtctctttttattgtttttgacttaaaatctgctttatctgatagaagtatagctattcctacttgcttttagtttccatctgcgtagaatatctttttgcatctcttcattttcagtctatgtgtgtcttaatgtctttacaggttaagtgaatttcttggatactttttcatgttttcatgatagtgattattgtcttcgcttccagatgtaggactttcttaagtatatcttgtaaggctggtctagtagtgacgaattctctgtttttgcttttctcggaaagaatttatttctcccttatttctgaaggatagctttgctggatgtaatatagttggctggcagtcttcttttttttcttcaacactttgaatatatatcatcccattgtctcctggcgtgcaaggtttctgcaaagaaatctgctgttagtctaatggggattttcttatatgtgacttcaagcttttctctagctgtttttagaatttcctttatatttgacttttgacagtttgactataatgtgccttggggaagacctttctgggctgactctatttgggaattcttgaacttcctggttttagatgtctatacctctccccagtcttggaaagttttcagctatctcattaaataggttactaagccttttcccttctcttctccttcttgaactcccataatgccagcatgtattcacttaatgttgtcccataaatcttataggcttccttcattctttttcgttcttcctgctttttttctctctgactaggtagtttcaaatgacagagattttttttctgcttcatccagtgtgctgttaaaactgtctattgtattatctcatccattgaattc

SEQ ID NO: 204642 - DNA, 1000 bp, Homo Sapiens
tccaaaatacctgaccagtattcttcaaaactgttaaatttttgtttggagatagagtttcactctgtcacccagactggcaggctggagttcagtggtgtgatctcagctcactgcaacctctgcctcctgggttcaagtaactctcctgcctcaatctcccaagtagctgggattacaggtgcccaccaccacacccggctaatttttgtatttttagtagagatgggtttcaccatgttggccaggctagtctcaaattcctgacctcaggtgatccaccggcctcagcctcccaaagtgctgggattacaggcgcgagccactgcgcccggcctaaaactgttaaaatcttgaaaagtaaaggaatatggagaaactgtcacagatccaaggacactaaggagacttcaaaactaaacacaatgcgggatcctgggttagatcctggaacagaaaaaggacattcatggaaaaagtgctaaaatcggtttcaagtctttaatttagttaatagctctaatataccaatactagtttcttagttttgacaaatgtgccatggttacataagataccatgttagaggaaactgagtgaggggcatatgggaactctacgatctttgcaacttatctgtaaatctaaaattactcgaaaaaatgtttaattttttaaccatgctcccatagatggggctgggcagaaggccccagtctactagctcaggcataagagagtcatattccttcaaaagattgcatgtatgggccgggcgcggtggctcacgcctgtaatcctagcactttgggaggctgaggtgggcagatcacgaagtcaggagattgagaccatcctggctaacatggtgaaactccatcaatacaaaaaattagccaggtgtggtggctcatgcctgtagtcccagctactcgggaggctgaggcaggagaatggcatgaacccaggaggcggaggttgcagtgagccgagatcgcac

SEQ ID NO: 204643 - DNA, 1000 bp, Homo Sapiens
aattttgtaataaaactgtgttttacagaattctaactatgtgtgaggggctggattatttcttttattcctcatactaaccttataaataataggtgtacttattttccccgtgtcacagatgtgataactaaggcttagagaagttaaataggtagcccaagtcacacagtagtaaggggtggagccagaacttaactcttgtctccagatctccatgccagttaccagtgcagtattctggcaactttaggctggcagggtaacatacggagttccaggaaggttgatctctttcaataaaatatcaaccccgtccctcaatatgcgcatatgcctaaaatttttaactttaaaaaatgtatttctggccaggcgcggtggctcatgcctgtaatcccagcactttgggaggccgaggcgggcggatcatgaggtcaggatatcgagaccatcctggctaacacggtgaaaccccgtctctactaaaaaaaaaaatacaaaaaactagccgggcgtggtggcgggcgcctgtagtcccagcaactccggaggctgaggcaggagaatggcgtgaacccgggaggcggagcttgcagtgagccgagatcgcgcctctgcactccagcctgggagacagagcgagactccgtctcaaaaaaaaaaaaaaattatttcttaggggcctgaagggttaggagggaaagtttctcaaatccactattcaggtctaaatacctctgggaggtgaagagctggtttgaatatacaaaggttctcagcctcagggcactttagaagcacctgggttgtttttttgtttgttttttgtttttgtttttgtttttcttttttgagatggagtctccctctgtcgcccaggctggagtgcagtggcctgatcttgtaatctccgctcaccgcaagcgtagcctcccgggttcgcgccattctcctgcctccgcctcccgagtaggtgggactacatgagcgcccgcca

SEQ ID NO: 204644 - DNA, 1000 bp, Homo Sapiens
atttgccaagtttacaaagatagttctggcctttatttcaaggataggtgaagagatcaaggctcaagcaaagacaatttacggaaaaacattctttagagacaaacttcatcaatatatctttttcttaaggaaaagtgaagaaagggagaactctggttggccgtcagtgtccttgacttgtctccttcccctatttaaaaatagaatcagttaataatgtttattagtgttaatgttggacattttaaaataccctttgcttaagaattaataactttgttggatggctcaaaaattgtgttttggaagttgataaggtattgattttagatttaacatggtacaatatcaaatcatggcaaaaatgatccactttatgatttcactgactcttttcaataattaaggtttctctaagtgtaaagtgtaaagatttttagaggaagatgtggaagtactcataatatagttcttagtctaaatttctaatgagattttttttttaactaaggaagttttaagaacagatttacaaaacagtgattattgaaagatggtgatacttgctcttacctttcccatgatcagttgagctgatatggtcaactactaattccattcttagtgctatttccaaagcagtatgtgaatgaagctgtatttaaaacattcatttaccaagtagatatttattaagcaagacttttttctccaaaatctgagtttccttttttaagaaaatattttacgaatgccttttcttgttgttgtaatgtttagcacatgtatgactgtgttcatgtgcacatttgtttgcattagtcttacttatagctactgtttctttgggctgtctgctacagtctggcttgtgcttcttccacactgctgaaatgcttttgctaaagtaccagtgaccttccagttgtgagatatctttcaaatttttccttactggctctgttactttggacggtttatgtctatcttggaattc

SEQ ID NO: 204645 - DNA, 1000 bp, Homo Sapiens
gatgaaagagccatcatgacgtacgtctcttgcttctaccacgcttttgcgggcgcggagcaggtactcaacacttgtccgtccgggctgttgtgttactctctgttggttttagttgtgtgtgcatacttgagtgtgtgtttgtgcgcttcacatcttaccttggaatctttctgagtgttttctaataacctcatatggcaagttctaaactgtgaaaacttttttttaacagctttaactttagacagttcctgaaatgtttttatgtgttttacttttaatgcatttcctttatttcattagtaagttgtggaaagtatttgtgctttagaaaaaaaatgccatgaaaattgagccacatgcattgaatggtaaagggggaatgtggcaaggagaaatgaatgcctttccaacccggccttgttctctgcttagaaattgccttcacagttccgtgatttggtctaacatccttcaagactaatcttattttaagtgaaatagtggaggggataacagagttggaacctcaaaaaatttcacatttctcaagacaaatagcccaagggaccttgaggaagaatggccctcagctttctgcatattcacctgtttctgttcctctccttggaggatcttgatagactgcagtgggcggagtatgcattatttcagtgaccgctgtgaagcccatcactgggaaaggatgctaacaggctgatgaggactttaaaggaaaggcctggggacaggctgcgggcccagaagccagttaggcaagcttctcttgttccatcagacagttatggttcaaggcgctttgccactcctgccccaagttcctttccacgaaagatgacagagaattgtgtattacctcaatgacttctcatctaggttagacaaagtcttaaagcacactcagctctgtggaaggatcccctccagaaagttctacatgttcatatcaggagatgaggaggtcttcagtgaattc

SEQ ID NO: 204646 - DNA, 1000 bp, Homo Sapiens
attcacaccattaaagagtttgtatcttagcatgagggaggaagaaaataaacaatagctaaaaaaaaagaaataaattatatagtatatttgaaagtgaagatgaaaaaaataaaactagtgtaggtaagtgtgatcatcagagaagcaagcaacattaaatggggtggtcactattggaagatgacatatgatgatgagagaatttgtctttgaggaagattccagctagagaagacaattctatatccctaaattgggaaagcacatgcatgcctgaagactggcaagagggctagtgtatggaagtaaatgatcccgtgaaagagtagtaggaaataaagtaaaagagacatgtataatcatgaaaatcactgaaaggtttggagatattgtggggggagtccttgtttgttggttttttaatagcagtgatataattcacatatcataaagtttataaagtatacaattcagtagtttatatatattcacacaggtgtgctaccagtatcacagtccaactccagagtatttccatcgctctccaaaatcaccatatctattagcaaccactcttcaagtccgcatcccccagcctttggaaaccacagatttcctcaccgcctctaagaaattgcctattttgaggctcaaagtaaagggttggaggaagatctaccaaccaaatggaaaacaaaaaaaggcaggggttgcaatcctagtctctcataaaacagactttaaaccaacaaagatcaaaagagacaaagaaggccattacataatggtaaagggatcaattcaacaagaagagctaactatcctaaatatatatgcacccaatacaggagcactcagattcataaagcaagtccttagagacctacaaagagacttagactcccacacagtaataatgggagactttaacaccccactatcaacattagacagatcaatgagacaaagttaacaaggatatccaggaattgaattc

SEQ ID NO: 204647 - DNA, 1000 bp, Homo Sapiens
agtttctatgtatattccattaacatgtcaaactcagtttaatgtttattcattttcctggaacagtattgataatctctcaaagttctctgctataaccagttttcttttcatttgccttagagatggtttttcatttgttcaagcagtttttgattagctattttttctctagccagttttgctcatttttggtgctttctttctcttatttaattctcttgataaaaatcacatgaacatttgtttgtgttctttgatctatgaatgcattactactttatttgaagtatttctaattcctctaatttttattttcagtaatgtaacgtttctctagagaataatattattgggtatttggattatgttgggatccaattaaacagttaaggttattaactacttaagcattcgcctgatttttattctttgttttgtggttgtttttatttatttaattctatggctgtgtactgagctcctacttctatgctgtatacaaatgtttagcaagttagaaagatattagtagaaataagactcttgccagatctttcttctgaatctcagactcatattgagttgccttcctctgagcatctcataggcatctcccatggttgattttatatgtaaacttgactgggccatgagatgcccagatacttggtcaaacattattctaggtgatcctctgagggtgtttattggtgatattaaaatttaaagtagtagactgagtaaagcagattcctcattgatgagactggatgagattcaatgtcattcaatcagttgaagccctgagtagagcaaaagtctcatcctccccaagttaaagagaattctcctgcctgatggcctttgaactaaaacactggctctgttcttgccttcagactcaaagtaaaatataggctcttcctaggtctcaagcctgttggccttcggactggaaatacaccatgggatctccttagtctccagcttgctgact

SEQ ID NO: 204648 - DNA, 1000 bp, Homo Sapiens
aggtaaatctgagcaaaaccgaaatctatattaacatcgttctacccattctaatttgctaattttcttaaacagagaagatagaaacaatagcagcaacaaaacaaattagcagttctttctccctcagtttgtgggcttatttcttttttccttaacacagctaatattttataacctttcatatttggagtatctataaggattcttgactttacacacctcatactctttttaaaactccttactacattgtttaatcattcatattcatttttttgttatacatgctttgtaaaaatgtaagaatctatgactaaattttcatttgtaaaatcaattgttttctttaggtaattattgtgctattttctggttataggtctatttgcaaagatagagtcataattgtatctttagtttcttactttcttcctcagttacgttttcttggagtctctgggtaacttcccattactagctgtgtgttttaagttcatagaatttacccaacccttctcatcatcttcttcctttacttttatgcacctcaaatactttgtttctacttagtatctgtgttgtggatgcaaatcaaaatccttacctataagcgaaatttaaatgagttagaattcctcccaagagagatcccgtcatttaagccttctctttctcatccatatcttgtactcattagcagactatcctctgtaatattttttgctgggaaatgctacaccattttccagtgacaaagtcttcttttattttcctttcctgacatgaacatctccaaattcaattttttatattttttatcataaaactggtgtataactccctgatacgcagtgacacacatttctcagtcattgtattgttccttttgaaaaattagtgaattttctcctactcttcctctttagaataaattatatatgattccatatgtatgtataaatttcccttttctatgtttttttaaaataatgaattc

SEQ ID NO: 204649 - DNA, 1000 bp, Homo Sapiens
atttctcttctgcactgccctaacagaggttctccatgagggctccacccctgcagcaaacatctgcctgtatatccaggcttttccttacatcctctgaaatccaggtggaggttcccaaaccccaattcttgacttctgtgcactcacatgctcaacaccacatggaagccaacaaagcttggggcttgtacctacagaagcaatggtctgaactgtaccttggccccttttagccacagatgtagtggctgggacacagggcaccaagtactgaggctgcacaaagcagcaaggcctggaccctgcagacaaagccattttttcctcttagacctcctggtctgtgatgggaaaggcttctgtgaaggtctctgacatgccctggagacattttccccattgtcttggtgattaacattaggctccctgtggcttatgcaaatttttgcagctggcttgaatttttccccaaataatgggtttgtcttttctatagcattatcaggctgcaaatttttccaaacttttatgctctgcttcccttttaaacgtaagtttcaatttcagataatctaagttcaaagttccacagctctttagggcaggggggaaaatgctgccagtctctgcttaagcatagcaagagtgacctttgctctagttcccaataggtttctcatctccatctccagacccaaagtcgcttttacattgctgggtatctttacagcagtacccaactctaccagcacgaatttactataatagtccattctcacactgcaataaaaatcttcccaagactgggtaatttataaagcaaaaaggttaaattgactcacagttactcatagctggggaggcctcaggaaacttacaatcatggcaaaaggcaaaggagaagcaaactggaccttcttacatggcagcaggagaaagaacatgtgtgtgcagaaaaaacttcgatttataaaaccatcagaattcatgagaattc

SEQ ID NO: 204650 - DNA, 1000 bp, Homo Sapiens
aggacactcactgggtttccatccctgcctcattcaacatccccccggggtggtctcatcgtcatctggggctcagctctgccccactttcctaaatctgacttcagagcctgcaaacacccacgcccagtgtaaccctaagtccacgtttaccccagagagtcccaattttatatgttttcccaacatcaccttagtgataatttatcctgtaaattccaactgccttcacacctcacccccgctgtctcccagcagaccccacacccgggtctgtgcatgccgccctgctctgcccacgcgggaccccccccccccaccctttctggaggaatcagctggcgatcatctcctcgtggaaggctgccctgacttccaaccctctccagcagaggcaggggccctcctcggtacttccccccaaaagctgggccaagcatggagacggcacatatcctagctgtgcctgggatgtcacgggcggggtccccagatgctctgcacacggcctggggcaccacctgaacacagcaagtgctgaagaaataaaaccgacatgcactgacctccgatagggcctcctttaccatccacatccgtctcccctctggacagtaaagtccacaagaaagggagagcttgtctcactcaccttcaaattcccagggtcaccctggcaggtaaaggggactcgaatgtcttctgaaagcagcagctggttagctgccgagttaaagggcctctgaatttcagagctctgtgtaggagtccagcacactttatcatgaatgactccaaccacggcggaactggccgtggaaccagtgccaaccaattcagggtgtgttcaccgtttctcagttcattatcacaactcactaacagagcagccgtgcacagatcctcagacgtttacgcagtgggatgacagaggggccgacggtgctgagtcacgtgaaggtcccgttgcagactgggagagaacggccagacatggacc

SEQ ID NO: 204651 - DNA, 1000 bp, Homo Sapiens
gcatcagaatggctactacgaaaaagtcaaaaaacagcagatgctggcatgaatgtggagaaaagggaacgcttacacactgttcttggaaatgaaaataattcaacttctatggaaaacagtatggtgacatgttaaagaattaaaaatagaattacaatttgagccaataatcccactggtgggtatttacccaaaggaaaataaataattacattaaaaaggcatctgtattcatatattcattgcagcactgttgataataaccaagtcatggaacttgggcaaagaaaatgtgatgtatatatatacaccatggaacactatacagccataaaaggaatgaaatcatgtcctttgcagcaacacagataggccaatgtcctaaatgaactaactcagaaacataaaatcaaatactgcatgttctcgtttataagtggaagataaacaataggtgcactggacacaaagatgaaaagaatagacattggagactccaaaaatggtggggagaagagggcaaatatgggttgaaacattatctattctgcacaatgttcactatttgggtgatgtgggtgataattacactagaaccacaatttccacattacaccatatatccatgtaacaaacatagaatgtacctcctgagtctaaaattttaaaaagttttttaaaaactcgataaaaagacaaccacatttttaaatcagaaaataatttgaatatatatttctccaaagaagatatacaaattaccaataagtacatgaaataatgctcaagatcattagtcagaagggaaatgtacatcaaaaccccaataagacaccacttcatgcacactaggatggctataatcagaaaagatagctaataaaaaagttcagcaaggatgccaggtgaaaaggcaaaatggtaagccattataaataatagtttggcaattcctcaaaatggtcaaaatagatttatcgcataaatgttgacagta

SEQ ID NO: 204652 - DNA, 1000 bp, Homo Sapiens
ttgtgccgacttcctatgacctagaatgcctaacttcctgggaatgcagcccagtaggtttcagcctcattttacccagcccctattcaagatggaattgttctggtttgaacatctctgacaggaacccaaggtaaagggataattaaagcttggacctcacctgtgtatgaccaaccatgctgtagggaaaacagcagcacaatcttgaggtagaatctgggtctcctaacaccaaccaggcttgcctgggcgtaaccaggaagtggaatattttagtgcctgtgacattcctttgtgtcccagtggagcataaacagattcagtgtttggctaagtgctggaagagcagcccagggtcccccggcccctgctatgcatctgccttgattgatgtgcacagtggaagtggctttcatcggagaagcaattgtgtgtaggttcctgggagaaaagggaacatgccacttgttccctggttaggacacagggatgatgcttgaaccctagggagagagtaggcaaaagataaaaaggccacatccgtgagcactttgtgtggcccaagagcaggagcagggctgcttcagagcccaggtaacaaagtgcagatgagaatcaggagagaggtgccagtgaggtgtccttctttttttttttgtaggcatcctgtggtcgtggcacaggtagggacaggtaaggaagcaccgttggagggaagcaagacgtttactgctgtaggagcaagatgtccccatgaggggtacgtggaggacgtttctgagctcctgtgggaactgtctcaggaatgtttgcatttgagctggaagcttcttgtcatggatgaattacagctccttgatgatgaccctgtggagggtgtgtcaagtgatcgaggatacttttgagtaggctgacctttccttctctccatatcccagaagggtcctctttcctatctgtgggtatttctacctctgctccacacatctctagtctt

SEQ ID NO: 204653 - DNA, 1000 bp, Homo Sapiens
catctcagtcacaaggacagcaggggcttctccagctccctgaagtcccctctgtacacccttcccctttgggagcccagaggccaaggtcaagtttctggaggaggaggaggcactgtctggattgctctggcaggagcattttaagagccctgttcagccaggcgcggtggctcacgcctgtgatcccagcactttgggaggccaaggcgggcggatcacctgaggtcaggagttcgagaccagcctggccaacatgatgaaaccccgtctctactaaaaatacaaaaattagccaggcgtcatggcacgtgcctgtagtcccagctactcaggaggctgaggtaggagaatcacttgaacccgggaggcagaggttgcagtgagccgagatcgcgccaccgcagtccagcccggcgacagagcgagactctgtctcaaaaacaaaacaaaacaaaaaagagaagggcttttagaggttcacttgtctctcacaacctcagaagaaaaaccaggcgggatgactctccagctgaggagactgaggctgagggactgcctggtccttggctgtccagggaggggctcattccctgctgctctgctgccagactgttcagaggtgaaagcctcacattggcagaacccaggtatttggtatctagggaacccaggaaataacaatcaggccaaacactggccctgtcctgaatcctttagtccccatccttcagcacccccttgtgagggacaaccaggcacatcacaccctcatggatgcagatggcatggactccttcacttggttacaacccacactcacctggggtcttttctgccttctgtggacctattggaagatctaaggggggcatttgaaaatgaaaagggagcttgcagggagagcagccaactcagcccatccaagagcagacagacccctgcacgccctgctcacagctctgtccctgtgccgctgtggcctggcgctgcgtctggg

SEQ ID NO: 204654 - DNA, 1000 bp, Homo Sapiens
aacaggtttttttttttttctttttttctctcaccaggtacagaccagtctgtacttcttacctggagcaatgggggttcccagaccctcaggagggccagcctcctctgaagacccagcacaaagtggcttcccaccggcaggaagaggtctcccacctaacagaggtggtgggggctgcttttctggctgttcatcccacttgcagagcacagtcactaacttgaccccctgacatgtctattgtcagtgcacctggtaaaaccccacaaggaagcctgcctttgaaccactgttatttgctattcttaacatttagctgcaagataaaaagagccccaagatgacacactttacaaggtctcaaggaggggtttcaagaagactcattgtgcaatgtataggaacaagcagggccagaaatcacttacatcaaacagtgcttgaaggagtgaattttaaatcttatttaattttaatgaactggaatgtaaatagtcctatggagctggtggctgctgtattggactatgaaggtctagatgctctgtgatgggactgcagaccacaggaggaaaatctgatgtagggcacgtactgttccctaagccccccttttcctttcaccaaagtgacagagccctggagtgtggcagcgtaggctgataatgtgctatttgcccagctggcctggaggctcctgaaacaacttctctgatttgctccggtgttcccctcaatgaccagccaaggatgtataaagtgtgccgctggacttgggaatgaatgcaagccctctaaagtgcctgcatgtcattggacagaatgcatccctccccacctggcactgattgcataaagagacagagggtgctgggctgtgagggcactcagaggctatccacctgccccatgccacagatgagcagctgggtgagtggtgtggagcgcccagactgcaagcaaggtgatgattccaaacctactcccacatgaattc

SEQ ID NO: 204655 - DNA, 1000 bp, Homo Sapiens
ctcagctgcagtgtctttgtctctacggtcatgccgtggtgtgctctaattttcagtaattagatttacaggcaacaattgacacatgtccagctgccaagtattgtacctgataatttttttcctcttctgaatgttatcatgtaacttaggtgaaaggcttagaaacagaaaaatgacaaaatagtttaaaatagttgctttatcagagttctgatgatattcttatgagctattcttatttggaaatgcaacacttgaagctgtttttgaaaacccagtggggagagggtttttagagggctttgtttcggttacaagaattaaaaatttaagtgccaagagatatactattaacaaacaaagtccatacagtctgtacattttcagtcagaatacactggccttgcaaaaatttcagtattaaggaagtttatgcacagatactaaattatttatcttgttattgctgctacattaagtaatgattttttttcctttttctacctagtagttttgaacaggtttagtgatgatagcaaagtaacaaatttaatatattgaaaagtttccttttgaaaactcaaaagattatataaacttcacaaagaatgaactacttaacccatgttcatgataagattttacaggatttttgacgaacaggaagactgggaaattaataatattcttttaaaaagttttgacaaacatttttaatacaactttgcaatcttgtttatattaaacatacttatcaagatactaacacccacttattgtggcttagtccttgtacatataacgaaacacacacacagaaactggagtttcaaggcttattttcaatatgtataatcctgactctgaagttgtgtcataagtcaagaaataactttcttcaaaaccgtttccaatattgctattattttctgtgaaaaaaggtgaattttcttctacaattatgtttatttaactcaatttcaaaagccttttccac

SEQ ID NO: 204656 - DNA, 1000 bp, Homo Sapiens
ctccatcctgacatccccagaatctaccacagtgtcttctgtattcagtgctccataccagtttgctgaatgaataaatgaggttggaggacagcagcttgagagactgactgaaagagagagagcccagaagcccaggcaggagagcaagcaagggtgtgggtaaggggtgatgggctgagagcagtggagacacaaggaggatgctggtgtctgggacacttggattctaggctccccttgtcaactgactggatgttggagtgaggaggagacctaagaaattttgtgcccagacagctgggatgaatgcggacaagcaaaaatggacatcatgagccacagctagggccaaggataagggagggtctgctgtgtacataatgctcctaatatgtccttactctaaatgctccaaacttgggacacttgagttccaggccccccttttcaactgactagatgttggggtgagtgagagatctaagagatttttgtgcccagacagcttggatgaaggcagatccctgaaacaaacactgatgtcataagccacagcgagggccagggataagggaggctctgctgtgtgcataatgctttaaccgtgtcctcaaagggaacaatgcaaactccagaacaagaaactcctgagccctacagaggcattctactccattctcttactcacaaaatcaatagacaaatccttactgaatgggtaccaacaacaaatatacataactctatgtagatggggactggtgtactggtgtgcccatccatccccacccccagcacagcctgctggtgccaggacaggctggacaccatcaagatatgatggggaagtctcaacccagacctaggagacagtaagtatcattggggctcttgcaaggtttacctggttcccaggaggatgctcagatatcgaactcatatctgtttttctctaacatactgcacttgcagaagttcctcagctgcaggtgaattc

SEQ ID NO: 204657 - DNA, 1000 bp, Homo Sapiens
ccttgtgtgtatgtatttttaaatatttacacacaatatatattcatgtatatgtatgtatgttgtatttttgtggttttgtgttttaacatcagctgcggtagaaagagaagggtggctctgctaagagtccctcctcaactggcctctggctgcaacgtaaatgacctcccttgttccctaccagcatggctggagcaaaaacgccagagtctcacgtacaaacattacctggagtcttcctactgcactcctgcactgtggcatccagagaaacagcgtcacttggggagaatgtcatgcactcctgcactgtggcatccagagaaacagcgtcactcaggggagaatgtcaggcagggatgagctgccttgacttgaaatggtcttgcctctcatctcaattaaaatcaagccattaactggctttaatgtagagattttgtggttcagttttcttcagtggtatccattataaaaaaagatgggggttataggtagcagaactgattggcatagttgtcaggcatatagtatgtattattaatatttaatatgtattattaatgttccctacctatagtgagagctatcctggcttaatcagttatccttcactccaggacgaaaccatgctttctgtggttacctgaattccaggtggggctaagcacagctaagagtatctggtagcctcttcaagtggcttttgtatcacccaaaccttttaaaaactgccacacaaactgataaaaacgtatacttctgtctatccttgattgaatgtaattgtcactatttattttaaagaaatggacaacttagagccctattgcaacacatcccaaacccagctcacttaaaccattaatcaaaacatttttcctccctacctgtggtctgtaaggaggatacaatctagtctctgattgcacaattaaacaggtgcagaaagcagtctatggattcatgccaaatgagtggtactggaagggaattc

SEQ ID NO: 204658 - DNA, 1000 bp, Homo Sapiens
atgttgacagtggggtgttaaagtctgatgtggagcattctttcatatacttgttagtcacatgtatgtcttcttttcaaaagtgtctgtttgtgtcctttgctcacttttttatgggattgtttgtttttaattgttaacatgtttaagttccctatggattctggatataagagctttgtcagatacatagtttgaaaacatattctcccattctgaaggttgtctgtttacccttttggtagcttcctttgctgtgcagaagctctttagtttaattaagtctcatttgtcaatttttgcttttgttatgattgcttttgtcatctgtgtcatgaaatctttgccaggtcctatgttcagattgcctaggttgccttccagggttttagagttttggattttacatttaagtctttaatccaacttgagttgatttttgtatatggtgtaaggaagtggtcgaatttcaatattctgcatatgctagccagttatcccagcaccatttcttgaatagaggaagtcctttcctcattgcttatttttgttgactttgtcagagatcagatggtggcagatgtgcagcattacttctgggctctctattctgttccattggtctatatgtcagtttttataccagtaccatgctcttttggttactatagccttgtagtatattttcaagtggataaaattatgtctccagctttgttcttcttgcttaggatcaccttagctatttgggctcttttttggttccatacaaattttaaaatagttttttctaattctataatgcttcattagtagtttgataggaatagcattgaatctgtaaattgctttggacagtatgatgaatttaacaatattgattctttcaattcatgagatggaatgtttttccatttgtttgtgtcatctctgatttctttgagcagtgttttgtaagtctcattgcacacatctttcacctccctggttagctgaattc

SEQ ID NO: 204659 - DNA, 1000 bp, Homo Sapiens
ttcaccctcaaaagacttgggttgtgggaggcagagcttgcagtgagccgagatcgcgccactgcactccagtctaggcaacagagcaagactccatttcaaaagaaaagaaaaaaaaagaagacttgggttggccatgggatattctgatcactctgagctgcattcagagttaaccctccttcacctggttgtagcttgtcttgatcgctgaccttaactttcttctacacacacctgtcccgcgtatcatgtgttatagtcacgattacttggtgcacagcatattggcaaatgggttgacagatatgctgccccttatggcctctggattttattatataccatatcgcctttgtatgcttgatttggaagaagtacctatgtgggaaatcagagggaacctggagctgttatatcaaggcaggatgaagttatcaagatacttttgttagcactattctaataattggggccaggtgttttttgttttttgtttttgagatggagtcttgctcttgtcacccaggctggagtgcaatgctgtgatctcagctcactgcaacttccgcctcccaggctcaattgattctcttgccccagctccagggtagctgggattacaggcaagcaccaccacgcctggctagtttttgtatttttagtagagatgaggtttcaccatgttgatcaggctggtcttgaactcctgacctcaggtgatctgtccgcctcagcctcccaaagtgctgggattacaggcatgagccacctggccaaaatttttgccagtcagtaagagagctaccttgttcagattgcatccccacatcttcctacttccaattaattttaaagaaactgcctgagctctttactctctctttgccttcctttccctccctgcccaacatttgctcttttctgttctgctctgatatgtgacttctgaagactttatcatgcaggttctcttgccttctgatttctgcctgaattc

SEQ ID NO: 204660 - DNA, 1000 bp, Homo Sapiens
ctaaatgtctagctattgaagaatgactaaattatgtcaacttgatggaatataatgcagctattaaaagtgaaaattataaacaatatttttaataccttaagactgtataacaacatgaaaaataataaaatcaaagttaaaatttatttaaaaagaatagaaaattacagcaaaacaaccaggagaaaaaaatttacctttgttcttttgacaaggctgaatgaaaacttagtcttagacttagttctttaattataacaagagctctaattctgagtgaatctctgaaagggtagctataatctcccaacattttgaacccatttggcatgggttggggtggcgggagggcattgttcttattgaagaaataaggaaagaaaagcctttgaattaggccctgacactgcctccatgtccaggaaacgctttaagagcaccaagtcattaatcacaagcttttagagcaggaataagccattctaattaatttcttaaaaacaaatttatttttggagacagggtctcactcttgcccaggctggagtgcagtggcgcaatcacagctcactatagcctctacctcccgggctcaagtgattctcccacctcagcctccaaagtagctgggactacaggtgcacgctaccatacccaggtaatttttgtatttgttttattttgtagagatggggtttcaccatgttgcccaggctaaaaataaatttatttgagtaatagaaactatggattactaaacattcattacagaacattaagcatttgtgagtccacttctgggctctgagaagaagtaatgaggaaagcaaatagaatcaagtgataagaaaatcgtgtatccacagtgggtgggaagggggcatggtgctgttcaacagaaagctagcatacatggcagtgggggcgtgtggggggctggttacagagctggtgctctctgaaggatcaggccccttctattcacgttaggattcct

SEQ ID NO: 204661 - DNA, 1000 bp, Homo Sapiens
gcttccacccaccatctcccaggccccaaccttgtgcagccgcaggagccaagggtcaggctcccacctcccaccctggcctccatggtaccagggacaccggcctgatgcttcttcctctttggtccagggggtcttgaaatgatcctggcccctgagggctccagctctgggaagctgcggatcccggcggctcaggagagggatgctggcacctacacctgccgggctgtcaatgagttgggtgacgcctctgcagaaatccagctggcggttggacgtgagtgtataccttgtctccccctcccctgcccattcccctttcccagccctctgcctgcttctgagtagggaggggaagctctctcacacaagtggccagtgtagatggcatcatgtggatcctgagcatgtggggacaggggaagtccaggggaggcggtgcatgcatcagctcttgctgggtaacaaatagcccccaaattgtgtggcttaaacaataagtatttatttcacagtctgaggatcaagaatctgaaagtggcttggccgggtgattctggctcagggtccatcctgagattgaaatcaatatcttggctagggccgcagtcatctcaaggtttgcctgggcctaggggatccactctaggctcactcgtggggctgttggcaggaggctcccagagaaagagagagagagacaatctcagagggaagccacagtcttggaagtaacaagccatcgcttctgccctattcttttggtcccacagagcaaccctggtgcagtgtgtgtgggaggggctacccagggatgtgaacaccaggaggcgggggctacccatgggtgtgaacaccaggaggcgggggctacccatgggtgtgaacacgaggaggtgggggctacccatgggtgtgaacacgaggaggcggggatctctgggaccagcttggaggcccaccgcagacagtttggttcagctcgggatgagaattc

SEQ ID NO: 204662 - DNA, 1000 bp, Homo Sapiens
tggatgccctggtttgagagttgaagatggctacactcatctatctggtgtcttggcgagaatgataaggaagctgggctcactgggctgtcccttgaaacacctacatgtggcctctccagcatgacagcctcaagttaatcagacatcttatgtgatggctcagggctccaagaggggattgttccagtgaacaaagttggaggctgctggtcttttatcatctaaccttggaaattacctagtatcatctcttatgtactctgtcagttgaagtagtcacaagtttcaaggataggggacagaaaccctaccctttggtgagggactgtcaaagaatttgcaaccatatttcaaagctgccatatacatgttgggggaaccagccccacaccaaccggcgggtaccccgagtccagcggagacacaggagttagaaagaggcagaataagcatttaaaaggtgggtccaggggaccgttgtgtaggaggcttgctcatggcccagagctcttgggctccaactaatttattgttttacaagctctttgttcttagggcagatgggagggggaggaagggatgaggaaaaggattaatcagtgaaggagaacttgtgagtcattcaataagatgtacagcagtggtggtctctgtgaatttccttgagcaaaggcgtgtgtctaaactacttaagattgcgtgtgtctaaactacttaagatctttaacttattgggactgaaaggggtgggagcgggtttcaggaggagccaagatgtttgattatactccactgcttccagggcgtgttatctccctgagcagcctgtggaatgcccccgagcagttatgctctcagggcataaagacatgaaggcaataaggagacttttctcctcagaggtcacccatggctccccatgggtgtctcacacaggggagaacaactcaactggcactccagaaactctttttcccacaatacatgtatgtatatt

SEQ ID NO: 204663 - DNA, 1000 bp, Homo Sapiens
ggcgaagtggcacatgcttgtagtcccagctacttgggaagctgaggcaggagaatcgcttgagcccagaaggcggaggttgcagtgagctgagatcgcgccactgcactccagcctgggcaacacagagtgagactctgtctcaaataaataaataaccgcctgaccatcacctgatggttgcctgacattccctcccacccctggaggccctctcctgccctgctcatgtctgcctgactacctactgtaacataatgatggtggttttctctggggagggctctgggaagggttgttatatacaaggggaacttgagctttaactatcatttgaatttttatggcacaaatgtgccgacatattaactgtattattttttaaagttagaaaaaattttctagctcacaactgagttctgatgtttgttgattctgaatcttcagcaaacctctatgagttgtaatatttttacagtaggagctttgtttttacaatctaaaatatctttaaatgaactgaaatttatttttatttaaaatgtttttcctaagaatttctaaaggactgtgtttggaaaaaatctgctttttaacagatgtcttacattccctcctcagtcctgtctctaaatattacttggtaaaagtaacacactatttttctagactctgactaatgcttctttgggttttttttttttttttttttttttggccaccgcccattcagaacacaacctctattaccagatgtttgtcttcctgctttctatatttaaaagtcacagatgagatttagctggtatagccacatagttatttttttgtcaacagtttaaagttttgacaatcggcattggcaaactaatttgaagaccaaaacaaaaaaaatcttgatttaattaaagagcttaagaaagatttcagcctgtctgacttccgcagggcaggccaggaggtcagaatggcgctcagaagtcctcctccacaggaattc

SEQ ID NO: 204664 - DNA, 1000 bp, Homo Sapiens
atagttgaagatttattgaaaattgtgaagatatacagagtttatatttgctagggctgctataataaagtaccacaaatggaggcttcaacaacagcagttctattgtctcacagctctggaggctagaaattcaaaatcaaggtgtcggcaggattggttcttctagagagccatgacagaaggatctgttccaggcccctctccttggcttccctgtgtctccgcatatcaggttccaaatttcccctttttataagcatcgtatacctcactaaagacccttaacttcaaatgaggttacattctgaggtactaggggttaggacttcccatatatgatttggatgggtagatgggtcacaactggacccataacagttcctatgtaccccatgcccagtttccactgtaaataacatcttacattagtatggtacatttgtcccaattaatgaaccagtatgaaactttattattaactaaagtatcatccttgttatgagcacataagaaaactttagttcaaagagaagcaacttggaaaaggtcttactagtaatctttttgactttactctggtgcctttttacactgttaaccaatacaaacgaaaacctccaaagtcacagtatgagcctgaaaagattaaaaaataattttctacttacagttaggtgtacaagacaggaaacttttttttttttttttttttttgctgcatctagtgcacatggcatgcatggcacagtaagtgttcagtaaatcttgataagatgagcagaagaatgcccttggtacttgttgggccatatttttgaagcataaactccaattttaccaaataactgtaaagtatagcaattgtgaaatctgctttaatgagaaagcaaaaattatttattttttaaattttaagttctaggatacatgtgcagaaagtgcaggtttgttacataggtatacatgtgccatggtggtttgctgtacatatcaaccc

SEQ ID NO: 204665 - DNA, 1000 bp, Homo Sapiens
aggcatgtaccaaaactgatgaatgactttatgtcctcctacagtacaagtccgaggcgagcagaaagcttgctttgcggaaacccccgtggctccgatgacgtcaacagtctttttggataagggggcgaccggggcagttactagcgaatgttcagcaccgctatctacaagaaagtcaatgtctccacccccgattgtcattctgaccagaggctctttggggacgcttgagcccggtctccctcagtccaataacccttctgccaggttgagcagggccccttcctccttttccggggcctcctgctctgagtcaccttgttttcttttgagctcagggcattttttcttccactgtcctatttctttacaatgagcacactggttacgctgcaaactctgacagccaagctgagtttctttcccagggccccccttcccttgcctctttgcgggggcccctctgattgctgcagctgacaaacaggtaggcgtgtcgccgggcctgacctccattctctttgccgttttccttacggcttactgcatccctgtttacaaacacctggctagatatttctagtaattgggatggattcatcccttcaagcccagcctgtttgtctagttttcttttcatgtcttctgcactttgacggactaaagccatgtgaatcacgcgctgatttcagggctatcgggatcaaagggagtatacctacgataggcctcccacagtctctcgtagaattgtgctggactttcttcttttccctgaatgacctcagagagcttgttaacgtttgtggccttctgagctcccctcattaatccttccaagagagcttccttgtgtcggtttagcctttgcatatcctctcttccatgtgggtccaactgggggtcggttcctggcaactgggtccttccatactcttggggattttgataatcagctggtgcatgttcctctagccacttagttgctgcttggagg

SEQ ID NO: 204666 - DNA, 1000 bp, Homo Sapiens
gagccaccacgcccggctggagtgttttatggttgcaaaaaaaatcaaaatgagggaacagccaaacatttgggcagtgggaaaatggcgggcagtaaggaaatagataaggatcccgcaggctggaaaggtggcaaaccttattgtgccagagcagagcatttggtaaaaaataactaccattaaattgagagcatgaaagaaagcaccagaaaatcagcaaaattccgaagattttacaaatacaacaggatgagaccctcgactggggtcactttcacatgaacttgattagatgcgaacagccagaagcctacacatttctgaaatctcactgcaaacataggcagtggcaggaggcaggtaagaagccgccctccaagtttgcaattgtttagccctaaagctgctcacacaagcaggaagtgagtggcacaagctgtgcagccaccagggagggcgtattttctaatgtccacttcagatatggccacagagcattaccaccaaggcagaagctcccaggggacgaggccagagcacacaggagtctctttctgagggcagcaacaggttcaaaccaaggagcttacttcatgccaagaaggcgtctcaccggtcccaccctgcagggttccaccactgctgcagagcagagctgcgggcccttccccttcttccttttccaaatgggagctctactgctctcatcatattcttcctccactgctatatgctggtttgggtaggaaacttggtggatagggaggagataacttctctgttagtttatagcttgtggacttcaagaaattgatggaggagatgaaccaacactcagacttgggggcagtagctgcattcaacttcatttccataaaaacaactctctctttgtgcccttatttcaagggtttttacactctttagtcgaattatgtaactattgtaacaagtgcaactggcctacacaggtttggaaatgaccctcactgactcc

SEQ ID NO: 204667 - DNA, 1000 bp, Homo Sapiens
gatggtaatcaacggatttgccgaagattcagtgagatgcaatgtttttacctagggtgaagaaaaggtcacagtatttctactatcattaaaccttgtcaaacaatgaatccaatggaaaacacaatatgatgcagtctgaaatgttgaggtcctggttctaagacacatggaaaaatataaagttgatttcatagcatattacactacagttgtatgtctgtgtggttttcatagcccagctgggaaagagtggctgctggaagactttgaaatcacgtgtgcccttgtacattgtcctggacctaagaatggcaatggaagtaaattagtgaagtatgtcatggaaatggcctagagaaatataacttataaatatctgcatattgaaaatacatacttttaaacaagcatggaaaaatctttagaattctcagtggtatagctttaaaatgaaactgacatgacaaagtgacagacctagggttttatataattttggaagattttctacaaaatgcattgaaataaaattccattgcataatgacaaaactatggtccacacgcttaaactggaacatgtacagatccttaagtttatttgtatataggctaatttcccttcccatttatggttatttgaaaatattgttaaaatttaagcagaactataatatcaagaagaaaataaggaaataactttttgctccctatgattttaaattataaaagccaaattccccaaaatgaatactttagcactaaattctcatgtttcattctttttcaataaaattgttttcaagtagttcaagtaatatttattatgtacggacagtacactatagttgagttccaagaactaagaaaattgggtggtcttttgtgtaagagactgcctaaattttccaattccattctctcttcctgtgcacacggaagactacattggactctttcccaatggaatgtgggtacaaatgatgtccaccacttct

SEQ ID NO: 204668 - DNA, 1000 bp, Homo Sapiens
acaaactgattgtaaaacatgtgtgtttgaacaatatgaaatcagtgcaccttaaaaaagaacagaataacagcgattttagggaacaatgcaagacaaccataaggtctgactgcctgcggggtcaggcagaatacagccatatttttcttcttgcagagagcctataaatggacgtgccaagtaggagagataccactaaattcttttcctagcaagtaatattaaatattaagaccctaggaaaagaaatgcattcctagggggaggtctataaacggccgctctgggagtgtctgtcctatgcggttgagaaaaggactgagatacactctggtctcctgcagtaccctcaggcttactaggattgggaaacaccagccctggtaaatttcaggtcagactggttctctgctctcgaaccctgttttctgttaagatgtttatcaagataatacgtgcactgctgaacacagacccttatcaggagtttctgattttgccttgtcctgtttcctcagaagcatgtgatctttgctctgcttttttgccccttaaagcatgtaatcttttccctgttcatacactccctccccttttgaaatccctaataaaaacttgttggttttgaggctcagggggcatcatggacctaccaatatgtgatgtcatctccggcagcccagctgtaaaattcctctctttgtactctttctctttatttctcagaccggctgacacttagggaaaatagaaagaacctacgttgaaatattgggggtgggttcccccgatacttatcagtagttctgcttttgccctttgtcctgttccctcagaagcatgtgatctttgttagacccttatcagtagttctgctttttgccctttgaagcatgtgatctttgtacctactacctgttcttacacccccttcccttttgaaacccttaataaaaacttgctggtttgaggctcaggcaggcatcacagtcctacc

SEQ ID NO: 204669 - DNA, 1000 bp, Homo Sapiens
gccctgtctaataatacagaggttgaacttggacttgggagatgactcctgtctctcgtactctctgtggctctgctttctgttattttactcataagcttgttttgtctccttgctgagaactgtcaaacatgaaatgtaatttcaggctatagtgaagaaggatgacataggccgaaaaaattggcaatcatttggcctgtacatgttgcttttattttttttctggacttaagatatagaccaaaccttgacatttctggcctttgagtctttcacaactgtgattataatacattagctcttctagaagttagaagtgactttggattaagtctttcataaggtggctaaatgaatttatatggctcatcagaattcactagattggttaagcaggaaatttacagagatttttttctttgctgtaaatgtttttctaaattgaaaaacttctaatactgtcttctggaatactagaaataagtgcaagtgattgtttttggcaggaggccacataaacatttctgcttctctgtgacttatgggtagcattgatataaattgttaaaaataatgatcgtagatagataatgtatcagagtttgggctcagccgctgtagctgctgttgacccagaggaaccactgggatcctcacatctcagggcagcacatcgtttgcagcaatggttggttctgtacaaccttttatgaaattaggtgaggcccttgattagaatttgttttttaaaaggtttaatatgagtttatatctctaaatatcagtttctaattttttttaaaagcctatgtttacaacaaatttgggagatacctatatgcactactaactagtgttcttttgtggtgctttagaaattctggcttacttgtatttttgctggccttctaatgatttcactcatcaatcagaagatatttgtgtccaccttcctgcttcctctccggtgatcttgtctattcttggccattttaga

SEQ ID NO: 204670 - DNA, 1000 bp, Homo Sapiens
ttgtctgagaaccatggactgacccaaataccctctctttgatttattcagtcagaaagtgagaataccagcatttctctactcccatcccctttaattttacctccaaggaaaaatttgtgtgaatttttaaagaaaggcacatctatacagaatttataaggtaactcggtgaaaaggagacccaaaacacaaaatataattgtccactcagtttggccagcaattattgagcatctactgtaatcctagaactatgcttggtagtaaggataggaagaaatgagtgtggccccatctcccgtgttctgttttctagcattatacagtcagccccctctgctctgcaagagaatgaaacaggactggccctttccctgcagtggcattgttttacaaactcatggatattcaggtacacacatcagcctggaacctgggcctcctctatgagttgtttcatgcttatcctggtcaaagcattgataggcccagaaaagtctataatgggtagattcaattgacagtctggagacttgattttatgtcctggctccttccccagattgtacaccataatctctctctgtctcaaattccccatccttcaaacatgtccaacaacccgctatgtaaccccaactttaactgcattgcttatgagtttgaatgaaataacaatatgagtaaaggacacaggaaaaaaaatcaactgtctatgccaatatcaggcttgtaaagggtatggtcactttctatcaagaaaccttggtagttgagtgaaccacatttttctttagtgtgcctttagtgaaaaatgactaattgaatagaattgctagcaccagaacttcagctttcaaaatactaagctatcgctgtgaaggagacagtcctgaaatctgtgaccttggatcaggcacaacaacctatctgctctcaggcaccaaaagcagacttgccaagcaaatattcctggagtcaatttcctgatgaattc

SEQ ID NO: 204671 - DNA, 1000 bp, Homo Sapiens
tggataaagagtcaagacccatcggtgtgctgtattcaggaaacccatctcacgtgcagagaaacacataggctcaaaataaagggatggaggaagatctaccaagcaaatggaaaacaaaaaaaagtcagtggttgcaatcctagtctctgataaaacagattttaaaccaacaaagatcaaaagagacaaagaaggccattacataatggtaaaatgatcaattcaacaagaagagctgacaatcctaaatatatatgcacccaatacaggagcacccagattcataaagcaagtccttagtgacctacaaagagacttagactcccacacaataataatgggagactctaacaccccactgtcaacattagacagatctgtgagacagaaagttaacaagggtctccaggaattgaactcagctctgcaccaagcggacctaatagacacctacagaactcttcaccctaaatcaacagaatatacattcttctcagcaccacaccacacctattccaaaattgaccacatagttggaagtaaagcactcctcagcaaatgtaaaagaacagaaattataacaaactgtctctcagaccacagtgcaatcaaactggaactcaggattaacaaactcactcaaaactgctcaactacatggaaactgaacaacctcctcctgaatgactactgggtacataacgaaacaaaggcagaaataaagatgttctttgaaagcaaagagaacaaagacacaacataccagaatctctgggacacattcaaagcagtgtgtagagggaaatttatagcactaaatgctcacaacagaaagcaggaaagatctaaaattgacaccctaacatcacaattaagagaactagagaagcaagagcaaacacattcaaaagctagcagaaggcaagaaataactaagatcagagcagaactgaaggaaatagagacaaaaaaaacccttcaaaaaattaatgaattc

SEQ ID NO: 204672 - DNA, 1000 bp, Homo Sapiens
acctcaggtaatccgcctgccttgacctcccaaagtgctgggattacaggcgtgagccaccgtgcctggcctgatttctttttccgattacctgctgctgatttttttatgttggttttgaattctgcaactttactgaaacctttttatcagttctaatagttttttggtggagtctttcagtttttcccaatataagattgtcatctgtgaataaggataattttgacttcttcctctccaatttgggtgactgttatttctttctcttgcctaattgttctgggtaggacttccagtattctgttgaataaaagtggtagaaatgggcatctgtgtgttgttccagatcttggagaaaagctgtttttccttgttcaatatactgttggctgtgggcttgtcatgcgtggcctttattgttttgaggtgtgttccttctatactcagtttgctgagagcttttatcgtgaagcgatgctgaattttattgaatgctttttcagcatttgttgaaatgattgttttttttccttggttctgtttaatgttatatgtttattgatgtgcatatgttaaaccatccttgcaaccttgagacacatcccacttgatcgtggtgaatgatctttgtaacatgttgttgaatttgggttgctggtcatttgttgaggatttctgcatctgtgttcatcagggatattggcctgtcgttttctttttctgccgtatccttgtctggtttttgtaggaggataatgccatatacagtgactttggaagtgttccccccttcagtttttttgaatagtttgagtacagttgatactagttcttccttaactgttgatagttcagcagtgaagccatcaggacctgggattttctttgatgaaagacgttttattactgctttgatcttgttacttattatcgatctgttcaagtttttccatttcttcatggctcagtcttgcagggtgtttgtatccaggaattc

SEQ ID NO: 204673 - DNA, 1000 bp, Homo Sapiens
gtcactaattgaatttttaaatgtaatccaattgccagccaatttacaaacttcctctgtattctccaggttgtttctagccttcctcctaatcacttttgcagcctggctggatttgatcaggtttatctttgtttggtttgagaaggaattgaaatgcctccttctcttaagaagatgattgtatatcccttgcagtttgcttagggcacagaggtgatctcatagggtttttccactcggtgtatttgattttaaaaacataaatatgtgaaagccccaatgttgcctcttaaaatcccctttgtgctcaaagaggaagtttggtgaacagtttcagcaaagtatcaggaatatcagatagcattgattcaccgagttctggaaacaaacctcagcttctccagtcattggctcatgataagaaaacttcccttcccacaaactaatatgacaaaaaagagagatcagataaagatgacacatgaatttgacgagtgttccatctttttttaccccagctcatgctgtgcccttctggctacatcattgcccttgcttctctacacaaaagtcttcttcattctcactcttgcccagtaaccttcaccaacattctgtcctgtggggagctcttcctcccctgaacaactctggcttgcatgtaaaaatctcctaacatacacacacagtatagactttccaaggcagggactctgctgaattcttatttgcacacctgtgggataagctgcttagctcacagccctggtgtgcaatgcaggctgggcatcagaactacccatatagcttttaagaactacaaatgtctaggttgggtgcagtggctcactctgtaatcccagtggaggccaaggtgggaggattgcttgagcccaggaattcaaaaccagcctagacaacatagtgagaccccatctctacaaaataaaaaatttaaaaattagccaggcatggtggcatgcacctgtggtcccag

SEQ ID NO: 204674 - DNA, 1000 bp, Homo Sapiens
acaagtttaagtgtatacgtttcttatagtttttccagcattttcaagcaggtcttgcaattttgcctacattttttacaagatttaaaacatttatatatatatttttcctgattttagaataaccttaggaattaaggttttttctgtgtgtgtgcatatgtgtttctcaaggacaggactgaggcaaaatgacaataacaaatatatatgtagttgaacaattgcaaagtaaggaccgcatttttctttttattatcaagcatgatggcttagtgaggctgaatagtgacaaattggttttaaaagtaccgccaaagatgagaggaattttatctgaattggataagggatatttcttgattaggacaaatatttgaaatttctccataaatgatagactatacacacacatacacacatttgtctcggtgaacctgcaggttgttctttgagaataattttggcaggttatgtggacaatggcttgcttttctctttaccacctggtttcttaaccccatatcctattatgatctctccctcctgatttctatacctgcgtaacattggtttatacatggaggtgtctacacagcctcacagttgtgtgaaaacaacctggcatattgcagcactgaggtgagtgcagatgtgactgagggagtgggtggaccagagcagggacacacaactgggatgaagacagaagtgatagaagtaataactggacaactgagggccagaaatgactgcagtaccaaggcttgggaagaggtagcaaaaaaagttatgagttatgaaaagcttaattgcaaaaatgcaaagaaattaacattttaggcacatttgatttttgtgactgagtaaaattcaaacctgctacaaaagcaaatcacataaaatggaagttttgtgtctgccaagcttactcatcttagggtcatctatcatcctaagcaaaatattaagtgcactattcacttaatgttgagaattc

SEQ ID NO: 204675 - DNA, 1000 bp, Homo Sapiens
caggtgtgtggctcatgcttgtaaccccagcactttgggaggccaaggcaggagaattgcctgagtccaagagtttgagaccagcctgggcaacacagtgaaaccctgtctctagaaaacatacaaaaattagccaggcatcagatcacctgaggtctagagttcaagaccagcttgggcaacatggtgaaaccccgtctgtactaaaaatacaaaaattagccaggcgtggtggcgggtgcctgtaatcccagctactcaggaggctgaggcaggagaatcacttgaatctggaaggcggaggttgtggtgagctaagatcacaccattgcactccagcctgggtgacaagtgtgaaactccgcctcaaaaaaaaaaaaaaattagccaggcatggtggcatgggcctgtagtctcagctactgggaggctgaggagggaggatcgcttgagcccaggaggtcaaggctgcagtgagccaagactgcgccactgcattccagcctgggtgatagactttgtctaaaaaaaaccccaaaaacaaaaccaataatactccatattttgaatttattctgccaatttattttttgtttcatcttcattaacctggattattgcaatattccctaaacagcctccctgcctgggaaccattttccacactgctgccgaagtgatttttttttttttttttttgagacggagtttcgctcttgttgcccaggctggagggcaatggcgcaatctcggctcaccgcaacttccgcctcctgggttcaagcgattctcctgcctcagcctcctgagtagctgggattacaggcatacaccaccatgccccgccaattttgtatttttagtagagatgaggtttctccatgtttttcaggctggtcttgaactcccaacgtcaggtgatcctcccacctcagcctcccaaagtgctgggattacaggcgtgagccaccgcgcccagccttgattattttagttagca

SEQ ID NO: 204676 - DNA, 1000 bp, Homo Sapiens
aacatcaatctggttgggtgcagtggctcatgcctgtaatcccagcactttaggaggccaaggcaggtgggtcacttgagttcaagagttcaagactggccaacatgatgaaacctcgtctctacttaaaatacaaaaattagctgggcctgatggcgggcacctgtagtcccagctacttgggaggctgagacaggagaactgggtgaacccaggaggcagaggttgcagtgagccaagatcgcacgactgcactccagcctgggcgaaggagcaggactctgtcacaaaacaaacaaacaaaaaccaaagtcaatttaagacatatagctgtttctgttccatggatataaattgaccagttatacaacttttgcaagttccattaggtgggatgcctatcaggacattctttttgatggcccagacaactccattatcacaaaatgaatacagaaacaaaaaagtgactccagttctagtttgtgatgggtctctatgttttttgattttattgccctcaggtattttcatgttctgagtaaagcctctttcttttctatatactcatttatcaggtgcctcatgtttttaaaataaaagttttaaaagtaataatgctaaaagtagtatataagttatactaaaataaaataaaataagaatatgaaaatcattcataatctcatcatctggagataaatgctattaccaaagaatacatattatctttatgtcaaaatgggatcttgatgtacatagaattttttgctctgcttttgtttaattaacattggtttgagagccttttctcaagtcattaaatagtcttcaaaaatcatgcttcttaatggctgcataattcctcccaaaggatatactataatttattaaattcaatactaacaaggttattatgaagcaggcacttttctaaactggtagtggaagtataaactggaaagcagtttgacattatatatcattattaaaagaattc

SEQ ID NO: 204677 - DNA, 1000 bp, Homo Sapiens
tcgagacagggtcttgctctatcacccaggttggagtgcggtggtgtgaccatagctcactgaagcctcgaactcctgggctcaagcaattctcctgcttcagcctcctgagtcgctgagactacaggtgtgtgccaccacacctaatttttttttatttgttgtaggggcagtgtctcactctgttgcccaggctggtcttgaacgcctagcctcacacaatccttccacctcagcctcccaaagcaatgggattataggcctgagccaccgtggctggccaaggcaagtcttgtgaatgagggtttccaggcaattgtcagacaggccaaataaggacagttcttaaataatgctattttggggatctccaaacccattcggtcctagcaagtggctgctaggctactggtcttcactatgattgtagaactgttggttttgaagactaatgaggagttgaggagagtgttgagaataaggcaagttaaaacaccacaaagctcaccattcttactgagatacagccttaaaaaaaaaagttccttgggttgttgcaaagctttggttaatttcagaattctgaacatttttattttacaagttatctcaatattctcattgcttttatggaggaataggtttttagaggcccttatgccaccactcctactgacctcacctcattcagttatttgaaggcatcatgccattgtctgcttcaattttttctgttgcaaaatcatagtcagtttaattattgttcctatgaaaataatctttttctccttggttacttttttttttctttgagacagggtctggctctgtcactcagtctggaatgcaatggcacgatttcagctcactccaacctccatctcccaggctcaagccatcctcctacctcagcctcctgagtagctaagaatataggcacgcaccatcatgcccagttagtttttgtatttttagtagagacagggttttgctatattgc

SEQ ID NO: 204678 - DNA, 1000 bp, Homo Sapiens
ttttatttatgggtagtttttgactcctggtttcctgtagaaaggatctgtcttcattcttgctaggcacctgagagctgccagtctggaatcatgctaaatgaattctgacctcaggttttttgattacccaagtagtatacattcacttttcaaatacacatgatggctggcttgccgttccaagtttttattggagataacctagttcctttccctgctactccaactcagtgtaaagattgagagtagattttccttatcgtcctagggggcaggagtaatttgtatttctagtacacgtttacactgaagtgtagctttttggggtcccagctttatgagagttatctcctatcagactctttttgggatatcttgacctttgtcccccatcccttatgccctgtgaagctatgagaaatcaaagctcaagttcagctggcttagcaaatctactttgggtgaaaattggatgccgtatcccacttatgtctctgggttcccactttcactttttttctggctagaaaattccttgtgtatttgacagttcatagattgaaaaataaaacaattttaaaaatattttatccaggacttttggatgttttcagtggtagatttgtttaagaactagctttttatatgctcagaaatgaacatctggatcttgttttccaacacttttatggctgtgtccttactttcaggagcaaccaggaggacattctaattctattccttggttgtcagtgctctcctgaaatatctctaaataagttgataaatacctactgtgtgtctagtattgtgctaagttctatgaaatatcgggaagaccatgtagcttctcatgtagctaacagaacattggcagtagtggccttcagcccttggaacactgatttaaaccatattttcatttccaaacccttttaagccctagaaattagcatttagaatgatgtggttgtaagactgtaaggtacataaaggc

SEQ ID NO: 204679 - DNA, 1000 bp, Homo Sapiens
ataattcatcttctcctccttcccccactccaacagtatataatagttttcttctatttacaatgacagaattaacatattttttcctccatctccccctctctatcacctgattttagtaatattatctttcttcatgtttacctctaattattttacctctgtattattccattttatacttataactctactattcatttaattagctttaagtaataacttttcacctctagttattaaagatgaggaatcagtatactttatttcatatatataatttttaattgtttagagatggggtcttactattttgctcaggctagtctcaaattcctgagctcaaacaatcctcctgcctcagccccccaagtagctaggattacagacacacaccatagtatccagcaaacaaacaaaaaaatcagtatattttcatccttttccatccattgctttccactttttattgctctatcatttctacatcatcagggctaataacatttaaattccatctttccaccgtaatcctcatatttgtctttgtcctgtgatttgcatcaaagctcactgccaatcccgtctgcagttgtttctccactcatctcttgttctactgaaccttctaacatttctcaaatggatttatgaaaataatattccaagagttctttcatcttcaaactatttatcttttgtctttacacctgaaaatatttggctcatgttttctttcctatgggattttgtagccatttctcaaaaatcttccagcattgaagtttgctatggaaaaagacagaggctagcctttggattacttccttcacatcatgccaaggaagctccagcatttcaacctcattaactgtagaccaccagtgagtcgaaatttttagtcaaccaaccaagtaagcttttacagccatctccagctgcatggactgacactttgaacctgcagtccctagtaaagtgtatccatagcagtgaattc

SEQ ID NO: 204680 - DNA, 1000 bp, Homo Sapiens
gacagagtcttgctctgtagcccaggctggagtgcagtggtgcgatctcgtttcactgcaacctctgcctcccgggttcaagcaattctcctgcctcagcctcctgagtagctgggattacaggtgcacaccaccacgcccggctaatttttgtatctttagtagagatggggtgtcaccatgttggccaggatgttctcgaactctttacctcgtgatccgcctgcctcagcctcccaaagtgctgggattacaggcatgagccactgcgcctggcctccagatttgattaattcattctactactgccagacatttggacagttcagggaatggggctattacaaacagtgctgttctgaacagtccaagactgttctggcacaaatgtgcatgagtctatttagagtctaatctatgggtggaattgcttgctgggccagagaatgtatgcatttcttcacctttacaaggtaattccaaattatattccacaatggtactcttgccagcagtgtatgagacttcctgttgttctaaatttttgtcatacttaaccaatgttagattttttacatttgcccttctggtgagcatataatagcatctcactggagttttaatttgccttttacctattcatgtgggagaaaaagacaaatgacttccaaccttacataatacataatcaattacaggtggagtataaatctaaataagcaagataaaacatgtttcagcccagacacagtggttcatacctgtaatctcaacactttggggaggctgaggtgagtctgagaccagcctgggcaacatagtgagaccctgcctctaaaaaaaattttttaaattaatcgagtgtggtggcatgcacctgtggtcccagctacttgaaaggctgaggtgggacaaccacttgagcctgggaagtcctggtggcagtgagccatgattgtgccactatactccaacctgggtaacagagtgagaccctgtc

SEQ ID NO: 204681 - DNA, 1000 bp, Homo Sapiens
taaaaagattttaaaagatttctcatttgtaactgcctgcagactggacttgacaaaatagttctaatctagagataaaattccttaactgtagtagtgtagtaaccattttccaaaatagtccacactgaactaaaaaaaaatgtttaccactatagatttatttttctgaattacctgttgcataccttttgcagaagtagcagcttaatattaccaatgaaaagacttatacattataaggtcagctgttttaccttactatttttcctgatcctcatggaatgtgtgtgctagtgtgatacaaaggaagattttacaccccaaacagtgaaataattttaaaaacaaaacgcacatagaacacctacatggtgttattttcttcaaatcagtgtaatatacacaggctcagcagtctagacatcaacatttaaactaatttaaatgtattaatcccttcttttttcatgcaattgcaatttccagatatttaaagatgtgagcatttttacacatttgctgataaaattggaatcatttcattttaattgatacctctaaaaatcatctcttcagcccgattgtattttccagacctgacctttgagtcagaagagagccaatttgcaaataaaggggtgtctcatggctgcctgctgagggactgttcataagcctttttgtgagggtgattcaatagctccattctggtacagtgagtcctgcccgttttagccatttgcctataactgttttactgttctgtgaataatttttatttatcttaatattattttcatgcataataactataataaacaaccctgtcagtgcctcctggtggccatttttcctctttttgttatatgtgtcctgagggtcccttaagctatttgtaggatagggtagagaataggacgttttttgtcttttttctctcttacgcatttaggacttttttttttttttttttggtctttcacttttgaaagaattc

SEQ ID NO: 204682 - DNA, 1000 bp, Homo Sapiens
gcacacaaaagcatcaagtttcattattatatcatgttattatgttacagcatgatattgtgcaggaaacagaaaccagccggacctgcctagaaggtctatctggagaaatggaagaattaatgttcttgtgaggatcttaaaagccagatgaatgagtctggatgtgatagcaagggaaaggaaccataagttttaaaacaaggaattggcatgataaaagcagttccatagaaagcaggggccggaagacctatgcaggctgaattccaaatgcaccattgctttggcttgatgactttaggggtttgggggtttcacttacaaattcagtaaatgtcaccttttcagtgagagagaccttccctgaccactttgtccatacgttcaactctccccgcttctgcatcctatctatcctctttctctgctatttttttctccttagcagttatcactttcaaacacagtatgcattttatgtaataatacgttgtttatggcccatctttcccgctataatgtaagttctgtaagggcagtgattcttgtctatttattcactattataccttcagcacctagaacactgcctggcacatagtagcccctgaatactacatgttgaatgcgtcaatgaattgattagtacctgtaccaagtcctattcttgatactagaaataaagtagttaataagatacacaagttttctgttctcatggaggatacattttagtagtggataccaaaataaacagagttgtaattccaagtggtgctgtttgctcagaggaaaatataacagagttaacaagaatatcaaatatcaaataaatgctctcctgttgcacacattgaatatataacagtcgaaaaggctgtttttgtttccagttttgaattcattattcctgaacaatctacactggttttttatcacagttatttttcctggaaaagacacagaaacagcttgcaaaagcaagaacctgactgtg

SEQ ID NO: 204683 - DNA, 1000 bp, Homo Sapiens
gcctcaaacaactcaccagctgcgtggccctaggtaacttcttcactcctctgggctcagtagtgataggttttgttttgttttgttttgttttgttttttccccataaatttcatttgattatgacaaattgcttaggatgtttcctgtaagtagcaagtttttaagaaatgttactaatatttgagaaagtttcaagagactgaggtaatcaagaggggaagatgaaagacaactaagttaagccatatagactttatcctgaaaactgcggggtgtcattaacacacagcagtttaacttgcatttattctgcacgaggtttcaaggggtatggagaaggactaggagggtaaacactcgtagctcattagtctaataatgaagaagtcatgagggccaaggctaatggaaaggtggtgaaaagacaatcaggatgtataattattcaaatgcagaatggagacttatttaaaaggacttggtatgtggtggatgggtgccattatgaaggaaaatgacagattttaggtgtctaggtttgtcatttgggtggttgggcagaggacaggcacaaggacaaacaaaaacaaaagatgatgcattcagttacagggaaaactatcacatgctctcagccagttcctgggacacaactggagatgggagtccatggtacaaaaaagagttcgaggctaactacttgtaattgggtgccgtccacacttaggtacaattgaagccacaggtttcatccaatctgaatgcggatcacccatggaaatcagaactcaaacctgggtaactgctgagattgcaggttcctcttcccttcctccaaaccactttcaaaggattttgagaactgactaaagaatataaataaaatcaaggaaacagggtttcacaaaactagggaaagaaaagtagcatggaatagctggatcagcagtactcaacaccacaaggaggcccatgagctctttctctaacaaggaca

SEQ ID NO: 204684 - DNA, 1000 bp, Homo Sapiens
aaaaggagcatgttgaaaggggtaacctgaactcagtcatttaaccagagctagtgatatcaccagtaccagatcagactcattttcctgcctgcaggaaagtgcccttctagagggctaccctaagccacagggctacgtgcgtattttatttttattctcatttgttctttattactgaacacccattactctacatgaattccacttgggtcttgggtcgtcagccctggcctacaggaatatgaaccatcccatcctgcagttctctgtggggggtgagctgctcctgctgctttggtatcctcttccagccctgcatcctagctcccctcttccacaaagctttgaagctgaaaaacttggtgggcttgaagaggctttttggtagctgctgacctttggcgctggggctccttttctgccttttcccctcccatagtttgtgagcccacagccttgccagggtcagacatgtgcatgagtctgagggtggggaagggatgctgtgctttcccgtagatgccactgtggtcttttttgggacaaatccagtgcagatgttgaaagccaaaccacaggatgcatctgtcatccaactcttccaaacattttgtcattgtagataaaggctgtttgattagtatttcgtggatgacataactatagacctcttaatgactgttattaatttgttatatttggatgacagatattgtgtttctattgtttagcctttttattatagaaaaattcaaacatatcacaaaatagaatgataacaataaacccacatgtatcccagccgtcccgtgcgtatcccagccgtcccgcgcatatcccagccagcatcagcagttgcccactcatgactcatctggttctgtctctctgtcacgctgctcccaactcccaccctgtggtttaattttacacaaatcctggaatcatattatttcatacagaaacgtttagtacatatctctaaaatacaagcatt

SEQ ID NO: 204685 - DNA, 1000 bp, Homo Sapiens
ccatgagaacgctgctttcataccccacaaaggctgcggctttactctctcagagtagctgctctgagagacttccctcagactcattgcccaggatttcttcaggccctgcagagtcctgggcctctcacattgatgacagtatcaccttctaatgaatggcataatttcactataaaggaaacaagaaaaaaaaacagaatgggtacacaaagcttcttacagttcatttgattcccacaagaatcccttagctgtgttgctatgtttatctccaagttagagatgagaaccctagcccccgtgtgtctgatcccaacctgcccttcctagcacatcatagcatatctcttgattaggaaagtgtgaagatgcactttggattttatgattgttgttaatgcttcttttatcagcccacaacaatttgatcttagccggcatcagagaactgaatgcctgaacaaatataatttaccagtagctgccacagcaaatcaataacctgtttactagcaggaaattgtgttagtgaacataacatctcattctcttcatcagtcatcacattcattatctgttggggctgttctatcttgtgtggttttcatctcacaagaatgaatgtaagcataaaagaaatctaatgttaagtgttgtgtgtttaatattatgtatgtggtgctaccaactgctatgagattgcatgaatttatggataacataatcttgcctggaatataaaatgcatgccaaatgtaggtatatatgtaactgtcatccctgtttacctgtagaaatgtctagaaattacaaagagatatgctcccaaacaaaaaataattttttaaatctcaaaagttgaggttaaagctaaaattacccaactgtttttcaagtgaattccaaaacagttcttagttatctacagtgtaattgtgtacaaaatgctgtatgacctcagtcttttctacaatgaatccaagaaggatgtatgtac

SEQ ID NO: 204686 - DNA, 1000 bp, Homo Sapiens
tcagagagaagagttatgttaactgcagtatttaccacttacaagctttcagtcacatatactgtgaaattttgttttgtgtataattaagaaaaatatatggatcatttattccatacatgatactgtttcaacactttcagtttacagtcagctagaaatttaaaggatgcctggcttctaatactaaaaggtacattttaaaacagttttgagatattgattcttcttaccttcttgaaatgttttttactttattttcctagcatcatataatataaaggatcataggccagaaaaatttaattagccttatagccttccacttatgaaatgtgtgcttagattagtaatttacaactcaagaatcaatttcttcatctgaatttcaaaagtaatgacaagagctcttagaactcaagtaaatggtaaacaaggaaacatatccgtatatgtttacgctattgataataaaacagcaggtcccttactctctttagttaatattggcacaattagtgataatatattaagatattttccataatcagatcatatgtcatactgaggtgtaaaatcaatttccctttactccaatctaaaatactgaatatgcataagactgaatttttgtgtcctcacaaaattcatatgttgaaatctaactcctaatgtgaaggtattcacatgtgaggtctttggaaggtgattatatcatgaggatagaactctcatatgtgggataaattatctatgaaagaagactccagagagctcccttgtcccttcttccatatgaggaacatattgagaaaagattctatgaaccaggaagcagaccctcaccagatatgaaatttgcaaaacccttgatgctggacttcccagcctccacaactgtgagaataaatttttgttccttacataccacctggcctgtgacattgtcttatcactactcaaatgaactatgataccatcaataacaatgcaggaattc

SEQ ID NO: 204687 - DNA, 1000 bp, Homo Sapiens
cgccaggtcatggggtatctgttcaggcctccctgcccctgacacctttggcagctgaggaatcacaaggcgctgtcagtagtgtgtctaagagagaggcgcggtggtgatcctttgaggacgcgagctagccagtgggccatccatttccaaaccccagctggctgtcagttgatttctcccagtgagaaatccggaggacacaggaagactataccatcttccttgggagattctcggtcccagttttgggttccggattcagggcgttgctgagttggggtgactcactttcatcccccatgttctgaaggttagccttgagggtggcggcaggatgtgcagggaggcggcttgggaggaccacggcccaacttgcatcccgcccaccacttccctagctgtctgaccttgtgtaaatgtttaggctctcggaactcctgtttccttctctgtaaaatgggggaaatgacatttcctacctcctagagctgtttgcgaggggggtaagtgggttgctagaagtaaagcatttggcacgccctgcggccggtgctaggtgctggggaaatgtgtgctctcgtggagctgtcccagttgccaaccattaacagctgctgaacaaagcccacctcctgggaggcgggggcggggggggttacttttggaacctcattgccaaggaacagtctctcaaagccttcttgggacactaaagtgcttttcagtgagtgagcgggagagccagggcagctctatcacctggcttccctgagagcagggactggcagtaccatcatacacatgcccttggctccttacacttccccggcctcgggtgctgtggcagagtctggctctgcccccgattttcacctgcccaccaaattattctcggaccaatgccagttttaggagagaaacagcgagctgcagagttcctgtcagaaactggactccatggccatccccaagtctcagcagggagcatgtgtggttg

SEQ ID NO: 204688 - DNA, 1000 bp, Homo Sapiens
aagctccacctcccgggttcacgccattctcctgcctcagcctcccaagtagctgggactataggtgcccgccactacgcccggctaatttttgtatttttagtagagacggggttttgccgtgttagccaggatggtctcgatctcctgacctcgtgatccacccgcctcggcctcccaaagtgctgggattacaggcgtgagccaccacgcccggcccaagacactctttctaaacaaggctttttgggacaactggtcacccttgaactgctgtgacaattagacagcagtaataggtcaaggtagtgtcttgatttcaatggttgttattgtaagtatcaaagttcccaagaccctgccttgtgggaacccacccatccctcagtaggaacctaacctcccacccaggccctgagcattcactcattccttggtcctttgactcagagaccaggctgctcaaagattagacagtcaggtggaggggtggggacagttgttctcatgccattggtgaggtttctttctgaatgtcagtttaatgatatgtagtaaaatcttcaatgtgcatgacaccttggggccaactgtcccacttttgaggaatttgtcctaagaaggccttcagggaaggaagaacacagctgcctgttagcagccccaggactcatttgacaagccctccctgaggaatgagattctccccgccctgtagtgtctctcccccggaggcattctccaccatctctgtctacaggcttgtaaaagcagagtcaccccggaggggaggaggcagatggggagatggaccagataggacaaaaatgtccagagcgtatccttgcatgtgaacacaagatgggattctccttgtgtttgtcttctctggaaagggccaaaatgggtacctagagaagagggaaagccctgcaagaaagggagggagcagagacaaaaagcaagatagaatcagagaacatgcagagaggtggggggg

SEQ ID NO: 204689 - DNA, 1000 bp, Homo Sapiens
cacaattcaaaattgatttcattttcctccaaaaaggctttgagaatcttctgttgttctcttttagtgcatcttcttttgtcttagaattaatcacttaaattttttagtcagcattcccaccacatgtttgacagtggttgcaaggtcaaatttggtatatatttaattaggatgttttttcctttgggcagattcagaaaatatcataactatcttccaaattgttccaaagaatgtcactgttattgacacaactcctagcaatacattcaaaagacgatgcattacttacggcataaaaaatacttctggaatttatgccaaaattctggcatgtataccttttcttttgtcagctgtattagtaccatcatgatggtcttgcccttcagatgattttaaatttttaaaataaagctgcaatttttattataattttttgaaaatttaatggactcattaaatatttctattttaaagaaggtattcacaattctaatgtctactatccatatagttgccaatataaggaatgactattacagttcatgcactttacatctaggcctaaatatgtaccagtgtaagggtaatacgaattgttactgtttttcagctaacatttgcaactgctgtggatactgtgttaatttgtgagcatatttggaaccttgaattagaacatggagagaggcaagaaaactgatgcttggcaccactaggaaacaatgcttccttatgccagaaactattgcattcatacccagagaaaggctttgatgagttaatttcctttccctcttaaataaaagctctgcagctcaaatcttccccttgctcttacttaagcagtgtctgtctacgaagtcatggcagcacaatccacagaacttcatggaattcagcagcagtttcctttggaggcagggggtgataaaatatatataacaaaatttgtcattttaacaatttttaagtgtacaagtcagtggcatta

SEQ ID NO: 204690 - DNA, 1000 bp, Homo Sapiens
ggcttgtaatatcaaaactaaaatggaaatttttcatctgtagtttttccaaggttgtgtggggttagatgtgataacatggtgcaccaaggtgaagtggcagatgagagagacagagaatacaatgactgcaagtctgtatttggttctgggagccaagtctgcagtagatctagagagagtttttataggaactatctgcgactatcctagtttaggttgaaagaggagatttcccaggaagtaaaattaataagcatttggaaagagactatttggatataagtcacgattttcatactggaatgggagggtatggagtctcctcttctggatgtctttgaaaaaaaatcaattctttaatagttgaggacactatttcccaagctgggatttctgttctgtgtggcatggtaacaggagtggtacttgggggactggagggatgagttcagaaagggctccccacatgggttggcatgagcattgccggagtgtccaccaagcctgcatgtctccttccttctactcacacttctcctcatttccctagaaaactccctgaaaacgcctatcttggccagtttctctccttgctgggactagctgtgatgtggaggtgacaagatgtttgtgcataaaaggcttaaataagggacattaagtatcagggcttgcctaaagatgcaaaaaatggtcgtgtcatcatggcctcctcttaaattcttagactcttcctccttcgaagattccttcagatttgctttggtggccaaacgtctgctccttcctctttttttgtacagtgtcttgagtaaacaatgacacttctagccagcatttgcttctctgcgtgctttgaggatgtagattttgtggaaataaaaaaaaagagagagaactttctgctgctttcccatgcaaggaaggctgaggtttagcagtggtttgtgtgttgggttttagccagatgccctggatgaaccacatggatgaattc

SEQ ID NO: 204691 - DNA, 1000 bp, Homo Sapiens
tatacatcctcctgccaaattaaaaccctaacctaagcattgtaaatccaaaaacatacctaatttttatattacataggtcatttagggatttttttaattaaaaaaattaggacagtgtcttgaaaaccaattacctggaatcataagcagaggttttagaacaaagttaatatatgctgaaagacttgtaaatctgctaagtgcaaaagacccaatgaatgtctttggttattattagaataacagaaaatgaagaagacatctgtttaagagatattcctgctgaagcagaattgggagcagagatcaggtgctgaagaagggaagagagcagaactaagcagatgatacatctaacagtttttccccaagaggttttgagtagaaggaagtggcactaccaatgctaaaagcccttcagggaattacaaagcttcagtgcattgatctatgccacagaataggatattcagaggagtgaggataggttgggctcaataatttcagaagagtttgatttttcgaaaccagcacacatttcaatataacaaatagtataattttcaaacattgcacagcattcctaaataaccagtgatttcttcaatttatttgttccatggctgtgtcttcagggtcaaaaataaagcatattttctgcatacagtagatatgaccaaatagcagtaatgtcacaaggaaaatgaaaatataggaggacatcaaaataggcgttttaaaagattaagcaaaatagtaactaaataataagtattgacagttgcaacaagaactaattgaaatttctttttctacattgtgaaagttaggaaatcatgcttcctacatagacccacagcacgttagaacagtttataacatcaaataactcatagttcagcctgtccattttgcataggggagcctgatgcatacattgttgaagtctttcatccagtgcccaaagctaaatattggaaaaaccaggactggaatt

SEQ ID NO: 204692 - DNA, 1000 bp, Homo Sapiens
tgggaagtaccctataatcaactgacacaggaagaaaggactagggcctggttagagatggttctacatgatatgtaggcaccacccaaaagtggagagctgtagcagcatagtcactttctgcgacaacctggaatggcaatggtaaagggaaatcttctcagtgggcagtaatttaggtaatgcacctgaatgtgcactttgcttgaaagtagaaatgccaaatgtgtggttatatactaattcacgggctgtagccaatgatttggccaaatggtcaaagacttggaaagaacatgattgaaaaactggtgacaaagaatttggaaaagagatatgtgaataaaactctgagcaggcaaagtatatgaagatatttttgtcccatgtgaatgcacaccaaagaatgacctcagcagaggaggactttgataatcaggtggatagaatgacctactctgtagatactagtcaacccctttcctcagccaccccatcattgctcagtgggttcatgaacaaagtggcaatggtgtgatggtagagattatgcagggactcagcaacatggacttccactcacaaaagccagcctggctatggccactgctgggtgcccaatctgacggcagcagagatcaacatcttagatgatcatttcctgggataatcagcaagctacctggtggcaggctgattatattggaccacttcaataatataaggaactgtgtttggtctttaaaggaatagacactagatatggatttgctttccctgcacacaatgcttctgccaaaactaccatatgtggactcataggatgtcttatttaccatcatggtgttccacacagcattgcttctgacaaaggaactcactccatagccaaaggagtatggcagtggagtcatgctcatggaattcactggtatttccatactcctcatcatcctgaaaaagctggtttaattgaatggtggaagagtcctttgaattc

SEQ ID NO: 204693 - DNA, 1000 bp, Homo Sapiens
ggtttgaacatcctcctttagctcagagaagtttgttattaccgatcgtctgaagccttcttctcccaactcctcaaagtcattctccatccagctttgttccgttgctggcgaggagctgcattcctttggaggagaagaggcactctgatttttagaattttcagcttttctgctctggttactccccatctttgtggttttatctacctttggtctttgatgatggtgacgtacagatggggttttggtgtggatgtcctttctgtttgttagttttccctctaacggtcaggaccctcagctgcaggtttgttggagtttgctggaggtccactccagaccctgtttgcctgggtatcaccagctgaggctacacaacaacaaatatttcagaacagcaaatgttgctgtctgatccttcctctggaagcttcatctcagaggggcacccagtcatatgaggtgtcagttgacccctactgggatgtgcctcccagttaggctactcgggggtcagggacccacttgaggaggcggtctgtccattctcagatctccaactctgtgctgggagaagcactactctcttcaaagctgtcagacaggggcgtttaagtctgcagaagtttctgctgccttttgttcagctatgccctgccaccagaggtggagtctacagaggcaggcaggccttcttgagctgcggtgggctccacccagttcgagcttcctggccgatttgtttacctactcaagcctcagcagtggcagacacccctcccccagcctcgctgctgccttgcagttcgatctcagactgctgtgctagcagtgagcgaggctccgtgggtgtgggaccctccgagccaggcatgggatataatctcctggtgtgccgtttgctaagaccattggaaaagtgcagtattagggtgggagtgtcccgattttccaggtactgtctatcacagcttcccttggctaggaaagggaattc

SEQ ID NO: 204694 - DNA, 1000 bp, Homo Sapiens
cttcatcctaggttcttaagttacctgtatgtgtgtttatctctgtgtgtgtgtgtgtctgtgtgtatgtgtgattctttggaaacttaactctatgatgactttgaggcctcaaaataattgccatttagcaagagaatttctctttaacttttcttcctaaggtacaatattgaccatcatcttaaacaaacaaaccttgagtatgtagaacaatgaaaagagtgccaagctagatgtctggaaaccaggagtctagcctcattttggtcctaataaactgtgtggccttggacaagtgcttaattttcaaatagctattagctcaagaaaaatgcgggccagagcagcttttgatattgcctatgatccactatttgcaaaaatagctaatatccatgcattaaaatgaaaaagagctcagcagaaagcttgtagaaacagcactggaaatcgatatcatcagcaagggaaagaagtgatgacgagaaaaatattcctttattttcttctatttaacaaaagaatctctgcttaccattttcctcttcttagtgtacaagggcaactttaaaatgtgagttaacaaaagcgaatgattcagagctaatattttgttgtccctaaagttacagcagcatcaaatgattttatagcccactggggccagaaaaatcacttggaagcagagcatacctacatgagcaagttgtactacataaagtgacaaatgatcttagacaattacagaaacatttatatctcaatcagtaccctggagacagctgataatgtttgcacatactgctaaaaccgtcagcaataagatgtgaggaaaacccaaaccagaactttttacaaattatgaggttctgaaaaagagcagaaacctctgtggtaacggcttacattaacaatacagctgcctcttaaagctcctcaagtcataaaacactaacagcaaagaactgaaaaaaaaatgtgcacactacaaggaaaa

SEQ ID NO: 204695 - DNA, 1000 bp, Homo Sapiens
ctgaaattcatatgttgacccctaaattcccaatattaacagtatttggaaatgggggcctttaggaggtaattaggtcatgggggtggagctctcatgaatgagattcaagtctgtaaggagataaagggatcagagagctcccactctgccacgtgaggataaaacaagacagctgttcgtacacgaggaagagggtcctcacaaaatccaaccatgctggcatcttcatttcagactttcagcttcccaaactgtaagaaaaaatagtttgttgctgaagccagtcagtctacagtactttgttgtagcaacctgaactgactgagacacatgatcagattccattctcagaaccaaccttccaaccaagcaatattgatttgctacacttaaaagtttggcttttgtcaaatttccaaagctatttaccccgtctgaattcagaggattgacatgaataatttcctttggatatgcccttgggaaaagggcttcattttaagcacagcttaatgaggtgtaagaagcttttgaaggtgttctttacagagtattcatggtaggaggtttgcttgaagggtcacactgaagactgtgtcccgtgacagcatcactgaagtttgactttggatgtaacactgaaagtagatgctgtgctacaccagcagatccccattcactgaagttatcattctggcagctgcctgcctccctagagatttcccttggctggagacaccggcttcatccaaggataggctctctgcccagcgacaacacttaccccacaaactttgggagtacacagtcctgactcctatgcatcaattgaggataacactgcaaggccatccacgcggcagagacctccatgggactggaagctccacttctgcctctacccagtcctgtttcccttactcccttataagtgttgttccttggccaggcacagtggctcacgcctgtaatcccagcaacttgggacgctgaggtg

SEQ ID NO: 204696 - DNA, 1000 bp, Homo Sapiens
gcgtgatgggccctcctgtagtaccagctactcttgaggctaaggctgtagaatcacttgaggccaggagtttgaagccatagtgtaccatgatggccatgatcatgcctgtgaatagtcacctagtcactgcactccagcctgggcaacatagcgagagagaaccccatctcttaacacaaaacaaaacaaaacaaaaccaaaaaagaaaaaaaaaattttggagaaaccataaaataacagaagaatatataagtacatggccgggtgtggttgctcacgcctgtaatcccagcactttgggaggccgaggcgggcggatcacctgaggtcaggagttcgagactagcctcaacatggagaaatcccgtctctactaaaaatacaaaaaattagccgggtgtggtggtacatgcctgtaatcccagctactcgggaggcggaggcaggagaattgcttgaacctgggaggcggaggctgcagtgagccaagatcatgccatagcactccagcctgggcaacaagagtgaaactccgtctcaaaaaaaaaaaaagaatacataagtacatttttcacctgttcacaagagagagaactttgtttctatttattttttatttactatttagagacagagtctcactctgttgcccaggctgaagggtggtggcatgatcatagcccacagcaaccttgaatgcctggattcaagctatcctcccacctcagccttctgagtagctaggactacaggcatgcaccaccacgcctggttaatttttctatttttcatagacacagggttttgctgtgttgctcaggctggtctcaaactcctgggctcaagtgatcctcctgtctcagcctcccagagtgttggttttacaggtgtaagccaccacgcctggccctacttatttatttttaatgtttaaagtttttaatttttaaaatttgagatggggtctcactacgttgcccaggctggtcttgaattc

SEQ ID NO: 204697 - DNA, 1000 bp, Homo Sapiens
tacaaaaattatccaggcatggtggcgtatgcctgtggtcacagctactttggaggcggaagcaggaggatcgcttaagcctgggaggatcgctggagcccaggaggtcaagggtgcagtgagctttgatcacaccactgcatgccagcttgggcaacagagtgagatcttgtctcaaaaaaaaaaaaaaagaaagaaagaaaaaaacatttacagctctcctcctaaacaactgtcttattaatacccatgggaagatcaaattgaaaagaggtataaaggctaaccttgggaactcccttaatgcgatcaaaaaacaagaacacagaaatcagttagaactaagttgaaatccaaatccaccataaatccccttctccaccttcttatactcctgtttacccccaactccctggccctggccctccagaagatctctcggatctctagaccccctaaactgccctcctcaaaatctggcctcacttcctcagcaaattccttaaactccccaagctcctccagcttccccagaaaattccttaaacactagatgcctgttttaacttccctttccctgaaagaattacagagagcactggtctccaggcctgggacatataggttgagttactttggcagaagcacctagggtgagtggcaaggatcactttgctgttccttaaggctcccattgccagaactctgcagtcaagctctgcccacttcaggggactccccactcacctttatgctccccatgctgtgtctgccctttcacaagttcagaagacacagcacctcttctacacagtggcagatcacctaggaataggccctatgaactaatccctcttcccactcagtcactaaactttaggctctcctgctctctctcactctctttttttgagacagggtcttgctctgtcgcccaggcaggagtgcagtggcatgatctcagctcactgcaacctccgtctccagggctcaggtgatc

SEQ ID NO: 204698 - DNA, 1000 bp, Homo Sapiens
cgtctccggggagttgaaaccatgagcgggaagccaagagcagctgctggggtctgggggatgcagaggtcaaaggaccaagaggggccgggtgcggtggcttacacctgtaatcccagcaccatgggaggccaaggcaggcggatcacttgaggtcaggagctcaagaccagcctggtcaatgtggtaaaaccccatctctactaaaaatacaaaaattagccaggtgtggtggcgcacacctgtaatcccagctactcaggaggctgaggcatgagaatcacttgaactccagaagtagagattgcagtgagcagagatggcgccactgcactccagcgtgggtgacagattgagaccctgtctcaaaaaaaataataaaaaataaaaggccaagaggtctggtccagatagaagccaggggaggaacaagtagggaacaggcagccttgaccagcaagccggcagtgtcctgaggaagaggacgctgacccttccctcctgttctctacgccctcagactggggctgggatcccgagactgtgggtgagtggggccaagccctctcctgcttcttgtcctgagaaaaggatcctaggtctctgttgggctccatgcagttgcccctcagtggctgcccccgtcgtttaaatcctctcaaactcaggctcttgtttggtagctgcagagaaataagagatgcaaacttataaataattaagaaacctaataattatctccaaccagacagcaagcctgcatcctcgtgagagacggaagatctggagagtttcggggggtaaactacaaaccattatttagcaagttttcccactgggctttgtcatgccttgatcttcaacgatcatgattagagttcatttgattcccgcagctgtgttctgggggctttgtgaggaggatcaagtttgggatgtgggtgagcgtagggagaggaggcgatgaattccttgtgacatcagagcccgatctaagatc

SEQ ID NO: 204699 - DNA, 1000 bp, Homo Sapiens
aaaacagcttactaaatgcactggtgagctggcaagaaagggaaattctcaaagacgtacaaaggatcaaaagtccaaatcaaaaaactaaaccagtactgaggaaggaaatctacccttctttcataagctagaattactattttaatggcctcttggagactggagacaaaacctcggacctcatgaactgagaagttataatctgaaacccctccacagagccaggaccagaagggctacaccttcaatgaaagtgaattttcattaaaagtaaagaaaacaagcagtcatgtaagcaagaaggtacagaagaagacatggaggactgggagtcttgggtcaaaaatggtcctgtacaaaatccttttcagggtcaattaaaacctatttcactttcatttatttaatcatcattttcaatgactattgatgagtagggtttcattttattatttcttttactttgccatttcatcttgatctctgaatacttttttccagtggttgttggataccagtgcatttgtgaacagaagaagaaatattagttatcctaacctataatactaactttcagcctaatccacaatgtataataaatatcactgggtatctgaagcttatgaattttcatttcagttttaaaatgttttttgctttggcatggtggcttatgcctgtaatcccagcattttgagaggctgaggtgggaggatcatttgaaaccagggattcggtttgcagtgagctatgcacttcaaggtgaaggaagggaaaatagtataattttttcatcattcattgtagagtttcagactgcactccagcctgggctacagagcaagaccttgtctctaaaaaataaaaaatgtttttgtgctaaaggaattagtatgctgttgcttgaattttgttaatctgagattataaaacacacaaaaatattataaagcttatctgtttcctttaaaatttttaaagccttactttttatact

SEQ ID NO: 204700 - DNA, 1000 bp, Homo Sapiens
atcaaaagtaaaacagattgagaaggcaaaataaatacaattaatatcaccagagaaataaaagagactattttttaaaatgccacagaaacaaacaggtataaagaagcattttgaaatatcaactttaaaaatataattattgaaatgaaagttttattatttaatggatgattgcataatgaaattgataaagctgaagaatacataagatgaaagactgggtcaggaaattacaaaagtggctgggcatagtggtgcatttctgtaataccagcattttgggaagacgaggtgggtggatcgcttggtcccaggaattcgagaccagcctgggcatagtgagatcccttctctctctctctctctctctctctctctctatatatatatatatatatatatataattttttttttttttaagatggagtcttgttctgtcgcccaggctggagtgcagtggcacaatctcggctcactgcaagctctgcctcccgggttcacgccattctcctgcctcagcctcctgagtagctgggactacaggcgcccgccaccacacccggctaattttttgtgtttttagtagagacagggtttcaccgtgttagccaggatggtctcgatctcctgacctcgtgatccaccctcatcggcttcccaaagtgctaggattacaggcgtgagccaccgcacctggcctattttttttttttttaaagaaaacattaggaaggcatgcaaagaaagattgagagactaaactacagggaggcagaaacaaaagcatcaacacacatataaaaagagaccccaaaatagtgaaaaaacaaatggagggtttgaaatatttgaaggcgtatcgacaaatattttccaaaactaaaatgttggaactgggattagaacccaggaagtctagctcaactatttgagctcttagctattcactttctactcaattaatcaatgagtaaactttaactagaagagaattc

SEQ ID NO: 204701 - DNA, 1000 bp, Homo Sapiens
atctggccgggtgcagtggctcacgcctgtaatcccagcactttgggaggccgaggtgggtggatcacgaggtcaagagatcaagaccatcctggccaacatggtgaaaccccgtctctacaaaaaaatacaaaaaattagccaggcatgttggcaggcacctgtagtcccagctacttgggaggctgatgcaggagaatcacttgaacccaagaggcggaggttgcagtgagccaagattgcgccactgcactccagcctggtgacagagtgagactctaaaaaaaaaaacagaaaaaaaaacaccagaaaatccaagctaacaaaaggtaggtaaagtaaaatttatgaaatgatataaattggctgggcacagtagctcatgcctgtaatcctagcactttgggaggtcaaggtgggaggattgcttgagtccagaagttcaagatcagcctgaggaagatggtgagaccatctctacaaaaataaaaaataaaaaaattagctgggcatggtaatgtgtgcctgtagtcctagctactcaggaggctgaggtgagaggagcacttgagcccaggagttccaggctgttgtgagttatgatcataccactgcactccagcctgggtgacagagtgacactctgtatacaaaataaataaatacaatacaaattgagtaagaaaacagttaacagacataggtagagtaagctggaagggagttgaaaaagaagggggttttttggctcatagagaacactaggtctttcttcacaaagcagtacccaaaggctctgaaataggacaccctgaccacataaagaaaactaaaaataaaaaccacatgatcatctccatagatgcagaaaagacttctgataaaattcaacattgcttcatgttgaaaatcctcaacaaactaggcactgaaagaacgtatctcaaaataataacagccatctatgacaaacccacagccaacatcatacggtatgggt

SEQ ID NO: 204702 - DNA, 1000 bp, Homo Sapiens
aagcagttctcctgcctcagcctcccaagtagctgggattataggcatgtgccaacacgcccagctactttttgtatttttagtagcgatggggtttcatcatgttggccaggctcgaactcttgacctcaagcccacctctgcctccctgccaaaaggggtgggattatagacatgagctactatgcccagtccactgatggatgacatttctaataagtggcaaatagtatcattctgcttattgtggaagggtagtaacaaaccatcctattaaatggatgtgttatatttattttgcgttctcttccctcaacagatggagcagcatattgtatgggacgtatgaattctgactgttggtatgtttaatgcaattttgtggatttttgttgtcctatgtaagatttaaactgccaattgtcatttttaggaactatttttaatttttatttaggtacttatatactctggatttcccagagagtcgggtaatcagtcagccagatcaaaccttggaaattctgatgagtgagcttgacccagcagttatggaccagttctacatgaaagatggtgttactgcaaaggatgtcactcgtgtaagcatttttagtaataattgttgctggactcttctgcgtggggactaaattttatttttcattctgtaacttttaagttcagggtaacaagtgctagtttgttacataggtaaacttgtgtcatgggggtttgtcgtacacagtatttcgtcacccaggtgttaagcctagtacccattagttatttttcctggtcctctcccttctcccaccctgggactaaattttggactcaattgaagtttatttgtcaaacccttgttaaactcggtctttttccccccccaggagagtggaattcgtgacctgataccaggttctgtcattgatgccacaatgttcaatccttgtgggtattcgatgaatggaatgaaatcggatgtgagtagttatat

SEQ ID NO: 204703 - DNA, 1000 bp, Homo Sapiens
acaaaagaccagaaatagtcaaagtgatcttggaagtaaattaaaaaagtttgaaagcatcacatttcctgatattaaattatattacaaaggtatagtgtttaagacagtatgatactggcataaaaaaggacacctaaaccaatgcaatgaaatagaaagcccagaagtaaactcaagcacatacagcgaactaatttccaacaaggtcatttatatggcttggttctctgtccccatccaaatctcacctcaaattgtaatccccataatccccacatgtcaaggatgggacaaggtggaggcaatcatatcacaggggcagtttcctccatgctgttccggtgacagtgagtgattctcgggagatctgatggttttataagcatctcgcatttcccttgcttgcactcactccatcctgccaccctttgaagaaggttcctgcttctcctttgccttctgccatgattgtaagtttcctgagacctccccagcaatgtggaactatgagtcaattaaacctctttcctttataagttacccagtctcgggtatttctttatagcagtgtaagaacagactaatacactcaccaataaaacacaatgaggaaagaatagtcttttcgataaatgatgttgagtgaactgaatatccacatgcaaagaaatgaaactggacccttatcttacactagacacaaaaatcaacttaaaaaagattaaaaacctaaacataaaacctgaaaccatgaaattcctacaagtagactaggggaaaagcttcttgatattgctgttggcaatattttttttgtcttatcacaccaaaagctcaggtaacaaaagcaaaaaataaaaataaaaataaaatagaaataaactgggcctatatctaactagaaagcttctttgaagcatggacaataatcaacaagaacaaaaaggcagcccatatatctgaaaaggggtgaatatccaaaatatagaaggaattc

SEQ ID NO: 204704 - DNA, 1000 bp, Homo Sapiens
cttgaggcctacattattactgcagcaatctcccagctggaccagcctccagtctctctccactgcagtgcaacctccacatggttatccgatgaacccttcttaactctctggtgatcttctctctttcttctagcagcaaactataaaataatcaggccatacctatcttacctatattacctcccattattcacccaaaccagctttgtgcagtgctcagccatctatcaacttgcctttgcctgaacatgaatgtgtttttccattcctacacctgagcctatgctgttccatttgccagaaattcctttccttgtgcaccttccacacccatcttcccacatctaattcctatacttaagagatcctgctcattttttttttttttaacagggtctcttctgtctcccaggctggagtacggtggtatgatctcggcttactgtagtcttgacctcctgggctcaagtaatcctcccacctcagcctcttgagtagctgggaccacaggctgattaaaaattagccaccacatccagctaacttttgtgttttttgtagagacagagtttcactatgttgcccaggctagtcttcaactcctgagctcaagccatctgcccgcctcagcctcccaaagtgttgggattacaggcatgagccactcactgcacctggccccagttcaaatctttaatcccttctcttctcatggagttcaaagtgatcccttcctgctatctctcccaaaggcaatggacttttgcccatcttgagcactaggtgatttgaattgtaggtaatggagttcatgctacaaatctttcttactagacaataaggatgtcctatagttttatctacagttccttgcccgtaatagattccagaaaaaaagtatgccttacatattatggatatataatgtttaaaataagtatggatatataatgtttaaaagtaagtatctttaagtaaggaatacaataaggaattc

SEQ ID NO: 204705 - DNA, 1000 bp, Homo Sapiens
gatttcctttaccctctattcaaggtgtcctgtgtgtacaaagaaaataataaaaaacaagaccctgcctatgaagaaacgttaatctctgtcaagacaacaggaaaacatgaataaaaatgaacatattcaaatacatgaagaagtgaaaaaaatgcaaccaattaggggaaggatatctcagcacaatgaggaaggcttgctcatttggttgaaaaaatgatctgagacaacagtgacaagtatctgccttatgctaccactaggagacatgcatgatcccttccccatctcaagctatagaacacccctcaaataacggcatgtggcaatgggatgtctcagcagcaagaggtgccttcccactaccgttgctctccccaagtggcctccagggtgggctatatgacacctgggctctgggcatccattgttaatggtagaattgagggagagaatcaccagtactgcccaaagctcattagtctgcacttctctgcagagtatagatgtgcttttgcctttcttggaagtgaagaaacttcagaggctgaataagtacatgtgaaaataaacacccaaaagagagcagatatattttactaaccagaggtatgattgtcccagatctccacgaagtctttttcacagccagaagaattctgaaggttaaagtcttcaaaagagatggtgagatagtgtccagagagcccctggagatgccactcacagaataagttgtctctgtatggaagtgttggatgtccaatgctttcaacaacaccactttgccctggtactcttcccccacactgagctgcaaaaaataaaaataaataaataaataagaaagcaagcaagcaagaaagattgattctattacaaattttgttttcttcatttcaccagcacatttgaaaacttttaggtgccaagtgactctgaattgaagttttaaaaattttgaaaacggttagtgctttcctcattatttgaattc

SEQ ID NO: 204706 - DNA, 1000 bp, Homo Sapiens
tgtctcctacacctaaaattttgccataggtaactgttttgataaacataggatagcgtccttttattctgtatgtaaaaaagtactatatgtaaaaaaggaacttaactcctcactaccctgtttctgtcctctagacagccagatggatcttgtgtaaaagtagaagtaatcttggctatagaacaagaactgttgatatttccattttaaaaagttgaatcagtcttaagtttgagttggtgagtaaaacaaaaccaaaaccaaacctgggataagctaccaataagttaccaaagtatttaaaaacttgacagatgtaaaacattaatatataatttattcttagcaacttaatctgtttattgagtggcagtgtttcagtaataaagctgagctatttggatacactgaccttaatctagtggaaaacaggaggcttttaaattggcacatacacaaatcatcttaggatccataaaatgccttattgttaaattactgtttttaagtcttatattttctctgactacttctgatagtattagtaggcatctcttactgtattttttttttcagaaggcaaatttaggccgtttttataaggtgaatataggtagattttcatatgtattctggtatattgggaattactgccaatgattacttcccagataatccattctaactatcgagtatctagaaatgatatgttttaagtcacgatgattattaaaaaactgctgaattaaataagctacacattttgctggaaattaaacaaaacttactcgcttctttgaaggaaattgatttattccttgatttcttctctgaatcttgaatacaaattaattttttggttttttttttttctataaaagtgaacttggagaccagtatagcacaatataaagcaaggaaagttaaaatcaattaagaatgctttgtttaaaaagagagaagacagaaaatgtacaatttgtttgtgaaagaattc

SEQ ID NO: 204707 - DNA, 1000 bp, Homo Sapiens
agatcatccttttggttttttaaactatgtaaaaattttaaaataattcctaaactacaagctctacaaaacacaggcatgaaaaaggcttagtcctatctatgtactaaatagtacaatacttcaataaataaaaggctgcagttttactaatgcatgaaaagaccaatcagtgaaatagaacagaaaaccaaaaatacacccacatatatgcatagaaatttaatatttaataaaggggacaattcagattactgtggaaaaggcggattactcaatcaaggattgaattatcattggaataaacaggttaacctgccgggtacggtggctcacgcctgtaatcccagcactttgggaggccgaggggggtggatcacaaggtcaggagatcaaccatcccggctaatatggtgaaaccccgtctctactaaaaacacaaaaaattagccaggtgtggtggcaggcgcctgtagtaccagctactcgggaggctgaggcaggagaatggtgtgaacccaggaggcagagcttgcagtgagccaagatagcaccactgcagtccagcctgggtgaaagagcgagagtccgtctcaaaaaaaaaaataaataaataataaaataaaataaacaggttaacctattaaaaatccatttgaggccaggtgcactaagtcacacctgtaatcccagcactttgggaggccaaggagggaggatcacttgagccaaggagcttgagatcagcctgggcaagatggtgagaccttgtctccacaaaaataaaaacaattaaaaaattggccaggcatagtggtccatgcctgtagtcccagctgctcaggagactgaggtgggaagataactggagcccaggaatttgaggctgctgtgagctatgatcatacaccgcactccagcttgggtggcagagtgaggctctgtctccaacaacaacagcaacaacaataacaacaacaaaaaacagtaaaattagact

SEQ ID NO: 204708 - DNA, 1000 bp, Homo Sapiens
gtttcactacgcttcatcatattactgtaagatagttaatgtatcactctttttccagtgagattttctgggggtccaagaggttactcaaaatcctaaagtcaaacattcatggaaaggtgaagtaagaacttaaaacctgatatatctgactccaactctgctgtcttttttcacattgtcaagctgtaggactctgtaaatgtttgttattaggttggcatttttgatatcttctgcctgtttcattgaatgattagcagtaccttagaaacactccaatgacctccttgcttgtcatcagaaacaatcactgaagatagtaaagctattgctctatgtagtcattttgctagacaacaggattgggtaaagcagaactccatggagccaaatggataataacagctgaaaaaacataaagctggatgagcgtcttgtttttgtagaattggtattgctagttcaggactgaacaggagctctgaatgagaaattaaaggtgcatattgtctctagactttactatgtgttcaacttaattggaaattacaactaacacacttcttagacattttctttgttgggtataagatcaaagtgaactatataaaaaaataagatgtgtttgatgattagagctataggagaaaaagtgtaacactcaattttggtagataaaatatctcaacaatgtcttgaagcagaagctgttaaaatcacatatatccttttgcccacttgaatttcctaaggctgtgatagacagtttcttgcgctttgaaaaatgtcaatttcagacacttttaactcttttctaccagaggatatcagagaagttgctcagccacaagctgggtgtaacctgtaagtagagggaagttcaaatgcttagagacaactgaggagtggtagtcagtggataagttatttcatttcctaaaagattattgtgtatgatgattgtatgtcaggatcttcatggtttctcagagaattc

SEQ ID NO: 204709 - DNA, 1000 bp, Homo Sapiens
agtatcctgttggatttcccacattaggaagggtctgaagacccataagaccatgataacagttcatggtcttccagttcatccagcttaggaaaaaccctaaagatgaagatgaaaggtggcttttctttttttttttttttttgagatggagtctcgctctgtcgccaggctggagtgcagtggcgtgatcttggctcactgcaacctccacctcctgggttcaagcaattctcctgcctcagcctcccgagtagctggaactacaggcacctgccatcacgcctagctaatttttgtatttttagtagaggcagggtttcaccatgttggtcaggacggtctccatctcttgacctcgtgatccacccacctcggcctcccaaagtgctgggattacagagagaggtggctcttgtagctacttttatttgtcccccatcctccacccctaagtattctcacttgattgcctgctcttcaatgcattgcaagcttttaaaaatacttaattctgaatttttagttgattttcatgcaagttttgatcagactataatggataattacttggttctgactatagtgtcatgtaaaatggactaattgcaactttttaatccacctaataaggtccactttcctcaaaccaggtccaaaaagtccccaacttatatatccctatatattaatggtgtagagaaacccaagttcagggcttttagtgagccaactgccctgatttccagtgtactatgacaattagaaaggtaactcctggcttcccaaccccaaccacttattcattgaatccttgtagtaatatgccttaaacaaaagtgaagagttactgatacccaggactactaaagttgacagctcctttcccttctgaatgcgaaataataaacactattgtaaactctagaatggtatttttaaaaataataatactattaataatgcttcaggttcagtataaattaactcgactagactc

SEQ ID NO: 204710 - DNA, 1000 bp, Homo Sapiens
gtccctcaccggccccggacatgccgtctgggaggctatcagctcagagcccacaccagcttcctctgctattgttcagcactcaccattcttctgataacccggctgtgggaaccactgcccagacgccgggccaacacagaggcacgactacagctgggaagagtctctccttcacatgacgactgagctctgtagggggttgtgatggagaagactgagacggggcaatctaaggcccaaacgtggcccagtgttaagcatattgagaaacccaataccaatctggtgaattgaatagttttgcaaaactaaggaaaattaacagtctccacaaaaaagtgtttatccaagtgttaaagtacttaattgttctcaaaaaaccaaattgtccccattctgaacatttttttgaactttctcaattgcagttagtcttctgggacattgaagaaggcctagaactcaatcaaggaacaaaaatatctaagcattgtatttaaaaaacatgtgttagaggtttattaccttaggagatttttaaatatcatttatctgttaaatttagttgttgcatcagacattttgctcatttttccctttaataattatatctttataccactatctgaatttgtgtctttactctttttcaccttgaaaagggctttttcttttgattatataaataatagatactcagtgtaaaaaaagttcaaccataacaaaaacatgaagaaagttaaaaaatcacctaaaatgccactaccctgatataatcaccatttgctttcagcgactgtatctatgtaatccacatatctagatctatgttcatacagacatatacacacgtgtgactttttatagaagctgtgcattttaaaaattatgaacgcttttttcagtgcagtgttctagatatttctgacacaaggatccaggaaataggttggtatctgatctgtatcttagatttatctacctatatataactaga

SEQ ID NO: 204711 - DNA, 1000 bp, Homo Sapiens
agtagaggttgtttcattaagtgcaaacacattgttcttaatttgaaaactgtgggcagaaacagaagcccgagactaatttttccattgctaactctagattctcggccactggagtctgaagatactctctttgagaatgcatattattttgctcacagctaaaacatttaagtatcatagctgatcagtggagtgagattaaaaggtttcttttttgaatcatcagctagagatgtacaagggagacagcatgcagggtgtgttcagaagagcttgctgaggtgctcggctcttagcattaaaaatgtgatgttggtatatcatcctgatagaaaacactgctttccaaatcctagtcactggatgggaggaaagtaagaacagattctgccaaccactactgatttgttataattctccccattgaaattgggacaaaatttgtaacatgctactctgaaattgatcacattctcaattctgtcaatagcagagaatttagcctcaacaccaccaattcaaaatagtttaggtcttgcccctgcctgattatgtaacagaaaagcataaagtttgcagggtggagcgggaggatttttctaggaaacttccttctcttccattaacgtgtgaatgagtaaggacagttaatctccgcttctgatataaatattaggggtagaggctgagtagaagaccctctttttgttttcagtagctcattctcattcaccaatgataagggagacttggctctcaactataagtgtacacatgtacatctttagagagtagagatacatctgcatataaaaaaaaaatctgccgtaagtgatagagttgaaaataatgtcctacataccagaatgttcttctgaattaggcatcatgtaggtattcagcattctttccatttccaaattgctcccactccctgttttttcatcatcccctttttcctcattagctcattggaaataaagatttttattttatt

SEQ ID NO: 204712 - DNA, 1000 bp, Homo Sapiens
tggggcgcactgtctgactcgctttcagacagtgtgttgaagcagagaattgagacagtgatgtgggttaagtctcaaaacctgctgttgaggaataagatagttttgtgggtttctttttttggtatgcatgatacagattaattatcagccatgagcacatttattagataactgtgattcccattgattttggggttccatacagttaccagtggcagctgcctcctgtctgtgccactcccctgcggtctggctgaggagcttgtgcaaacccagcttggttctttcaactcatgggcgatattttaaagaggcttctgaaatcagcaaaacgtttgtaaatggattcatcttgtttaaagtttcagagagcgcagttttagagttcttttcaaacttaaacacaaagcccagtgggaatttcagcagactttacatgaacttttagagtatttttctcattaatttctttcttttcacaagaattaattttgtgataaaaacaccacatatccagtgtggaaaactaatttaaaaatcagaaaaacaaaaatggaaaataaaaatatcacattctaccacccagaaatcaccattaaggcctcagtgcttaccctttaatgtgtgtatgtgagtgtgtttatatataaattatatagacataaataattaagcacctaattctatatataatttatatatgtacacacacacacacacacacacacatttgctttttacctaaatgatgtcatgttattattttggggacgtttcaggtatgtggaccgacttgcttctttctgaaacaccgttatattttttgctagtataaattaaacttagggttcatttcctccaaagtaaaaattgatttgcttaaagatgaattttcattcagtgacacatgacttaaatgacatcaccactatcatcatcataattcacaaataagacttagcaagttcttaatagtgatgctctataataggaattc

SEQ ID NO: 204713 - DNA, 1000 bp, Homo Sapiens
tcttttagcctgtaaggttttcactgagaaatgtgctgccagatatattggagttccaatttatgttattacttttcttttcccttgctgcttttaggattatttctttatctttgacctttgggagtttgattattaaatatcttgaggtagtctcattgggttaaatatgctcaattttctaaagccttcttgtattttaatgttaacatctttctctaggttggaaagtgttattatcttttgaataaactttctactccagtctctctctctacctcttctttaaggccaataactcttagatttgcccttttgaggctttttttctagctaccataggcatgcttcattattttctattctttttcttttgtctcctctgactgtgtattttcaaatagcctgtcttcaagcttactgattctttcttctgcttgatcaattctaatgttgggagactctgatgcattcttcattttttcaattgattttttcagctccggaatttctgcttgattctttttaattatttctatctctttgttaaatttgtctcataacattctgaattctttctctgtcttaccttggatttcactgagcttcttcaaaacagttactttgaattcaccgcttgaaagatcacatatttctgttactccagaattggtcactggtgccttatttagtttatttggagaagtcatgttttcctggatggtcttgaagcttgtgggtgttcatcaatgtcagggcattgaatagttagatatttattctaatatttgcagtctgggtttgtttgtacccaactttctagagaaggattagtaagtattcaaagataattttgagtgttgtaatccagttatttggtcatgcaaccataaatgcattaaggggcaccccaagtccagtaatgtgctgactcttgcagacttgtagaggtactgccttggtggtcttgggagaagaccaaggagatcagggagaattc

SEQ ID NO: 204714 - DNA, 1000 bp, Homo Sapiens
attatgctatacaacagtttacttaatttgtattaaaacattcatgttatgtattcaacgtaagtgttcagaatttatggggtttttttataactctcttagcatttctttatttttatatatccttaaaacatccagaaaacaaattagtcgaagattcctgtcctctgagaggcccagccagtcagaaacagaaacagtcacttccccaggggatggtagtctgactttggccatgcccttcccgcctgccactggtacagtggatacgaggggaccagagaagccactcacctgaggtgcagggtccctgaggaagcctgcagtggagtccctgggggcccacacttggtagtgtccagtctttgctgatgcgtgaagtttggcttcatgcccatcatggactgacaggagggagttcaaactatggagtcagtaggtagggggacccccctggaattcgaaattagggaccctggagaatctcaggaatattttatttatttatattaatttttttttagatggagtctcgctctgtcacccaggctggagtgcagtggcacaatctcagctcactgcaacctccgcctcccggcttcaagcgattcttctgcctcagcctcccaagtagctgggactacaggcatgtgccaccatgcctggctaatttttgtatttttaacagagatggggtttcgccatgttggccaggctgatctcaaactcctgacctcaggtgatccgcctgcctcggcctcccaaagtgctgggattacaggcatgagccaccgtgcctagcctacttttattttttaaaatattcctagatatgaccctcagtgataaaaataacaaatgcgtgtgctaaagaatacatttttaaaacagtaaaccttggctctcatgcaaatataaaatgaacatatatttagtattttcaacacattaattgatgagggaaccagtcagttgtcgaaaccaattcaaaggagaattc

SEQ ID NO: 204715 - DNA, 1000 bp, Homo Sapiens
agcgtgtgctggttacgctgggtatggccctgagattacctatgggaacttttaggattccatgtccagcattttgaaaattcccatatcttgttccccaattccaagatagttctctgtttggtatttatcttgttttcaagaatcaattaattattctgctaaaatcatttaatcaatgtttaccttgcaggacagtatgtttccaaaagcagaaaaagtatcataaagtgccttgttatctatagatttgtccaggttcttgatgaagacgtttcccacaccagattttctcaaagagggatccctctgagaccacatgatgcggattggctttcccttaatcacatcaaagttcatggtgtccaaagcccgctcagctgtaagagagaaacacatttcaataaggagagaaaacgtcagctcccacaggccaacagcctaagaacagattactccaggacttttcaaggtaatcactcttgataaaaggcaactctattaaaataaaagggcatcagattcctccagcctgcactgttagtaagggaagcataagttccagctaatgactctacttcatgacagaagtctaaacacccttctgggtctgtgcccttgttggataaaggggccacaagtaaagataatctaaatggccttaatgacaccaagatccagtgataatacctcacatttgactaagctttaccacttagaagagactttgcagactaccacccaccatgactcaggtgggacagctgaaattatacattttacaaaatgaacaaacttatgtttagggtaactaagctgtgcagctagctagtaattacgaaactaatactagattatctgatttatttttcagtgaggtattgcatcaaagttatcaagtcatttagtctgcaatccacctatggagacaagtgacaaaacctgtaaagcaaatgatctggaaaaaaaaaaaaaggtgctatccctgaattcagaattc

SEQ ID NO: 204716 - DNA, 1000 bp, Homo Sapiens
atatttttggctattttttatgaggtaaaaacacctataatacatacattttacatttgtaatggttcaggcagctttctctgcaaaattctccattcctgaacttccctggcaatgctcacttaatttttttctcactgtctaagtttctaaaagaattttgtagtatttagtgtttgcctcaatggactcttgcttactgtgggccaagcaagacctcgcaggattcaggctcaccattgcaaattggccagcaggtgtcactgtgggtttgggtggtaacccaactgactacagaaaagaatgactgatgtaggggagtaataagaaaaggagagaaagggaaatacaaaagcaggttcttagaggaagagaaaagtgaattaaagatcgctgatgtttccatagaccttttctctaggatttcagtgttcttttgtaccacctccctggctcctgttagcccagataggaattcacttgcataagatctgttgattctgagttagtcactaaggataacttcactaaataaaatagcaacagagatgagcaaagttgggaagagctggattcctgcagcctgttcccgactgctcaggccttgcctctgggcttcgttgctgtacgtttttttgaaccataggcccctttgtttaacctcagaaatgtacaaagtctctcagcttttaaataggtcatagacttgtggcccagaataagattttggctatccctaaccgttcagtagtaaaataaatcctactgtttcattacttaaaggggcatcttggcctggaaagttggtccttgtatctctcaaagatttggattgctcattttcaacaaagctagcctgttcaagtcacatctctttctgagtgcgtggaatttcttaataaataaaatttcaatttgtaaaattaacacatatttcttgaacacctgtcaacttttaagaatagctggccataaaaactctctgtacaacgaggaattc

SEQ ID NO: 204717 - DNA, 1000 bp, Homo Sapiens
attaagagagggaagaatatctgagctctctgcaacttctgtgaaactctgtaacatacttccttgtgggataatgacaatatttgattaaaaaaagcatttcaacaattctgaggacaaatttatatcaagaagctctaaggagacataattgtttataaaaactaaggaatgtgaacataattttgtaacaattcacatcagaaataaacaaaaaatctagcatgaacagctatgccagtaattaataagtaaacaggttgtatgttaacgggcaaacaattaaattatttgtttcctaggggcatgtaatgagattgttatcacattcccatgagggggacaaatagatattaaaaaggtctttccaatacctgtattggctaaggccaacagctaattcaatagattcgatcaaaatcactacttctttcactgctgctgatttatgactttggttgttgttagtcatcactcattgcagtttgctttccagtgctcagaaattatgcctcataaataaaaagatacaatcaaggagatcatatcaattcatctacaaccttggagtacattttcccatggcactcacgctaatgccttcttaaagggtagcttgtcataggttttgaatatgtttgaatagcaatatgctgaaatcttctttgctggaatcgcggttaaagaatgttggcaaaaaagacaatgcaatgaatttgaaattacatgattacaagattgttttatttcatgagtagccctgcaggctccagttatgaaggaataatgtgctgaaaagctctaggagctatttatttaactgtctatctatctgattttctttcaccatcaaatggatgttttccagcatctctatctgcatagaaccttgctggatacaatacagtcacacttttacagatatagtcccgttttccaggttcccttcatctaaaacactttggattaggcaagatagaacgtgattttaattgaattc

SEQ ID NO: 204718 - DNA, 1000 bp, Homo Sapiens
attttagcagtatttattaagaaaaaaatcttcagtagtttttggtttgatttgtttttattcttttgtgtttgatttttaaactagttttactcagggccccgtatgtttatctgtttttgtttgttttgtgtggtttggatatgtcttcttgtcaattattagttttggaacattgggtcttttattggactaatcttatttcaaaaaataattttttctcccatctgccatttgtagtctatgtttatttctctgaaatattttaggattaactaatttatctatgtatttttttcttctcacaaataggaaaaacaacatttcttattgtattttaaagtttattattaatacccattctgacattgctaccactatgtggctcccgtgtttattttattttctgcttgacatttggatgtacaagtgcagtcaacaaaaataagtcatatggttactaaactgagttagctaccttcaagaacaatcactgacaccattctataacttcttaggttttctggcctaaggttctggcctgaggttcagaaggccagacctttgagaaaagtcaccagtgccactctaaaccgacttaggttttctggacccatctgcagaacttggagccactgcagatctcagggcctatcacctgcctacctccagcatctctccaaagtcctaagcaattttcagctataaaatttctaaaaatgaatgaagtctctgtccaaagcctgacttccctgtcttggaattagaaatcaatttcattttcccctgtagttattacctaatgttccaggggctcctaccgcaaatccatagtcattcttagtcgctgttcatatcagctcccaaaaggaatagcagccacttaggttattttcctcagcctcctttccttcgtcaggcggatatgggttggaataacattttcgagtcccaagtcagaaagaactttgtgagagtgaccattctgatgtgagaattc

SEQ ID NO: 204719 - DNA, 1000 bp, Homo Sapiens
actttgggaggctgaggcaggtgcatcacctgatgtcaggagttcatgaccagcctgaccaatatggtgaaaccctgtctctactaaaattacaaaaattagccgggcatggtggcaggcgcttgtagtcctagctactcgggagtctgaggcaggagaactgcttgaacccaggaggcagaggttgcagtgagccaagatcgcgccactgcactccagcctgggcaacagagcaagactctgtctcaaaaaaacaaaaaaacaaaacaaacaaacaaacaaaaaagcaacttctctcacagcagcccctcccaaagcacatctgttttatttttctgcataggatttaccattggcagatggtgtctttgtttactctgcattgcacacctaaaacaatgtctggcacaaaagagaaacacaaacgaatttctcaaaatattttctcatacaggatcacattcaatgctcacatgatcctgaaaagcagtaaagaacagataaattttttaataatcttttaaattgtgaaagcacaaatatacaaagatgttaaatgatttgtctatgatcacacagtgaagtaactgcagaactaaccctagaattggggtccccaacatcttttccaattcacatcactgtctccacaaacaaatcaaagagcaggtgtatatttgatttcacacagtgatctttaaaaagctcaagatggcatctattcctttaaaccacgatcaaacatgaaatagcaccagaatagtacatgactccgtagctatttattttcttctaactaaaagggagtaatagaggtcatcagactatttttagaatttaccgattttgtgacaattctgactaaaaggaaaaaggggtaatgtgccaagaaacagttaagaattcaaatatgctgtgcatggtggctcacacctgtaatcccagcactttgggaggccgaagtgggtggatcacaaggtcaggagatcgagaccatcct

SEQ ID NO: 204720 - DNA, 1000 bp, Homo Sapiens
gaggtcaggagttagagaccagcctagccaacatggtgaaaccccatctctactaaaaatacaaaaattagtcaggtgtggtggttcatgccagtagtcccagctacttgggaggccgaggcaggagaatggcttgaaccccggaggcagaggttgcttttaaaaaatttgtggggcagccagggacagtggctcacgcctgtaatgccagcactttgggaggctgaagcaggtggatcactgagcccaggaatttgaggccagcctgggcaacttagcgagacctcatctctacagaagttggcaggtgtggtgatgtgtgcctatagtcctagctacttgggttaaggcagaaggattgctcgaggctgcagtgagccgtcatcacaccactgcactgtaacctgggtggcagaacaagaccctatctatctttaaaaaaaaaaaaaaaaaagtgttaagaaaaatttacgtaaagaaccatagttatcatttttcagggattttttttcagtactttaaccaccacccccgatggaggcatctatttccaaagcttcaaatcttttcttaatttggaacccaacaccttttctccccctacccctcacacgaggaagttccacagattttttaaaataaaaaaccaggtcctgttatataaaagtacattaattatattaaccaaaagttgtttttttttttttttaacagacaagcctactatccccagagaagtctttgaaaatagtggaatccttgttacagatgtaaataactttatagaaaacatagaaaaaatagcagctccatttaggagtagctattggtaagaacactttttatgtaactttcccatgtgagttggagttgttgatggcaaatattgacatttgtgtctaagggaaacagttgggaaactgttgtttacatacttcatgctataaatttaaagtgtttgtttaggggtggaattgctatttggcataaataggaattc

SEQ ID NO: 204721 - DNA, 1000 bp, Homo Sapiens
agcatatatacataagcatacataattaaatacattgttgttattacttcaatattaaatcaattaagaagaaaaataaaaggtggttttattttcacttattccttttatactctttgttttcttaagaaggtccaatttgtgacctatattgttttcttttctctctaaggaacttctttaaacattttttgcaatgctggtctactggcaacatttttcctcaattttttcatgtatgtgagaaagctttatttcaccttcacttttgaatgatagttttgcaggttatagaattctaggttggtagtttgggttctttttttttcctctcaacactttaatatttcactccattctcttgcttgtatggtttctgaggagaagccagatgtaatgcttatttttgttcctctgtacataaggtgttttttccttctggcttctttaggattttttctttttctttgtttttctgcagtttgaaaattatatgcctcagtgtagttttgggggttgggattttttttcttttagggtttttttttttggcatttatgctgcttggtattctcagtattctctgagcttcctggatctttggtttggtatattaatttggggaaattctcagtcattattgtttctgattttctatttctttctcttttctccttttggtattcccattacacgttacgcctttcgtagttgtcctgtagtctttggatattcttttctgggttatttttgtttgttctgcttgcttttcagttttggatgtttctattgatatatcctcatgcttagagattctttcctcagccatgtccagtctactaataagcctgtgcataaatttatatttagtatctaaagtctgtattaaatggcaagttccttgagggcagagtttgtgtttatctttgatttccttacaactcctagtagagttctctacaacaaataagcataagttttattaaatacaatgtatcat

SEQ ID NO: 204722 - DNA, 1000 bp, Homo Sapiens
agatttatagagatccaaaaatatccagcgctcaccaaggtaaaatttacaatgtttggcattcaaaccaaggctactaggcatgcaacaatgcagaaaaatgacccatgatgagaaaaatcaatcaaaactgacccagaaatgatacacatattagaactagcaataagggctgggcgtggtggctcgtgcctgtaatcccagcactttgggaggctgaggtgggtggatcacttgacgtcaggagttcaaaaccaacctgaccaacatggtgaaactctgtctctactaaaaaaaaatacaaaattagctgggcgtggtggtgcatgcctgtaatcccaactacttgggaggctgaagcagaagaatcgcttgaacctgggaagtggaggttgcagtgagccaggatcgcaccactgcactccagcatgggcaacaagagtgaaactccatctcaaaaaaaaaaaaaaaaaaaaaaaaaagatttagcaataaggtcattaaagtagttattgaaactatattattccatttggtcaaaaacttaagtagagacatgagagatataaagaagacccaaactacacttttggagataaaaactacaatgtctgagatgaaaatacacagaatgcgatttatgacagattagacacggcagaagaaaagattagtgaacttgaagacagagagagaaactgtccaaactgaaatatacagaaaacatacttctatagtatatacttagaagagaagagatgattaccaaaagaagttctaaaatgtgagaagaactgggaaaaaatacacttaatcatgggtaaatatgaataaaaaatacattataaaaacagtaataatggttagtttgggggttaaaaatgagacagagctaaattattaatcaacaataatatatgagatggacgaggcagaaaagaacaaaattaagaagaggaacagagcttccctatcagtggaagtaggtgtaaaagaattc

SEQ ID NO: 204723 - DNA, 1000 bp, Homo Sapiens
gcacctaaggagtaatggagaatacgcaggaaagtggagtggagactgcattgtccaagggttcacagcaagcattggtagaaccagaagcagaatgcaagtttcctgactcctggaccataccaggaagcagagtcaataatcagaacagcagtcatggggcatgatgaagaagctgagtcagagactcttcttcatctggttaaatcccagtgacccagggcagatataagctgagaaccagaaaacacttgtcagttttattggtttgaagagaatgaagtgatctgattcctttgggaacacagggattaggaaatggtttgaccatcaagatgatggtaaatgaccatcttaaatataatggaaaccagaaattaatttactttttctaagccacataggtaggaatttgcctgatttcaaagtcagtgtttttcccacttaatttaaattctcctttgtctggtacccccattctgggtgtatactatactccatacagtctgtgcatagctctgtattttacaaccatcttgttttatacttatgtaattatgactctgtttatcttattagattgtgagttccttgaaggtagggccacatcagattctaatcaaatcaaaattatatggggtcgatatcagcctggccaacaaggtgaaaccccatctctgctaaaaatacaaaaaaaaaaaaaaaataggcgggagtggtggtgcatacctgtatttccagctactctggaggctgaggcaggagaatcgcttgaacctgggaggcagaagttgcagtgagccgagatcatgccactgcactccagcctgggcgacagagcaagactccatctcaaaaaaaaaaaaaaaaattatatggaggttccaaggtacatgttataactattcgtttatttaacaggcacttaaatgatgatacaatgtgccagatacttgaaacagagtagtaaaaatatttagtccctgtcctcaaggaattc

SEQ ID NO: 204724 - DNA, 1000 bp, Homo Sapiens
actatttcttcataatactatttaataaacatataggttttaaaatagtgccttaatgtcctaaattgaaaatatcggtaaagttgaactgtgtatttggaaggtataatgcatcaatgtgtaggaataactcaacagaaaatgtgagtcttgaatattattccaaaagtacaccataattgatttttactgctattggtaattctgtattctcatacagaaatcatttattttattgtaactaacagcatgcatttcaaatcataactagttaatgtagtctaataaaaaggcaaatgttgtgaacaaataggataagcaataataaatacttgtcatattcattcataaatttacttgtaaaagttttgcagtttccaatagtgtagaaatacgccctaagcaaaaggcttcttccgtattagagtatcatagtaggatatcacataacttccattcaaatctattgcattaaaatgacaagagttgtgtttaactctgctaaagtaaaagaagatatcacaattaaggaaagaatctttcttcctttcttcgattaaagcatgacaagcagataatagcatattttgaattcatatcagaaaggcggctaaaaaagtacaaacttcatagagaagggctgaataagaaacagattgaaaaaattagcttaaaaataaccgtgttttaaaaatgtgcaggcactgggagaatgtaaatgagaatgttcgtagtattgtttccaaggggtattaaacatttttgatatgtttacataacagtatttgttaataaggtaagaataaagcaactggttcatattaaagtgactgcaaaatgatttttttaagtctcctgaaatttatgtattgttctagagcagagttatattcccctgaattctccagttctagaaacactgggtactgaagcataaccaatgtggttctagcacttcctgttctctactagatcagcccatgacacattaactcagatc

SEQ ID NO: 204725 - DNA, 1000 bp, Homo Sapiens
cactcattcattcactcaaccaaccaagcatttattaacaattatgacttctcaagggctgtgctaggcaccatgaatacagagttgcaatacacagctgaaaaagtactttctgaaagcaattgtttcctatataacaatttggtcaatctctctggaggaatgtattacattcagctctgggctatagttattcatgtttatctcttaccttcctactgaactgcaagctccttggtggtaaaacaatggctttctcacctctgtatgtcccataggcaggtgtcaataaatattttctgaactggatcaaatttaattttaaggctgggcatggtggctcatgcctgtaatcccagcactttgggaggccgaggctggcggatcacctgaggtcgggagttcaagaccagcttggtcaacatggtgaaacctcatctctactaaaaatttaaaaaattagccaggcgtggtggccggtgcctgtaatcccagctacttgggaggctgaggcaggagaatcccttgaacccaggaggtagaggtttcagtgagctgagatcactgggcaacagagcaaaaactccattaaaaaaattaattttaagcaaatgactttgggattcgtggaatgaaagacatttgaagcagtgaagtctggctatgaatgagtttttgaatgtctatgtttggacagagcgcaaatttaacagatggtgcttcaaaaatagacgtgagattttaaaaatagtttcttccagctacgggaatgtaggctccagttaagcagactgacatctggcgaattaagttgccatggtaacaggttttcaggtcaagcctggagactgggtcagccctcccctctgtcatgggaacagtcttccaggggggtcagtgaaaagaacatctttgacaacacacactttcagtcaagccaccagtgccctaaggtctctaccttttgtcatcttcatataaaagctctaagaaagaattc

SEQ ID NO: 204726 - DNA, 1000 bp, Homo Sapiens
atgaggtttgggcagggacacagatccaaaccctatcagctactatttgctttaaataaaagggagtcctggccaggtgtgatggcttatgcctgtaatcccagcattttgagaggccaaggcgggtggatcacgaggtcaggagttcaagaccaggctggccaagatggtgaaatcctgtctctactaaaaatacaaaaattagccaggcatggtggtgggcacctgtaatgccagctactggggaggctgaggcagagaattgcttgaaccgggagacggagtttgcagtgagccaagattgtgtcactgtactccagcttgggcgatagagtaagactccgtctcaaaaataaataaaaatggcagggcatggtggctcacgcctgtaatcccagcactttgggaggctgaggtgggcagaccacgaggtcaggagtttgagaccagcctggccaatatggtgacacctcgtctctaccaaaaatacaaaaaaattagccgggggtgatggtgcctgtagtcccagctactcagctcggagggctgaggcaggagaatcacttgaatccgggaggcagaggttgcagtgagccgagatcgcaccactgcactccagcctgggcaacagagtgagactccatctaaaaataataataataaataaataaaagggggtcctttgtgcaagatggcacagaaggcaaagaaggaagctcctgccccctcctaaagccgaagccaaagcgaaggctttgaaggccaagaaggcagtgctgaaagccatccacagccacacacaaaaaggaacatccacatgtcacccaccttcctgcggccagacactgcacctcccgaagacagcccagatatcctcagacaagcacctccaggaggagcaggcctgaccactgtgccatcatcaaattcccgcagaccactgagtcagccatgaagaagagagaagacaacacacttgtgtacattgtggatgttaaag

SEQ ID NO: 204727 - DNA, 1000 bp, Homo Sapiens
atcagagaggctatgtttacacttctccaaaagttctttacataccagattgcctattggtgactgttttctaagtgcctatttttaacaggaaggacaacctacaaccaactagtaattttcagaaggtgagaaaataagctagtaataagtaagcctaagagtaagtgctattaaagacagagcagcaaaaagttatctcaattataccactatggtcagaattactaagccatatcagccaagggagaattgtccgttaaagccaagttgatgctgactgcagtcttggggcaggatccaggaatcacattcattcaaacaatgtaacaggaattgtgtgcataaccctaaatattagaggtccttatacttcatcccaacaacctctgatggtttgagaatcgcctcatacggctaatgttactgcagtaacagagatcaagaaactgaaggcaaaattaattgttaattgcagtcattaatgaatttcccttattggttgaatgggtttaatgaaataagtaacctcaggaccctgtaaattaaatactaattttcaaaagacaaggcttcctctgtagtgaaataagagagggaacaatctctaagcctggtgaatggccaggaaaagaatgctggcaaggaattgaatggcacttgtcttccacgataggaaggactcaataaagtgcctgatttagaaagaaggcacatgagtggtaagcttgaaactccagctaagcaggagagttactgtaaccacagatttttctacaccacagtggtctccaaaaaatcttcaggatcgccgggcacggtggctcacggctataatcccagcactttgggaggccaaggtgggcggatcttgaggtcaggagatggagaccatcctggctaacacggtgaaaccccgtctctactaaaatacaaaaaattagccgggcgtggtggcagacgccgggaggctgagggaagagaatggcatgaacctggg

SEQ ID NO: 204728 - DNA, 1000 bp, Homo Sapiens
aggtacaagaaaatgatacaaaaggccaagaaaataatacaaagatagtccttttcttcattatctccctttaactctcaaacattttgcttccttaccctctgtttccaaacccgtaacaaagataaaccccataatagaggtaccatgggcctctattatgagtcacacatgctttaagaacaaataagacaggaatgttatgagagtttatttttttttcccaaaggaaaactttatgttatgacaaattacaattagataatcacctcgtgcagaacaagagactggggaatgttaccaggcttaaaaaagaaatcctactatattgctgcttaggtggaaatcttacctatggtctagagccaaactatccattgtttaaaagacacttgccagtacaccgttgccaaattaaggttaacttggggttcactgctttactacatgacttaaatgtaacaacacagacttcatggcatattagtttaggtatatgaaggaagaggaagagaggtgaatataaattgttaaaataaacatggaactcttgagattccaaggaaatgcttgagtagtttatgacaggtttctatttgtcctattctgctaaataaataaataaataaataaatgtcaatgagcagtaaggaaaaacttaatctataatacattgaggatctgcaaaaagctcaaggtgtgtgacaatggtagaaatataaatataaatttcaagacatttttaagaagtaaagtgcagcattaagttagaaaaaaaacgtgtatgtgtatgataaaaaaagagggactcttactaagagcagtcttcatgaaaaaatacttaagaattgttcctcacaactcgatattaatgaacagtgtgagattcttgccagaaagttagaggaatcttagtttgcattgtgctcagaataaaggatgtaaaattaatgaataaaaccatatctgttaatacggctttttgttcagttctgaattc

SEQ ID NO: 204729 - DNA, 1000 bp, Homo Sapiens
acacccagcccaactcacagaagacccaggacaggtgatggtggtctatgtcaaccacctgttcatgagagagacacagggaggagagggggcacctgccaaccgtttcatgcgctggtagagaccgggaatagcttggacagattgttcctggataacacaagacagcttcctgtttaaaaaacaaaactccggcccggagcaggggctcacgcctataatcccagcactttgggaggctgaggcgggcagattacttgagcccacaagttggagaccagcctgactaacatggcgaaaccccgtctctactaaaaatacaaaaattagctgggtgtggacgcaggtgcctgtaatcccagcaacttgggaggccgaggcaggagaatcgcttgaacccgggaggcagaggttgcagtgagccgagattgcactactgcactccagcctgggcgacagagcaagacttggtctcaaaaacacacacaaaaaaccaaaactccaagcgcagagcacccagtgccatcttcgtccgaatgcagcactcctggctgggtcacggccacccctaggccagtgcctggccaggggcttctcttgtctatgaccaggcaggtcacaggcgggagggacccaggtcaggctcagctgctgccccaccggaaacagacccagcagccttgcctagaccccaggtgggtccaggtttttctattggggcagagagagtgggccaggatgggggcgtctctcagctctgcaagctggagaattaactccgggacttgagctcggggtccccgctgggcgcaggcgtgggctccagcgggaaggaagcccctcgttgggttctcagcatggacagctggatggcatcactggattccctcacctggatccggagacaaaaggggagaaaatgatgaggcagcgcccaggcctgcggggttgagtcagccgtaataacagcctgttggccctaaaaaaaaaaaaaaaaaaa

SEQ ID NO: 204730 - DNA, 1000 bp, Homo Sapiens
cagctcagaatagtacctgttccagctagccagactgaaaaaaacctcatgattcgtaagcattggataaagtacacaaaagaaatttacttcagtagtggggaaaagttagacctccactgtgcactgctccagtcctgcttaacaagttttaaaagcaagactcaaaagggtcagagtatttccaaataacttagctgtaccccaaaaaacagctcaagaatattcacaggaatacaaaaatatccatcactcaacaaagtaaaattcacagtgtctggcacccagtcaaacattaccaagcattcaaagaaacaggaaaacataagtcataagaaggataaaaactaatcaattaaaattaatccagagttcaaagggatattagaattagcagacaaggacattaacacagctattataactacattctttatgatcaaaaattaagtagaaacttagaagattttttaaagactctcaattaagcttctaaagatgaaagctacaatgtgtgagatgaaaaatactttggatggaattaatggcagatcagacattgcagaaaaaaagatcagtgaatttgaagacagagcaatagaaactactcaaaatgaaacatccagtgaaaagagaatttttgaaatcagcagagcatcagtgaactgtgggtcacttcaaacagtttaatataattggagtccctgaaggaggaaagagacagaaaaatatttgaagaaataatagccaatatttccaaatttgctaaaaactatgaacccacagatccaaaaaggtcaatagaccccaagcacaagaaatgtaaaaacaacaagtgctatagggttataataatcaaattgctcaaaattcaatgatacagagaaaatcagaggaacaaagcaaaggataccagcaaatttttcatcagaaaaaatacaaatgagaatctagtgaagaaacactttaaattactgaaaaaaaattaaaactagaattc

SEQ ID NO: 204731 - DNA, 1000 bp, Homo Sapiens
agaggagaggatggcacatgagtaggacagaagtgatcgctaaggctgggaaatggctgtcactcacatattaaaatagcccaaaagcccaacattagggttattagtgaaaattttttcaagtttagcacaatttttttgctctatatcttaaatagcctcaccattgtattaaacattttttatcgtggaaaaatatacataacataaaatttactattttagccttttttttttctgagacggagtctcgctctgttgcccaggctggagtgcagtggcgggatctcggctcactgcaagctccgcctcccaggttcatgccattctcgtgcctcagcctcccgagtagctgggactacaggcgcccgccaccacgcccggctaattttttgtatttttagtagagatggggtttcactgtgttagccaggatggtctcgatctcctgatctcgtgatctgcctgcttcggcctcccaaagtcctgggattacaggcgtgagccactgtgcccggcctattttagccatttttaagcatacagttctgtggcattaagtacattcacattgttgtgcaatcaacaccaccatctatctccagaactttttcatctccccaactgaaactctgaactccttaaataacaactctccattgcccactcctccttccctctggcaacagccattctactttctgtctgtataaatctggctactctatgaaccttatataaaaggagttatacaatatttgtcgttttgtgactagctttttcatttagtataatgtcttcaaggttcatccatgttgtagcatgtgtctcactgtttttgcttttgttttgttttttgagacggaatcttgctctgtcacccaggctggggtgcagtggcgcgatctcggctcactgcaacctctgtctcccaggttcaagcgattctcccgcctcagcctcccgagtagctgggattacaggcacccgccattatgcc

SEQ ID NO: 204732 - DNA, 1000 bp, Homo Sapiens
gttgggattcttcctatctctgcagggcctgggattgagggtggtgcatgactgtctgagcgtgaccacctccatgccccatgatcccgtgaacatccagctctaagaatcttgcaggaagaaaactgattgatgaaaaacacaggcccctgagccttgcacccacctgctcaggctgagcttttttgtgattattttaaagatccaagctggtcagaaggaccacagtcacctcccctgaccaggctggcgcctcatccccaaacccagtgcacagagctctcaggagggagaaggggcagtgcagtccttgaagagtgtgtccccacgcctgcctctgctcaccttgcagcttcacctgcagaggctggaacagcaggagtgtggaggtgacggcatcatttccaagcacaggactgctgggcccacgttagctctcgatgagcttgctgatgagttaatgcaaagcagggaggtgtccccctggtgaggactgcccgaggccactacctggctgctcattgagccctctggagaggaaactctgtttttcctcagcctgaggcccggcttctttcctgggagggttgacagcaaaggcttcaggctgctccctaagcctgaggcctccagccacatacaaggtcatggtctctgggaagcttaggtgccgctcgggtgcagggggtggggtgtgctttaaaagtgctctcccacctccaatctctctgataaaagccctccagcaaagccagcaagagggagggataacagtaaactctgccttcagccactattggagaacttccatttaaatgacacgcccccaagcatttatgcaatgctcagggctttctttgcaaaattcactaacaccataagaaacagccaatgcaattaaagcctaaggtgggcctgggagcctagaagggaccctgaggaggcctggctctccaccctcaagcctaggggttggatctggcaaaactgaagtgaattc

SEQ ID NO: 204733 - DNA, 1000 bp, Homo Sapiens
ttgtttgcttttttaatgttgagttttgaggattctttatacaccctagatactagtctttgtcagatgcgtggtttgtaaatatttttcccagtatgtggcttgtcttttcttcatcttaccaggactttatgaagcaaaagcatttaattttgatgaagttcaaatttaccaatttttgcttctgtagattttgttttcggtgacaagtctaagagatctttgcctagccctagatctcgaacattttctcctttatttttggaaaagtttaatagtttcatgttagcgtttaactaacatgacccattttgagttcacttttgcatgaggtgtgaggtttagggcattgtttattgtgtacccatagatgtacaattgctttagcaccatttgtttgcaaagccatcttttctccattgagttaattttttttatctttgtcaaaaatcaatttgggcacatttgtatgggtctatttctgggttctctaacttgttctacagatccatatgtctaaccctccactaataccacacagtcttaattcctgtagctttatagtaagtctcaaaatcaggtagactgatttctcccattttattgttccttttcaaaattgttttagctattctagtgttttgttgtttcctataaacccaaaaataatcttacctctatccataaaatacttgagattttgataggaatggcactaaactgggatatcaatttgggagaacggacatctgtactagagtgagtcttctattacataagcacagaatatctcttcatttatttagatcttccttactttcttcatcagtattatgtagttttcagtacacgagtcccatacatgttttgttagattgaaaactaagtttttctctttttttgaatgattataaatgttggtgtatatgtttgttgctaatatatagaaatataatttattttgtatatttatcttgtataccacaactttattgaattc

SEQ ID NO: 204734 - DNA, 1000 bp, Homo Sapiens
gaaaaggagacccacatcggccaggtgcggtgattcacgcctgtaatcccagtactttgggaggctgaggtggatggatcacaaggtcaagagatctagaccagcctggccaacatggtgaaaccctgtctctactaaaaatacaaaaattagctgggcgtggtggcacgtgcctgtagtcccagctacttgggaggctgagacaggagaatcatttgaacctgggagggagaggttgcagtgaggtgagatcacaccactgcactccagcctggcgacagagcaagactctgtctcaaaaaaaaaaaaaaaaaaaaaaaaaaaaaaaaagaaaaagaaaagaaagaaagaaagaaagaaaagtagacccacaccaaagagtgttaccttgcatgtaactttaaagcaaatgattttccttctgtttagataacaaagaaaccaaatattgcttatgtctttaaaaatacttggtatggaaataggttggtgtggatcggataaattgctgtggaaagtctgactcagatgaactggagcagagtggccctgctcagtgggaagaaaggcaccttcaaggtgacagcgtaaaagatgagactataaataactccggccatcagtaagggcactcgatatgttcctaccattcagagacaacagaattaaagagttggacaaaccaaaagagaccatctgtccaggtctgtctttgggcaggtgaatacctaaaccatcagagctgtctctttatttcttggggatcttatgtagcagggatccccaacccctgggccacagactggctgcacagcaggaggcgagccgtgagagagtgaagcttcatctgtatttacagccactccccattgctcacattaccacctgggctccacctcccatcagattagcagtggcattagattctcacaggagcacgaaccctgttcgtgaactgtgcttgccagggatgtaggctgcatgctccttatgagaattc

SEQ ID NO: 204735 - DNA, 1000 bp, Homo Sapiens
gattgtaccaagcctctcctgggaaacacggacttaccagaccatttagcataggcagtttttcctccagcataggaacaaatcactgtttctttgactggacatcagatgaaatagttggcttagacttagggacccaagatgctcatcttttaatacaagtctcatactaggagaagcaagaagctcgaaattgggactgggactcactaaggacacagtgtcactgccgatatcctcaagtggatgggacacagaatcaccaagccaggcaaacacgtgcacgactcacctcctctgggaacacccccctgctggccgcctctcttctgccttttctctcccaacatacagctgaaacctgcccatgttaaatgtgcatgagaagtagttccactgaatggggtttctagaatcttcattcctgaatatggctgggagggaagctcaacttcctatttagaattcctactccattccccaccatgaagattccagattaaatcattcccattgctagctacatgtaagttccaaaagttcaaaaacgtttggatgaggatattctgaaatcaaaattccgctcatgaagtgcaggggaaagaacagagggtaacagggactccacagagcagcacagggcctcagtttaccagctctgaaatgggaatggtagcaccctcctctgtggagaggctggaatcaagttaattaattggcctctgtagagcagaaaatgtgtcatcctcttcaaaccttaagatgaaaggtgtgaaatggtgtcattgtttcataaattgctacatcaaacatgggacaggacgcctataaacctgcagcaggtaattatcataaaaatcacacactgttaaaactcccaagaagaccctggcaaatttgactacaggggaggaagaggagcgcacgtggtcctgagcacagaaccccacctccactccaccttccaggacccggcaaccaccacctttttctggaattc

SEQ ID NO: 204736 - DNA, 1000 bp, Homo Sapiens
ctcctgagaattgttggatccacttagaggactcaggctttgagtttgacacacactgctttggaccatttgcatttcttcatcccacacatctagactctcaggaggtcaggttttcagaaggagaagttgaggaggcgcaggcattgtatcactcactactttctttaattcaaatgcattccatgtctccttatgttggaagcttcaatgacattttatcagcttgagtatgcatggccccttagctttctggcactaaacggagagaaatatttagaaataagtgagtactttcttggaaattctacttgtatatgatggtgtaggtagatgaagagaattacatcggattcctgtagctagagtagagatacattatcatttgtttggagattctagttcttctccaacatagtccatatattgaaataaaaacacttccagttgattggctaatatatacatatatacatgtctatgtatacatatacaagcatacacaaatacatatgcaaatatgtgtgcatgtctgtatgctaatgaaaggccaacagtttctaagtgactactagttaattcatagctaaaatattgctgtcaccctttttatgttttgtaacgcttagtaactacgtgataggtactgtatacagaaaggttatgcagcatgctttattctgtagttgtgatagtgactcagtaaagttacagtgagacaatgtgataataatgagagctgaaaatgctgcagtccattcaaagcacgattgtcaaactggaatgtcttgagttggtgtgtcgttctttaaaattttaggaaaatgttaggaatcattttaatgattaattcatggtaaagtagcaaacattcttctattcctggttctctcaaaggtcatttgtcaatctatttttattttaaaataatgtgtgtgcagcatatacttcattaggaaggacattcagagaggtttctagatgagaataaaatgaattc

SEQ ID NO: 204737 - DNA, 1000 bp, Homo Sapiens
ggagcgggcgggggcgcaggtgagggaggcgaccgcgtacctgtgcccgcgccccccacggaccccgtgccgccgccgccgcccgcaagccggatctgcggggagggcctcggccagggtgccggggaggtgcggaggacaaaaggaaaagtagcggggccggccaactttggagcgccggccgaggcgaggctgtccctcctctcggagctcttccttcgcttcgttgacctttcactttgttctgagtaggatggcaccatctttaacgaaaagttggccagtcccggcgtgtttctccccagacaatgctgctccagccctgctggctgtcagaagcaggaaagcacgctcggtgggaagcttgcggactcaagtttatttccaaaccagcagctttaaagggctctcgatgtaaaaagttcacattcttttgttaatggtctcggccttccccgtgctcattctcaaggatagtttgtttccttgcttaggaaaggaagcagcgtagagattaaagtcttgcgagtggaccactggcgtccctctgaaggaaaagcaagcaggaggtggtgtgtccgtggagatgcagaaatagtgtggtcctagggctgagataagggaccggtttggagaaaactgtcagcgtagaagtatttctttgaaattaactgtctagtaacagttgagacttctaaagcttagaaagttaaggtgtagtaagaagccgtacagtatcctggtgcatagacttaacactgtattttaactcaggtaatgtatggcctttttgtttatttttttcctgcatttttggggggtgttgaaataagtaaactgggaaggtgcaggggaattcttaaattcaatgcaaggagtttttgctgagtatctgcagcattcaaggaattaatattagtcactgagaacaaaaagcgaaattagaaaatttcaagtcacttctaggcttgtaggggagaagacgtgtagtgatgaattc

SEQ ID NO: 204738 - DNA, 1000 bp, Homo Sapiens
ccaggccctgagctgggcctctccatcctgggcccaatttgccacaaaggcccggctggttgccatggagaggaccaagcatcttggagtacaatggggcacgttgggctctcatatccaccctcccttccccaaacacccagggagcccagcagacaaaggggcagtgagtccaggccccaagtccggcccctcctccagccagaagggggtgggggcctgcaggacagaagcagagatggagcagaaagccacacacattcaacccaatgtcaggatcctttggacagtgggtgtctgcctcaagtaaagaattgttaatgagtaagatcagccactccatggcaggcactgtgctattattaacgaggtctaatttaattctcccaacagcctatgaagtcagctctgatacccctagtttacagaggaggtaaacgaggcccagagatggccagtcccagagccaggaagccccagagccagtgctgggatttcacagtacactgtgctacttgcctaggcaaagtcacgtctcttctctgtctctacaaaacgaggacagactggcttactccgagcgctggtataaggattggaagagaatgcagtgagcggttccccaccccaggttttggcatggaacccccaatttcaagggaaattttagatggaagcccatgaatagttaatagtaaaattgttaaaagtggcctgtttgggtggcaggtggggaaccccacctgctctgtctccccctcacttcaggaggtaactccctggaactgtgctctgagcccaaactctcaagggttggtcagtgccaggcacagggtaggtgctccgtccctgacagctattgttgcaattactgttatcaaaattatgtcttttaacctcagaaggtaaacatttttgaaaaagagtatgccaaattattctgcccaaaagagaatttcaccctttcctgatgactgagtgagtgtctgcaagcctccat

SEQ ID NO: 204739 - DNA, 1000 bp, Homo Sapiens
atatgtatacatagttgtgtattgcataatgatgggttatcttctcagaaatgcattgttgaaatgattttgtcatgagaatactatagaatatacttacacaaacctagattgtatggccaactacacacctaggctggatggtatagtatattgctcctaaggtacaaacctgtacagcatgttactgtattgaataccacaggcaattgtatcacaatggcaagtatttgtgcatctaaatatatctaaacatagaaaaggtacagtaaaaatacagcactataatcttataggaccactgttgtatgtgtggaccatcacggactcaaacatcattatatggcacatgactatgtgtgtgtgtgtgtgtgtgtgtgtgtgtccacacatacatacatatacatataattatcttttttatttttagagacaagatcttgctctatcacccaggctgaagtgcagtggtgcaatcatagtgcactccaatctcaaattcctggattcaagtgatcttcctgcctcagcctcccaagtagttgggactacaggtgtgagccaccatgcccagctaattttttattttcattttttgcagacaggggtcttgctgtgttgctcatgctggtctttaatttccgggctcaagggatcctcctgcctcagccttccaaagtgctgggattacaggcatgagccacaacactcagcctaaatataattctttttaatccttaaaacaagtttctaaggaagcaatgtaaagttttcaattaactacaatacacttgagtacagtgttatgtttgtgttacttaggttaagctataacctgggtctcacaagtattctaatcaagactgccactctggagcagtctgctaacatgacattgaagaattcacagcccatgaggagtgagctggtgttttaatcaggaaattcattctccactccaacagtttctgctaggcatatctcagtcaatgaccaatgc

SEQ ID NO: 204740 - DNA, 1000 bp, Homo Sapiens
tgacaagagcatgaatgtcttcatctatcatagcagagttgatcagtactgtccaaaagtgaaaaatcacactcaaacctcttgaaatgttttacacaatgttttctctttaccttagaggaatctcttcgaaaataatgacccctggagagaaaaaacagttatttgaaattcagcaattccttcagtctcacactggggcttctttttttttgttttcctataaaattcagttcaaatttaaagtggcaactgtactataattctatttttataaaagaatttatttttatatatctgcatatctttctgtctgtatatgtacagaaagatgcctagaatgattttccacagtgttaataatgaccgttttagaattacaaggaatttcattatatttaattttctgcattggttaatttatttataataaagatcaactattgtttaaaaaaacagaaaaaagttatgatgactttcaaaattaagcaattaaagagacggttgggtcacttaatgagacagaaatgaaagatgtattttgtttgtttttgtagaaggaggtttgggagacccaagagttcaattttcaacatgtttaagtgagaaatgtataaattgagatgtcagaaggcaggtgtatatataggtttggtagctgaaaagagaggtctgggctagagatataaatgggggcatctactagcatataaatgatatttaaaggcaaatgtttaagtgtaataaattaagagtagagtgcacagaaacctaggatccttggtcctgggtccaggactaaatcctgagtattccaacattcagaggttgactagagaatgaaaaaaaaaaaaaagaaagaaagaaaaagaaaccgcagcaataagagtgtgtgatacacagaaatgaagagaatttttcacacaggaaaaaaaaaaaaatggtcccctatatcaaatgctactgacagttatagtaagatgagaaaagagaagaattc

SEQ ID NO: 204741 - DNA, 1000 bp, Homo Sapiens
agagatgtggagtggagatgaaggtcattcagtcatttaatcggtatttctttttttttttttttttttttttttgagacggagtctcgctctgtcgcccaggctggagtgcagtggcgggatctcggctcactgcaagctccgcctcccgggttcacgccattctcctgcctcagcctcccaagtagctgggactacaggcgcccgccactacgcccggctaattttttgtatttttagtagagacggggtttcaccgttttagccgggatggtctcgatctcctgacctcgtgatccgcccgcctcggcctcccaaagtgctgggattacaggcgtgagccaccgcgcccggcctcggtatttcttttgagctcctagaatgtaccaggcattgtacgaggtatacaaatatgaacaagacagccaccgtgttagagagaaacagtaaacaattacagtagagcagagttcctcaacctagacactaggttgacatccaattatttcctagaggcaaaattgcctctgtttgagaaccactgtgggagagtatgacaggtgcatgaatggagaaagaataggccattatgggagttcatagcagggcttcctaatgcagacctggaggtgaaggaagactgcctagaggaagtcatatcctgcaagacatctgcagggtgagtagccctcacatgaaagttggaagaggacagtcaaggaagggaatgattagacatggagaccagagggaggaaaccctgggtcagtcatgggtaactactcttaccagtggtggacgctccttttggtgccagccttatcaatcccaagtgccagagtttcacacccggcatctgacagcatgctttcagaggctgtgctcatgcacgtagctgccactagatgaggagtgatgctggtttagagatccttaggcttagtggtctcgggtgcaaaaggggaggaaatcgatatctaattccatagaagtagaattc

SEQ ID NO: 204742 - DNA, 1000 bp, Homo Sapiens
tgcgcccaagcctacaggattttttaaatgggagttgcttggtgaggtttggattttgaaaatttacttttgtcaaagaagcccttcacgtatgaaggtctatagtctccccttggatggagaataaggagctgctcacggcctcagctctgcaatcttcctgcgcatccttactctcaacctcaatcctacctcacacaactctacagattacaatccaggccgtgtgcggtggctcacgcctgtaatcccagcactttgggaggctgaggtgggtgaatcacctgaggtcaggagtttgagaccagcctggccaacatggccaaacctcaactctactaaaaatacaaaattactctgggaggctgaggtgggtggatcacgaggtcaagagatcgagaccatcctggccaacaggtgaaactctgtctctactaaaaatacaaaaattaactgggcatggcggtgtgtgcttgtagtcccagctactctggaggctgaggcaggagaatcgtttgaacccgggagacagaggttgcagtgagctgagatggtgccactgcactccagcctggcaacagagggagactccgtctcaaaataaaataaaataaaataaaataataaaaatttagccaggcatggtggcagacacctctaatcccagctactcgggaggctgaggcaggagaatcgcttgaactcaggaggcagaggttgcagtgagctgagatcaagccactgcactccagcctgggtgacagagcaagactccgtctcaaaaacgaaaacaaaaacaaaagcaaaaaaaaaaagattataatccaaactgtctacgaagagcccccagttgcttcaccaaagtaaggtccatgcctctctttgtggtaagtaaaagtgcctgtttactgtctctctggcagtgggatctgttgtaggagcagactgagttggatgtagggagagagatgaacttgtaaagcccctcagtctggaattc

SEQ ID NO: 204743 - DNA, 1000 bp, Homo Sapiens
aagaatcaatgcaaaaaaagctgaaaactcaaaaagctagggtaccccctctcctccaaatgaccacaacacttctccagcaaggtctcagaaccaggctaaggctgagatggctgaaatgagagaagtaggctttagaagatggttaataatgaacttcactgagctaaaggagcacattgtaacccaatgcaaagaagctaagaattatcatagaacagtacaggagctgacagccaaagccattttagagaggaacataaccccctgttatagctgaaaacacactacaagaacttctcaatgcaatcacaagtattcatagcagaataaaccaagcggggaaaagaacctaagagctggaagactggctttctgaattaagacaggcagacaagaataaagaaaaaagaatgaaaatgaatgaacaaaacctccgagaaatcagggattatataaagagaccaaatctacgactgactggggtacctgaaaatgatggggagaatggaaccaagttggaaaacatacttcaggatatcatcaaagagaacttccccaacctagcaagacaggccaagccaacattcaaattcaggaaatgcagagaaccccagtaagatactccatgagaaaatcatccccaagacaattcataatcagattctctaaggttgaaatgaaagaaaaaatgttaagcacagccagagagaaaggccaggtcacatacaaagggaagccaccagataaaaacagtggacctctcagcagaaaccctgcaagccagaagagattggggccagtagtcaacattaccaacccagaatttcatatctggccaaaccaagcttcataagcaaaggagaattaatatcctttacagacaagcaaatgctaagggaattcattactgctagacctgccttgcaaaagcaccttaaggaaacactaaatatgaaaaggaaaaagcatcattaccaaccactacaaaaatacactg

SEQ ID NO: 204744 - DNA, 1000 bp, Homo Sapiens
agtccttctacagtgtcatagaacactggaaattactccttttatctatctgcaattttatatcctttaacaaatctctccctatccctctcttcctcctacgcttcctagtctctagtattctctgctgtactttttacttctgtgagatcaactttttttagcttccatgtatgagtaagaatatgtggtgtttaactttctgttcctggcttattttgcttaactaaatgttgtctagttccatccatgttgccacaaatgacaggatttcatatttttatgactcagtagtatgacattgtctatatataccacattttccttattcactcatctgttgttggacacccaggttgattccatatcttggctgctgtgaatagtgctgcaataaacatggaggtgcagctgtcccttcaatatactgagttcccttcctttggataaatgtccagtcgtgtgattgctggatcatatggtagttctatggtttttctttttaaaaagaatgtattcattcattttttttttttggagacagagtcttgctctgtcacccaggctagagtgcaacggcaagatcaccgttcatgcagttcgctcctgttctgcttgatattcatgaacatttcagctctccataagagtcctgaaagtttttcctctattctaatatcacaatctccaacgttatcagaaacctgcatttaggagcacctgttagagtcctatagctgactataaaaaccaccttttggccagggacggtggctcatgcctgtaatcccagcactttgagaggctgaggcaaatggatcacctgaggtcaggagttcaagaccagcctggccaacatggccaaaccctgtctctactaaaaatacaaaaattagctgggcatggtggtgcttgcctataatcccagctacttgggaggctgaggcaggagaattgcttgaacctgggaggcagaggtcacagtgagctgagatcgtac

SEQ ID NO: 204745 - DNA, 1000 bp, Homo Sapiens
attgaaccaaacaagtatggctgagagctaagttaactgcccagtgtaatagacacctttatttatcatagcacactgcatgataatacatgaggccatccttaaccctgtggggagttcatttatttaataactcttaaagcaatcatgttcagtaagagtcggtatggccattatataaatgaggaaaccaggaaatccttcattcacaattctgttacttattaattgtgtaatactaaatccagaattatctataagacaattggtatttctaatcctcagtttcctaatctgtcagtggtgagaatcaagtgagagaacgcatctgaaaatatattaaaatgattgggcagaacttagttaatgtcattgttaagcataaattcagcactgaattgaatcagtggtttaaagttctggctctgcagccatactacctgggttcgagtcttggctctgtctgtgtgatctagggcaagttacttaaccgctttgtgcctcagtttcctcatctgaaaaatgaggataataatattacctacctcgttgggttattgtgaagactagctgaattacttcgtggaaaatgttttgaacaatgcctaatatattttaagggctcagtaatttagctctcatcattattattgttacgtgagacagagctaatattttaaggttttcaagctctaaatcctataatgtttctataacaatcattacacctgtctaggaggaaatacacaccctgcttaaggtgacaagatttatacaaatgaaataaatagcacactgcataatcatacatgagtccatccttaactgtgtacctcttttgtagtctgactgctcagagttctagcaggttaatttttcatcactacccttaaatagaatgctgcctacataacctagtcagcatccagaggaagatgaccaagttattaggagcctggaacttctaatctggaaaccatttagcctagaaagagaattc

SEQ ID NO: 204746 - DNA, 1000 bp, Homo Sapiens
ctacctaaattgtttgaaattcttggagatttatctctcctcccccacttactacctattcaatctatttatatcagtatgaaccatggatatttactttatactttgggttataatccaaggctactttattgaatgtgttggtcaaattgttccagtttggccattgtgagcattttaaatcggttcctgtgtccttttgatgtatctccatcattatgggtttgttttattttgtttttattttagcacttgcttactttttggcactataagattcttcaggctgatcagtatatttccttccctagtcctagaataagtcatttttccaaggacctctgttccctttcattggagaatggtattaaacaccaaaatccaggtattatatgtgttcattgctactaggccctctcagttgatagagcaaagaaatataccaaccaatgtatatatacgtactgaaaaatatttctatatgtaaccatctgtgtctatactaaactaaacctgagttcatactgatgtctccaactctaatctacaacttgcatcattttagtctcctcctttgcttatctgtaacattccactccaacagtgagtacctggcttccaccatcgggcatccatttacttaactgtccaattccagcatacatctatagtagcatcagaactgttaacctgtactcctacgggaaacaactttttaaaatacaggacaataattatgtacagctttttttgccttcatcttacagatttcactcacttccgatgttactttgttcagcacctccacccccttgagtgaggttgtttcatacatttgtaatacagttagattgtttttgtctcatccattgttctctaaaaagaaaaaggaagctgaatatattaacctgcttcattgtattctaaatgccagaatatttaaaatagaattatattttagtctaggtttccaagtattttaaacactctgcttgaattc

SEQ ID NO: 204747 - DNA, 1000 bp, Homo Sapiens
aatggcagggctggaggccccactcaggccagggagttctctgacggcgaagccccgcttttaactaaatgtcatgcccggtggtgtttgacctcagaacaggctgtgggtagcattgggtctcatctaagttcttcttttcagctccacctgttcccagaagcccagtccaagcccgctctgtgcctctctcagcatctccaaattagaaacaaaaaaaactatttgctggacgagtgcggtagcttatgcctgtaattccagcattttgagagccgaggagggcagatcacttgaggtcaggagttcaagaccagcctggccaacatggtgaaccctgtctttacaaaaaatacaaaaattagcagggcttggtggcaggtgtctgtaatcccagctacttaggaggctgaggcaggagaatcgcttgaactcgggaggcggaggttgcagtgagccgagattgcaccactgcactccagcctgggcgacagaataagactctgtctcaaacatacaaacaaacaaaaaaactcctatttgctgagcccctgtggtggtccaggcactgtgcaaggtgacttgttcatgcaggcagtcatttattctttcattcgttaaatatctgctgaacacctattacatgcctggcactgtcctagcactagggctatggcagggaacaacacagacgaggtccctgccctcactgaactgacattccagtggagaggatgggcaggcaacagcacatcactctgtaacgtgtcaggtagcattaggaactttgaagaacgttaaagcagagtaagggagaggaaaggatgggcctgaaggagcagggatctattgtagatagcctgatcagggaggcctctccgagaaggtaacatatgagctgtggctagccatccagggagtttccaggcacagggaatggcaagtgcctgggccctgaggtgggaggatggctggtgagtttgagaacaacaatgccagg

SEQ ID NO: 204748 - DNA, 1000 bp, Homo Sapiens
actgtactcaaatatttatcattaatatttggcttgttttacaagtttcttggtaattaatgccatttgtatctgttttctcctaagagaaactctgagtgtaccaggattttgactgttttattcccttccttgggccacctcttacagctgctggcacaaagaaggtgctcatttatttattgaattaatggatgtctctaaaaaaagctttggtgcatcctacaaattttattctataattagtatgaaaatgatgcaaaaggatggcagtcaaataaaatgcaattttcaggtattcattattgtgttttctagtgtcactttttattttgacttgcatatgggaaattacacttaaactttcatttgtcccagcacagaggtatatctgcatgagagtcctagtcactacttacatttataatataactctgggttgcaatatttataggtttatttatgtcactattttctattttaatgtaattgttgtttgaccccaccacccaactccccacacataagcatcctccacaaggcaaggattttttttaatttcattcaaagttataaccaaggtttctaaaacagtgcctgccactgagtatttattgaataaataaatgaattacaaactctgtagcttaaaaccacagaacatttagggtattgacaaacttcctagataagatagtcttgctgtgggtataacttgcatttcccttcaaattactaaacgtgttgagcatctcttaccatgttcatttgctactgctgtttctttcacgtgaaatatgctgttcatgtctttgcccgtttttctaaccggttgtatgtctttttcttatttacatagttctttatatcattcattctaatccttcaagttataagctggcaaataccttctctttgtctttccactctatgctgtccaagtacagatgctcttgattttaacgcagctgaatttaatctttttaatgcagctgaattc

SEQ ID NO: 204749 - DNA, 1000 bp, Homo Sapiens
tccaacccagtgaggtgagcaaaggcctggagcttaggaccgaatctgctctcaggacctgggtttgccactttctgcttgttgactttggccaaggtttttgtctttttgctctttatatctctgttccctcatctaagatacctgaagaataacatctacctgcaatcataatttccaaagggcctgattccataagaattgcccaataaacctatgagtaggtgttatctaatccttttatctttctgctaaatttacacttagcaagtgatttcacggacgatgtctcctctgaggtagagcagttatgaagatctctgctttctaggacccctcttcctttcctttctcacacagactcctctgccagttttcttcctctccttctccatccctcatgaagccaattttcccctgtcaggcactttcaataacaacctatgaggcacattgagtaacagtgtaaatcctgggcccacactcagtctcctgacatgtccagctgcttctgctgttttttctgcttttttttgaaataaaagggcaactttcacatggaaagtgttcacatcagtctcttttatgaaattccatttagttcacattctccactcatgtccgtggccatgtcctcggtttctgtctcacagggatccatttctgctcagattaccttaaaatcctgggtcgtgttcattctcactctccatcccactcaatatctcctcctggagcccctggggctgcctggtgctcatctgtcaggcgatgccctcagctgaggaatgagggaacccctgtcctcagggggagggagggttgcgtgagataatgagcaccatctgggccagtggagaggacacatggaaggtgctccgggagtgtcgggggatgtgcagtccctgacacgtgccatgataacttatttagactgatttcttagcactgaactctcttttgcttctctgtggattctcacacccccagccaagactca

SEQ ID NO: 204750 - DNA, 1000 bp, Homo Sapiens
gaatggcagaggcagtattcaaagagttgataagtgaatttcctagaactgaagaaaaattagttctcagatttaaaaagccaccaagtgcaagcaggcaatccctcctcactaccatacaaacacacatacccgttatatacaatatattgaaaccctatagagaaaaaattctcatagttaccagagagaaaaaaacaaatttacctaataaggagcaacaactagattgacagcaggctcttcattagcaataataaacattagaagacagtgggaaaatatcttaaaagtgttaagggaaaagtcattgtgaacttataattctatcccagtcaaaattaataaaatgagatgactaaaaattagtttttaacacagtagctctgaaaggcaattctaacaaatttcaaaaatgtctcattaaaactaagagttgcattactttatgcaccactaagaaaggaagggagaaaaaccaccaacctgtcataattccttattatttaatttttaaatactttttgaaagagctcttttcattgtagacatagattttaatcaaacatgcatatattagaaaaacgtataagcaaagtaacttggttaatgtatctcaaaaattcacattgagtccaattttcttttctttctctctttttttttttttttttttttttttgagacggtctccttcagtcacccaggctggagtgcagtggcacaatctcagctcactgtaacctccgcgtcccggattcaagcaattctcccgcctcagtctcctgagtagctgggactacaggcatgtgccaccatgcctggctaatttttgtatttttagtggagactcggtttcactgtgttggccaggctggtctcgaactcctgacctcagatgatctgcctgcctcagcctcccagtgttgggattacagacataagccaccgtgccaggccccaattgtcaacacaaatttcttgataacttctatgccac

SEQ ID NO: 204751 - DNA, 1000 bp, Homo Sapiens
tgaggaactggatcctgccaacaccacgtgagattggaaagggacccttccccggctgagctctcaggtgggaggcagctggtatttgactgaaccctggcgagaagtggagctggttaagctgggtccaaattcctgacccacagaacgtgtgacgatacatatggctctacacgtaactacatataactctatgactagacatgtgtgctgccaagccacagtgctggggtgatttgttccagcagcagatgactgtatttgtttacttgggctgccataacaaagtaccacagaccgggcagcttaaacaacagaaatgtatcttctcatggtcctagaggctagaagtccgagatgaaggtgttggcaaggttggtttcccctgagccctgtccttgacttgcagacagctgcctttcttggtgtcctcacgtggccgtccctctgagcatgtccgtgtcctaatctcttcttgtaagacatcagtcggattatggcccaccctaatgatctcattttagcctccttacctccttaaagaacctgtctccaaatacaatcccattctgaggttctggggcttaggacatcaacctgaatgagggacacagttcgtcccataacaataagtaatagagttgcaccctagcagccgctctgaccttctttagagacctttttatctaagcagtttgcctcttagctagtgtatgacagtccctgtccttccttcagctagctatggccatataactaagtaagtgctagccagggagatgcaagcagaagtaatgagtagtacttctagaaaggaatcacataaaatgaagggaaagacacacctttttcctgctccctggaatgggatgtgttggctgggacttgagcagccattttggatcatctgcataaaagccacatcctggggtgatgggagctggaaggagggggcccagatgactgtgtgcagttgtcattccagcctggcctggaattc

SEQ ID NO: 204752 - DNA, 1000 bp, Homo Sapiens
ccctcccacccccagacaccacaccagtctgctagctttgctagagtgactcgtgatttattcaaatcatgtttcaaagctctgagaagttcaaacattttgtactaccaagtcctaaatattttttaggatcccttggtattttatttgttttgtggtggttgatagtgccaagttggatgtcatcatttcccatttaaattcctacatgattattgctggtatgcatgaaagcttctgatattttaaatcataatattttatttttttatttacagggatttatttttacattttttcttagctgtttcccaagaagatatccacatcatctacaaataatgacaactttgtgtttttaccaacatatatcagatttttttctctttacaactcattccactagaaagaaattgtaagacaatacttaataacatttttgatagtaggcagacttgtcttgctcctgattgtaatgcagttttccctagttgtttaacatcatttgtgtgtttgtgaatttgagaaccctgagaaatattgcctgttaagtatactttcttagttttttgtttgtttgtttgttttttgagatggagtttcgctcctgttacccaggctggagggcaatggcgcgatctcggctcactgcaacctccgcctcccgggttcaagcgattctcctgcctcagcctcccgagtagctgggattacaggcatgtgccaccacgcctggctaactttgtatttttagtagagactgggtttctccacgttggtcaggctggtccggaactcccgacctcaggtgatctgcccgccttggcctccgaaagtgttgggattacaggcgtgagccacggcgcccagcctcttagtttgtttttaatcccaagtgttgaattccttcaaatgctcttccattgtccatccatctttaaaatatggtcaggagcggtagtgtctctatcgaggtcactctttttatgtctgtatttta

SEQ ID NO: 204753 - DNA, 1000 bp, Homo Sapiens
tgtggaaggcagtgtggcgattcctcaagaatctaaaaccagaaataccatttgacccagcaatcccgttactgggtatataaccaaaggattataaacattctatgataaagacacatgcacacatatgtgtactgcaccactatgcacaatacgaaagagttggaaacaactcaaatgcccagcaatgatagactggacaaagaaaatgtggcacatatacaccatggaatactatgcaatcataaaaaaggatgagttcatgtcctttgcagggatatggatgaagctggaaaccatcattctcagcaaactaacacaggaacagaaaaccaaacactgcatgttctcactcataagtggggattgaacaattagaacacatggacacagggaaggggacatcacacaccagggcctgtcaggggtgtggggctaggggaaggatagcatcaggagaaatacctaatgtagatgatgggtgccacccatacatgtgccaccaccacggcacgtgtatacctatgtaacaaacctgcacgttctgtacatgtatcccaaaacttaaagtataattaatttaaaaaaaagagagagagagacaaaagtctcttaaaaataatattcagggccgggcgcagtggctcacacctgtaatgacagcactttgggaggccaaggcgggcggatcacgagttcaagacattgagaccgtcctggccaacatggtgaaaccccatctctactaaaaatacaaaaattagctgggcatggtggtgcatgcctgtagtcccagctactcgggaggctgaggcaggagaattgcttgaacccaggaggcggagattgcagtgagctgagatcgtgccactgcagtccagcctggcgacagagcaagacttcatctcaaaaataataataataataataataataataataataataataataatatgcatgctggctttcccactaactgatccaaattagtgaattc

SEQ ID NO: 204754 - DNA, 1000 bp, Homo Sapiens
gaggaggccgtgggtggtgacagcacgcccagcccggacctgctgatggcccgcagcttcggtgacaaggtggggcgcctggggccggggagtgggaggcttatttcgctccccgtgggggggatgatggatccggagccttcgtgggcctggggccgcgcccaccctgccgccccttcccgggggacgggcgtgtcctggccccggagccctcggcgaagcgtctcctctgccgcctccgcggggtcgcagccgcagagggacaggcttcgctgcctgtgactggtcgcaagcaccggtgacagctggtggggaggggtccagcctgcgtgttggagcgggaggcgtgtgttcagggcagggcgcctgtgtcctcggatggggttccgagttcctccaggtgcatccctgcaggctgagctgctgcataacttgtagctcctccagtttccgagactgcacagaaagcaggagttcctggctttccgtgctgggaccgggcagccctgggcttacagcgagagtcttcttccccctagtcagtcatgtggggagtgatctttgtttaggtttgctgtttgtcctgaggagtcacctgactcagaccccagccggcggcgggaggagagcctcgttgtggttttctgtctggggctccattcacctccgacggcctaccactctgtttaggtttggcagaggctggttttgtggttgatggaaagaaagctcgccctttgaccttctttgtacggagggaggctccagattttcttagagcagcacaaccctcctgctgcttggagagacagcagagtccaggcaggggtaagggacgacctcctccctacccccatggccatttcagctgtgaaggagacttgagcagtgattgtatccccgctcctgccgtcacttagtcactaactgcagaaattagaattgttctcaggtcttgtgatcaagattttctctccctagtaaaatactaaatgaattc

SEQ ID NO: 204755 - DNA, 1000 bp, Homo Sapiens
aaatgaatattagtccattcacaaagttgtgcaaccatcaccacaatcaatttaagagcatttttatcacctcatagagaaccccataccttttagcatcttccccgatttttcctgatttccccattctccccagctagcccaaggcaaacacaaatctactttatatctccattgatttgactattctagacatttcatgtaaacagaatcataaaatatggggttctcctcccctcctctcgattttctgtcacttttcttttggactttactgtcagtcacacattttcttctattttggagctgtatgttctgtctctaagaaatattttacttttaacgtactttattttagaaagttgctgatgtaatatacctatgcttaaaagcatcatctagataatctgcaatgtgttctcccccctttttttttaagaaaatttcatgttttgcataagtcttattgccaatctctctcacttctcaatctgttaaattggcactttcagatatatgcagttatttcatactattcccttgaacaatagcttatttcttcaatttatatttttaatgtgaatgacttatatttcagtaatatatacttctgaaaatttctgattctttttagaattggtatttcatcaccacattattctcacatacttgaatgttatctgtaaatatcagtgtaaggataccagcgctacaaatggaaccctaaaggctcattgtatatcaatatctctcagtcacatcattccattgtagctccagagctcagagccctgcttggcacatactagttgttcaggaaatatttctgagtgaatgaatgaattaatgaattatagaggtgtagtaatctcatagctgttagcatatagtctattaagtccaaaccagtcaaactgaatgaatccttcactccggcaagcaaagtagccaatagttgttggaccaatgcttttgttgatcatgctattgaacagaattc

SEQ ID NO: 204756 - DNA, 1000 bp, Homo Sapiens
tccataaactccttttccaagggagcctggatgtttgtgtactccaagctagagagaaagcacagaggggcagttagtttctccattgcataggaaggcaggtaaatataaatagtttgtaaaacagggggaaaaaaaaaagagaaatgggtatacgctgggaatatcaacacttctgatggcatttatttttgacttagccattttcactgggacaaggaggggctggaaagtcatggacataattgccaagggtcagagggctgtggcatctgatgtttagtcacttagtgtacagtggtattgcctaatcagggaaccttcctcttgtatgtattttcaaatgtcttttttttttctgttcatcactaagacaatgattctgtgtactcatgctcccaaactttcctgtaggaatcattgtcaagaggagagaaaaaaaacaacaggatggaagctctatgttcaaactgtcaatcattttaaagaggacaacagcacaaacgttcactgttcaggaaaatgaaaagttggcagcttatgcctgttttttcaaattatagacacttttgattctacattaatctctaatgatagtactgctaagatcataaatgatgcattaaaaagcatgtgggaggccgggcatggtggcttacgcctgtcatcccagcactttgggaggccgaggtggacggatcacttgaggtcaggagtttgagatcagcctggccaacagggtgaaaccccatctctattaaaaatacaaaaacaaacaaacaaacacaaaaaaattagccgggcatggtggtgcatgcttgtaatcccagctactttggaggctgagtgggagactagagaatcacttgaacctgggaggcggaggttgcagtgagtcaagatcatgccactgcactccagcctgggcaactgagtgagactccatttcaaaaaaaaaaaaataaaagcatgtggggattacaattttttccctatcctg

SEQ ID NO: 204757 - DNA, 1000 bp, Homo Sapiens
tattaacatatttggaatatcaattttaaattctacttgatagggagctatttaagtgttttagttgatatggattattgtaaaggtcaccttttagttcaatagtagttgcgtgagagaagtattaaagaactgcaggatgttaggaaggtgtggtaggcaagaagagatgttgctcagatattcttcaaaaaaaagatgtactgtgtcagagtctagtttgataagagtatccagcagcagtgtcttggcgatatattacagcattcaataaacaattttattctttctggaaagccctcgggccatgagtgaacaatatggtttattaggaccaggccatttctgcctaatttttgactcatatacaatggttgctccaaatctccctgttgcactgctcatgactttgccatatctgggtggctgtaggagactttctgtgcacagttctgtttttccctatctttcctgtcccagggctcagatggaatttaccttctcattcctgcctctctcccacatccttttatttataggagttactgcacaacaaacattttgcactactattacatctcagtgtctatgttaagaaagttcaaacagatatagaagaaaaataaattaggagatgctgtagtatttcaggtgtaactaataaaaaactttaccagtatgtgataaaataacagaaaaataagaatgtgaaaaataatgtttgaaaagtcaaataataataatatccttacaatctattgttttaaaatacttatcaactttaatactatcataaaattttatatcacattgttcaggagtgcgtaaagacacacacacacacacacaaacttatttactcctcttgaaacccttgatattatgaatattcatgtgttatagattaaggaaacaagtgaagccgaggtgaaatacttcacataaatacaaataaggcagtagaaacataattttgactagaggttatatcctaaagctt

SEQ ID NO: 204758 - DNA, 1000 bp, Homo Sapiens
cacgcaaaagcattgcctatcatgtgccaagcaagacattgtagtaaatggccaaattccttgaaaaagaagaaagaaactttaaagccatgagagattgttgcaactaatgcatgcatcatagagaaccaccataaggcattgcttcctagtttaattggtggcattgttttccttcttagtgtttaatagaataatagtgtatcttatgattgatgatgtcttagagataaaatatgttaagtggtggggctgcgatttgaatctgggtgacatgattccagagtttatactcttaatcactgcgcaaagtgccccctagatgactgggtttgtagggagtgcttaggaaatgcctaatcaattttctatggtaacttaaatgaaggttattcaaactaattttcatctcttgaaaacttctggcaattggttgcacaacaatgtgaatatacttaacattactaaactctacactttaaaatggttaagttggtaaattttatatgatatgtattttgccacaactaaaaataaaaataaataagtaactataataaataaaatatttggccaggcacagtggctcatacctaaaattccagcaccttgggaggctgaggtgggaggaatgtttgaggccaggagtttgagactagcctgggcaacatagagagaccccatctctactaaaaatgttttaaaatagctgggtatggtggtgcacacctgtagtctccattacttgggagactgagctgggagaatcactttaccctgggaggttgaggctgcagtaagcagtgattgcaccactgcactccagcctggatgacagagcgaggccttgtctcgacatacataaataaacaaataaataaataaatataaaataaaataacatctcaaatatctaatttattttctgtctttgagccatggtggaagttattagcagagggaggaagacgacgtagtattctaaatcacagtatcaaaa

SEQ ID NO: 204759 - DNA, 1000 bp, Homo Sapiens
cctcaagtgatcagctcacgttggcctcccaaagtgtcaggattacaggcatgagccaccacacctggcttctacacattttatgagcaataaataatgttgataatctctcagttttcttctttcttcctgtctctccctccccagtggtcctgcagcagttctaatcccattcccatcaccagttgatcagagacctagtatttttaggaaagtagcagcctttatttattttttatatttatatttatatttttacttatttatttatttatttttgagacagagtttcactcttgttgcccaggctacagtgcaatggcacaatcttggctcactgcaacctccgcctcctgcgttcaagtgattctcccgcctcagcctccagagcagctgggattacaggcatgtgctaccatgcccggctaattttgtatttttagtagatctggggtttctccatgttggtcatttttagtaaatctggggtttctccatgttggtcagtttccatgtggagagagaattttgccatgttgcccaggctgggcttgaactcctgggctcaagtgatctgtctgcctcagccttccaaagtgctgggactacaggtgggagccaccatgtccagcctgcatactttttatgttatcagaaatgctatctttctctttggttacatttctttttttttttttttcgtaaatcaaagtactattttattaaatgagttattttacacaatatgaacatcaatataattacaattgtaaaaaatttttttataacaaggatggactgattttcatatttccaaatcagagtcaactgtacatttacacagaattgtctttgcatgaagcccaaaagggaacagcataaaaaatgagtgtttctgtagcccctttatttttgctgatcaacagtttgttagaaaagcagctgcaggtatgttacctaaggtctgagacagtagaagagtcaaaggtgtcgtgaattc

SEQ ID NO: 204760 - DNA, 1000 bp, Homo Sapiens
aaaccccactgtcaacatggggcagatcaacgagacagaaagttaacaaggatatccaggaattgaactcagctctgcaccaagcagacctaatagacaactacagaactctccaccctaaatcaacagaatatacattcttctcagcaccacatcacacttattctaaaattgacaacatgggtggagtaaagcactcctcataaaatgtaaaagaacagaaattataacaaactgattctcagaacacaatgcaatcaaactaaaactcaggattaagaatctcactcaaaaccactcaactacatggaaactgaacaacctactcctgaatgactactgggtacataacaaaatgaaggcagaaataaagatgttctttgaaaccaatgagaacaaagacacaacataccagaatctctgggacacttttaaagcaatgtgtagagggaaatatatatcactaaatgcccacaagagaaagcaggagagatctaaaattgacaccctaacatcacaattaatagagctagagaagcaagagcaaacacatttaaaagctagcagaaggcaagaaataactaagatcagagcagaactgaagaagatagagacaaaaaaacccttcaaaaaaatcaatgaatccaggagctggttttttgaaaagatcaacaaaattgatagaccactagcaagactaataaagaagaagaaagggaagaatcaaacagatgcaataaaaaatgatgaaggggatatcaccactgattccacagaaatacaaactaccatcagagaatactataaacacctctatgcaaataaactagaaaatctagaagaaatggatgaattcctggacacatacagcctcccaagaccaaaccaggaagaatttgaatccctgaatagaccaataacaggctctgaaattgaggcaataattaatagcctaccaaccaaaaaaagtccaggaccagatggattcacagctgaattc

SEQ ID NO: 204761 - DNA, 1000 bp, Homo Sapiens
ctattaatgattttctagaaatgtatctatttcatcaaattatttcaaaatttttgacttaaagttacttattacattctctttttctctcccatgactatagaatctataatgatttccttgttattattccatgatatttagaatttgtggatactcttttttttaaatttcatgcataatcatggtatatttttatcagtcttttcaaagtaactttggcttttgctgatttcatttattttatgattgtttccttttctcatgcttcttatgtatcttctcttttctaattctttggatttaatttgacatcacattttaaatttttgaaattgacaattagattattaattttcaagctttaattttttaaacatatttatgtaagcatatgcatttatctccaagctgaggtttgcctaagcctcccatcttttaacaagcagtatttttactttcgtttttattaaattcaaaatatattttaatattcactgtaattactttttcgatccatgaataacttagaaatgtgatgcttaatttctaaacatttggtcactttcaaagtcttgctatagatttgcagcttaataacattgttgtacaaaaaacactgtcaaggatttcaaatttttggtatttattgattcttgttttgggcctaacctcagcctatatctgtctatctaacctatctatctatctatctatctatctatctatctatctatctacctacctacctatctattatctatctacctagatagacagagatatctatagatagctatggtaaattttgaaacacgttccaaatacattataataaattgtgtgttttgctatttttgggtgcagtttttatatcaaagtatttaatcctactgctttaaatttttctattattattgatattttgtatcctttttgctatcagttattgaaaaaggtatattaaagtctttatgattgaaaaaaaagaaaaaaaaaa

SEQ ID NO: 204762 - DNA, 1000 bp, Homo Sapiens
aaatcacatgtattcatatacaccaataatagacaagcagagagccaaataatgagccaattcccatttacaattgctacaaagaataaactaccaaggaatagaacttacaagggacgtgaaggacctcttcaaggagaactacaaaccactgctcaagaaaataacacaggaaacaaacaaatggaaaaaaaaagtccatactcatggataggaagaatcaatataatgaaaatggccatactgctcaatgtaatttatagattcaatgctattcctatcaagctactattgactttcttcacagaattagaaaaaaaaaaaaactttaaattccatatggaaccaaaaaagagtccatatagccaagataatcctaagcaaaaagaacaaagttggaggcatcacgctacctgacttcaaaccgtactgcaaggctatggtaacgaaaacagcatggttttggtacctaacaaatatatagaccaatgaaacagaacagagaccccaaaaataataccacacatgtacaaccatctggtcttccacaaacctgacaaaagcaagcaacagagaaaggattccctatttcataagtggtgctgagaaaactggctagccatatgcagaaaacagaaactgggccccttccttacatcttatacaaaaattaactcaagacatattaaagacttaaaaccaaaaaaaccctagaagaaagcctagccaataccattcaggatgtagggatgagcagactatgactaaaacaccaaaagcaattgcaacaaaagccaaaattgacaaatggaatctaattaaactaaaaagcttatgcacagcaaaagaaactaccatcagtgtgaactggcaacctaaagaatgggagaacatttctgtgatctacccattggacaaaggtctaatatccagaatctacaaggaacttaaacaaatttacaagaaaaaaacaatcccatcaaaatgtgggtgaaggata

SEQ ID NO: 204763 - DNA, 1000 bp, Homo Sapiens
atttccctccctctcctccatccgcagacagagccacctgcttggttcaaggctccagatcgcatacttaggtttaatgatcctctaataaattatcatgaatatgttgttagtagcaaaaatgtgctgttcgtgttggttttttagtgttggatacagttttctgggctgtgaaaaatcaattttggagaacaggctccaggcctgggtattcctatgctcactctacccccatgagctgccttctgcctcagctaacctttctggccagcctcttgcctccagttcttctggctgtgccaatgggatccaaatggggcctatcagagcacgtcctgccatcatggataaggatgaaagatagcttgggtagagccctaactatgccagcaccaaagatcagtggttatctggaaatgggctggaacttgacagctgatgccacggagccagctcatgccccttgttacagctatcctgtcatgaacaggaggaggaggacaatgtcatgtttagagcttgggctcaagtgtcagactgcccaggctggaaccgttctctgctgcagggatggctgtgtgaccacaggcaagatgaccttctgatcatccatacacatctcttcctaactccacagtgatgtcacattagcagcttgaaatcagccatgatcagagtatttacaccacagaaatcggctaacactgtaaattagagcttatgttttcctggaagccgcttgctaaatctttcctggctgttcaacatttatcagcatattactgcctcctatatcattacatacaggctgtgcgctccaccctctgccttccttctcaccagcacaagctttgccactcgcccactttgtgaccagttgcttatgttctcaggccttcaatttccttagtccaatgagagcaccggccaagtactttgtaactgtcaagcaccgacaggttagtgaatcagctgggagctctcaaccacagggcctgat

SEQ ID NO: 204764 - DNA, 1000 bp, Homo Sapiens
tgttagatgctgaataaaacagacccctaacttcagagagctaagtcaggtattttaagaaatgtacattaaattttcctctgttaatttgtacactacacctctgtggtcccaaattttcttataggattgaagtaaaagactgagtataaaaggtcgggagaaagctgacatatggagtaggtaggaagaaccttagtactggaaatataggaaataaggtgttcaggactcttggggacaaaggcaaagatgtgactacccggcagagggaaaaaaaaaaaggaaaaggaaaagaacacagtcactgactcttactgggcttcatgtagccttagaacctctgtcactttttttgagaaggggtctcactctgttgcccaggctcagtcataatgcactgctgcctcaaattcctgggcttaagtgatcctcccaccttagcctccccagtagctgggactacaggtgcatgccaccacacccagctaatttatttctatttttatttttgtagagatggagtcttgctatgttacttaggctggtctcaaactcctggcctcaagtgatcctcctgcctcagcctcctgaagtgctgggattacagacgtgaccactgcaccactatcacatattaatgattaatagggacaagctcattactaaacttctgtaactcccagagcatagtaattgccctccttattgtatctgccctttgtattattaaaatcaaagactttcagaaaccctcaagactccccaccattcttttccaattctaggccccattcagaatttccaccctcttctagcctcttattaggaccttttcctaccaaggtacacttaggaaagagaggagtcatcagaatggggagggagggagtgttgttggaattctcagttaaaatttagtttttttcatagaaacattgctaaaatagaatctaaatgtcattactgcttccagctttatagttcagcaaacctatgc

SEQ ID NO: 204765 - DNA, 1000 bp, Homo Sapiens
aggtgatcaaggtcaacatcaacagtgattagtcatgttgataatatttacccttgatgtgatatgaagagaatggcactccccatctgtgaccttcccaaaacccaggaacccggtgtcatcatgagaaaaacatcggaaaaatcccagttgacaaacattttacaaaatacctgaccagttctccttcacaccgtcctcaaaagcaaggaaagcctgagaaactgtcacaaaccagagaagcctaaggagacaggacaactacgtgtcatgtgatatccaccttggatcctgaaacagtccaagaacagtacagggaaagccttaaaaatctgaataagtaattgacagtagttaacacagcactatctgcttattagttttgacaaatgcagcatactaatgtaagaagttaacaaaaggagaaagtgggtgtggggtgtatgggaactctctgtactatctttgcaacttttctgtaaatctaaaactattccaggccagccacggtggctcatgcctggaatcccagcactttgggaggccaaggtgggcggatcacttgtggtcaggagttcgagaccagtctggccaacatggtgaaaccctgtctctactaaaaatacaaaaattagccaggcatggtggcgcatgcctgtaatcccagctacttgggaggctgaggcaggagaatcactgacctgagaggcggaggctgcagtgagctgcaggaagccactgtgtgggcagtgtagtgaggagagggtaggagatgaggtcagggaggtgatgaacctgagggtgggcagaccacatggagccaggttccactgtgaggactgtgcttttatttggagggaggtgatatccattgtggggatttgagcaggagcgggacgtgatctgacttagggttgaacaggatccctctggctgctggctggagactaggctgggaggataggggctagataaggataggagcaggaagagtgaggag

SEQ ID NO: 204766 - DNA, 1000 bp, Homo Sapiens
cccgagtttgcatttttgacactaaagtttacttttaaattaaaagtttatttaaaaaaaaaaagaaagaaagaaaagagaaatgccgggcgcagcagttcacgcctgtaatccagcactgtggaaggccaaggcgggaggatcacttgaggtcgggggttcaagatccgcctggctaacatggtgaaatcccgtctctactaaaaataaaaaaattagccaggcatggtggtgggtgcctgtaatccccggtactcaggaggctgaggcaggagaacacttgaacccaggaggcgaaggttgcagtgagcgagatcgcaccactacactccagcctgggcgacagagcaagactctgtctcaaaaaaaaaaaaaaaaaaaaaaagcccagattaaagagttccagtaggcaggactcaaggacttaacagctgagttgcatgcaaatgtgacagcaaagggggagggatttgaggcctccctcggaatttccactttcagaaatgaagaagcatgctagattccagagggaaaagccagccttttcaagaataaagatggaaacgtatactcacaaaaatactctccatggctacccaagtgacacattcatcagtgtcctcaatattcctatatactactagaatacacagttaacgaaaaaatttacaaaagagaccaacaaactttctttgtaaaagcctggagaggaccgggaacagtggctcacacttgtaatccctgcaattgggaggctgaggtgggcagttcccttgagctcacatttgagaccagcctgggcaacatggtgaaaccctgtctctactaaaaatatgaaaattagccaggcatggtggcacacgcctgtaatcccagctactcaggaggctaaggtgggaggatcgcttgagcccaggaggcagaggttgcagtgagccgagatcaggccactgcactccagactgggcaaaagagccagaccttatctcaaaaaataaaa

SEQ ID NO: 204767 - DNA, 1000 bp, Homo Sapiens
cgccgagcccacacccacccggaactcacgctggcccgcaagcactgcgcgcagccccggttcccgcccgcgcctctccttccacacctccccgcaagctgagggggccggctccggccttggccagcccagaaaggggctcccacagtgcagcggcgggctgaagggctcaagtgccgccaaagtgggagcccaggcagaggaggcgcggagagcgagcgagggctgtgaggactgccagcacgctgtcacttctcactaccactccaattttccagacacataaaatgccacctcatgagaaaatttccttgataccaccaccagtgccagtgactgcctgctctgcttctccatggcatcttggacatctgtagagttactgaaaaaccttgagattactgattcatttacctgcccctacccctagtagacatgagatccccaaagggatagaccatgatgaattcacttttgtatccctaggacttagcccagcacctggcacacaggagacacttggggagtgtggttggctggatgcatgactggatggatggctaactggcatggagacctccaagtcattctttatcaggcagaaattcgatactaaagagtaaaataaggcatcaatactcagaggataggtacttgccttcaagtactgtgaagacctggttctgtcacttagacagggaagagaaggataataagaggataaggtaagatcaaaagctcagggtgacaggcaaaagcaaatctcagtccagagtacccacagggatggcctctatattactccatcttcacattgctataaagaaatacctgagactgtgtaatttatgaagaaaagaggtttaattgactcaccattccacctggcttgggaggcctcaggaaacttagaatcatggtggaaggagagggggaaggaaggcaggagagagcaagaacaagcagggaaaatgccaaacatttatcaaacaaccagatc

SEQ ID NO: 204768 - DNA, 1000 bp, Homo Sapiens
ttttggtagttttctcgtgagtcgtgggcttgtcagtgcatactggtgtctggaagagctctttcaagccagccaggtcttctaggggttgggccttttccttagtttttgggtgcctcttgctaccagttacacttgctgctgggtccagtttctgttttgcagtttccctaaacgcgttgatgcttttatcctcacctcctggtactttatctgtgtgtgtggtttcccctgatgtctgtgtgagcttcttcagggctgagagctccttctgtacgtcccttttctccaaaggtgtcttgggctgccttcttgtgcttgttggggtgtctgctgattctggtggagaagattcgcagggcattttagtagttttgccagcagccactgcttcttcagtatgaccaggggtctggaagagctctttaaagccagtcaggtcttccagagcctgggcctcttccttaggagtttgtggccgtctcttgctgccggttaagttctctgtcaggtccagtttctgcactggagttcccacaaatatgatgatgtctttctcttcacctactgatggtttaggcgtgtgcatggctttgcctgctgatggcattagattcctgcacgctaagagttctccctctacatctgctttcctgatacttctcttgggtcgttgctttgtgcttgttggggtgtccactgggtctgactgtggagagtcgcagggtattttagtggttttaccagcagccactaattcctcggtgtgaccaggagtctggaagagctctttaaagccagccaggtcttctagagcctgggccttttccttaggagtctgtagctgtcttttgctgccaggtaaagttcctgccaggtccagtttctgcactggagttcccataaatgctttaatgtctttctcatcacctcctgctggtttgggcgtaagcatggctttccctgctgatggtgttagtttcctgagtgctaagaattc

SEQ ID NO: 204769 - DNA, 1000 bp, Homo Sapiens
tgcagtctagacccagcctttgtctgccaagagcctggaaatgttgacctccgttattaagcctggtcagtctaagactaattcttattaccgaagtaccattaggtaaatgtgctagctatagatttaagtgacataaaagatcttaaagaattctccaagggatctgtggggggtttatgtatttattcattaaaagatctgtaaacaacattttatacaaatcttgattcttttacaaaaatatccagaattcctaacactttacagaaaacacaacagacctaaggaaatgaagcagcttcaggctgcgaggatgaagacaccattgctgaagcaaaggtctcctcctagagggatagccaggatccatcacagtaaacccttttacccccattttataaacatccaattattaactgttcctgctgggttggagtgtaagaagagaccaaatggagagatgtctagtagaagccccactgggggtaacctgcttaacattaaaaaaaagacaggctcagttctattccctggacccacatctgtaggaattatattatacagcaccagtcttaaatggtgttctgcttcagattcatgcatacctgaatgggttgtaatgacaatactgtacaagtcaataaactgtatcacaatacaacttacacagttttgtaaggttgaataaatactttctgtgccagttaaaaccatcagcagaaactgaagaaaacaaactgacatttgctataacattaatcaatgaaaagtgcaccatctgaacttgaatttgcccatgagtttgaaaacacacacacacacacacacacacacacacaggccgggtgcagtgactcatgcctgtaatcccagcactttgggaggccaaggtgggtggatcacctgaggtcaggagttcgagaccagcctggccaacatggtgaaacccccgtctccactaaaagtacaaaattagccaggtgtggtggcgggtgcc

SEQ ID NO: 204770 - DNA, 1000 bp, Homo Sapiens
ctaatgtatacactgatttctagcacagcattgctttgttaatttgacaaatgatcttctaaaagggtgggcacgtgtgccaagggtactatcacaaggttctctaattttaatcttatcaaggaaacaagtaatcaaaagacagaaatgggaggcagaattagtacataattttaaatttgcattggtgtgatactatactagacactggaaataaggtaatcacagttaacctactaaacagatattttacttgatagcaatagagaatacataatatgtctaaatcaagtatcctgtataaatcacaggtgagctatttctcaacacattatttgtttccttccttctctacttaaaaaaattatacacataattcataaatcattctcattataaaagggtcaacaacatagagcaaagacttaggggtcattctctactcagccttcctttcagcccccagccccttacctcactctctcaccacccaatccccttaacagagaaccacaatgatgtatattccaagtcactttcaagttaaatttcattattggtatccttacattttcctttaagaaaaaagaaactctgggccaggtgcggtggctcacgcctgtaatcccaacactttgggaggccgaggaggctggatcacgaggtcaagagattgagaccatcctggccaacatagtgaaaccccatctctactaaaaatacaaaaattagctgggcgtggtggtgcacactgtagtcccagctactcgggaggctgacacaggagaattgctcgaacccaggaggcagaggttgcagtgagccgagatctcgacactgcactccatcctggcaacagagcgagactccgtctcaaaaaaaaaaaaaaaagaaaaactctgaaaagggtaaggaggaagtgggattcagtaacctacaaagcatttaggcaggacgcttttcaaaatgcagttggcagaaatggaagttgaactgagtg

SEQ ID NO: 204771 - DNA, 1000 bp, Homo Sapiens
atttcatacatgactctttgttgctatcaacctggattcacacgttaatgacagtagaattcacaagtgtcccagaacattacaacacactcgatcgatattaatcgaaaaggagaagcagaaataatttaagtaagattgcaattgccacggagctctgacctttcagaaacactcgtacacgaaagtgccaggaccctcatgttgcacggttccagggggcgctgtttgcagagtgtagactgaagactgcctcctaggaagggcgacttgctggcctgcaggacggggcacaggcgcagggtccctgcccagcacaaccacgccttatcccagctggagtctgaaggccccgcaggggaactcccctctcttactcacctccatccccttcacctccgctcctgcagcctccatgcacttcagtgggaaacggatctgcactacaaactgccccccttgcagagttccaagctcatctaattacatagtgtttagaacagtgcaataaatcaaaagatacttccttagccctggaggtgaatagaatagtttcatgtcattaaaccccacaaccaagggaccctttatgacacggacttcttttgggaggtgatgcctctgtccgtgtgagagtcctggctcctggtaggtttcttccggtgcctcccaggcagttggaggacgccgctctcattaggtcatgtttactgaaggtgcttgttttctgtctctccattcattcggttacaggacacccgacgggacaaagcgtgttgtaaccgaccaccaatggagccggctctgttcacggattatggttgtcttggcaaccagctttgctgaactcaccacagcaaacatggaatgaatgactgggtcaacacccgagataaaaagagggttatgcaactgtttgctgaacccttggcgggattttttttttttctggacatttcccagaatgtccccatattcaaaaattccaaatgaagaattc

SEQ ID NO: 204772 - DNA, 1000 bp, Homo Sapiens
tttcaacaaccatcacatttaccaagtctaaatttgaggggaaaggaacttatgggagtaggttaaacataaatgagtcctgcaacagcctcctactcctacatttacgcattctggcctactgcctggaaaataatagctaacaaggggataacgtgttcatttcataaaccttccttggaacatcatagaggactaattaacccagaccagatcctacagaacagctttcctccactccttacctatgtgagcatcaatctctacaattttctcaatgctgctgggctccatcagtggggaagtaattctcttctccacagctaggcacacaccctctgatgtctggatcccaatggctgtagaaccaagctaaagagaaacatgttatgattaccatatataggtcaaataactgtcttacatactcaccagatagctctctgtaaatcttcacatgatagaaacttcaactggccacatcttataggcagagagaaggagcaccctaacatactgtaagtaattaatatactattcctgtcaatagcaagaacattgatttacagaattttgtgattctaaaaagttcttttttctcccttaaatttttttaaaatttttaatgttttctttataatttacccatgtaattcccagaaccccaaaagagtaagttcaacaaagtctttcaaacactggaaaaatccactctctaatgccaatatttggaggacggaggattcaaaagttctaaacatagtgggcaagaaagtaataaaactcttaatgtcttctctggacctggcctcttttcacctctgccatctaccttggtctgtcccaagaggtgatgatattccccaacctacctgacctccaaaaaagtaataaaggaaggtagggagggacgaaaagaaccaccaccatcatcaccaccaacaacgtaaaactattaattatttaaggtcgctagaagtccacaatatacctggaattc

SEQ ID NO: 204773 - DNA, 1000 bp, Homo Sapiens
aaaaaggggaaatgtgcacacagagacacacagaaagagggaaggggatgtgaaaacacccaggaagaagatgccatgtgaatacaggagatggaatgaagcagccacaggccagggaaggtcagagatcaccggcggcagcagcaactctgagaagtagggaataattctcctatggatccagagggagctgggccctgccaacaccttgattttggacttccagcctccagaatggtgagagaacaaattcttgtttcaagccacccagtttgtggtgctttgttatggcagccctagggagcagataatacactggcgaaagcagagattggagggaaggagtagtcgatgtcccatgtggctggtggctggggccctgggagaaaggcggccacaggggagtctcaagaaaggcaccaggaaatattccaacagatcacccttcctctgctgctgtttcccagactcctcgtgctgctccctgtgcttcaacgagcttcccgcaacttctccatggtagaaacccttcacgccctttaagacggagctccagggctctttcctctgtgagatgtttctcctgccagcccacctgagacttaatcggaacatagggatctgtcttcgtattgatgctacttgggaaagcgcatctctgtcgcctcaccttacacatagacgtccttttttgggaggactacaggcatgccaccatgtctggctaatttttgtattttttgtggagatggggtttcaccatgtcgtccaggctagtctcgagctcctggtttcaagtgacccacctgccttggcctcccaaggtgtttgcgtgacagacgaggaccactgcgcccggccttggacatccttttatcctgctttctgccttctgtttgctctaagtggacttttatctccctgtctactcctagcacctaacacagagccaggcacacaggagagacctaatatgtgggggcaggattgagttgaattc

SEQ ID NO: 204774 - DNA, 1000 bp, Homo Sapiens
tgatataaaggaaagaaaaacctaggttctacaacaaaatgttgacagcagcagtttcattcgatggtgggattttagatgatttcattttccttcttcacagttttcactgtttttgttttttgtaatgaacacattactttcacagttatagattaattaaaaccattcacttttaaaggaaaaaaatccagattataaaataattatgtggaaaatggtcttatcacatgtgtggctatgtatgtctgtcatgcctaaaaaaatggatcataaataaatgcaacaaaatatatacagtttccataggtgataaaattgcaggtgatgaatactttttttgtatattacaatttttttttttgccaaaagcatgtaatactttggaaagcagaaagaaaatataataaaaggaattggccaggcgcagtgactcatgctataaacccagcactttgggaggctggggtgggtggatcacctgaagtcaggagttcgagaccagcctggccaatatggtgaaaccctgtctctactaaacatacaaaaattaaccaggcttggtggcggccgcctataatcccagctactgggatccaccgtcctggacctcccaaagtgctgggattacaggcgtgagccactatgccctgccttaagatgcaatttcaaaggaaagttacttataagagttaatgcaaactctcagagttattcttacacatggatcactgtagacacttctgcttactgtctttctgccaggtgtttctccatctcatagatagtggtgagataaattttctgaagcacacagatacaatcatgccacatccctgttcaaaaaccataaattcctgttatgatccctcagaataaactccagcctttttctgcccatcgtgaagttccttcactgtcttgtggcaatctgttttcctgtctatccttccagactccacaatattcatggattcatcagcccatatttaatgaattc

SEQ ID NO: 204775 - DNA, 1000 bp, Homo Sapiens
acttgacaattagcatcaacaatagacagctaaacagaaatatagtgctttttctatttgtgtctgtcttactacatctataagctagtattctgtctttaggctgatgggcctatttacatagaagttccagaagcgaaatgaagaagattattccatcttgcaatttaaatgaaatattgcatagataatttcagacaggaattttccaaagagcaagaaatagttcttagcaacatgaaaaaccagaaacaatgctagatctaattctgtatgagcacagccatgtgctgagtgccccatttcatttttaaggacatagatttaatttcatgtgacaatctggcatcaaagatttcccctagtctttttactaaatagcccagtaaatatgaaaatgcaatccaatagtaaaagattaaatttgtcagactctactttcagggcaccacggttattatgaaggcaataaatgaacaaatgagattaaggaaaatgccaatagatatgtcatgtgatataaacacatctaacacctgactaatgagaattttatgtgcacaataaaatgtcagtttgtatatctagcttgtttcctgtaccatttctatctatcatatttatcaaataaatataataacctttcaggtactataataatttatgtaatattttactctttttaccaaggcaagagggaacactttttccctcctttaaaggaaattaaaaattccttttaatttttttattaaaaggaattaataaaaccctattttattttcttcaatactgtcgaagaaatcttttgagagattcctaaatttaaaacagttaaaatttaacaaatttgcttaaaggaatatggctataaaaataattcttagtaacctgtaactaaatatttaaaagttcttttgttgtgtttaaaaaaaatgacaatttactacacaaacaattttatttgaaggttgcatttattcatattcctgatgaattc

SEQ ID NO: 204776 - DNA, 1000 bp, Homo Sapiens
tggttttgaggattcagtcagctaaaggatagctaaagtagattctcattcactgtagttatgttcacagagtcatagtgaatgctaaaccattgctcttctgggcagtatagggtcactgcaagcctgtggtcataatgtttctaccaaccaaccaatcaatccataaccttgttttatgtgtgtctctgttgaaagatttttttttttttttgagacagggtctcttgttgcccaggctagagtgtgcagtggtgcaatcttggctcactgcaccctctgcctcccaggttcaagtgattctcccacctcagcctcccaaatagctgggactacaggcatccaccaccacacccagctaatttttgtattttcagtagagacggggttttgctatgttggccaggctggtctcctgacctcaagtgatctgcccgcctcagcctcccaaagtgctgggattacaggcgtgagccactgtgcccagctgaaagattctttacttaatatactattgattcattaacattgaactcatggccagcagcactatgactcatgcatggatgaagcgtacctaacacttttctccataagggacatcacagccttcttgcactgagaacactgggcagtgcttcagcattatgtaggtgccattttaaacagtgaagtcaccaacagaaagcccacaaatgggaaaagtatagcactaaatagacctgcgaaaggacacttgtttacagtatgagagctgcagtgagaaggtggagtgtcaccttgttccacctcagctggggttgtgtgtagcgggcacatgtctgcgagccccttaagtgttggttttgcaagtaaattcaagtgagtaggtgattttgcacatatagaattagtaagtaggatcagctgtatatgaagtacctgctcaggcctggccatggttagcactcagtaaggtcagctgttagcatcagaatcattaccgaagggagtgcatcat

SEQ ID NO: 204777 - DNA, 1000 bp, Homo Sapiens
taaaaacagttattataactatattccatgtttaaagtctacagaaaagactgagcaaattgaacatctagatatgaaaaatgcaatatctacagtgaaaaatatgctgggaccaggcatcataactgtaatcccagcaaattgggaggccaaggctggagaatcacttgaggccaggagttcaaggccaacctgggcaacatagtgagatgccgttttcacaaaaaatacgaggaactagccaggtgtggtgtcacccacctgtagtcccagctagtcagacgcctgaagcaggaggattgcttgagctcagaagtttgaggctgcagtaagctatgaaagtaccactgcaccctagcctggaccacagagtgagaccttgtctctaaaaaaaaaaaaaagagagaaaaatacactggatgggattgagattgacaggagtttagacaatgcagaagaaatgagtagtatagttgaatatgtagcaataaaaactatctaaaatgaaacagtgaaaaaaggttgaaggcaaagcatcagtgagctatgaagcaacttcaagttgcatacactgtatctgaggccaaagttgattgatccatggctggacaccttgaacatggctgggccagtgagttttaggacccagaatcaaactagtctcgctctgggtgactaaagcagaaacatggagatctttgtgttttccaccacataggccgagcagcagaaatcatcaatctgcaacaaagggagaaagaaacagacattcagaggaaagttgatgtataatttggagaaatgggcccggcgtggcagtgcactggtaatcccagcaccttgggagttcgaggtgggcgggtcgcttgtggtcaggagtttgagaccagcctggccaacacggcaaaaccccttttctactaaaaatacaaaaattagccaggtgtgggggcgccctcctgtagtcccagctactcaggaggctgaggcatgagaattc

SEQ ID NO: 204778 - DNA, 1000 bp, Homo Sapiens
cggggagctgttatccagacagagataaatcaaaggatgccacagagccccgggagagcaggtttccaacagcaggagaataattaaggaaacagtttcaaaatgcaaataatgaaaggggccttgagaggaatgaggatgaggaggagatgattagagctgggatgacagggaggggagcaggggcagtgagattcgtccctcagtggagaaagagcctggggttcaggattcctggcatctgagagtgaacttgcctactctgtgaagctcttaaaatggaagggttagaagacacactagactgctgtgccgagtggaaagaacaccaggttgagacttaaaagactggatttaatttccagttggcactgcaatttattagctgtgtgaccttgggcaaaccacttaacctctctgtttcctgataatcatacccaagcccgggcataattatgaagataataggagataaaatatgtggaggaactttgtaaaatgtaaaatgctagataaatgtaagctataatcattttcctaaattgagtgtcttgcctctgaattggatcccctgacatgttgggtttggtttccagaaatggaatgtataaatgtctagcaagtactggatactttgtactggctattgttcaagttctctgacagaacttagacctgaagaaagccacatcaccccaccacaggcccatcctctagtgctcaacctccaaccaggtcctggcccaaagggacatggctggctctgaggaacattcctgggaggtcacctgccagccctgggtgcattgtagtgagaaaagccctgctgagtcagctcagggattttaatccaaactgagtcccaccccaagggtctttctgggccattccatagtagagattaatggacttctgtgggattcagccattctcccattctctgggggtagaaaacagcttagcccctgctagcctcggttttttcatccaccaagtaggt

SEQ ID NO: 204779 - DNA, 1000 bp, Homo Sapiens
aatctcagctcactgcagcctctgcctcccgggttcaagcgattctcctgcctcagcctcccgagtagctgggattacaggcacctgccaccacgcctggctaattttgtttgtattattagtagagatgggggtttcaccatgttggccaggctggtcttgaactcctgacctcaggtgatccgcctgccaaagtgctgggattataggcgtgagccatgatgctcagctgcaaagtattttaaatttcctttgtaagcttttctttgacccattggttgcttaagggcctgttatttaatttccacatatttgtgatttttccaattttccttctgttattgacttctaatttcattccattgtgtcagagaacatactttataatttcaaccctttaaaaattattgaaaaattattggagctggtgtgttggcacatacctgtaattccagctactcaggaggctgagatggaaacattgcttaagcccaggagtttgagtccagcctgggcaacacagcaaaaccccatctttaaaaaaacaacaaacttactattcattaagtggatcattaaaaaacaaaaacaaaaaacacttgaaacttgtttatgtcccagcatatggtctatcctggagaatatccatgtgcactggagaaggaggtgtatcctgtttttgggtgtagtgttctgtagatgtctgtgccgagaccagctcggtcggggagaccctaacccggcggcgctagaggaattaaagacacacacagagaaatacagaggtgtgaagtgggaaatcaggggcctcacaaccttcagagctgacagccctgaacagagatttacccacatatttagtaacagcaaaccagtcatagcattgtttctatagatattcagttaactaaaagtatcccttacgggaaacgaagggatgggccaaattaaaggaataggttgggctagttaactgcatcaggaacacgcccttaagaca

SEQ ID NO: 204780 - DNA, 1000 bp, Homo Sapiens
taccatcagagtgaacaggcaacctacagaatgggagaaaatttttgcaatctacttatctgacaaagggctaatatccagaatttacaaagaactcaaacaaatttacaagaaaaaaaacaaccccatcaaaaagtgggcaaaggatatgaacagacacttctcatgtgcagccaacagacacatgaaaaaatgctgatcatcactggccatcagagaaatgcaaatcaaaaccacaatgagataccatctcacaccagttaggatggtgatcattaaaaagtcaggaaacaacaggtgctggagaggatgtggagaaacaggaacacttttacactgttggtgggactgtaaactagttcaaccattgtggaaggcagtgtggcaattcctcaaggatctacaactagaaataacatttgacccagtcatcccattactgggtatatacccaaaggattataaatcatgctgctataaagacacatgcacacgtatgtttattgcatgtgcaatattcatactattcactattcacatactctattcacaatagcaaagacttggaaccaacccaaatgtccatcaatgatagactggattaagaaaatgtggcacatatacaccatggaatactatccagccacaaaaaaggatgagttcatgtcctttgtagggacatggatgaagctggaaaccatcattctcagcaaactatcgcaaggacaaaaagccaaacactgcatattctcactcataggtgggaactgaacaatgagaacacttggacacaggaaggggaacatcacacaccgaggcttgtcgtggggtggggggaggggggagggacagcattaggagatatacctaatgtaaatgacaagttaataggtgcagcacaccaacatggcacatgtatccaaatgtaacaaacctgcacgttgtgcacatgtaccctagaacttaaagtataatttaaaaaaaaaaaatagttgaattc

SEQ ID NO: 204781 - DNA, 1000 bp, Homo Sapiens
ttggcaaggatgtggtgaaatgggaacacttttacactgctggtgggaatgtaaactagtacaaccaggatggaaaacaacgtggagattccttaaaaaactaaaagtagatctatcatttgatccagcaatccgactactgggtatctacccagaggaaaagaagtcattatacgaaaaagatacttgcgcatgcatgtttatagcagcacaatttgcaattgcagaaaaaaatgtcccatcaaccaacgcatggataaagaaaatgtggtacatatataccatggaatactacctcagacataacaaggaatgaaataatggcatttgcagcaatctgaatggaattggagactattattctaagtaaaataactcgggaatggacaaccaaacatcgtatgttctcactcataagtgggagctaagctatgagaacacaaaggaataagaatgatacaatggactttgggaacttcagggaaagggtgggagggggatgagggataaatgactacacattgggtacagtgtacactacttgtgtgatgggtgcaccaaaatctcagaaatcaccactgaagaatttattcatgtaaccaaacaccacctgttccccaaaaacgtattaaataaaaaataaatcttaaaaaacatggtacatatacacaatggagtattattaagcaaaaaaaaaaaaaaaaatcagatctagtcctttgcaacaacatgaatacatgaatggaactggagatcattgtgtttaatgaaataagccaggcacagagagataaatgtcacatgttctcacttatttgtgagatctaaaaatcaaaacaattgaatccatggagatagagagtagaaggatggtttccggagactggaagggtcactgagggatgtgtgttggggggaggtgaggattgttaatggatacaaaaaataattagaagcaatgaacgagacctactatttgatgccataacagggtggctat

SEQ ID NO: 204782 - DNA, 1000 bp, Homo Sapiens
gcctagtttgtgttttttcacttaatattatgccgtttttgtatcaaagggacttcataaccatatccatctaactacttattaaggccaggtgcagtggctcatgtctgcaatcccaacactttgggaggcccaggcaggaggattgcttgaattcaagagttggagaccagcctaagcaacacagtaagatccagtctctataaaagttatagttatgaggtcaggagttcgagatcagcctggccaacatggtgaaatcctttctctactaaaaaaatacaaaattagctgggtgtggtggcatgtgcctgtaatcccaggtactcaggaggctgagaaaggacaattgcttgaacccgggaggcagagagctgagattgcgccactgcactccagcctgggtgacagagcaagacaccatctcacacacacaaaaaagttatagttaatcccagctacttgggaggctgaagtgggtggattgcttgaccctgaaaggttgaggctgcagtgagcagtgactgatagtgccacctcattccagcctgggcaacagagtgagaccctgtctccaaacaaaacaaaacaaaacaaaacaaaacaaaaacaaaaacaaaaaacaaaaaaaaacactgatacccaacgtaagaatttttcaaagaaattgacaatttcaaagacaggcaaaaactttcttagaaaaatttcaaaatctgaaatttttaggaaaaacgagttcctcgtgcttgatacatcttacaatattgccttcccaaaatgttataccaatttactcagccaccaataggtaataatttatcatttaaactgtcatgatgtagtagggaaaatagatatttcatcaacctttccatttgcatttaaatacattgctagggataaaggactttagccaagattatttactagttttatttcttctcttatagaatcattagttattgaggggaaaaaagtttatctgctactagtacgg

SEQ ID NO: 204783 - DNA, 1000 bp, Homo Sapiens
ccccacccccagcccttggcacacgctgctacagagagcctggaatcccacttggatgctgatttccaagtcttgctttccattttctgatacatgggatcaactttaataacaaaaacctggcagggaaggcacctctgcctagcaagagcccccagtggcaaaactgaggaagtcctggtggggggctggagggcagactgtcagctcatttgttaccctccgccagagacgcaagggcaccctgtgaccttcccccaggccttctgcctcaaagccaacaacagcagcaactgtctatatagtggcttcttcttttccttgaggaagtccctcccaccatctccagccaagatctgcccaatccttcctgtaggttcagcttgtgctgtagattattggggtaatttgtactccccacatggctctcggcagcctctccaaaaagcaatgcaaaaaccactgggaccagacgttgctggatgctcaagaagaccagtgaaccacccaccttccccatgaactttgtgtctggaactgaaggcttgttggtaagctggtcttgacaagccaaatcatagcatcgcaacctctacaacagtcaccacattgtaaggtgccagagagaggatgtattccatcccactgccttcacgagaaaaaaaatgagaaaaatgctcatccacttgtcctgaacagtcatttcctcaaagatgtctcattagatattcccaacaatcttatggcacaaatattctcctcattttacagatgaacaaaagcctcagctttgttatccgatgccctactgccaataagtggcagtcacaatttgaatcccagtattataactaaagggcatagctctctgcttcatttcacagagtttcagtctctctgaattcttgtccaccacagtggcttgatagttttgtaaaggcagggacatttgacaccccaacaaaattcttcccagctctatgcagtatgaatttgaatt

SEQ ID NO: 204784 - DNA, 1000 bp, Homo Sapiens
gtggctgagggaggagaattgcttgaacccagggggcggaagttgcagtgagccaagattgcaccactctactccagcctgggtgacacagtgagattctgtctcaaaaaaaaaaaaaaaaaaaagatttattattgttaaaactgtagaaaatattaagacttcagaaaagagggaataaaattaaaatcacctatatttattattattattatttgagacagggtcttgctctgttgcctaggctggaatgcagtggcacaatcacggctcactgcagcctcaacttcctagcctcaagcactccttccacctcagcctcccaagtaggtgggactactgttagctgccaccatgcctggctaatttttaaatttttcacagagacaaggtctcactatgttgcctaggctcatctcgaaatcctgggctcaagcaatcctccagccttggtctctcaaagtcctaggattacaggcgtgagccaccatacccagcctacctataattcttgactggaggtaagtcatttctaattatttggaatatatatatatatatatatatatataattcatatatatatattcatatatatatgaatatatgtatatattccaatatgtaaatattatatatatttatatatacaaatataatatatatttatatttatacatacaccacatgcatataattgtttttattctaaattatttcatactttatatggatgtggaccctgcattttcactttgcaccttgccataaatggaatacactttacattttatatgtaatataatgtgcatccaacatatatttgttaaatgaattaataaacgtaaggcaatttttcatgtctttattatttaatggcttgcaaaaacattaaatcttacatattccttcatgtggctgtactataatttatttaaccattctttagttatagcaatttctaattttttggttttagaaatgttattgcattgaattc

SEQ ID NO: 204785 - DNA, 1000 bp, Homo Sapiens
caggtagagaggaccagagagacccaggaaaaatggtgttggcctgatcatcctaatgcctttgtggagagtctatgagattaacccataggcgtctcaaactcaatatgttgaaggctgagctcaacatattgagtttgagaatagtctgtggtagacaggaagggatgatttaggtggatgatcttattcttccccacgttaccttctgatctccctttgaagtggaaatccacccatattccaattcagacaccaagggaccacctttgagtcctcataagcagccaccaagacttacaaggacgatccaatttcttattaagccctgccctttttttccataccactttgggcatgagttttggcggtagcccgcaaggaaacttgactcctgttttgctctcaaaatcaaatttactcatatcacctccatgctaaaaatcatccagtaaattcctatttcctgccagacaaagtccaaagccttagcgtgatatacaaagctatttaaacagtatagtgtcaggcagccattttgagccagccattttggtatcattgttttgcaaagtataaagaaaacaatgtcaccctttcctcattcctcagcttcactccattgctgagccttcctccattccttctgcttaacctttttcaggctagggattacaatgagactccaccaatcaaaggtcaggggcagaaaacaacacagtgttttgttgaattgtgaagtctactaccacagatgtctctttggctaatttcctggcgctgaacttgtgtattttttctttcatttccaggcattcacacatgctatttcttttgcctgggatgatttcccgttcttcatttttgataggtttatacaagaaataacataaatgtagtgaattctgaacaatgctaacatttttttcaggttatagttagcctagatgttgttttcctcctctgccccctactatccaagccagcatttataaaatgc

SEQ ID NO: 204786 - DNA, 1000 bp, Homo Sapiens
cttttaatttcaatgctgttttttggtagaagctactagaaggcttcctaggctgcccgggagttacctgtgcccctgctgccccgcacccctcctgttgatggcacatttcttctggcgtgaccgccccaggagcctggacagtggtggggcaagcaaggagctttgcatcagaagccaggagtggccttgctggggtctggcagccaggggcttcctgtctcccctgcagggtctcctgacagcagacccaccttgggcgtttgtggaaattacgcttcctgattggaagcaagggcacgttgtgggtggcacacttcagcagtgccctcttgttgaaaacgaaccacagggtgttctggggaacgtgatcttgacaccttccattcagcagccagcagaattgggagctcttttttcctaggggagaaaaggcaacctgcctggacttaatctgatttgactgggtttcttctgcctgttttttatttttatgtaatgttagtaacctgaagctttttcttttgaaaacttttttcttacagttcttatagtaaattaattgaattttattaactgtggtgttgagttgtgaggtatgtcttaagtttaaaataacacagctggcaaaatcattacttttaaaataatgcagattcagggtcactgttacgaagttcacttcaccggcacacatgctgacgtgcggcttatgatcgcagtggctgtgattgaggtgtggacagtctcccctgcaatgttgttttctatcctgcctccaaattgtagatttcaaagatgaaaaagtgttgtttttcctcagatgaaaacatttcatagtgttttcttctacaattaaattcttagctgtagaaaagagattgagtaggtaagtgtgctagcaagaatagattggttttcctccttgtagctcttacagtgtagaagggatttgtttcctgtggagttttgttttccatcctgtgggcagagagaattc

SEQ ID NO: 204787 - DNA, 1000 bp, Homo Sapiens
aaagcttatatttattttttaaatccccctagtattgtacactaaggaacactttttaatgcgttttgattttatggtatatatttcacaccttataagtaagaaaattgaatttctttttaaatagactagatttgaaattctcactaagtcaaatctggcacagtgcgtctcacatattaagtacttaataaattactgttattattaataactcaccattattagttcaaatgaatgaacttatccaaagtttcaaagagtctacacaaaaatatttgctttcatgtgcttgagtaaagaatttagtatctaagaagcataacacctttaacgtttaaaacaatggttaatataatttataggaaaaattttttaatattctgttaaaaacagcaataaaagaaagaagatgccgggcgcagtggctcacgcctgtaatcccagcactttgggaggctgaggcgggcggatcacaaggtcaggagatcgagaccttcctggctaacagggtgaaaccccgtctctactaaaaatacaaaaaaattagcctggcatggtggcgggtgcctgtagtcccagctacttgggaggctgagggaggagaatggcgtgaaccagtgaacccgggaggtggagcttgcagtgagctgagatgacgccactgcacaccagcctgggcgacagagtaagactctgtctcaaaaaaaaaaaaaagaagatatgcaagaaagataatcatacaagaaggtaattattattctttaataattactggagatgcaaatatattctacacagatactaggaataacaaggaataacaggagaagagccagtccatctatctatatggtggaatatttaaagcactctgtccttgtatattttaatttcataatgaaaacatggctaaaactatgtctattgttacccatgtgtaaattagaggaaagatcatggaaataaatatatttataaattgaagattattgaattc

SEQ ID NO: 204788 - DNA, 1000 bp, Homo Sapiens
atgttctccgatacagtgtaatataaaattaaataacacttctaaataatttacagtaagagaaaaagttggaaggaatattagaaaacaatttgaaatgaacaagagtgaaaatacagcataataaatttgtgggatgtagttaaagcagtacttagagggaaatttatagtactaaaatgcttagatgagaaaagaggtctcaagtcaatgactcaaccttctaccttaagaaacaaggaaaacctatagcaaaataaatccgaagcaagcataatgaagaaaataaagacaagagcagaaagctgtgatatctaaaacaaaaatcacaggcaaaaaccaatgaaacaaacttatttttaaaaacgttagtaaaatgataaacctctagcaagactgcaaggacaaaacaaaataccaatactaaagaaagcacataaggccgggtgcagtggctcacgcctgtaatcccagcactttggcgggtggatcacgacgtcaggagatcgagaccatcctggctaacacggtgaaaccccgtctctactaaaagtacaaaaaattagctgggcatggtggcgggtgcctgtagtcccagctactcaggaggctgaggcaggagaatggcgtgaacccaggaggtggagcttgccgtgagtcgagatcgtgccactgcactccagcccgggcaacagtgcaaggctccgtctcaaccaaaaaaaaaaaaaaaaaaaaaaagaaaaaaaacacataaaagaccaatatcaggaataaaagaggtatattactgtagataaaggataaaaggataatactgcaatagtctgaacaagcttacagacagaaattaaacaatttaggtgaaagagactaattcctcaaaagccataaactactaaaattcatctaagatagaataatctgaatagccctgtacctgtttttaaattcattcttttaataatgaatttgttgttaaaaatctccccaaaaagaattc

SEQ ID NO: 204789 - DNA, 1000 bp, Homo Sapiens
attcccaggctgaattaaaaaacctggcccatgggtctgactgcagctccaaatgcacccagggagtggcagaagattgagtggacaggtggctacttaataagtagaagctcaggtgcatgaggcagaaagtcatcaatagctctaatgatgaggtgggagagggtactgctgagacatcagggacccgagacctctgagaaggggaagactgacacacaggcttatatcaaaaagaactctgaggaccagactgtcaacacctctccccaggacctgcagggctgctcttggaagcagggaaggagagcagtttgcgtcttagggccagatggccaagccttcttatcctttctccagcccttaaagctatcctgggcaagtgaatacctcctttcctacagaggccttgctttctctactcaaaatgtgagtagcaaccctccccttgtaggaacaccctccctaagggaagttgcaagggtatagaagcaaaacatctgtctcagtcctttttattctgtatcagagaggtattcagtgaacgtttgctggatgtaggactgaatgaactggtaagaaactggaggctcttcagcatagcacagcacagccgcagctagaaaaggttcctctactccccatcgcatacacacatacatacatacacacctctttcctcgttttatctcatggcagctggtgttgagagaatggataacagtatggctatttaaagaataaaccttggagtcagacagtcctgggattcagactttgttccactactcaccaacttaaactcctaaggaagttccttaacctgcctaaatctcagtttccttctctgtaaaatggatataatgatacctacttcataggttgtgtagattacatcaataatacatgtaaagagcctagaagaatacctgccacacagaaagtaactgttctacataaagcaggatcagtaaaatgaaaacaggagacatttgaattc

SEQ ID NO: 204790 - DNA, 1000 bp, Homo Sapiens
cttttttttatttctcttttatctttttttaaaaaaatcattttcttctcttttctttcagttctctttttactcaagacaaacaccataaatatgctttgtcttttctttaattttcacactttaaaattttcaaattggttgggcggaatgtacttagcttgcatgtttatgtgtgtgtgcgagagagagagagcaaggaaagggcacaagaatttacacacacacacacacacacacacacccctatggaataggaataccatgtattttcagttctatttgatcaaatgggaatgtaatcccagtacatacaccatttaccattatcacctcctcagtgcttactgtgctgtaacactcccagctcttcttaaaaaactttccatgttgtattttttgctctttgtttttacttccttataaatagcaagaagttttgctgagaagaaataattacaaatcccaaaaggttggtgttccgttctgagctccaagatgtaaggattgagtggatttcaaacttggcaaaatttctgacttggcaaatgcttccatccttatttatgacagcttggaaacttccattttccagggtttataaatgatgctgctgattttgtctcctttttttattttgctgtgaattataaaataaccagcctgaaggtttccttataatattaaccctcttagcagagagggagagaagtagagagagagagagagagagagagagagagagagagaagagagaatgtgtgtaaattgctgtgttctttcttttcttggttatgaggtgcattttacatatttcataagcccatttacttccctttttctgcctttcaacaaaatgaaaatctagaaatgttgaggtttgggatacagagagtgacaacctgtgtttgtcattttcaccataaaggacttcttggccagcagtcctctaagggatgatacatttcatctccaaattgcaatttagcatttggaattc

SEQ ID NO: 204791 - DNA, 1000 bp, Homo Sapiens
aaggcacagctgatgggctctgtggtgcattccacagaggtcggcgacccggcagcagcaccagcacctcctttgcactggtgttcggtgacactgcgctgtttttcgactttgcattttctttctgtcttaacaagcaccagaacttaggtttctcagatgtcagacagacctagagcaccatctggggtcatcacatatgtgctgggtggatgggcaggctgcttaacctccccacgcctgtgtgtcctcaggtcaagaatggggacaactgcccaggattgctgggaccgccgcaacatgataaagtttacactcgtgacatgcggtatcagtcctcgccactggcgggattcctggggctttaactccgggcgggctccagtttcttacattatttatcttatatagtatattatttactatcattattatttataatatttagattattattttaataatctaaaaaaactcagaggtgtgcatttttacttcctgttctctcttcccctcccttcggtcgccctgcggtgccagtcgggacagcgctgaggtttccgagcgtgcagggtgtccaggacgaatctttcagagctggaaattggctgctcgccctgtcagcctagctcgtggttgccatgtatctaattcagtttagctagtaattagttttgtattactttacacggtgatgttaatactgattacagggcctgataactttagtaataaatacaacccaaggcaggaaattacctttcttctgattggggaaggttgaagtcagtggaatgagaagcaaattgctttaggagacggagcagctgtctcatgggcaggattgacagctcagcgcccctggtgtcaggagcctctccaccaggggaggcagcccgggaatgggaaaggggagggtgcccctctccctccgtgtgtccagaggcattgccagcctgagaggccacggccaactttggtgcaaagactgaatgaattc

SEQ ID NO: 204792 - DNA, 1000 bp, Homo Sapiens
acacctcttctagcacctcatgggggtgtggtgggggtgtggtgggcgtgggagccagcagcaggcagaagagtaaatgggaggtgagaagaaaagcaccaagagctaaaacacattagcctcagtgacaagactaagagttatcaaagattatgcagcatcaggaaagtcttattcaacactctgtggaggtgtaaggtgtgagaaacaggaactaagacctgccggggctgatcttctggcagtggaaaggagatttcttagttaacacctaggtctcacaggaccactaatcctgaaactagcagtaggcatcccgaaaggctagttgcttctgacaagtgctgaggacaatatattcacccacacatcatccaaatgctaggcttcgcacctccatacctttcccacactaacatccctagttttctcctccagcagaataatgctaggcagcagggactacatttcagttcaaagcatggtaaaaaaattcatataacaaaaaccatagcaccactaccaggtatgatgctgtgagcccataacctgggaccattcaggcaggaaaaggctttaccaaaaacacaagctgggtcccggaacactggacccaaaccctttcatgtcagcaaaaactgcctaaatgctcttctatttgctctctgagaaacaaaaagaagccgaaggaggaaaaggcctttaatcctaaaattattcttaatttccaatacagagcatttgagaaaaatctgaaagccaacagaaaaactagcagattctttaaaatgtgtgtctacagtcctttctcctttaccctctgcaaaaaaaaaagcaacccaactcccaaatgatcatttttcttggcttaatttcactattttttgtgatacataattggaaacagactgctttttcctggctttagagaacaggatcttcagggttataagagttgccaactacagaacctcaaccttagcaaaatttttttgcaaac

SEQ ID NO: 204793 - DNA, 1000 bp, Homo Sapiens
ctctctctctctctctctctctctctctctctctctctctctctctctctctcgctctctctctctctctctggaactgctttgtgattgcagtatgacatctggttttcctatacaggtacaaggtggctgtgcttgagacatgccaagttttttttaactcagaatacttaccatataaatagagcaatagagtatgatagacaaagctggctaggaaataaaaagcagtggaaggaattcagtttgatgacaaagaagtgtgaattgcccttaagaaacaaacaatagaataaaatgagagcctgaaaataaataacttggttatttatagatttcttgtgtctgtcaatacagcatcacagaccaaaacatttaaattcaggggttttgttgttgctgctgttcttttcataaatatggccatattagaaaaactttacatggcgtttttctcttatgcaatcttttttatgtagcagtttcctgggaaatgttatgtcagctttaatacaggcctgaatttaactggcaaatagtgacacaaattgtcatgatggaaaagtaacatgttgggggttttaataaccactgaaatactgatagccattttcttttttttttaacttctacgttatttagggacctattttgcagacataaccttaaactaaaatatcccgtgtccattgagaagcctacccccacaaaaataaataaatagatgtgggaatgatatttggagtttgtgagtaatgtttgttttgttttttgtttgtttgtttgttttgacacagggtctccttctgtcacccaggctagagtgcagtggcgccatctcggctcactgcaacctctgcctcccaggttcaagtgattctcccacctcagcctccagagtagctgggactacaggtgtgtgccaccatgcccggctaatttttttttatttttagcagggatgagattttatcatgttggccaggctcgtcttgaattc

SEQ ID NO: 204794 - DNA, 1000 bp, Homo Sapiens
tgagtctgtttgacaggtaactttgttttcttaataagggaaggaatacactctatagtaatgataaaaagtatactgtagtaaataaaccagtgacatggtcctttattatcatcatcaccatcacccagtattatgtactgtacctaattgtatatgttacacttttatgtgactggcagtgcagtagatttgtttataccagcataaccacacttatgagtaatttgttgtgctatgatgttaagacagttatgactttacaacagctatgatgtcactaggcaataggaatttttcagcagctccattataatcttaagggaccattgcctatgtggcccattattgaccaaaatatccttctctgcacataactgtaattagtaaatggtgcagccaacatttgaacagagtctaaaacctctgcaattcatctctaggaaccttttctgattttgtgctcattctgggcaatgcctaatggaaagctctgcttgactgtcctatggatatctcaaagtcccaaagtccagattagaattcatcactcatctacctgaaagtcttccttcttttcttgtgacagagacttaatgattgacactaccaaccacctagctgctcaggctaaaatcctgagtgtcacccttgactcatccttctttctttcccactgtttgtacttatggtgttcatttctcccatctctgctgctatccttccctacaatgtccacccttttctgttttttgggaaagctgtaacagactctttacctatattcctatataatctgagatattctgactaatcttactaaaattcagatctcatcaagttactttcctgatttatacccttttgtggcaccttgttttttggacaaaagttcaaaatctaacctaggaaaaaggtccttctttatctaatcagggcacattttcccacttctactctctgttccagctgtcttaagcagtttgatattcctgaattc

SEQ ID NO: 204795 - DNA, 1000 bp, Homo Sapiens
atcttcacaatactgattctacccatctataagcatgagatgtgtttccatttgtttgtgtcatctatgatttctttcagcagtgttttgtagttttccttgtagaggtctttcacctccttggttaagtatattcctaagtattttatttttttgcagctattgtaaaagcagttgagttcttgatatggttctcagcttggctgctattggtgtatagcaaagctactgactgtgtattttaattttgtatcctaaaactttgctgaattcatttaccagttctaggaagtttttagatgagtctttaggattttctagatatacaatcatgttatcagcaaacagcaacagtttggcttcctctttagcaatttcggtgccttttatttctttcacttgtctgactgctgtggctaggacttccagcactatgttgagaagtcgtgaaagtgggcatccttgttttgctccagttctctgagggaatgctttaaacttttccccattcagtatgatgttggctgtgggtttgtcatagatgatttttattaccttaaggtacgtccctttaatgtccattttgctgagggttttaatcataaagagatggtggattttgtcaactgctttttctgcatctattgagatgatcatgtgatttttgtttttaattatgtttatgtggtgtatacatttattgacttgtggatgttaaaacatccctgcatccctggtatgaaacccacttgatcaaggcagattatctttttgatatgctgttggattcagttagctagtagtttgttgaggattttttgcatctgtgttcatcaggaaggttggtctgtagttttcttcttttattatgtctttttctgattttgttattagggcaatttggcttcatagaatgacttagggaggattccctctttatcttttggaatagtgtcaataggattggtaccaattcttctttgaatgtctgagagaattc

SEQ ID NO: 204796 - DNA, 1000 bp, Homo Sapiens
tgcgactgggagcataaacatatctgtgtcacttctctatgatggaatcaatcaatacctagttgggatgaggtgaaacaacacttctggggaacctttcatgataatttaacagcagacataaagcaacttaaaactaaaattttagaattccttcacactatagatctacacacccaacaaacggccatatggaaggatgtgcaagatcacctctccgggttagacccccactcctggggtcactctttgattggaaaagaatgttgctaattatacttatgattgtcttattttatttactaattctaggatgcaaagccagaataagagcaatgaccaccacgcctgacaaacctgctgctgcatacatctgtgctctccaatcaataagacctgatgcagaaaacagaaaaggggaagagttagggattcagtcaggatggtgggaaattttgtaaaataaaccttcttggagggccagaaggtttttgcaaaagcttcaggatagagttaatggctgaaggcagcctaatcctctttgagctataacaagggtaactaacataggaatgtagaggagtctatctaaatagcttgtttgctcatgtggtcctaagactgacttttgaccatccacgggtgcatgattgctctctattcaggggttggcaatggtaattaccttctagtggtgtttattgagacttttgtcatttaatgtgggctgaataaatgctggaaaggccagcaagttggagccacggttgcaactctttacaacactctcctgggagtctgtaagcggcccagaccctcagccagactgacaagcataatatctgtgtcagtgtacattattcatccatcgttgggttagggtctgtgggacggacccccacactccctctttcctattatttatgtaaaagtgcacattcagtgagccagactgaattctgtattcaatggaagactgatcaaggactcaaaagaattc

SEQ ID NO: 204797 - DNA, 1000 bp, Homo Sapiens
agcctgggaggcacaggttgcagtgagccgagatcgtgccactgcgctgcagcttgggtgacagggcaagactctgtctcaaaaaaaaaaagctgggtgtggtggtgcatgcctgtattcccagtggctcagcaggccaaggtgggaggattgcctaagcccaagagttctaggctacagtgagctacgatcacctcactgcagtccagcctgcgcaaaagagagagaccctgtctttaaaacaaaacaaaacaaaacaagaatctctggggactctttactgtgtctgctttgagggtgctgctaagaatatatccactgtattgctcagtgtcccttttaatgaggaccctttggaaaaagtttcccctagttttagtttcagtgttcgttattcaacaagtatttacagagcatcccactatttgccagacagtgttctggaaggtacagtctttgtgcttatgggcctcacataataggagaaatatataatgagcaaatgattaaataagtgaataaaagaatgttatgtggtgattaactgttatgaaaaaaaattaaagaaggtgaagcaagacaagggtggagataagggaagggaggcttcttagactggaaagtcagaaacttctttgaagatgggactttcagctgagacctgaatggcaaattcgacatgtgaagatgtggggaacaagcattccaggaagagacaaaacatggtgtaaaggcctcaagtcaggcatgagtttggcatgttcaaggaacaaaaaggagatgaggggtgagaaacatggtggagaagcagggaggtgctggctgacaaggcttcagggtccagcaaggacttgcaggaatcagaggtgcagtgggaagctgttagaacttggaaacacatctgagctactctgaataaacagtgtcatgtttgtttcatgattcctgtgacctgtatatctgaatccatttccttttctcattccctgctcaaaagctt

SEQ ID NO: 204798 - DNA, 1000 bp, Homo Sapiens
agtggcagtggtgagcctggagggtgagcaggtcaagtttctgggcagtgggcaatggcagtagcagtgaaggggcaacctctggctccccagaggtccacactgttaccaattgtggctttgatgggctggacaggacagtgcgcaggcccacagggggtgtgtgcgggtgggtaacagttgtggtggtagtggcaggttggttgggcgtgtcttctgcccctgggaaaagtgctcaggtgccaacagtggaggatgttgcagggccaccctcaggccccaaaatgtgtgctcaggcactgctagggcggcagaaggggaggacagagcccagccaagttggcctgtcctcaggcctccaggtcgcaggcaggggtggggtgttcttcaggtccttggcagtgtgctaccagcacttgggtcctgctgctggggagagcagcgttgttttcagtggcaacggccagtaagcaggcatctggggcatgtgagcttccgccagttggtggctgtgattgggagaatctgtcctcagggtgcttttaaatacgtgactgttggagttgtggggtcactgccagtggcttgcacttagatatcatcattgtctgcaggtttgcaggggttggggggctgtcttcaggtgcttcccccaccccgacttagggtgtaaggactcttgggccccagggtaggatgcagtctggtgggggccgagccctcaaaatggcgctgtgctgcatgcagctgcttagggcatgtgtaggacccaagcatgaacctcctatctggagcatcttgtggtctctaggcagctttctgtgttggtgtcaggacccctgagggtcatgtggctctcccctggctaggattgcaggagtctgaggtgggaatgtggaccattaggggtctctcacccttatctcactggtgagcccatcctggcttcccttctccttccttgccttaggtgtttctgctcactttatctgttgaattc

SEQ ID NO: 204799 - DNA, 1000 bp, Homo Sapiens
gttagacttgacctatataaaacagttgcaattaagcagtttcaaacagcataaaacattatcagataggcaatgtagatagatcactctgatagctgtgtgggaaggtggcattttgggtagcaataggaagctgccagagtccagagaagaaaaaatgagaagactaggactgatagaagaaacgagagaagaagagattcaagaaataatcagaaagaaacattggaaaggtgaagctactttctaagagaatataaggaataaaacaagtttatgaggaaagtaaagggtttaacttagagcacacagagcttctagaatagatgagacatccattgaggttattcagtaggccaatgaattatttctcaattggaggaaaaggtcctaaacagagatatacatggttagttgaaaacttcagaggtgattacccaagtaaaacactacataccgagggaaagaatagtagaatcaggaaaaacaactgagaaaaaacaataatttaaggcaaaaaggaaaaattatgcaaccagatagataatgaaaagtcaaaggggtatgaaattgagaaaatttgatgtcacagaagtcaagaaatctttgttctccaaagaagcagcatatgattatatcaagtagagtaggtaaatccaataaatttccaagaactaaaaactaataaaaattatttgtgattttaaaacgtcatttattaaagataaagaagtcacaacaatcttatatatgcactttactgcaaagcttcaaaatacgtgaagcaaaaaccaatcgaacgggaaaaataaaatctaaaatcacagtgggagacttcgatacttctctcaataattgttagaacacacagaaaattaacaagaatacagaagatgtgaacagcactaccaaccattcagaatatacacgaatactgaccaagatagaccatgttctgggacataaagtaagacttaaaaaatcagaaaggacagaattc

SEQ ID NO: 204800 - DNA, 1000 bp, Homo Sapiens
catgtggggacaatgcctaaaacccaggctgttggttaaaggaatgggatgagatggaggaatttctcattgctgttctgaaaggagagtttgcctataatatgtaaagaatgactgtaaggtcatgagcttgattttgacttttaaacttgggaggctgtataggttacctctaaggatgctcccattcctcaaaagccacctggaaacaggcttccttggaatatcccttttcccttcagagccaatataccaaccaaaaaagacaaccacggcttactactttggagtcacaggtggtgcttgccttaactaacatagtatcattcagccttccaccccaaccctattcctactcccacccccaccccaggcaggctccaacagatctggttccaaatagcttatgactgtttccaaaaccctatgccctttctcaaaagatgaagacgtgaagccatcaagaaggttgcatgaaaccttatgccctttctcaaaagatgaagacgtgaagccatcaagaaggttgcagggttgggctgcaggtcctgaaggcagtttcccagggggttttctctctggggagtggagggcctcttgaggggatcagcatatcaaagaacacccttgtgtcaatggttaaggtcaacgtcatcttccttaggaattttaaacatataataactttattccttttttaattacaaaagtagtccatgtccattgtggaaattttagaaaacacagtcaaaaggaagaaaatacaatgtattaataatacactccctatccagagatagtctctgttcagattttggtggctattttccaagacatttttctagacacaacacacactcacagatatatatccatcattaagtgctgtcagttttacttcttaaatttatctttatgctttatttctgcttcctcaattactaccacaatcgaaacatctctcacttggacaactgcaatcgcttcctaactggaattc

SEQ ID NO: 204801 - DNA, 1000 bp, Homo Sapiens
agagaaaagacaaaaatgtgaaactttagaggaaggtggagagagctatgctaaagaaaggaagacaattccttgcattaaaaaaagtaggatggaagagtttgatttacctctctttctgcataaaatctggacacttctttaaacattccttctcacatctcccttgcaagtgtcttctccctggatttgggcagcactctgactgtattttaaaagcattgtttcttccagagaaatagttaaccttacttacttttgcaacttctttctccatattaggtatgtattttacctacagtcatctatactcagaaagaagagacatcctcggaatctttcccattaaaaaaaagaagatgtgaagtacagcattccagtgtgacacgagaaaagacaggctgtggattcagtgcagtaaataaaacacaggaagtattctggtggaaaaataccttgtatttgataaaaatccattacatgaaataactgcacatacccccaaaactctagacataacaggctatgtttttcacacattgtatttttaagacatatatattctccataccctgcttcaccaaaattcctgcttcatttggattttatacaagttatacttacattgtatgaagtctgattattttcctgtaagtttaatgagaaataggagattagctgcaatagattcaattaaattaagaaaccaaacttgataacctaaattacatgtattctttttcacttccaagttcccaaatagatctgtaggagaagagggatggaaaatatattccacagttgcctagaataacatatttcatagacagatgtctgtcttcagatctaataatactcaccctaaacattagatatgtttagaaaattaaatatctttccaagccctatgtcttagctcaggttgctataatagaacaccataaaccgaatggcttaaacaacagcaaacgcttctcacagttctggaggctgggaattc

SEQ ID NO: 204802 - DNA, 1000 bp, Homo Sapiens
cctgaagactcagacctaggtaaccttgggtatgagctccatttggcctgtgttacaagctggtttttaaaggcaaaacacaggacaaagagtgggctgacagaaagttgtttgccaggaattctcattggtttacagaaataacattgattagtgattggctacattgttgaactatatgaaatgagttagagggtccagcgtgcagcattgttaagttgatgtatagctacctgtggtggcaagcagtcttcagtgcacatggccagcagcttcaagaggtggttgtttagctcaaggcaggcaggaggtgggatatgactgctgtctcatccccatgcttctctggacctgatcatttacaggaggcttgcatttctgagatagtagtttcttttctttctcagaaggattttattttattttttgttgtgcaattaagctaggtgaaaatcacctcaagccggtcatggattcaaatgatgatacactggttttcagttcttgtgagaaatggtctactttacacctactcaggggcatttctcttctggattcttattgaaaatgtggcatgtttgccagttgcgtggcagggcttacacttcatttcctatttctccagctgtgtaacaagtacagaaatacctactaaaggtctcagttctcagtaggacttttggaattgccgctattttataggggaaacacaatgtcaaatgctatgccaatcggtcttatcttcagtgtcttccctctccttcaaaatttgctatttgtcagcttcttgatggcttcatgttttatccatccattctatttattctcttaaaaatgtttgtttaaaacaacctagttcactgttgcaagaaacaaggttcctcacaatgtttttctggatcagtagctggaacattcaatttcttctattttagatcctttacttttattgcaggtatttcagactagtagtatgtcttattcatctttataaaatttt

SEQ ID NO: 204803 - DNA, 1000 bp, Homo Sapiens
gttctctacagggctggtcctcaccttttcacaacgcactttggaaaaccagcacagaacaaaggcccctcccagcctggtgtattcagacctcagtgctttgcctgggctgcagctctgttgggaaaaggtggcagttcagttcccgaggctggtgccctcggcaagaatgggagagcctggtaatttataaaggattatcacatgcaaaggcaatgtttgttttattccatcatctctcattctttcaaagcagtggcgttttcttagtatcgccatgtaatagagttcgagaaaagtgaccttaaaattgaggcaagtgtcacactttgagaatgcattaatttttttaaagacattttagtggttttaaaattttatttcatatatatatatatatataatttttttttttttttgagacggagtctcgctctgtcgcccaggctggagtgcagcggcgcgatctcggctcactgcaagctccgcctcccgggttcacgccattctcctgcctcagcctcccgagtagctgggactacaggcacccgccaccgcacccggctaattttttgtatttttagtagagacggggtttcaccgttttagccgggatggtctccatctcctgacctcgtgatccgcccgcctcggcctcccaaagtgctgggattacaggcgtgagccaccgcgcccggccttcatatatttttatgttgtaaaaaggggaaacctttgttctttgagtaaaatgccctggtagtgaacattttttaaggttttttttattttgacagacatacccacatttcacgcagcatcatgcttacccattcacctcatcttgcattcagagagctctcaggcacttgcaaaattgaaggccagaatgaagggagctcagtcatccttgacaactgctggggacaaagttggcaatttgttcattgttcttgcaagcacttagcctcttgccgagcactttaacatcagagaattc

SEQ ID NO: 204804 - DNA, 1000 bp, Homo Sapiens
agaaatctaaggagaaaattagaaaatactttaaactctgataataaagatacaacatatgaaaatgtgtgggatgcaggtaaggtggtccttagaggaaaatttataggtttaaatacttgtatttgaaaacaaaaaagtttaaaattaatctaagtttttatcttaagaatctagaataagatgagcaaattaaacccaaagaaaatagacgggaagtacttataaagataaaaggtataaataaaatagaaaacacacaatagcttaaactaacaaagcaaaagttgtttttctcaaaaaaaaattaatgaaatggataaacctcagcaagagtgactgagaaaaattgatcattcggacattaaatagataataacaagactatgaacaacttaaactaaatagaaaaattccttgaaaaacatagcttaccaaaacagacccaagatgaaagagaaaataagaatagctctgtatcttttaaataaattgaattttctatcatcaacttcttctcaaatagaattccagaagcaaatgaattgactggtgaactttaccaaacacttaagaaagaaatatcaattttacaaaaaccatttcaaaaacatagatgaggaaacaatttccatcccatgtcatgaggcaggagaatcctgaagccaatacctgacaaagacatgacaataaaaagaaaagaaaaaatatatcattaaccagttaccttcatgaacgtaaatgtatttttttcatacaatgttagcaattcaaatccagcaatatatgaaaaggacaatatatgttgatcaaataaggattttctcagaaatgtaaaagtttatttatttactttttgagagggtctctctctgtcaccaggctggagtgcagtggcatgatctctgctcactgcaacctccacctcctgggttcaagcaattctcctgtcttagcctcctgagtagctgggattacaggcacacgccaccacgcttgg

SEQ ID NO: 204805 - DNA, 1000 bp, Homo Sapiens
gattttgtggcagtcaaaggggtacaacaaccctgtctggcacctgtggggaaaacaccttagatgcggggaagtaaggaaaaaggggggacattagtgatccgtcttttagaatcatccctcacaaaggacatttctctgcaaatgtgcaaaacctcaaatttaactgacaactgggtctgcccctaccccaccacacaactttgatcactactcaatcatcattctccttaactgcacagtctctcagaagcagcagaggatggtccaagctcccaaatctcccacgtgaaacacctgtccataactttaggcatcttttcaagggacagtcatttcaagggacagatgaatgccattgagttggtggcacagataataaacaggacagattggactgactgccttcaggccatctctccacaaaccagtactagagaagtattcatactgtacttggaaccctaaggcttaccagccatcagggaggccacattggagaaactgtcagcctgtgccgtctgacttaaaagtaggtcccacataactggggaggtgggggggaatggggggagcggggagaagtaggacaatataaacaacacattctttataggcacacacagtccttgggagtatttcttgtttggaagtcgggcattgcctcccttcagaaaatgtgatgacttgcacaccaagggaaaaatcactataatgggagtcatccaattagaaaactttatttgaaatttgttcccgactttagctgaagcaatcaatgacatcaccttgggcctagaggcattcaggacggtctaaaatcactatccaggattgttacagatagaagaatagccctacgcttcctctttgtagaccaaggccaaatctgtgctctatattctgcagtaactagattaatgccttgggccaagagtaaagtcagcacagaaacaaagagaaagccacctggctctcttaggtagaccctaaaggttta

SEQ ID NO: 204806 - DNA, 1000 bp, Homo Sapiens
ataagtctcaattatgagtgtagataagctacattgggttttcttcaattttcatactgtgtataccagttcactataactgtcaagtttcatgtagatgaaaagcaatatatgtgtgaatgtgagcagttaagaatacaaacaaagaaaagtgccttaggatgccaaataagatttaaaacactaacacagacacacaaagcatgactgcaggagagttatacccaccagatttgtgatagaatctcaaagttacacattgcaacaaggaatagcaaatatacaaaatacactttctaatagtgtctgagtaaaggaagtacataaataatagaaaaaaagtgaaaaagaagtctcacaagattgaataacattcatatgaacaagctccctctgtgcttaaaaaaaaaatacagttcggccgggcgcggtggctcacgcctgtaatcccagcactttgggaggccgaggcgggcggatcacgaggtcaggagatcgagaccatcccggctaaaacggtgaaaccccgtctctactaaaaatacaaaaaattagtcgggcgtagtggcgggcgcctgtagtcccagctacttgggaggctgaggcaggagaatggtgtgaacccgggaggcggagcttgcagtgagccgagatcccgccactgcactccagcctgggctacagagcgagactccgtctcaaaaaaaaaaaaaaaaaaatacagttcatattcctgaatcacactagtcacttcgacataaagcagggacctgattgtttcatctgcttcccttattgaattgcgtgcatgtatattttggagaagttctcaaaaggaactgtttttccaccagtttatatcaaattatatgtaatcatccaaatacaaagttcaagaactctaacctctaaaaaacagcgaaacatattcatttttatttcctcattttgacttttaagtatgcatatactttaaagggcctattttttaaatgaattc

SEQ ID NO: 204807 - DNA, 1000 bp, Homo Sapiens
gaaccgtgggaaggaaactgacattcattacaaacctaccagtgttgtccaatgtcatcttatttacacctgcacctgacaggtaagcacaggaggcgcagagggctgcctgcttcggagtggggctgctggagagcagaggatgagtgttgtctgggctggcttcataccaaggccgggttcctgtccacacacctcatccttctcttctgcctgcgcccctcctgctatagctctgcctgtgttttcttgaaggcagctcctctctccccatcccggactctccaccaggtggccctttgcgctgagaagagctgtgggcatcttgctgccctgcgtgggggagccgtgggccctcttctctgtcaggagaccccgccccacttcctgttccagctccattgtgtggtttgcatccccttctcttccttccgggccccgggctttcaggacaggcagaggacaccaggagggcttgtacctcaccttccatctgttctcccctcctctgggccgaagccccacacaagcagctccccaggtccagggatgtcccagcctcatgggttcctggtctgtgccctttggttccatgctgggtgggtcccaagcaggggaaggtctcagctgttgtctagtgtgtaccccgggccagacccagtgctacccatgctgagatggaaagaagcccagtgcccccagagaggtcacaggctcttggggagggcaacagttataatggggctgtgtctgcaggcatgtacctgtcccagcaccacccatgctctttgaaaacagcctgttggccccctatcagctgcacctctgagccactgaatcagaatctctgggtgtgggcctgggacataaatatttttaaaaagcttcacaactggaaaccactgtgtgaaatgggtctaaggaagctttgcagaggagaaatggggtctggttttgatgactgaacaggaatttgcttgctggttgtgagagagaattc

SEQ ID NO: 204808 - DNA, 1000 bp, Homo Sapiens
gatttttgtatatcaaatagacctcaataaagctgtttttaaaaaatgtgcctactgcagccactctgtaaaaccgtttggcattttctcaaaatctaaacatagagttatcacgagccagcaactccactccttatccagagaaatgaaaacatatattcatacataaaaacctgtaagcaaatgttcatagcagtattattcataatagtcaaaaatggaaataacctaagtgaccatcaactgaataatgaataagcaaaatgtggtatatccatacagcggaatagtatttggccataaagaaaaatgaagtactgatagatgctacagtatggatgaccctcgaaaacgtgctaaacagaagaaatgagtcaaaaaacatcaaatattttatgattcaatttatgtgaaatgtccagaataggcaaaaaccacaaagacagcaagtaggttagtggttaccagggactaggtgaagggggaaatatggactgattggtaaaaagtactgggtttttttagggggcaaggaggctgataaaaatgttctaaaattagattgtgataatgggttcacaactttgtcaatacactaaaagccacctaactgtatatcatttaaatgggtgaatttcatggtgttagaaatatatttcaagaaagctataaaaataatgaagaataaatctactatgaatcaaggctgtccttatgacaaagataacatttttcctaaataaggaatgtactagaagggcaagaaaaggtcaggttgtcttctatcaaacagtgggtgaaggatatgaacagacacttctcaaaagaagacatttatgtggccaacaaacatatatgaaaaaaagctcatcatcactggtcattagagaaatgcaaatcaaaaccacaatgagatagcatctctcaccagttagaatggcgatccttaaaaagtcaggaaacaacagatgctggagaggatatggagaaataggaattc

SEQ ID NO: 204809 - DNA, 1000 bp, Homo Sapiens
gactgtctccaagtctccattctgcaggtttttttccctttaaattataggcacaataataccatcctcctgggtttggtgagtatcaaatgatttacatgaggcatgtaggacgtggcctggcacagggtttggccttaatcaagggtatctgttatatgtatatttcatagataacattgttccatttattgttattaatttcagcctcaacccggtgtggtggctcacgcctgtaatcccagcactttgggaggcaggcagatcaaaaggtcaagagatccagaccatcctggccaacatggtgaaacccccgtctctaccaaaaatacaaaaaaattagctgggcacggtggcgtgcgcctgtagttccagttactcgagaggttgagaatcacttgaacccaggaggtagaggttgcagtgagccgagatcgtgccactgcactccagcctagggacggagtgagacttcgtctcaaaaaaaaagaaaaaaaaaatcagcctcaagggcaaggctgcgggaaggcctgcttgacccacctataactctgttatggaggaaggtcatggctgaccgttagtatgcacatagttatatgtctgcatccattcatctgaccacatctgtatgtctgtgtagatgcagagggaatgcttttcatcagcctccaaagagccaagcagttgggaggtgtcaggacagtgcctggctacatgccttgggacctagtcatctaacagttgtctgctcaggaacccctgctctctgctggctgctgggccaggcaaaggcataacccagctctgcccacctgcctgaaatctcagcatcttcactcgagggccactggagcctgttctgaggcaccacagtgtcccctgcagggcctaccagggaatctcacacacagtaaggtgctcaagtatttgctcttgaatgtgaaagtctgtaactgtgtttgtctctgcttttgctcacatttgagagaatgaattc

SEQ ID NO: 204810 - DNA, 1000 bp, Homo Sapiens
agacaacataccagaatctgtgggatacagccaaggcagtgttaagagggagatttatagcactaaatgcccacatgaaaaagttggaaaggtctcagcttgacaacctaaatcacaactaagagaactagtgaaataagagcaaagaaatcccaaagctagcaggaaacaagaaataaccaaaattagagcgaactgaaggatatggagacatgaaaaaccattcaaaagatcagtgaatccaggagctggttttttgaagaaattaataaaatagaccattagctaggctaataaagaaggaaagaggaaattgaaataaatgatcagaaatgacaagggtgatattaccagtgaccccatgaaaatataaataaccatcagagaatattatgaacacctctgtgaacataaactagaaaatctggaagaaaatggataatttcctggacccatataccctctcaaaactgaaccagcaagaaattgaatccctgaacagacaaataacaagctctgaaattgattcagtaataaatagcctaccaaccaaaaagagcccaggactagacagattcacagctgaattctaccagatgtacaaagaagagttgataccattcctactgaaactattccaatgaagttaaggaggaggaactcctctctaactcattctatgaggccagcatcatcctgaccaaaacctagcagagacacaacaaaaaaagaaaactttaggccaatatccttgatgaacactgaagcagaaatcctcaaggaaatactggcaaatcaaatccagcataacatcaaaaagcttatccaccatgatcaagtaggttttatccctgagatgcaaggttggtgtaacatatgcaaatcaataaatgtgatttatcacataaacacaactaaagacaaaatccacatgattatctgaacaggtgcacaaaaggctctcaataaaattcaatactacttcatgttaaaaactctc

SEQ ID NO: 204811 - DNA, 1000 bp, Homo Sapiens
acagtagctcactatagattaataaatgagaataagaagatacaaataaacacaataagaaatgataaagtttatgctaccctcaaccccccagggaaaaaaaaaacctggagactattatgaacagttctatgcacacaaactggaaaacctagaagaaatggatgaattcttagaagcatacaacctcccaagactgaagtaggaagaaactgaaatcctgaacagatcaattaatgagtttcaaaatttaatgagttatttttttaaaatccctatcaaccagaaaaagccctggaccagaaagattcacagctgaattcttccagatatgtaaagaagaggtggtaccaattctactaaaattactcaaaaatattgaggaggaggggctttttcctaactcattctacaaggccagcatcattctcatactaaaacctggcaaagataaaaagaaaaaagaaaacttaaggccaatatacctgatgaacacaaacacaaaatcctcaacaaaatacgagcaaattgaatccagcagcaaatcaaaaaggtaatctaccaaacaatcaagtgggctttatccctgggataaaaggtttgcttcaacatatacgaatcagtaaatgtgattcgtcgcataaacagaactaaaaacaaaaaccacatgatcatctcaagaaatgcagaaaaggcttttgataaaaattaacaccccttcatattaaaagccctcaaaaaactagccaatgagggaatgtaccttaaaatattaagagctatctatgacaaacccacagccaatatcatactaatgggcaaaaactggaagcattccccttgagaaccagcacaagacaaggatgcccactcttaccactcctattcagcatagtactggaattccatccagagcaatcaggcaagagaaagaaataaaagacacccaactggaaaagaacaagtcaaactatctctcttcatagacaatataattcta

SEQ ID NO: 204812 - DNA, 1000 bp, Homo Sapiens
tagtgattattgcttcaggcaaggcgttggaataaattaattttcatgacagataaatccttgctatgtacttctgcctctcctgacatatttaataaatgagtattgctacatactgaaaataattctcttctacctcttcattctgatattcccttagtacccacttcctcagatgtccccgcatctttggatccctttgttccccagaacacaaccattattgtaacaataactcccactttgtccactccattagctcaagaattcctactcatcttcttctctataggcagtggcaccaatgccaccaccaccctgagcagaacaagctccctataatatcctatcatatatgcgccataccaattgtgcactccgttttatggctctccattgctgatgctctagaacttactgcacttactggaatatagatgctcagtcatactgatcttgccatccacatgttcacctggcagctgcttgcttattttcatgtttatcatttgttcatttttagaatgatactctagttgtaagagctttgcagatctcagctctccttcttcatccttttctctttccactttctccctcagatactttatctattctactttttttttctttttttgagagttagcctcactctgttgccaggctggaatgcagtggcatgatctcagctcactgcaacctctgcctctgggattcaagtgattctcctgcctcaccctcccaagtagctgggactacaggcactcgccaccacgcccagctaatttttgtgtttttagtagagatggggtttcaccatgctggccaggattgtctcaatctcttgcccttgtgatctgctcaccttggcctcccaaagtgctgtgattacaggcgtgagccacccaccatgcccggccctactgtcttataatcacctctatagtgttgactgccaatccaatctacagaatctgtctgtcataataaatcagaattc

SEQ ID NO: 204813 - DNA, 1000 bp, Homo Sapiens
cgcagcctgagggtctgccctgactcatgagcagggcccatgctttgctgggtggacagacttggatagaacaaaatcaaagggctggtgaaagggggtttgggaagaaggcctgtgaatggacctcacagaaagagcccagaatgcaagaatatttgtgtctagtgtagccattcaaccagcaggccctctccctggaggatgctcgtgacgatggagggtgaggcgaacctgttctgtggatgtcattgttttctcactgatattccatgaacaaagaggttgtggtggctagagcagaggctgcacatggccttgccagcatggacctcctctttctgagtcaggcccagttggagccactgctgaagacacagaagctaccacaacagtccaccacctggggaagggttgtttccactactgtctgccaacatggagggagcagaaacgcattctctttagaaggcagtttcatatttctaggtttggatttgcgttctctgacccgatactgccaccaccaccatctatagacatcctggatgtctcatacactatcacagtgccccacactgagttaccacttctgacaaagggtctcactgtacagtgaaagacgggtaatgatacccagcgtgtgacgagtcctgcaagtgttaacccatcttcacagcaaacacatagatctaggcactattattagctccattttacagataaggaaactaagtcacagagaggtttcataaattgcctgaagtcaactgtgagtagtgaggtccgtatttgaacccagacactatggctcagagtccatgctgtgaacccatgggagtcatggatcttaccatgtacctcatccctcagaagcagctggccttagggaagactcagttatggcaaaaccttctgaggttggagtgctggccacagaatgcagtttatgccctgaacctgcaaccattctgcagcagcgtttctgtctcagctggaattc

SEQ ID NO: 204814 - DNA, 1000 bp, Homo Sapiens
atcgaagcagcagtgttacagctgtgtggctgctcctacagagcccggccgccctgtagacagagagcagcagctcagggcagttttgcagtcatatttatactcacttttaactgcatgcagattaagggctggtttatgcagggaagggataataactttgggatcattggatgctatggaaaggggagataatgcccaggtgttgccatggcaacagtacgttgacatagcacactggtgggcaggtctgattgaaagttgctttcaccctgtccctattttagctagtcctcagtctggtccggtgtctgagccccacctctggagtcgagtgccacctcctacctcacacctgtggtcatctccccagcagcctgatgtgtggttcagaaggtgggcacagagctggtgctttggcctttgcctgctctgggctagacctctcttcctttcaagaccccatgggactgccgtgggcccctcagaggccagggaggccacggagctccaagccccgggcttagcctgggcattctttcattccattctctgaattagctgtggtttggtccaaagcctcagctcattgacaaccaaagaagttgaaagaaggagaataataataaaaacagtggatttgagcctttttaaacatggaagggggttaaaatattgaagtggaaagagaaaaaatgccgtggaatctctttataactgtgagaagcagatctctttcagacctcactcaatagacttttttaacccttcattttgaaattagagattcacaggaagttccaaaaatagtaggtagagatcacacctaccttccacccagtttcctccagtggttacttactatgtgtgactataacaatatcaaaaccaggaaattgacataagtgctgtgtgtgtgtgtgtgtgtgtgtgtgtgtgtgtgtgtcagagaaagagagagagaggacaatgtgtgtagttctgtatcattttatagatc

SEQ ID NO: 204815 - DNA, 1000 bp, Homo Sapiens
cccaggcctaattcccagtctttctcctagggttgagctcctgccctttttcccctaaggccaaacacctgtctctgatgtctgattcctcttctcccagaattcttcattttggccaagaccttcttccccagtcaaattcccagagactcatatctggaggacagaaaggcacgaccttagctcttcctcagaatgaggaatagaaaacagtggggggccagctcactttttaataagacactagtatttcagcattctatgaagtcaacacccaaggaatgtccctgtcatctgttctcaccttgcaattgctggtcctgttgtcttccccagccctctccacacctcacttcaccagccaagccattgttggctcctaagcatttcagttcctgatggaggagtaagacaggtagtcaggtaaagctggagtgaggacaaatgggactggggtggcggaatccctggcagaaagtcaaggacgtgaacatacaaggaaaaataggccacagccagagcactgaaggccacaaatgtgaacccctagctaggatatgtcattttatgccaggcaaaatcaggacaacaaagggttctcaagcataggtgcgacccaaccaacccttcaccagccaggaacattttctggtgttaatgccatcttagaaaatgctgtgaaaagctccttgcactgagctagtttctcatcccctgatgtttacacctctcaaaggtgcatggagccccacaatgtgtcactctctgatttgtcacctggagaacacagcgcagacatgtttggctgctttaatatttctctataaatcaatcctctttccccttaatcatgtgggttgttcttctctgaacttgctccaatttgtctacatcttgctgggactgagttgtctaaaagtgaacacacccttcaaatgcgggaactctccctgcagcccctggcagctcctggcgactcacttcaccgcccggagaattc

SEQ ID NO: 204816 - DNA, 1000 bp, Homo Sapiens
cagctacttgggtggctgaggcaagagtatcgcttaagctcaggagttcaagactgcagtgagctatgtttgtgccactacattccaacataggcagctgagcgagatcctgtctcttaaatcctgtctcttaaaaaaaaaaaaaagaaaaaaactctttcacctacactccaaatctaatacaggcatatgccacataacatcttggtcaacactggaccacatatacaatggtggtcacttaagattataatacttgccaggcgcggtggctcatgcctgggaggctggagcgggtgaatcacttgaggccaggggttcaagaccagcctggccaacatggcaaaactccgtctctactaaaaatgcaaaaaattagctgggtgtggtggcatgcacctgtagtcccacctacttgggaggctgaggcaggagaatagcttaaactcgggaggcagaggttgcagtgagtagagatcgtgccactacagtctagcctgggcaacacagggacactctgtcacacacacaaaaaagattgtaatactgtatgttctaactgttctatatatttaaaaaattataatttactgtaccccttttatgtttagatacacacatactcaccattatagttgcctatagtgttcagtacagaaacatgctgaacaagtttgcagcccaggagcaacaggctatattaaacagcctaggtgtatagtagactacactatctaggtttgcataagtatactctgtgaagttcacacaacaaaatcacctaatgttgcatttcttagaccatgtccctgtcattaagtgaagcatgtctgaattaccagaagagttttattaaaatttgtcagcatgactttcttgattttaagaaatggccttgatgatcctgaagtttctatcgtttttgctttatgtttctctttagtgtggcagggaaaggcaagaacagagtaaaaagttggcaagggagtcacacataaaa

SEQ ID NO: 204817 - DNA, 1000 bp, Homo Sapiens
agtacaaaagttagccaggcatggtggcgcatggctgtagtcctagctactgaagaggctgaggcaggagaatcacttgaacccgggaagcagaggttgcagtgagccaagatcgtgcctccatactccagcctgggtgacagagcaagactctgtctcaggggggtggtggggggaagggatcatttgtaatgtagcatttcacaagatgcatttttttttaaccttaatatactgtggactaatttccatattgtagatactcctctgatttcttaaaatacctgtattctgttgctttataccgtgatttatttaaacacttctccattgttaatggagtttttgccatttcacacagtgctacgttgaacattgttgtacttatttctttttgcaattgtgctagattcctaaaagtggaactgaggattgtgtggttatagggtatgcacatttaaaggctggagtagatagtgccacgttgttctccggtatggttgtatcagtttacattcgcatcaataggatctgcaggccgggtccactggctcacgcctgtaatcccagtactttgggagactgaggtgggcagatcgcttgagcccaggagttcgagaccagcctgggcaacagagcgagtctctgtatctttgagacagagtctcgatctgttgcccaggctggagtgcagtggcacaatctcaattcactgcagtctctgcctcctgggtttaaacaattctcgggcctcagccccatgagtagctgggattaccaacgtttgccaccacacctagctaatttttttgtgtttttaatagagacaaggttttgccatgttggtcaggctggtctcaaactcctgtcctcaatgatccatccatcttagcctctcaaagtgctgggattacagatgtgagccaccacacccagcccaatttttaaattttttatagagacagggtcttgctatgttccccaggctggtcttgaattc

SEQ ID NO: 204818 - DNA, 1000 bp, Homo Sapiens
agctcccattttaaaggagggcaaagctgggcacggtgactcacgcctgtagtcccagcctttaatcccagcactctggggggcctcagcaggaggatcactaagctcaggagtttgagaccagcgtgggcaaaatagtgagaccctgtctctacaacaaataagataattagctaggtgtgggagcatgcaccctgtagtcccagctacttgggaggctgaggcatgaggattgcttgagcccagcaggtcgggctgcagtgaaccatgatcatgcccctgcattccagcctaggtgacggagcgagaccctgtctaaatatatatatgtatatatcccacagttctggaggctgggaagtccaagatcaaggcaccagcaaagtcggtgtctggtgagggctggctctgtttccagctgtgccttcacatggtgggagcgcagaacaagtgccctcaggcctcttttataagggcactgatcctgttcatgagagctctgtcctcatgacctaatcaccttccagatgacccacctaccagcaccactgtactgtgggttccctttcaacatatgcattctgagggacacaagcattcagaccagagcaacatgtaaaatggaataggctccagacctgaaagaatacaaacaggcttttcacccacataataagcatgtggcaagatagtcaaaggtggttagaatcgagaacaatctggtttttgtgcagcattgtctgccactattggacctcatgtgatatctcccaattcattgtcgacaaccaaaaataccctatgaatttccaaactactccctgctgagtaaacatccaaagtgaaaactactggatcattgaaaagatttaactactcttttcaaagattccagacccactttctttcttttttatctttttcttagagaagggggtctcactctatgcccaggttggagtgcagtggtgtgattatggctcactgcagctttgaattc

SEQ ID NO: 204819 - DNA, 1000 bp, Homo Sapiens
tataaaagaaaaacagcattaaatcaggtgtgataaaatcacctttttctgtttatctccaccactggcatttattggcacttggaaactatttataaactcatactcttgtaacagtcttgtaactgaaacccactggattcaaaatctattcctagtacttaactttcttctgaaaattccctcatctataaatttgaggatgatgataattgcaaagatgccagggaaatttataatcattattgaactaatccttttgaaaatataaagcagcattaaatgttacgattactaatctttttaattaaagtggcaaatgtgtccaaaaatctgtaactaagttcattactctcatttatgcagctaaacttaagttctaccaaatgtatttttaagttgattaaaaatatggttggcagcatttataaatacccattattaacatgctatactggtaaatatatttctgctcttatgactagagagtgttgtactttagtaaaaaacttatacctcaataattatctgctctcctatttttattttatttgcaatagatatgtatttattcatgcatttgtattcttattgaatgaaggatgttatgtcacttgcattgagtacataggcatccctttcgacaaataaaatcagaatctaaactacagaaccaggttcaagtggggacagaagtacaattttaataaaggtcaaagttttgctagtgtttcacttaaaatttatttttaggctttctgaatgttctcttaaagaaaaagacttaatcatatacgtaccttttttgtattgttaacaaggaagaaacatactaatatgaatggtactacatacattatacatgttatacaagagaagaaaattatatattcaagataaacatttttataatcacaatacttcaacataaatgtgttcaatatagtaaagatgcaggttgtataatttgtcaagcaaattctcaattatgtttgaattc

SEQ ID NO: 204820 - DNA, 1000 bp, Homo Sapiens
ttcctttagttctgtgagcatatttaagtcaattgttttaaagtgtttgtctattaaatttgatgtctggacttcctcaggaatagtttctgtcaatttagtttgtttctgtaaatgggccataatttcctatttctttgtatgttttgtgatattttttgttgaaagctatatgtttgaatatcataaaatgttaagggggtacattaaattctcctttttcctctgagttcgctgtttatttaatttatgtgaaggctatagtagtccatttgtttagtgactttcccaaagtacttttaggaagaccgtttttttgtgtgtgtagtcattgatatttctgtttttcagtttgtgctcagctagtgttttgataggatttccttgaatgtcaggaactaaaaaaaaaaaaaaaatcaatcaaacaaacaaaaattacctcccccacctcatccttgcagaatcattttgttctagggcattttttttcaacacctaactaggcttgcactaagcataggactcagccagtggtgaaacattagagttttcacatgttgtttttctgaggatgtgtcttgtgtggagcatgcacatggctttctaaatctccccatatatgtggcttcttttgaatgtccgaatttctcaaataaactctccccagctcttgctctcagtccttaggtggtctgttttgttttgatcataatcttttcccctgagatctgcatattgctcattttttcttgcattgattttgagcttgccattttatagcctcagttctgagtgaagtgaaacacagatgaatactttatgtcagtcttttagccccaaggcaggttagaacatacatacacaacaatatgcaaataaggtctgctctgtttcctccaggatcaggaacaagtttcccgcaggagaatgtggactttcctattcaagaccatgactgcactggagaggaggtggggcaagagcaagtaaatatgccata

SEQ ID NO: 204821 - DNA, 1000 bp, Homo Sapiens
tataaaacataactcaagatggatcatagatctaaatgtaaaactacaaaacctttagaaggaaacaaaggagaaaatttttgtgactttagctaggcaaagatttcttagatgtgacatcgaaagcacaatccagaaaagaatactacgataaatttgacttcaaacttgaaaacgtctgctctttgaaagatattcttaaaagaatatcttaagtactgggccaggtgcagtagctcacacctgtaatcccaacactttgggaagccgaggtgggcagatcacttgaggtcaggagttcgagaccggcctggccaacatggtgaaaccccgtctctactaaaaatacaaaaattagccaggcgtggtggcacaaccctgtaatcccagctactggggaggctgaggcaggagaatagcttgaacccgggtggtgtaggttgcagtgagcaaagatagcaccactgcactccagcctgggcgacagaggaagacttcacttcaaaaaaaaaaaaaagaaaaagaaaaaaagaaagaaagaagaaagaaaggagaagaaagagagaaagaaagaagaaagagagagaggaagaaagaaagagagagagaaagaaagaaaaaaaagagagagaaagaaaaataagctgaggactttgagaaagcatttgcaaattatacatttgataaaggacttacagctggaatataagaattctccagattgaatcataggaaaacaaacagtgtttaaatatgggcaaaggagtttaatagacacttcactaaaaaagacatacagatagtgaattatcacatggaaaaggaaatgaaaattaaaaccataatgagataccaccacacacctattaaaatgtggtcagagggagatatgacaatggaagtctggtcagagagatgcagtactggtggtcaagaagataggggacaggggccatgatccaagtgatgtaggcagcctctaaaaaaaggaaatgaattc

SEQ ID NO: 204822 - DNA, 1000 bp, Homo Sapiens
aggtagaataaattaaataacatgacccaactatatgctgtctgtaagaaactcactacaaatataataatataggtagtaaaaaatacagatttatacacacaactatgtaatataaaaaataataaaaagggtatctgacaaagtaaactttggaagaaagaaaattatcagagtgtttgctttggcagcacatacacaaaaagtggaaaattatcagagacagagaagaacattatgaaacgctaaaagggtcaattcatcaagaaaacttagtaatcctaaatatgaactaaacaaaaaagctaaatttgagatgcaaccactgataaaactgaaagaaatagacaaacccacaattacagttggaaacttcattatccttcaacaactgatagaagaactagacagaaaatcaccaagacagaagaacccaaaaacaccatcaaccaaaaagacttgacatttatagaacactccaccaaacagcagcagaatacacattttttaagtgcccatataagatattccaaaatagactaccgtattagccataaaccaaactacaacaaatttaaagtccccaaacacctgaaaagtaaacaatacacttctaaataatccataggtcaaagggaaagtgtaagctgggcatagtggtgtgtttttgtagtcccaactacccaggaggctgaagcaaaagaatccattgagcccaggagttcaaggccaaccagagcaaaataatgacaccctatttcttaaaacaaaacaaaaatgaactaaatacaaatgaaaacacaacacatcaaaatttgtgagacacaactaaagtagtgttgagagggcaattcattgcactaaatgaacattcaagaaaagagaaaaagtttcaaattaataatttaagctcttacctccaaatcaagaaaaagaacaaaataaaccaaacgtcagcagaaggcaggaaataataggagaaatcaatcaatggaactga

SEQ ID NO: 204823 - DNA, 1000 bp, Homo Sapiens
tgctccttccagacattttttttttttttttttttgagacagggtctctgtcacccaggctggagtatggtggtgtgatcgcagctcactgcagcttccaactcctggattcaagtgatcctcccacctcagctttctgcatagctaggactacaggcacatgccaccatgcttggctaattctttttgtttgagacagagtcttgctccagcccaggctggagtgcagtggcgcaatttcctctcactgcaagctccgcctcctgagttcacaccattctcctgcctcagcctcctgagtagctgggactgcaggtggccaccaccacgcctggctaattttttgaatttttagtagagacggggtttcaccaggttagccaggatggtctcgatctcctgacctcgtgatctgcccacctcagcctcccaaagtgctgggattacaggcgtgagccaccgtgcccagctgtgcttagctaattctttatctttttagttgagtctgggtcttgctatgttggccgggctgctcttgaatttcctggcctcaagtgattgtcctgcctcagcgtcccagagtgctaggagcataggcacctggcctttctgttgattagcagggagtatgacaggttgtctgaaatgcttttgtttatcctgctgcccaggtagcttgtcatctgatgaaggtgttatagtgtggggccatagatgatacacgtcatcagacctagagttcagtgtgatgcaaagggcctgtctgcagttcttttttttgagatggagtctcgctctgtcgtccaggctggagtgcagtggtgcgatctcagctcattgcaagctccacctcccgggttcatgccattctcctgcctcagcctcctgagtagctgggactacaggtggccgccaccacgcctggctaattttttgtatttttagtagatatggtgtttcaccgtgttagccaggatggtctcaatctggcttcgtgatc

SEQ ID NO: 204824 - DNA, 1000 bp, Homo Sapiens
ttaaatgtattttttggaaatacttacaatcttacagaaaaattagaagtataattcaagaacacttgagagtaatttactggtttttgtagtcccatcgcccaccaaatactttccctacaaacaaggatatttgtctgtataagcaaaattaagccatctataccaggaaattaatgtcgattcattactgccatctacttagcagactctattgagtgttttcagttatctccttcacagcaaaaagatatagttcaaactcagatatagtcagccctccatatacatgggttctggatctatggattcaaccaactgtggattgaaaatgtttgggggaaaaaacattgttgaaagttccaaaaagcaaaacttgaatttgccacatgctgagtactgtgttgaatccacacgaatgaagctatgtgtaagcattgtattaggtgttacctaatacaatgtacagttaggcaccagataatgacgtttcagtcagtgatagaccacatatacaatggtggttctataaaattataataccatatttttactgtaccctttctatgtttaaatacacaaataccattgtgttataattgcctacagtattcagtacagtaacatgcttgtatgggtttatagcctaggagcaataggctataccatatataacctagatatgttgtaggctgtatcatccagatttgttgtaaacacaccctatgatgttcacacaatgatgaaatcacttaatgatgcatttctcagaacatatgcaacacgtgactgtaatctggagataatttatacaggaagatgtgcatcggttgtatacaaattccacatcattttatataaggtatttgagcatccctggattttggtgttgggagggtggatcctgaaaccatccctgcacccccaccccccatggataccggggaataactgtattgcatttagttaatgtatctctttagtttccttctgaaacagt

SEQ ID NO: 204825 - DNA, 1000 bp, Homo Sapiens
actaccctcattagctgtattcctaggtattttattctctttgtcacaattgtgaatgggagttcattcacgattttgatttctgcttgtctgttgttggtgtataggaatgcttgtgatttctgcacattgattttatatcctgagactttgctaaagttgcatatcagcttaagaaccttttgggctgagatgatggggttttctagatacaggatcatgtcattggcaaacaaagacaatttgacttcctctcttcctatttgaaatttcctttatttatttctcttgcctaattgcactggccagaacttccagcacttggttgaaaaggagtggtgagagagggcatccttgtcttgtgccacttttcaaagggaatgcctccagcttttgcccatttagtatgatattggctgtgggcttgtcataaatggttcttattattttgaggtatgtttcttcaatatctagtttattgagagtttttaacatgaaggtatgttgaattttactgaaggccttttctgaatctattggaataatcatatggtttttgtctttagttctgtttatgtgatgaattacatttattgatttgcatatattgaaccagccttgcattctggggataaaaccgacctgatcatggtggataaactttttgatgtgttgctggattttgtttgccagtattttattgaggatttttgcacagatgttcatcaaggatattggcctaaagttttctttttttgttatatctctgccaggttttggaatcaggatgatgctggcctcataaaatgagttagaggggagtccctccttcacaattgtttggaatagtttcagaagaaatggtaccagctcctcgttgtacctctggtagaattcagctgtaactccatctggagctgggcttttttttttttttggctggtaggctatttattactgccttaatttcacaacttgttattggtctgttcaggaattc

SEQ ID NO: 204826 - DNA, 1000 bp, Homo Sapiens
aacaacttcctccatgaggctgtcactcagggcagctcctgggtaagacctgggaaccatgctgttaagctgtgctgagatggagttagaggaaatgtggaggagggctttccagaaggcaggagcctggaagagggacttgagggtcttgaagaaaaggcatgtgggcaggagtgtcaggaggggcatgaggtaatgttcccagagtgctctgagccctctggttaaaggacatttaaccacagattattatactacctattatttgtgtctgtaataactgctatgacaatggatgctgcaaaggtcagccctggggcttctgttgtctgatgcacttagtaagggttgggggtggaaaagagttgatgaggcttgctattgatctaaacacttttcagctggccaaggccaaggtgtgggggggggcctatgagaaactccagatgaaactgatctcctctgggactcaggcaaggatggcagctgaaatttaacttgaatatgtgcagggtaagtcccatggtgtaaaagctcatctcagcatctttttgagtgcaggactctccaccctgagaggctggaccagccacagagagtaggcactcactcagttcagggcagaggcctgccttggtcaccaagcatgcagcatgccaggtggagtggggccctgggctctgggctcctgaacagttactaggccccacaggagtttggactgccctttcctgtctagagtcatctcagatctcactgagcattgcttggtaggactgtagcaattccaccccttcaccttacatgaagagagggaggatcttggaggagaaaagtctcaaaaaaaaaaattaataataataaagagtttgagaccagtctggccaacatggtgaaaccctgtctctactaaaaacacacaaaaaattagctgggcatgttggtacatgtctgtaatcccagctactcagaggctgaggcaggagaatcgcttgaattc

SEQ ID NO: 204827 - DNA, 1000 bp, Homo Sapiens
ataaataaataaataaataaataaataaataaataaaagaactaaagggaatactcccaaatgattctaaagtcagacagaaatacaagaaaagggccaggcgctgtggctcacgcctataatcctagcactttgggaggccgaggtgggcagatcacaaggtcaggagatcgagaccatcctggctaacatggtgaaaccccgtctctaataaaaatacaaaaaaattagccaggcgtggtggcgggcgcctgtagtcccagctacttgggaggccgaggcaggagaatggcgtgaacccaggaggtggagcttgcagtgagccgacattgcgccactgcactccagcctgggtgacagagcgagactctgtcaaaaaaaaaaaagaagaaaagaaaactacaagccagtatcactaatgatcataggtataaagattctcaataaaatagtagctaacccaattcagtaacatatcaaaaagatcatacatcatgaccaagtgggatttatccctgggatgcaagtatggcttaacaaatccaaatcaattattatgatacattacattagcaaaaggaataatttaaaaaccacacggttatttcaatagatgtggaaaaagctttcacaaagttcaacatcctttcaggataaaatatcttcacaaattaggtattaatattaaaaatttcctcagcataagaaaggccatttatgagatgcccacaggtaacatcataatcaatggtgaaaaatggaaagcttttcctctaagatctggtataagacaaggatgcccacccttgccaattttattcaaaatagtactagaaatactaaccatggcaatcagataagaaaaataaataaaatgcatccaaattggatcagaagtaaactagccctatttggagataagatgattatatatgtagaaagcccaaaagactccctccaaaaattaaaaagaaaaaaacctgttagaaaaagtgaattc

SEQ ID NO: 204828 - DNA, 1000 bp, Homo Sapiens
aactttacatggaaaaaggaactttgcagatgtaattgtggttcaggccttaagatagattttcctggattatctgggtgagcccaatatcaagcccttagaagccgagaaattggctgctttggctgaaagcagaagagggagaaagagccaaagcacaaaaagggctcaaagtgctgttgctggcttgaggatgtaaggggccatgtaggaagtgtgagaaggaactggatactaccagtaacttgagtgggcctggatgcagattttctcccagagcctccatataggagcacaagctggcagacaccataatctgggccttgtgagaccctgagcagagagtgcagccacactgtgctggacttctgacctacagaagtgtgatataatatgtttgtgttattttaaactacatttaacatgttttacctgtttcttttggtatataaccctttacttttgaataataccctaatattgcaatttctttagatttagaaatgatctttcttctgtagaagatgaggaattagcttgcttttatgcctctcaacacgcacttgtgcacacatactcacacttctcttccaaaaatataaatattttcgttaaaatagtcaatatttgcattatacttatataaatattgcttgtggttaacttatgcactgtaccattaattatatttttttgtttttttccccatattgtctcccctttatttttttatgtacctgtcatgagttcaatcccaaacttttccccatattgtctccctttctttgatttatttttgtatgtacctgtcatgagttcaatcccaaacttttctgaagaaccataacacttcactcaatatgatcaaacatgttaggtaatccatgagtttcatgaatttttggggggagacagccctctttagagtttgctgccctcctgatccatcctgaaatggttgttctctaggccgagcacctagctgccatcctgggaattc

SEQ ID NO: 204829 - DNA, 1000 bp, Homo Sapiens
aaatgattttatttcatatatgtgaaatatccagatcaggcaaatcaatagagacaaaaaatatcttggtggttgcctggggctggcagggagggagaatttgggggaatgaagagtaactgctaatggatatgggatttatttctagagggaacaatattctaaaaataattgtagtgtgctatgttttggatgtgttttctccctgccataactcatgttgaaatttaatgccattgtaaccatgttgagaggtggggcctttaagtggtgattaggtcattaagatggattaccctctttctcaggagactgggttagtcctcatgaaactgaatcagttcctgcaaaaacaggttgtgttataaaacgggtcagcctcctttgtctcctctctcttagcacataaccaattccccttccacttttctgctaaactatgaagcagcacaaggctctcaccagatgcagccacctgatcttgaattttccagcctccagaactgtgagctaagtaaatttcttgtcttgataatgtactcagtctcaggtattttgttatagcaacagaaataaactaaggcagggtgaatgttgcataaccctgttatactaaaaacatcgaattttacactttaaatgagtgaattatatggtatctgtatgatttcttactaaagctgttaaaaataaatgtgggtaagtgcaataaattccctttttccttgtgagtttatagtttataaattatagttgatgattgaaacaaaaaatagcattatctgatgttaaaggcaatagtatttaaaaagtgggaaaggtaaagggaccttaatgtaagtatggtttccccactatactaaaagtggtaaaatgttgaaaccaggagactgtgataagtcacatatgtgtattgtaatacctacagcaacctctatgaaaactatacaaaatatgcactcaaaaacaaaaacactataaatgactcaagatagaattc

SEQ ID NO: 204830 - DNA, 1000 bp, Homo Sapiens
acgttatatggaaatggaattttattctgtgaatgttttatttcagatagacttgcaaagcccttctatacatagacactgtttttagtttttttgtcaccccaaacctcaaaaatgcatctcagcttgaaagactttctagacttttcctgagtccaaagtcatcctgctgatatcacggtttaggttctgaaaggttttatatcgagtgtttttttcttctttcctaagaaggaaaggatcagaaaggaacttgtaaccattgttgagcattttaggaaaagtgaaaaccgacttcatccgtttcatttgtaaggagaagcatgttagatgtgagtatatttggaaacgtccaaaatttaaccatgacaagagacagcagtgtgatggcaaatttcaggccaaagtctggaatttctttgctttcttcccattttatcttgtcttctcatttcttttacttttctacttctcttctctcactatttctttgctttctaacgtttcccatcaattttgagccattttctttattccatctacatatgaactcacagcagtagcaaaaatactgagctctcagaaatatatttatccatgtatctaaggactctggaaaacagattcaaagatgtgaagcctcagtagtgaaactgactcgaggaggaaagacgtttatgtgcggcagatcttctcggggtttgcctatttgtaaaatgtattcagtattcatggaacagatatgatgggtgctcactctacaccaggtaccatggtcaaacagagagggctaacctatgttgcctccattctgagaatctctgcgatgacacaggaggggacagaaacaaggatagaagcttgtagttgcaatatagtgtcgtgatgaccttcacgaaggcacgaaccatgtgttgtgctcgtatagtcgtgttacaggaaaggggtcctgatccagaccccaagagagggttcttggatctcacacaagaaagaattc

SEQ ID NO: 204831 - DNA, 1000 bp, Homo Sapiens
agaaatagtatgagatcccacaggttgagtgttcagtccccaagactgctccctcctttcccccagtaacaagtctgagcctcctgaacttctggctgaccaacttcaagttggggttcccactatcccttctttgagttcgattaatttgctacagagagacttacagaactcagagaaatagttatatttactggtttactaagaaggatattttaaagaatacaaataaacagccagaagaagagatacacagggcgaggtctggaagggtcccaagcgcaggagcttctctccacgtggagttggggtgcaccaccctcccggcatgaggatgagttcttctttaccttcctcctgtcagcctccatgcattcagctatcagaagctccctgaacccagttatcttgggtttttatggaagcttcatgatgtcagcattccttcccctaagggtatgaggtaagaccctttctagggagggttttaagaccgactatcagaaagctactctggaggatgaggcaggagaatcacttgaacctgggaggtggtggttgcagtgagccgagactgcaccattgcactccagcctgggcgagctgagatttaaccattgcactccaacctgggtgagctgagatttcaccactgcactcaagcctgggtgacaagagcgaaactctgtcaaaaagaaagaaggaaggggaggggagggggagggggaaggaaggggaaggggagggaaaggggagagaagggaagggaagaaaagactgtaacaaaggactatgggagttgtgaactaggaacccagaaaaatatttatatatatatatatatatatatatatatatatggaattcaggattaaacatcttaaacaattcttaaacaaaagcctatgattctaatgtcagtgacttttcattccatggaagcaggtcaaagtgcagcctaatttatgcataattttaactatatttctgtccagaattc

SEQ ID NO: 204832 - DNA, 1000 bp, Homo Sapiens
gtattttcagtaaaagagaaatccacaatcaatttattgctattatatagcaataaataggtagcaaactaataaaaaggtagcaaactacctttttgttagaacacaatgtcccttcattcaagcctttctttttttttcagttttagtagtttctaagctattttgaatattttaataattttggagattcttccctcttcccaatctgtctttccatggcagattcattagatgtttttaattctggcttatcatttggcctaacctcttaattgacttctttgtatgcccacttttcaccttgatgtttattcagcatttatgttttcagtctatgcatttctcatgagaatagcttggtgagttttttattttcaaattcattgcccaaatcatctttaaacggaatatactgcctctttcatgacagttccgagctcactgagtggctgagcattgtgagagaggacaagggaataattgagattggtgttaattaaaagttgtggctttcatctagcacctcagatttttcttcactgcccctagcattcctcactttactcctttatcaactcttctgcaagtctgtcattccttttaatcactttggctatcagagttgctcaaacttcactcatttttgacaactttgagagttttcaggagtactggtcagatcacttacattgggatttatctgatttttcctaatgattcaacagaaaccgtgggtttctggggagaagagtgtagaaggaaaatgctcttctcatcacaacctttcaaaagtacatgctatcaaaataagacatcactattgttgttaatcttggtcacgtggtgttcattgggtttcttcattgtcaatgtactcatcttttcccctcttttccacactactcagaagtcactatgcacatcccacccatgaagggtggggagttatgccccaccttcttgaaggaagagtatctatataaattacttggaattc

SEQ ID NO: 204833 - DNA, 1000 bp, Homo Sapiens
ctgtcctgccagcagccacgcatcgtctgttcattggcctgatcagccatccattctcatccccaccatccatccagccatccttccctccatccatccatccacctcctctcacacccactgatccttccgtctatccaatcaccctgctgtctctccacccagcatttaaatgagcacctaatgtgtccccccagccctgcaaaatgtaggggaaaagttgatcagcaatcccaacagccagcccctcagtcactatctcccattgtacattttattcaggagcctttgagaagtccccacatccaacaccaccgttctaaaggatatcagagaattgcacaagtgacatctctaaggaggacaacaggcacaaactctccgacttgacaatcctcactctcccactgccacagccctgtgtgacggtgtgacaaacactggacctaaacaatggacctaagagtaagacccaccttgatctgatcaagggttccagattcttttggtctcctgctcaagtctgccagaccggtcccccggtccctcctgagcacaggtgactgccagccccagccataaccaccctctccctgagccccaagactacctggtgcacagtctgtttcctcaaagagcaggtacagtctgattagtaaagaaggatgtttgaggcagggcgtggtggctcacacctgtaatcccagcactttggaaggccgaagcgggcggatcacttgaggtcaggagtttgaaaccagcctggccaacatggtgaaaccccatctctactaaaaatacaaaaaaattagccaggtctgctggcacacgcctgtaatcccagctgttcaggaggctgaggtagaattacgtgaacccgggaggtgaaggtgaagatcacaccagtgcactccagcctgggcgacagagtgagactctgtctcaaaataaataaataaataaatagataaataaaaataaaagaaggatgtttgaattc

SEQ ID NO: 204834 - DNA, 1000 bp, Homo Sapiens
tttctcaagctcaaatgaagaactcagaaaaataaaccacattctgggttataaaacacaactcaaaacatttaaaataatagtaatcacataaagcatgttcttagacaacaatgaaactaaattagaaatcaataatataaaatatatttagaaatcaaacagcacacttctaaatggcacatggttcaaatgaaaagtctcaggaaacattttagaatattttgaaataaattatactgaaaatatatcaacaaaatgagtggggtgcaatgaaagtagtgtttggaggaagagttatagtattaaatatatatatcagagaacaagaaagaactaaaaccaataatataaaccccactttaggaaactaagaaaaacaatgtaagcctaaagcaaacagaagaaaataaataataaaatcaaataaacaaaattgaaaacaatgggaaaatcaaagaaactaaatgttagttatttgaaaaaaatcaatgaaaatataaagctctatccaatctaacaacaacaaaaagacagaaatcacatagcggggttatcactactgagtccatggatattaaaatgttaagaaaataataccataaacaactctatgcccataaattagataacttggataaaatggacaaactctttgaaagacacaaactacaaaaatttataaaattatatgtagataacttgcacatccctaaatctattaaaatgaaacagtaatttaaaactttccaatacacaaagcaccaggttcagaggttttcacttagcctttcaagagcatttaacgaagtccagaaaatagacatagtgggaacatttcataacacatagtaagaggcctgcattatcctaaaattaaaatcagatgaaggcattacaagaaaggagatctaccgactaatatctttcatgagcatcaatgtaaaaatcttctacaaaacatcgggaaattatatgcagcaatgtataaaaagaattc

SEQ ID NO: 204835 - DNA, 1000 bp, Homo Sapiens
aacagggtctttccatctatgtggtaccagctagtatcatcaattcagcataaagggctccaagtgaagataatcctagcaatccagaagtggccagcatccactgggcacctcctatgggccagccctggctcagggtacagcatgcgtaatctcacataatgttttcaactaccataagaggtggggatgtcaccagtccccatgtccagggtagggcttagaggcacgatgggtccagggaccaggtgggaaagactcagccaggactccaactgagatactccaagtccaagtccacattttcaaaccctatgtcctcctgcctccaaggctggcagggtgaccttcgagagtgacttgcccggtcatctttcagcgtggacagctcctctgggtgtttaaatgctgctctgcatgttttctgtgcaaccacatggctggttcatgggtccgtgtgggaggcggccccagtgcgtcctgctcctccttggccccactgctggtgcccgcacaatgctgctgctgccctcaacttatttatttatttatttatttatttatttatttatttatttatttattttttgagacgacaccttgctgtgtagtccaggctggagtgcagtggcgcgatctcggctcaccgcaacctccacctccccggttccagcaattctcctgcctcagcctcccgagtagctgggattactggcgcacgccactgcacccggctaattttttgtatttttagtagagacgaagtttcaccatgttggccaggctgctcttgaactcctgacgtcaggtaatccactcacctcagcctcccaaagtgctaggattacaggcttgatccaccgtgcctggcctcagcttttattttatgttcaggggtacatgtgcaggatgtggatgtgcaggtttgttacataggtaaacgtgtgccttggcggtttgctgcacagagcattccattacctaggtattaagcacagtg

SEQ ID NO: 204836 - DNA, 1000 bp, Homo Sapiens
acataaatgtcatttttcaaattatagaatgtatgtactaaaatatcacataaatttgaaacacaatactacatgttaaatatatttaaatatttgtaggaagaatataagtgcatgaagctaaaaagtaacttctacataagaaaataggatctgagaggatgacaaaagggactccaaccgtatgcatattttaatttttaaaaacaaatataggccaggcacagtggctcacccctgtaatcccagcactctggggggccaagacgggcagatcccgtgaggtcagttcgagacaagcctggacaacacagtgaaactaaaaatataaaaattagccgggagtggtgatgagctcatgtaattccagctactcaaaaggccgaggcatgagaatcgcttgaacctgggaggtggaggatgcagtgcgcagatattttgccactgcacaccagcctgggcaacagagtgagaccccatgtcaaaaataaataaataaataaaaacatatataaacacatctttgaagcaaatctgacaagatgtcagcatctattaaatctactgaatggggcgggcgcagtggctcatgcctgtaataccagcacttagggagaccaaggcaggcagatcacgaggtcaagagatggagaccatcctggccaacatggtgaaaccccgtctctactaaaaatacaaaaattagctggtcgtggtgatgtgtgcctgtagtcccagctactcgggaggctgaggcaagagaatcgcttgaacccaggaggcagaggttacggtgagccaagattgcaccactgcactccagcctgggcaacagagtgagactccatcttaaaaaaaaaaaaaaaaagaaaagaaaagaaaagaaaaagaaaaaaaatctactagtacatggtgtttgttaaattattctccattatttttctaaatttttgaaatatttaaattttactttaaaaaataagctgaggttgtggaattc

SEQ ID NO: 204837 - DNA, 1000 bp, Homo Sapiens
actattaacctctgcttgaaagcagctgtagaaaatatgtaaatgaatgggtgtggctgtgttccaataaaactttatttacaaaaatgaggttggggtacaggggagcatagtttgcagtatagatcactgagaaaaaaggattctctgaggcattttgttggtgtgactctaatgctgatgcagaaagagctctaaatctgagtaacaagtattggtaaattattcaacagatacactccttacaagatgaaaaataacattgttaaccagtgttcatttatagatctacaaacatcaggaatggaagtttatttgtcaggcacatatttctctgttatattccctgtaatatatactctggaagaagaaaaaaaagggatgaatagcctatatttcacataaaatgttactctttaatcttatcttgcagtgtcaaatttaaacaatatatatagatgtgtgttatgattcctggagtcaaggtgaattgtattcctgttccttcatagcaactagctattatcagggctgatgtttcttggggctggcctcactaatggaactcagatgatttactcagataagaaattctttggagaaaactcactgtaagcaaaatacttgaagagatatgagaaagggcaataattaggccataaaaacagactttatcttttcaatggaaaaaaaaccctccaggatcccagcaatttactcatttcctaagtatctgaatgtattattccatagcataagtaaaaaggtattttgctctttgagaacaaattgccctgagttatcaaactttcaaagctggaaaagaatcagtcttagaaaagatccacgttattgtgtttgtgttttagtttgttctcaagatgaagatagactgttccgcaaagtctttacaaagaattatgtgaaataggtgggcgctgatagtttcttgggcaattggacatctgagccttagcgtttcatgcagggagcagaattc

SEQ ID NO: 204838 - DNA, 1000 bp, Homo Sapiens
gtgagttctggacttttgtgtatgtttgaaaaaatttcataagacatttggagaaagaatcagtaaccctatattaaaggatctatgccaacttcagtatataacttttcccttaagattgaaaataaaatatttaaagtattctatggactttacttttttctgctttacaaaaattatattgcttacactgaaaataattatataaactagatgaatgattagtattagattgctgttataacaatagactattcataatagatggtgaaataatacagatggaaattatctcaggatctttattctttattttattttattatttatttatttttgagacagagtctcgctctctcgcccaggctagagtgcagtggtgcattcttggctcactgcaactctgcctcccagtttcaagtgattctcctgcatcagcctcccgagtagctggtattacaggtgcacgccaccacgctgggctaattttttgtatttttagtagagataaggtttcaccatgttggctaggctggttcaggatctctattctttggatcaggttaaatatttaaatcagtttggcctttttgataatacacagatgaaatactgataactaatgttagaattaccattgagttaaacactattcagattatgtctgagattgtacataagtgaactgacaaaatgacaatgctaagtaatacccaaaataaaaacaaatactcccctttttagcagctttattgaagtataattgatatacagtaaattgcacatatttaaggtatagtgcagtttgacatttggcacatgaatatacctatgaaactatcaccaaaatgaaggtaataaacacatatatctccccaaaagtttccatatgcccctttggaattcttgcctcccaaccttccccatctcagtccctaagcaattactgatttactttcagttactgtaggttagttagttagttagtttgtttgtctgt

SEQ ID NO: 204839 - DNA, 1000 bp, Homo Sapiens
aaaaagtgaatgatcattaagttctatatcatgccagattcacttcagagctttgccaacctgcactcatatttcattttcatgtcattgtaatccacatgtgcatactgtcctccattcctgcttttgtgcttgacattatttcaaacacatctcatgcatccacgtcactcacatggtcatttcatttgcatttctctaattcctagcaaggttatgcattttacaagtggcacctgggacttgattttttatttaccagaacaaacactcttcctacttggaagagtatgttcttttattaggtctgtgtagcacgtatgtttccattgtgctgcttttgttcttctgtttggtgtacaacatttccttttgcaaattaaaaatcagaaagttctataaggaagtcagcactatccatctggcttccctcttgaacaacctgaataaataaataaatatatatttgtttctactattctatttttcgtacatttttattctggttttaaagttttatttttagtttttggatctgtgtgaaatgtattgccatattggttcaatatatagatataaagcaattcttcatagtcatattcaatggttatttattaaataaggatttcttagctcactagagatacattttaaacatgggttttcaaaaatatgaaccataattcatatcatagaaaatcagatttagtggtgagcttacatttattaatgtacttttgtgtttcagaattagagttgacacttttaaaaatcctaaactccagagggtcctgaaccctgagccttttcagaataaaatgtccttccttcatacaatattttaccagatatggtggctcattcctgtaatttcagcactttgggaggccgaggcaggaggatcacttgagcccaggagttcaagaccagccttggcaaaatagcaagaccccatctctaaaaaaaaaaaaaaaaaaaaaaaaaaaaaaatccaggcatg

SEQ ID NO: 204840 - DNA, 1000 bp, Homo Sapiens
acaacatactatagcaacaactctgaggatgtagtaggaatttgagctttgtcacctcttttagactcttcataaatgctaacaattattgtgatttttataaagataataattattgtcagtaagaaatcattactgatagcatctacttataaaatgtaattaattagtttaaaagtaaatattatgtaattagaatgattgcatactatcttatttataaaataagatagaaaatgtggagaacattacggatgtttttaaaatgtgagaaaatggcagatggcataaacatcagtaaaatccaaatgaaatatcaacctattcagaaaataaaacaattttgtaaggattttgtatttctcacttttctgttatgttacgccagcaatgacttggtttctggtgatgtcgaagatgattgcatgttagacaacgtaattctagcattaaaggtattactttgtgcatcgacaactgccaccatctttccagatttctcaaattgcatgagtagcttgcaagctgacataattatgctgctctcattagcaatttaagtacagctggaaaaagcttattaggatcttataccagtggttcccaatgagaatcctgcaatgtcctgcagtagctagggagccactatgccccagggatgttttgtcactgctcttgaaatgcattgtctctttctaagcattatacagcatggcctcatgggtacagctggggaatagatcaagatttacaaggtttattcctgcccctggagcagatttctgggaaaccaaaaaaggaacacataacagatatgtctgtatcagcaaaacttagtggagtaaaactttcctgtttagtaacatgaaaccattttataagggtttaaattttgcacttgcttattctcaatttttatccattttgtctatttccccacccatattttgttggcctccctctatcacccccaaagctctttttgttttgttttgaattc

SEQ ID NO: 204841 - DNA, 1000 bp, Homo Sapiens
acgacctactgattgagcagacagctgggtagtcattatgtctagggaggctggatcccaagtccaccaagctccacttagggtcaaataaagagagccaggggattggtttttagttgtgaattcacagaccatgtttttcagtaaaaaaaaaagtcactgtattaataattgcaaacatttaatgtgtattatgtgccaggcactgtactaagacctttttatgtgtaatcacgtttaaaactcacaatgacccaatgagtcaaacactactaaacagtattcctagcttataaatgagtaaagtgaggcaaggagaggttaagtaatttgttcatgtgcaccagatggaaagggagaattgacgctgggcatggcggctcacgcctgtaatcccagcactttgagaggattgcttgagcccaggtgttcgagaccagctgggcaacatatagcaagacctgtctctatttaaaataaaaaaaaaaattataaaaataaaaaaaagaaagggggagttgggatttaaatcctgacactgattgtagaactcaggctcttaacaagatgaccctgaccagatggtaagctccattcatgcagggaccttccccaagggcctagtgcactgcctggcacagagcagaagtgtagcaaatattaatggattcaaatgttcacacgctaacactgccagtaggttgaggaaaggatggtggcaacgtttcccagtgactgcaggcttgtgtcctcgctcagggcacactccccagaatccaagcctaaggtaaggaggccaaattagtgtcatgagaggccctgtgggaggggttggaaccagagggctgcagccacagaaggacctttctttaccctggtgggcctgatgtgcccacgggagcacaatcccttgatctgcagcttccaccccagagtgtgctggacacacttctgcacactgaacctgagcctttttgcttcacccgcttctgtggaattc

SEQ ID NO: 204842 - DNA, 1000 bp, Homo Sapiens
gcacgatcccagctcactgcaagctctgcctctcgggttcagaccattctcctgcctcagcctcccgagtagctgggactacaggcgcccgtcaccactgctggctaattttttatgtttttagtggagacggggtttcaccatgttagccagatggtctcaatctcctgacctcatgatccgcccgcctcggcctcccaaagtgccgggattacaggcgtgagtcaccatgactggcctgacaatgagtttttagatataattccaaaagcacaatccatgaaagaaaaaatctgtaagttagactttagtaaaatgtggaacttctgctttgtgagagacaccactaagacaatgaaaagacaaactgggagaaaatatttgcaaatacatatctgataaaagacttgcatctagaaaatacaaagaattgttaaagctcaacaacaggaatataaaaataaaaataagcaaaaaatctgaatagacacctcagcaaagaagatgtatagataaaaaataaacgtgtgaagatatgcttaacctaccatgtgcaaattgacacaataatgagatactactatacaccaactagaatggctaaaattaaaaaaaaaaaaaaaatgaccacaccaaacgctgacaaggctatagagctacagggactctcactcattgctggtaggaattcaacatggtacagtcaccttaaaagacaatatggcagcttctttttgtttgtttgtttttgaaatgtttttgaaacagagtctcactctgtcacccaggctggagtgcagtgacacaatctcaactcactgcaacctccgcctcctggattcaagcgattcttctgcctcagcttctcaagtagctgggactacaggcgcgtgccaccacacctggctagttttttgtatttctagtagagatagggtttcaccatgttggccagaatggtctcgaactccagacctggtgatccacccgcctcggcctc

SEQ ID NO: 204843 - DNA, 1000 bp, Homo Sapiens
tctgaagaattgtgctcttccaccccactcaaattgctctttctctggtatctcctatttctgagagaaaagaactctcttctacacagaagacatcaaagcagaaacttggagacatgattaagcaggaagtgtgtgaacagcaaaaagtcagagaaggccccggtgggctaagggctcacctggttgcaggtgggcttgtacctgagccctggcttgttgaggatgagttccagcagcttgtgtttgtctccttgattctattacaagcatactcataacagcaagtagacatatttgttgtctcccacttatttcaatgctacctatctggcttgagacatgcaatagttccttaacaaattataccagagtcataagcaaaggagactcttgggttttctgttagtagagggttttctgctacctctgttctagaatgggaaaaaaaaatgaaaaaaaatcaatcaaatgggtttttcaagggcaggttcactgtcctgcaccttccaccctcctgctgagtcagtccgcagctgtccctcctccatgatgtgtttctatccaaagataacatgctgactccttttgtgcttctctatgctgaccccttatagggctcacatcctcaacctgatctcaaggccaaaggtgcctctatgtctacttagaaccttagaagttacaattaaaatgaactgtagaggccatctcattccactctctcacttcacagatgagaacacagaggcacagagaagctccacatctgaggtcagacaactgctggagcaaaatcccatctcttctgacccctcctcctgcaattccaacctcactacacagtgctgcctggtgtctgcagcagaacatacctcccaagtgtcacaaagctccacagtttctaaaataatctctccactggcatcctttggcagtaattctttcccaggctggaaaatagaaaagaagataaagaaggacattttctatggaattc

SEQ ID NO: 204844 - DNA, 1000 bp, Homo Sapiens
gccccctttctaggacaacctgcatgaataactggtctatgtgggtttataaaggttcaggcccatacactaatttggaacaacttcagagcctcctatgagattggctggggctatcgtcaagactgcatcacagctcaacttcttcctctgccccatcctgtttccttcttttcccttttatagctgttgatcctaagagcactccctaatagaagtcatgcacatcaaattattgcagagtctgcttcccagagaaccaacctgcaacaagtggctaccaagtaccaggtactattctagcttgtggcttagagtagtgaacaagaacaggtccctgccctcacagagcatacaatctactgggagaagacagacaataaacaaatacacacataataagttaaaggaggtgatgatcagaataagcaaattggaaagtgacctaggagctctatgagtccgttctcatgctgctaataaagacatatccaagagtgggtaatttataaaggaaagaggtttaattgactcacagttcagcatggcttcggaggcctcaggaaacttacaatcatggcagaagggaatacaaacatgtccttcttcacatggtggcagcaaggagaagtgctgagcaaaagggggaaaagccccttataaaaccatcagatctcggccaagcacagtggctcatgcctataatcccagcactttgggaagctgaggcaggtggatcacctgaggtcaggagttcgagaacagcctggccaacatggtgaaaccctgtctctactaaaaatacaaaatattagctgggtgtggtggcagatgcctgtaatcccagctactcaggaggctgaggcaggagaatcacttgaacctgggaggcagaggttgcagtgagccaagatcgtgccattgcactccagcctgggcaagaagagtgaaactccatctcaaataaaacaaaacaaaacatcagatcttataagaattc

SEQ ID NO: 204845 - DNA, 1000 bp, Homo Sapiens
taaagaaaaatatgtagcaaataatcacatagatgacaagcagatatgacagaattcatgatgatggtattcaaatgaatgaagttcatttagtgaagtttcagaaatactggatagtctcaaactccgatttttttggtgagttcaattttagattacaatcactaagtatacctcataagtatgtactttacgaactgatgattggaaagagagaatggaaaaatgaattttagcttttacttttttgtgtaatatcctagcaaaaactgatcctaaaaatgaagaggaagaaaagcggcgaattgaggctcggcgagagaaacaaaggcgcagaagagaaaaaaacagtgagaaatacggagatggatacaggtttgtacttagagtcagaaaattaggttcattaaaaaatgatttcctagaaaaagccaacacatcaattgtaatattaaaaagttcttaagattcaaatgaaaagacttgttcaaagatacagaggaatgcttttggtttttgatatttatatgtaatcactacttagaaaacataagaaaaaaggcattctattcatattggcaatccaaaagatatcaaatattcagaaataacagtattcttaaaaagaaacacttgtcattgagatttgactgtatggagtcatagtgattttcatgggcaggaattaaatattacaaatatgtaagttctttccaatccagatcccaaaggaaattctgaagaagagtaaatgagtaggtactggcttttatagataatcaatcattaaaaagctataatagttaaaaatatgtggtaatacacaaagctaattattataccagattagcctgtgaacagactgtaaggaagaatgtaatatttaataaagaggatattagaaataagaggggaattgggctaggcacagtggctcatgcctgtaatcccagcactttgggaggccgaggcgggcagatcacgaggtcaggagatcaag

SEQ ID NO: 204846 - DNA, 1000 bp, Homo Sapiens
gtctttttaaaaaaaagcagagaaagagtctcctaacatcctaaagcaacagcttactggcaagtactagtgcctccatgttaacattgcagaaaccagattcaaacaagttgtgagtttctcttgaagcaaaagaaatcaattacagggaaaatggaactctcaacttaacactcaacttaagaaatttaaaagtcatttcatgatgctttgcccttcttcacctctcactgaaacagttctgttcttcagtaattggtgttgggttgttcccgtgggttgacagtcagcatgtttttatttattaaatggtgtaagtaaaaattgatgtggtggaacaatcatggcagtctctgccacagaacaaaggctttttccaaaccagcatttcccccataacatctgtgaagatgtttcatgtggattttccttccccaatatccaatggcattatttcatgttcagatggaaatgacagtgacatttcatttgaccaaggaaaaataaaaggaaagaaagaaacatttctacatttaacagaacccaaaggcaatttgaaaaacactttggaagcttatttccattttacgatctaaagcagacctaaggtgtatctgtagacaggtggtgctggttgcagttctgctgtgagcctttatgaaaaggattatgttgactttctgagaatatttcaggactcagcatctcaaaggactccaaaatggtggttttaaactcccattgaaatgggtcacaatataaatcctaaagagaaaaccaagccaggtaaacctagggtcttggctccacatcaaacctcacaatttgaagcccaggttattcttacaactctcttaagacctctaagcccatcctcactagccacagcctggggcttccttgatcctgctaaaactgagccaagaagcaaaagctcagtgagtgtcattttgcatagaactactaagcaggataaagagaagcagtaggaaaggaattc

SEQ ID NO: 204847 - DNA, 1000 bp, Homo Sapiens
gctatacatcttattgaatgactcacgagttctccttcattgattaatccttttccttatcccttcctccccctcatatctgccctaagaacaaagagcttgtaaaccaataaattaggtggagcagaagagctctgggcaatgagcaagtctcccatgctccagtcccctggacccaccttttaaactcttactctgtctctttctaattcatttgtctctgctggactcagggtacctgccgggaggtgtggggctggtttccccaacacatatttagtggacctgcaaggtcaaagtaattttcatagcaatactaacatatgatttgcctttttcactggttcactgtgttgacatttgtactgatagtgcaaaagtaatggtgtgtcatttagtaaaaattatttctgtttaccctcaacctttgagtatacatctttttaaagttctgtatgacaaaatgggaagtacatttataatgcttctgctgtgttccagagtcagatggatagctcaaggaaaacatttgtgcagttaagtcatcagctgatctagtcaattttcatggaataccacttttacctgaaagaaaaacatgacagaaaaatataattattcacacttagatatttggaagatagtttcccataattgaatgtggtaagtttttgtttgtttgtttgtttgtttgtttgtttgagatggagtcttgctctgtcacccaggctggagagcagtggcacgatctcagctcactgcaagctccacctcccaggttcatgccattcttcttcctcaagcctcctgagtagctgggactataggcattcaccaacatgcctggctaatttttttgtatttttagtagagaccggatttcaccatgttagccaggatgatctcgagctgctgacctcgtgatcctcccaccttggcctcccaaagtgctgggattacaggtgtgagccgccatgcctggccagtaaatgcagtaggt

SEQ ID NO: 204848 - DNA, 1000 bp, Homo Sapiens
ggattacattaacaggcctccctgggtgagtagcgtctctttcgcctaccttacgctcaccccatggttatataaccttttgaacggaatttggaaattcttctgaccctgtcctgcttgctgatagagttgagccagtggctggcaggggcataatctaataggcgaaactggaaacacacaaattcacagtcctcttgtcttagcccagagactgtacaggcaaggaaagaaagactcgccccatctccctcctcccctcctctggcctaagttgccgctgacttcacccaacaggcacctgaccctcccagatgagctgggaggggctaaagcctggtgcagccatggtaggggtggaggtacaggcagcaaacaatatttaagatgctgacttgtggagcattcgggcttggaaggaaagctataggctacccattcagctcccctgtcagagactcaagctttgagaaaggctagcaaagagcaaggaaagagagaaaacaacaaagtggcgaggccctcagagtgaaagcgtaaggttcagtcagcctgctgcagctttgcagacctcagctgggcatctccagactcccctgaaggaagagccttcctcacccaaacccacaaaagatgctgaaaaagcctctctcagctgtgacctggctctgcattttcatcgtggcctttgtcagccacccagcgtggctgcagaagctctctaagcacaagacaccagcacagccacagctcaaagcggccaactgctgtgaggaggtgaaggagctcaaggcccaagttgccaaccttagcagcctgctgagtgaactgaacaagaagcaggagagggactgggtcagcgtggtcatgcaggtgatggagctggagagcaacagcaagcgcatggagtcgcggctcacagatgctgagagcaagtactccgagatgaacaaccaaattgacatcatgcagctgcaggcagcacagacggtcactcaga

SEQ ID NO: 204849 - DNA, 1000 bp, Homo Sapiens
tatacactaaaatgcctctgggacacttgaggaattcatacttcttgcttaatccttgatacatggtttggaagttataaaccaaaataaatatttgctcggggatagagaaaggagcagagtctttgactgttgctcaagggagttaaaaaattagagacttaaatggtcctagaaaccacagctagtttttccactcaattctgaacttgatattaaaaagctaagctggagacttctgaaaagcacagtagaaaattcttgagttttgaagtgcttaagagacagagacctaccctgtgccatgggtgtgtgtgtgtgtgtgtgtgtgtgtgtgtgtgtgtgtgtgtgtaggtggattggcttaagagaatcagctgtgtgagttcaaagccctgaaatgagtggcatgttgacaccgatgacctatagctgctttttagttggctacacttgctatttggtctcaaccaggtgtgtagaatccaggtatatagaactcatattttgtggggctgtagtgacaaaattgaaattttgaggggatttaaacacatacttgaccttttatttgccaaattctaaaggtgtgaatggtgaaaggtaagtagaaaatatctggaaagtgaagctatcacttggtaatgaagtgacaaagacccatcatactctcaattgaaagccatggagagttaggtcttacaattagaggcaaaccagatgtagaccaggtcatctcaaacccacaatacagcctctacccctttgaattttttattgaattatgtacttttactctatctgcgcagcagagccaaggagtcaatcctctcattatctggaacttctataaaccagcattcaataaaaaactaagtagatgaagagacaggagtatttgatcaataacaaaggggaaagaaacaataaaaagcagaagcacagctgatccagatattggagttagcagacaagaacatcttgattgttatgcttagga

SEQ ID NO: 204850 - DNA, 1000 bp, Homo Sapiens
tttcttgtggctctcctccgcctatcctaaatggccggattagttattattctacccccattgctgttggtaccgtgataaggtacagttgttcaggtaccttccgcctcattggagaaaaaagtctattatgcataactaaagacaaagtggatggaacctgggataaacctgctcctaaatgtgaatatttcaataaatattcttcttgccctgagcccatagtaccaggaggatacaaaattagaggctctacaccctacagacatggtgattctgtgacatttgcctgtaaaaccaacttctccatgaacggaaacaagtctgtttggtgtcaagcaaataatatgtgggggccgacacgactaccaacctgtgtaagtggtgagtatgaaaagaaagctgggttgggaggttggggtcttgcctttctgtgcagaccacgttttgtaccctcctgaaggacaaacagtgtgaacatgtaatgatgagggtggaagaaggaaacaagggaaaaggtgaaagttatggcttcttcgtggaggcatataactgctcgttcaaaaaacatcaattgagcaaaggagtttaaagtacatggaaaaatgtaattaaacacacctaataattgagtagggtaagttttgcaaggatggggtcagagtttgttggggatgtgggaatggggtggttttcaactgtatatctgtgttactgttaaaatgagaagaacggtgggatcttatagcaaaaatacacccaatggatttgaaattaatgtataagtagctgctaacacagtctagcacaggtgatatcctgctctctgtggtctctgtaaacatgttttgaagttatccactatttccccaagtcatcttctgagccatcacatttcaaataaatgcctttgaaaatagggacctactgtaaattattcattccttctcttttggtttggtttatgttgctgctgaaatataaatctgaatttgaattc

SEQ ID NO: 204851 - DNA, 1000 bp, Homo Sapiens
aggtatattggagccaagatttaaaccagccttgaccaactctaggccttcactacttctctttgtttttttttttttgagacggagtctcgctctgtcgcccaggctggagtgcagtggtgacacgatcttggctcactgcaagctccgcctcgtgggttcacgccattctcctgcctcagcctcccgagtagctgggactacacatgcctgccaccacacctggctaattttttgtgttttcagtagagacagggtttcactgtattagccaggatggtctcgaggccttcactacttttcattagcataattaaggaacctctgcctgacaccgtggctcatccttgtaatcccagcactttgggaggccaaggcaggaggatcacttgagcccagaagtttgagaccagcctgggcaacataatgagaccccatctctacaacatatagaaaaattagccaggtgtggtggtgtgtgcctgtagtcccagctactcaggaagctgaggtgggggtagcccaggaggtggaggctacagtgagctatgatcacatcactgcctgatacctaggcaacagagcaagaccttgtctctaaaaaaacaagaagaaaaagaaacccccatggaactgtgcggggacaattagaggctagcaccaggtggtggttgatactcaataaacagtagcttctcagccaggcgcagtggctcatgcctgtaaccccagcactttgggaggccaaggtgggcagatcacctgaggtcaggagttcgaaaccaggctggccaacatggtgaaaccctgtctctactaaaaatacaaaaattagccgggtgtggtggcaggtgcctgtaatcccagctacttgggaggctgaggcaagagaaatcgcttgatcccgggaggcagaagttgcagtgagctgagatcgcgccattgcattccagcctgggcaacaagagagaaactctgtctcaaaggaaaaaaaaaacag

SEQ ID NO: 204852 - DNA, 1000 bp, Homo Sapiens
tcatcatccacactcgctgactgcctgccctgtgcccaggcccggtctcatcaagacctgacatgtcttcaggaagaaacaaggaaaaactacaaaacatgctttctaacccacaaacgtcattcatacatgcggcctcctcaccagaaaacaagtgttcccttgagcaggctgcttccctcattccactttcaaaaattcctccaaggcctcccctgaagctgtgcccacaacaacgaggaccaagacttcaagaaagcagggaaggagagagctgtcattaaggaataatcagggaagagctagtctcagctgtcacagcaagggcaccctctaatcacaaccctcctagcctggtggggtgggggtgacaggtgggaggcaccaacttaggaaatgctgaatcccttaggatcactgtttctcaaaggtggcccaggccactgggggctggtggagatggaccagcacctgctgagcccttagccggcactaaacatcctggagcaaggtgctactattcttccccatggtactgatgaggaaacagaggctcaaaaagtaattagctcaaggttacccttggacctaggtagtgtgtctggactcttcaccactctgctaggctgcttattaacaatgcagatctccaagctccatcctcacccagtgtcagggatccgcattcgggatggttggtccccgggtgattctcagccagtgtcagacttttcctggcactgtctctgctttataatcacccgaacaggctggggccctttctcagcaaggtgagtgtccctcacccacccaccttcaccctctcactgcttggcactacttgattgccacatgagagagtgagacaatgaacactttctcctgaatacctagagtctggtcagagagcaactagggaggaggaggagtggaaaaatctcagaccagcagagcggcatggggagaagagagctcttgggctgaaaaaggcccaaaacaa

SEQ ID NO: 204853 - DNA, 1000 bp, Homo Sapiens
ttttgtattcacgcaaggttcatttgcgtcagcaggatgagtgaggtggtctgattcacagtgatttaggaccccagtagcttttcattgactaacccaacattgtaggaagtcttttgatgttctctatgcatttggtaaatgagggagagagcgtggatgatcttttaggagattttgcgggccagctccagaagtggtccacatcacttcccttcacactccactgagaacaccttttcatggccacatctaactacaaaataaataaacaaacaaacaaataaataaataaataaataaataaataaataaaaagctgtaaaatgaagtcaaactttgtgtccaggaaaaagaaaacatggatagcaatctgctacattgatattctcagaccaaaacattatttagtttagttatgtattatgtatattcttagttatgtacattaccatagcattggattgtacacttggtgcaggttggggtcctcagatttgtttatgtgaaggaatcaaaacagaaagtttgataggtggtaccttactaggtaatagggagaattccagtccttgccaacatctagaatgaactctgtacatagtttgtgcctaataaatacttgttaagtgaataaatatctatgaccttcagtgttcccataaaatatccccgtgcccaaacttaacattcaacttgatgtccacatgcaaaaataaataaatttagacacaaatcttacatctatatgataaattaactccaagtgagtcacagacctaaatgtaaaatacaaaactctaaaacttctaggatataagatagaagaaaatctacatgaccttgagtttgatcatgaatttttaaatacaataccaaaatcacagttcataaaagaaaaaagaaactgttaagttaccctgcattaaaattaaaatcttctgctctgaaaaagacattgttaagagaatgaaaaaacaagccacagactgtgagaaaa

SEQ ID NO: 204854 - DNA, 1000 bp, Homo Sapiens
ttcaatgaatgatacaaccaaaaatattaaaatgcctatttaagtcatatcttatttaaagccccatttcaaaggaggattttgaggataattagtattttaattgttaaagttagataattttgtttggatggaaaatctatgttcctgtgaaattggggtttatgaaataagattggaaaaaaatagagtgtataattgggcacattctgtactgcttagtgaatcaccaaacgagtgtaatcaccattaagcactttaaaagctatgcttgtatgtcctcgctctgcctgcagagctaggagtgcccacgaggaacagcagttcattcaggctgtagtcattggggtgactcgtggaacccctgcctgtgtgagtaagcccgctgccttgccaactgcctgctgtgtgagtctcaaagacatcagatgtcatcaagccacaaggacttcttggtcattcttaaggccatggcaggagcacagttcaaaatccaattcacaaggcaacgtctggaagaaagaatcaagtatgtgtgtagtgcatgatgtacctcagctactgtagtgaaaaattgttgggatgagtctttcaccatgttagtgtttttttttgttttgttttgttttttgagacagagtcttcctctgtcacccaggctggtgtgcagtgctaaatatcctgcagtgcataggagaggcccacagcagatgtgtccagctcaaaatgccagtagtgccagggctgagaaacctacctgaagcctcacagtggcatggtccgtttcagaagtatgtgggagagaaaattgaaggtgagaggtctgtagctctcctgaagtcaggccacataagtactttgccaggtaggtagtgcctagtgacagggatgtactagaaagaattcctcttgagcttggccttgggtctcgtgcagacatgttcatgtgacattaggggaggctgtgggcctcaggcagctaaggagtaactggcaagtt

SEQ ID NO: 204855 - DNA, 1000 bp, Homo Sapiens
gcttccactggctcctggtcactacatgtagcgcactccaggtagacacgttcttcctggctcccatattatgagctcatcagacagcctcccctgctgtcttcctgccttgaaaggatctaacatgaaagcacttttactttctaaaagtaaaatgctctctattcatgggcaagagattaccacctcactgactgggaccttcagctaatgcctttctttctgggcatttctttctttgctatgaagtgagaagaaccatacttgctgtatacaattaagaagtgatctattcaaagagccacttgatgactgagtgcaatggctcacacctgtaatcccagcactttgggaggccgaggcagtggattacttgaggtcaggagttcaagaccagcctggccagcatggtgaaaccttgtctctactaaaaatacaaaaattagctgggcatggtggcaggcgcctgtagtcccagctacatgggaggccaaggcaggagaatcgcttgaacccaggaggtggaggttgcagtgagctgagattgcaccactgcactccagtgtgggcaatagagtgagactctgtctcacaaaaaataaaagagttgatgattccatggttcctatggacatataatagttgactgtcacaaaaaatataactctggccgggcgcagtggctcacacctgtaatcccagcactttgggaggccaaggagggcagatcacctgaggtcgggagttcaagaccagcctgatcaacatggagaaaccccgtctctactaaaaattcaaaattagccaggcatggtggcgcatgcctgtaatcccagctactcggaaggctgaggcaggagaatcacttgaacccgggaggcaaaggttgcagtgagccgagatcgcaccattgcactccagcctgggcaacaagagcgaaactccgtctcaaaacaaaagaaacaaacaaacaaaaaaccaaaaccctgccgcaatcctt

SEQ ID NO: 204856 - DNA, 1000 bp, Homo Sapiens
gctttgtgctcacaggcgggcgacttcaccaaccacaatggcacaggcgggaagtccatctacggaagccgctttcctgacgagaactttacactgaagcacgtggggccaggtgagtgggggcctcctctagggtgagtgtccccacagctctgacctggcctggaagccccagcaggccctgagaggccacatgcagtcaccgtccagtatctgatgagtctccttcctccctgcgacactgtaggctgtctcagcatttctggcttgttgagtttccctagagttttctcatctctcagtttaaaaagcagggtttcctttgggaactttgtggaagaacctttaagcagaatggaggccctggccacctccctgtttgtcctctgagtttcgggttggaaattctaggacacttagaattgttgcagaatggtccttaggtcctttgaggattatttaaaatcttgcttagataaaaagcaaatggtttggaagccagagtggttattgtggcagcatcgtgtcacctataagacccaaggtagaatgtggagatgtctggaggtcaggtcctggggtcctgccccaggtcccgccccagctctaccactgagagcttccacaaggccctgtcctctcaggccaccccactgagaactagcaggcagcaaaggcaggcataccctggggggctggtatcgggccctggttctcctcttctgggtcccaggatctgcagactcgaatgtccctggtgtggtttgcaccgtctgccctttcaaatgccctcccaggcaggtgcctccaggggcagcgtggctcagccctgctggtttttgcaggtgtcctgtccatggctaatgctggtcctaacaccaacggctcccagttcttcatctgcaccataaagacagactggtgagttccctgccccaggccctctgggaatgcgggcagccttgcagctggaggaggattcgtgcacttttaggggcag

SEQ ID NO: 204857 - DNA, 1000 bp, Homo Sapiens
tctccttttttttttgagacagtctcactctgtcaccaggctggagtgcagtggcacaatctcagcccactgcagcctctgcctcccaggttcaagtgattctcctgcctcagcctcctgagaaggctgggactacaggcatgcgccaccacacccggctaatttttgtatttttagtagagacggggtttcaccatgttggccaggatggtatctatctcctgacctcgtgatccgcccgccttggcctcccaaagtactgggattataggcgtgagccaccgcgcctggatggtaaatcattctttaatgttaaacaggtcgatgtgtgcaccattgtttttaatcacttgctgtaagtagttattttttcacattgtgtaataaattctcaactcctatcctttcaggtataataaatataaccctctgactttgaatgacataggccagattcaacactcctccttgcgctcacactttttaaattctagagccatggagcatgctgacctgctaaaatgcatttcttcaggaaagagctgtgactagagaacatttctgatgccaacaacagctgctctgtgaactaattcaggcaggaatgtacacagagacagtaactaaagtgcctgttaaacatactgtgagaaattatgtttatctctctctcaagttgggctttttggggatggagccttaaaagtgacatgtctttatttcagcctttaatatgctcatagttgtcaaatgaagtctacaggttacaaaaaagcaaaatctgaacctctcattcagcttactcctatctcttgatttcttttccacttagttgtagcccgttccataaagccaaaaactatgcagataaaaatttagccagatttaggttacttatcatcacagctatctccaatgaagttcatgaaggattcaaacaatgatggatgtaaaaagggtagacttcttctggaaactcagtaagaagctgagtgaattc

SEQ ID NO: 204858 - DNA, 1000 bp, Homo Sapiens
cagagatataacagtgatatttcattcagtaaattcgcatttattgagaatttacaagctacaggcactaggagcgctacagtgagcatgacagatacaatccctgctttcatggagctcatgtccgatgggatccaagtcacacgggacacagaagaggggcccccaatccaaattggagtgatcagaaagggtccccctatggtcccagtgcttccgtcgaaccttaaaacctcctatcatccaggcccaagaagagaggacagcactccaggcagaaagcacagcacaggcaaaggcacgaaggtatggaagaagacggcacatccagagaactggcaacgccaactcagagagcgcaccctgtaagcctggtcctcggcgtttggctcaccgcttctccccggtgaaggcagcttttccccctctgcttcatcacacactccagagtccacacatgcacagctctcttccagtccattccatcattccagaactccacaatctgacatcatttatgagggggtcttagcccgagaaccttcttcctctcttcttccgactccaagaccactgtccagacacacctgggccccacttttccgctaccgccactagaaaaggcctccaggtggagccctttcattccattcttttgctattacacgcccattttacatttcctacctaatttccactccactgaatttccttccccacaagccgccggactggaactatcatcatccttaatttgaggaaaatcacaggaagcgtgttcaatacacaagccggttgagttgctcactttgagccttttccttaattcaagaagcccatgatcattcttagctctcttttggcttcttcagcccctgggaagctccctgtgctcctgcctgaaaggcttccccaactccactcaccagaggttggatgttccctacccctcaggaaagattccgagtggaaactcggacaatacctgctcaaagaattc

SEQ ID NO: 204859 - DNA, 1000 bp, Homo Sapiens
tttttttaaataaaatttatcatcttcccagtgtattataagttcattggaaattttaaaagccagttgtattcctactgaagacatctaacatcatatgtgccagagccagaattcggactcaggtgtgtctaattcttgaacttcacttttccatattatgctacctttcatattatgaaggcatgacccaaataaaagagtagctcagtttattcatccttctctccaacttagatgtggagagaaaatcacaccttatctctcttccagtttctcttccttcatttctttctgagtacactaaggaagccacccctactgagcctgaaattagaagtcaaatactgctctgccttgtctctcatcccattcctctcagtgacagtttaatggcatgctgttaataagtcacagacagattcctgtggtcaacaatggaatacctatttttaatcagaggcacaaggctaagtaacatgttttaaccatcaagcatactgtattagttagggctctctagagagacagaactaataggagatagatagatagatagatagatagatagatagatagatagatagatagatagatagagtttattaagtattaacatacatgatcatggggtcccaaaataggctgtctgcaagcttgaggagctaggagggctggtcctagtctcaggtttaactcagtttaactcctgagtttaactcttaactcttctcctaactgaagaagttggagttcaatattcgagggcaggaagcatccagcatgggagaaagatgtaggctgggaggcctgggagctgatcaggtggtgccctccagattaagagtgagtctgccttccccagcccactgactcaaatgttaatctcctttggcaccctcagagacacacccaggatcaatactttgtatccttcaatctaatcaaattgacactcagtatcaaccatcacaagcccaccccttgtcaacttgaattc

SEQ ID NO: 204860 - DNA, 1000 bp, Homo Sapiens
ggagagactttgtaatacatgcgatattgggtagacctcaagaaggtcatgccttagtagtagggctaaattagcctgagaacaagcactactctggacctgccataacaaaacttacaagcagctccaaaagattaaactgatctgcaagtaacaactacataacagagcaaaaaatccaatcctgtttaaaggaacaaaacaaaatccagcattcaacaatataaaaatcttaatgcctgatacctaatcaaaaattagcagacatacaaagaagcagaaaaaaaaatccatcaaaacagaaacagaaatgagagagatgatggaattagcacataaaaatgttaacaaagttatttaaaatattataaatattctcaagcctataaaggaaaatacaaccataataaagagagaactaaaaaaaatataaacacccagataaaatttctagaactgaaaatatgctcaataacttctagagtcaaatgtagtctagatgagcttaacagaaaattagacatcataagaacaaaagatcaatgagtttgaagacagaaatacacattatcctaaataaagcacagacagaaagatgattgaaaacgtgaacagagtatcagtgaccagtgggacaatatcaagcagtctaacatgtataattgtagtctcaaagaaaggggggagaagtacaaatatatttgaagaagttatggctgaaaattttccaaatttgataaaaagcctatagattttagaagttcaacaaaccccaaatagaataaaaataaagaaaaccacacaaagatacatcataatcaaattgctgataaagagtgataaaatgataaagaaaatatgctaaaagcagacagagacaaaaggacacattaagtaagagcaaaaataagaacgacagaagatgtcagaaaccaagcaaacaggaagataatgaaatgttagcttcaaagttctgaaagaagagaattatatagaattc

SEQ ID NO: 204861 - DNA, 1000 bp, Homo Sapiens
aaatacaaaaaattagctgggcatggtggtgcgtgcctgtagtcccagctactcaggagtctgaggcaggagaattgcttgaacccaagagacagtgaacctgtatcatgccactatactccagcctggggaacagtgagactctttctcaaaaaaaaaaataataataataataataatctagagcctgacttccttagcctggcagtcaaagcccccacaatccagatgcttcctgttcatgacactccagccaagctatgccatttcccattcatgtctcctgatctcccacacaagtgtctttgttctgtgattccacttgtctctctcctacttctccatgtttccatcatatccatccttgaaaacccagttccagtatctccactttcatgagaccttttctgatctaccctagggtagatatatgcacagcattctcactgcttctcgccagcagggctctaagtgttatggacagggaacactcctcactttctgacctgcatacaggtagtccatgcccgttcctttccccggtgagattgcaggttcatttagggcaggggccgtaactgattcattttgtttgcccttaaaatttcttaacacatcaggcagggcatggtggctcatgcccgtaatcccagcattttgggaggccaaggggggtggatcacctgaggttgggagttcgagaccagcctgaccaacatggagaaaccccgtctctactaaaaatacgaaattagccgggcatggtggcacatgcctgtaatcccagctacttgggaggttgaggcaggagaatcccttgaacctgggaggcggaggttgcagtgagccgagatcacgccattgtactccagccagggcggtaagagcaaaactccatcaaaaaaaaaaatgtcttaacacatcaaacattctatatttttagaatgaatgaatgggtcactaaatgaatgaattttacgtcaaaataatgaatgaattc

SEQ ID NO: 204862 - DNA, 1000 bp, Homo Sapiens
ggcatgaagtagaatagagaaagaaaccaaggaaggaactagcacagttgaggcaaagagacattttgaagagtataaatgaaagcttaacttgaaaataatttgaggaacaattgtgaaaaaagtcttatattctagacccaccccctgtcaaaactgaggttgaaatttggtcccctctgtgttggtgttggaagatgtggtctaatgggaggtgtttgggttatggggatggaccctcatgaatagatggatgtcctcgtgcaggaatggattagttaccatgagagcagtcagactctttttaacaatctgctctcatgggaaccacatccaaaccatagcagaggtcaacagagaccttggcaaaaccatttccagcagatgatgggggcagaagacaaaagggcagtggatcctcttagcccatatatccaatctaaactcttgggtctagaatttgacttcctctctcttcatgtgatctctttgcacacatccacttccacttctgctttctgccatgagtgaaggcagcatgaggtccttatcagatgcagctacccaattttggactttccagccaccagaattgtgagccaaataaacctcttttctttataaaatactcagccttgggtattatgttatagcaacacaaaacagactaagacaacctgcatttgccagaacatcaatagacattttttagtcctaattttgccttttcagcagcattacatgccatagaccactctctccttttattttcttccccttgtcttccctgatactacactttctggttttcctttcatctctttggctactttctctactatgcattgcgggctcatctcttctgccatctagccattaaacatggagtccttcaaggttttttcttgggccctgttttggtcttaatatatatgtatgcctttcttttaaatgagcgtattcacaattatagctgcatttatcacctagctaagaattc

SEQ ID NO: 204863 - DNA, 1000 bp, Homo Sapiens
aacaagtaaaaaaatcagctgggtgtggtggtatgcaccaatagtcccagctactcaggaagctgaggtgtgaggatggctttagtccaggaattcaaggttaacagtgagctatgatcataccactgcactccagcctgggtgacagagtaagatcctgtctcaaaaacaaacaataaacaaacaaccacccccctcccccaccgccaccacacacacacacctgttaaagtaaaagggcctaatatttaactctctccggcaaaggctaagaatctcctcccatttgccttcattctgggtcccgggcctaaaaagtcaaagtacactttgtctggcctggcctagtccagccccttttggagcagagattctagcatattgtcttttcaagcttatagttgggcactggggagaggtatgctagagccagcaggggctgcttagagtcacagaaatcccagtggctttttggaggtgttaacagatggaaagttggagggggctctgtgagccagtcacttctccctgtcttaaaagtctactgtgatgctaagagagaaaccaagtgcagagaggctctggagaacagagagaagatatggggagagagtgtatatgcaagaatgtgtctttcttggaccaccttagataattcctctaatcagaggctagataccatatatacatacatacatgatattatacacacatatatatgatagtatatataaatacacacatgctactgactgaatatgtatcccctcaacattcccatgttgaaatcctacccctccctacccacatgataatatatattaggaggtaggacctctgggcagagccctcatgaatgagattagtactctcatcaaacacggtgcagagagctcccttgcccctttggctgtgcgaggttacagtgagaagatggctgtctatgaaccaggaagtgggtcctcatcagacaccaaatctgctggtgccttgatcttgg

SEQ ID NO: 204864 - DNA, 1000 bp, Homo Sapiens
atttaataggctgcaatttcattttactcacagagagttaaatcttgtcataggaattacgtaagaagggaatgaaccaataatatctaacaaaaggaaaagagcattagatgtaacaggaaataataactgcaatatgttacttttctcaatgtataagaagtgagtttaactgagtatggccaaattggaatcactagaaatttactcaagttgtctctaaattctacatgaagaaactactaactttaatttttctataagctatagggcatttctcctttcctaaaaaggaacaaccttagattctgtctggtcatgtcaggatattaattttgaaaaggaagagaggatacacaagtacatgataccccatataaaagaggtcgggcgcagtggctcacacctgtaatcccagcactttgggaggccgaggtgggtggatcatgaggtcaggaaattgagaccatcctggccaacaaggtaaaaccccgtctctactaaaatacaagaaattagccgggcgtgaaggcatgcacctgtagtcccagctactcgggaggctgaggcaagggaatcacttgaacctgggcggcagaggttgcagtgagccaagatcgtgctactgcactccagcctggcaagagagccagactgtttcaaaaagaagagaggtagtgaggtcaccgaggatctgggacagcctgaatctgtccaaacttctcatcttgacctgatgctcaaatgaaaccatggatcacgtgtacagcaacctggtgattttacattcccagctgtggcgaagctttataggaggggatgctagatgaccaatctgcaaaaaagatgctactctcagcgggtgctgctttaaggaggacctacatctatttgctgactttgccaagcgatgagccacacaggattgggaagcctgaatgtcatcagtcaaggcccagagtgctgaacctatgaggcctggggagaccgctgtgaattc

SEQ ID NO: 204865 - DNA, 1000 bp, Homo Sapiens
gtccggccctcttcttttcttctcttcaattttattttttgagacccgatctcactctggcccaggctgaagtgcagtggtgccatctcagctcactgcagcctcggcctcccaagtgatgctcccacctcagcttcctgagtagctgggactaaaggcgcacaccaccacacctggctaattttttgtttttttgtagagacaagatttcaccatgttgcccaggctgatctcaaacttctgggctcaagcaatccacctgccttggcctcccaaagtgctgggattacaggcatgagccactgtgcctggccaggctggcttcttaggctcaggttcaggtctgctccatgtatctctcatttcaggacccaggccaaaaaggaagtagttacctgtggcatgcttgtcttttagcggatagcaggaatacaagacgcctcttaaagcctctgctcagaactgatacactatcactttggcccattggtcaaaataggacacctggccaagccccaaattcccggaatggggaaatatactccaccaactctactgggtgggatgtactacaaagttgcataacagagggtgcagatggataattctctagggagaaggaagaaatgagaataataatccaatattctagacactcttgtccatacaccagagtagagttgaggtggctgtgaagtcctgtttatgttattctgattataattattcgtgcatttgtgactaacttatttaagacctatctcttgtactggatatgagctccttgagggctgggatagtgtcaggtttggctcatcattgaatccgccacatctaggacggtgcctagtatgtagtaggcactcaataaatgttgttgaaatcatggatgaataaatggatccctgtttctgttagagtgttacctgattcatctctctttcgagaatctcagagcatttcacagttttgtcaaaaatgtactgcagtcaggagaatc

SEQ ID NO: 204866 - DNA, 1000 bp, Homo Sapiens
tgatatgtacatgaatgtcaagtataagtacatgaatgtcaagataagtttgtgctctttctgttgtgtattgcagaaggtacttgaaatacatttattgaggtatacccctgaagtctaagtaacctgttccagttaatttctacattttgaaaatatgtatataataatggtatccaaattatgccaaatctattcattatgttttaaaattatttagcataatttagtgaaactatatttgacatcacataaacaaccactcgcttatgcagctgtattactctgccagccagtgtgatttgggttatgttataatatgcagtaacctaagtttaaccagctgagaaaagttgagaaaaatgatcaagaagagacataggactcatgttggatagtatcatatttttacattacataatctccacacatttaattcatgtcatttgaagaaggcagattaagacattttcatttttggggagtgacctcattgccataatttcttctaacaatgcatctgtttgtttttcaggtgcttctttgctttgcattcgggcagatgagctacaagaagctctcacctcccactgtgtggtcactagaggagaaacaattatacgacccaatactgtagaaaaagctaccgatgtcagggatgccatggctaaaactttatatggacgtctctttagttggatagtcaattgcattaacagtttgttgaagcatgactcatcaccaaggtaaaaatttttacagaaacatttttttcccaaatgtcaggtgatgtaagtctactttctaattgattgttttgtatagatctctttcaagatgtttctataattgatgtaattaaattattaaaatgataatttagtagataagcttcacttcctaatagttccacctcataatgccacttaactataaaatttttaagttgctgcaacataaaacctgtagcaacataaataacacaatagaaagtgaattc

SEQ ID NO: 204867 - DNA, 1000 bp, Homo Sapiens
tggttcactagaatcaggcaatcacatataacctggcatgaatttagattgctgaagttgaatagcaatggattggtcagcctaccatgcaggctgatattcattgtttggtcatgtctatgagaagacagactgctaagaaacaaaacaaaacaaaacaaatcagcaaaaaacccctccagtctaaaattaaaaagctgaatgtactggtaacttaccaagctacatgggcattttcataaaatagtcagcattgtggtaattactacttaaccagcatatttagcatctctttatgggccagacgctatgataggcatcttaccctacttggtttgatttggaagggagttatgccttgcactctctaaatttgcaagcaaaacctgaaagtagtggctgaataagatccctggtaaatcttcaaagctgccaaaatgttttatgttttgtgaggtcaagctcaggattatatacctggtttggggttacgcatgtagatctggggtgtggttggtgactcaaacacatgtcagggaggtttggttgcggaaagtgtgatagatgttaggagagctcctgcaacttttttggtttgaagcagcatttgatactattagactccagggcccacatttaatttagaagcttaaagacactagggttcagaaaaatataaaaaaattttaccccgggttttttctattgtgctttcaaattgcaagataaaggcaaaacctcagaaataattagcaaacctaaattcctggaatctctcaacacacttgaagcattcctgtaaaacaagcacgtgtttcaggatttggtgcgcaatcttgcgtttatcctttcttttaccttgtaatgtttcccatctttctctcttaagcctactctgtggatctcagaaaagcccttctggtctgcagtgggtcttctgttaccactttctaggttcttcaaactcagtcctggctcgatcatactgtaaggggatggg

SEQ ID NO: 204868 - DNA, 1000 bp, Homo Sapiens
tttgaggctgcagtgagctatgatcacaacactgcactccagccttggtggcagagctggaacctatcaaaaaaaaaaaaaaaaaaaaaaaaaatcatgccaggacagcaggagtaaaccaggatggtcccagacaagccagcatgcatatcttccctatttacaaacacaagagatgttcacaaaggtgggatatcagatcttgaaaaaaatgggggctgggactcagactcagatttcagtcctggcttcaacactcactgatcctctctgggcttcagtgtgaagtaaaatggagtcaactgctcatcaaatctacagaacctgcagaacaattgtatggatgaagcgagctcatctctgtgaaaggactgaagcctgaaaagttctatgcagaggagagatgctgatatcacacttccagggcttgtgatcagaggcccttggaggctggggctatacctctgggtgggcgtaggctgctgctgcatccctctgcagggctgagcggatgtctggcatgctatctaggatgttttcagagcaattttctttgcctcgcttattcatctcggttcgaatttcttccatgtcctctttgatttgttcattttccttggtgaggtttttagacacttcctgagaaggaaaaaaaaaagatgatccattaaagcaccctgaagacaagcaggaggcagctagcagccatcttcgctcagagcacacagacacaacagacaggctgagaaatcatccaacaagtgattggggctagagagtgtgcccagccctgggctgagcaccggtaccaggtctcctggcagtatttccagggcagctcagcgcttggatatccaactacagaaaatactgcccaaactaccatagcttttctattaataacattgacaagtctctgggccaccaggacaccaggttctttttctgtcctttgtatatagtccactcttatccagtgttgaagaacattaaagaattc

SEQ ID NO: 204869 - DNA, 1000 bp, Homo Sapiens
tggtcaggctagtctcgaactcctgacttcaggtgatccacccatctcggcctcccaaagtgctggggttacaggcccgggccaccatgcccgggcgtatctgatttctttttaacaaaattatttttctggcatgctgccgtggctcatgcctgtaatcccagctgtaattacagcaattacatgcctgtaatctttgggaggtcaaggcaggaggactgcttgagctcaggagtttgagaccagctcgggaaatataatgagatctcatctctactaaaaatttaaaaaattagctgagtgcacctatagtcccagctacttgggaggctgaggttggaggatcgcttgagcctgggaggtagaggctagagtgaaccactgcactccagcctgggcaactgagtgagaccctgtctcaaataaaataaaataaaataaacaacacttttccccgtggcacctactgaatatccaatcctgggagcagtaaaaagaaaaatagcaattctgagagtatattgtaacaaagtgataggtacagagatagagatatacacaattaaatgttttaaatctcaatgaatacaagctggaatacaaaggctgaagttgtaaatgccttgaaaattcagagaagggaaaatgtcatgtgaatctccagaggctttctgagaaaggtgaagattgagtcaagcgttagaggagaggagaaaaagaaagaaggtatgagaatgaagcagcacaatacattgcccacatctatgccagggaagtcaatttcatacagatgcagactagaataaatatagaaggccatatactgagtaggtaagagcactacctctggaaaactatgagaagggatcccagatctgctacccactaactctaagactgagcaattacttgagctctctgagacttagtttcctcatctagaaaatggggataacaaaaaccctatgtcatattgtttaggttattcagcattgaattc

SEQ ID NO: 204870 - DNA, 1000 bp, Homo Sapiens
tgtaggttgtcagtaaatatagactattttttcttagtctattggaattttttcttaaaactttttttgggtgtgctagacatgtaggacaaattttcttttaaactaggttgctttatggtttgtgaatggtctctgttttacttatgaaagttatacatgttcactttgtagaacggggggtgacaaactatgtcctgtgggccaaaagggttctgttttgcaaatcaggttttattggcacccagccatgctccttcatttacttattctctgtaatgacagagttgagtagttgagaccttaggacctgcaaaacctatatatatatgtgtgtgtgtgtgggtgtatgtgtgtgtatatatatgatttattaaatataatttttatttaatataattacacatatttattaatgcacatatttaattatacttataaccatatagttatgctatatatagatatgtataatatagttatatataaaatatataatatatattctttacacatatatataaatatatttaattaaaaatatacatatataaaatttattttatttttaggttatagcttactgtaaactcaaactcctgggctcaggccatcctcctactttggcctcccaaagtgctaggattacaggtgtgagccaccatacccagcccaaacccaaaaacccttcatagaaaaaaattgttaaaccctgctgtagaacgtctgaaaaaatacagagaaatcgaacatctgaaaacatacggaaaaatcgcacgaagaaaacagctatccatatctcaccttcagtgaagtaggttgactgtaattttaccattctcatggccaaataattttgaaaatatctgattatttcctaaggctaagtttctcgaagtggaattcctaggccagtgagtgtgagtggcttttttttttttttttttttttttattgatcattcttgggtgtttctcacagagggggatttggcagggtc

SEQ ID NO: 204871 - DNA, 1000 bp, Homo Sapiens
agtgcagtggtgtgatcttggctcactggaactgctgcctcctggattcaagcgcttttcgtgcctcagccacccacgtagctgggattaccggtgtgcggcgcctcgcccagctaatttttttgtctttttagtagagacgggattttgccatgctggccaggctggtcttgaactcctgacctcaagtgatccaactgcctcagcctcccaaagtgctaggattacaggtgtgagccaccgcgcctggctcagtatctttaaatgtaatgctcagggaatatattcttcatggagaaccactctatgaaaatcctaactgtatataagcctgtaatatttgtttatcatgagtcaattctctgatttacgaatcactgctttactagaagggatttgatcgttatgacatttaagctgtaactattttttcctcaaagttgtgtattgcccattaggtgagagcagaagactgcagttcatggcaattatacagttaggtatcataggtagtagtcattttctaacaccaagagatttttttttttatggtaatgattaccttttattgggccacccagaaatttcagtactatgaggctgggatgctggattttctggaactgtgtagagatgaatgagaggagagacatggctgggtatatgtcactgatgggccacttcccaaagtgtactttctttcatattttttctttgggagaatttgctagtatggcatttgaagcatggcttcttgctgtaaatgtttgaagggacataaattacacaaaattaaaatttttcaaaaagtaaatatgctagaaaaagacagacatgcatatggattcttaaatgtaactttatgttttattattcttttcaaaaggttggggatgatatgaattcattcttgacatattgttcgcaatttgcagctcagctagaagaagcacttaaagaagaacaaaatgtatgtattctgtatatactgtcaagtata

SEQ ID NO: 204872 - DNA, 1000 bp, Homo Sapiens
tctgtcgccaggctggagtgcagtagcgtgatctcggctcactgaaacctccgcctcccgggttcaagcgattatcctgcctcaccttccgagtagctgggattacaggcgtgcaccaccatgcccagctaatttttgtatttttagtagagatggggtttcaccatgttggccaggatggtctcgatctcctgacctcatgatctgcccgccttggcgtcccaaagtgctgggattacaggcgtgagccaccgcgcccggcccaaactatgtttttaaaatgaaaattaataattatgaagaaagatgtaccatatccaaatattaaaataatatagtgctatgaaatttttttaaatagtacaacataaaaataaaaatatatgataaagtaaacttcccaaatcaaagaaaacagaaagaattattcactaaatgattctgggacatgtcgtgggcttaggcaactttgtttataatctgtacctcatactatttcatcaaacacatagcaagtgaatttaagaagtataaaaattcaaaacaaaaaggaagataaaataaaagcaaatatttatcaaatttctgcaagaaggaaacattctaaaattaaagtagtgaaagatgttacactcaaaaaaggttgacaaatttgatcttaaaaattgcaatttctgctatgacaaaaatgtaagcacatctaaaagacaagaaactgaggaaaacagatacactacatgtgacaaaatattagtctaaaacgataacataaattgattattaaaaatacaaagtctccactaaacacattaacaaaagttatgaacaattacccaaagagaatttactatgttagcaaaagtaggaaagtctaacatcattagaaaactttaaaaaattatcaacatcaaagcagatccctcttttatttctccaattgtttcatatttcaagaacaaaaatactgaatactgataattgtgcaataaaacaggaattc

SEQ ID NO: 204873 - DNA, 1000 bp, Homo Sapiens
ctctcaacaccatcattgttccttgctatgattttaaaccttctctgagggcacaggttcctctgctggcccttcagctgttggtgtttttcaggacctgaggtcttcttccactgtcctcactgggaacgtgaatgccgctgcttcccagatccctgccttcagttcaggtctccctgttgaactcaggtctcatctgtgcaacttcctgctgcacagcttcctgtgaccatctctcaggcgtctcctactcaacaggttccatcatccctacctgtcttgctcacgcaggcatccatgctagcgttcaccccataaatacttctcagacacccattacctgctagtcactacacgtgctgaccatacagctgtgactcagccacagtcccaccctcatggggcttatccaggggacatggtgtcaccatgtgcccagtgaccccagccagagccttcagtcatccttacccctgacctctcccacttaccattgtttagttagtagatttgatctgttcttcttcctgcccaactccggaagcctccccttcctctgcccccaccaagactgtcttttccccaggcccttgtcattttgctctgggatcatcgggaagctcctcactgctctcctatccccagacttgccgctcttgaatccattctccatgctgctagagtaatgatatttctgaaatcacatttatgatattgccatttccctgtataatattctcccaaagaccctcatagcattccatgtaacacctagcctccttggcatggtagaaaaggccttttaggtgacctggcctcatctgcttcttttttctttcttttctttttccttccttcctctcttttttctttctttctttctctctttctctttccttctttccttccttcctttcttctttcttttcttttcttttttgatagggtcttgctctgaagaccttggaggctggagtgcagcagtgagatcacacctcac

SEQ ID NO: 204874 - DNA, 1000 bp, Homo Sapiens
attttcatgctagcgtagctaaagcaaatcacatcatcgtctgaaaaagacatacctattatttttcagtgatatattgctttgcagctgtagccaaaacaatctaataagcactattagataaaggattctgaatatgaatgtattgaatttgtagtggaagaaaatgaacatattgcagcatttatgtcagattgggttaagcttgggcatctctttctccttaataaatgcagatcaaaagacttctcttatgtaaaaaataataatacaaatttcagcaatatgaaataacacaaccactttgtaatgttgggaggaaatcagtcagccatgtgctgtatagaatatgaattattttaggagggcaaacagatcctgtgatgctctctccatacatttatattcataaaagattccaaacgcctagaacaatagcagcgatctatttgccataaagcattccgacatttgcagtgtcacttatgacagctttgatagacatgtactacataagaaaaatatcttcgagcactcaactcgtctaataaattgattaaacttctcttcaaccaattgtttttgtcttaacttcttcttcagacatcacctgaaggagcccttgcttgttttcagaagactatgtaaaaggagacagtttaatcgaggcctcaacgtttgagcactgtcagaatttcccctcaaatgataaatgattgtataatgcaacagtctactgctagggctgaattatattagccatcagtgttcaaaacccatttgaaacttaattgtgctgtggtagtggtatcccccagtcagcagaacagcaggtttataaaaatcatctcctatgattgttaaacgctttcctaatgaagctgatgatcacaacactttgcaataaacgcttttgtcaagatgtcacaatgcgtgatagtggcctctacagtgagcaagtgcttctgcgatttgggtttatcttcattgcacggaattc

SEQ ID NO: 204875 - DNA, 1000 bp, Homo Sapiens
ataatgagcaggggttttttttttaaaggtacttattagaaacctgcaagaagtatcagaacacatgattatagatgatttttttaattgtgttattcttttcttaattttaaaatatttcacactaagcagacactacattcataattggtaaagtaacatttttttaaatgctttaaaaattgttaatttttttcttgggcaaaaagatgatgatgagattgccctaaacctttactccaaacagccagaccaagaacctatcatgaattataaatggcagtaaatagaaattcaattctggagaaggaaagaaagggttttttatattattatacaaatgatactaaagcaacattaacagaattctaaagctaaagaacaaaaacattcccccaaaatacagtcatggcaatatattaaaccattttcaaacagtaggtgctcctttcagttcttgtccatctgcagccctaatttttatacagtttttaagtttggtatggactttaccccatttcactttactccattatactatatggcctacaaagagcatagagcaattaattaatgataacataaaagaacaattaaacaaaaagaaaagtttaagagaataaagtcaagaaaagttttttgttttgtttcatttaaagtacagagatgagaatggtctagagagctgctataatacggagcttccaacttggctctgctcatccttttagtctaaaggaaaggcgggacaggtggcgaggcagtgcctaaagtgaaagataccacatgatcgttatgctgaccaattttaatgcatatctcttaggtcacttaactactttcccactgtcaccaactgtttgctagtacagaaaatacaaaaaggaagagctgtgagcataaaacaagttttttttttctaacttctgatttgttttcttaggctaaatccccaaaagtagaattactaggcctaagggtaagcatgttttcagaattc

SEQ ID NO: 204876 - DNA, 1000 bp, Homo Sapiens
ccgggcgtggtggcatgcacctgtaatcccagctactcaggaggctgagacaggagaatcgcttgaacctgggaggcggaggttgcagtgagccgagattgcactccagcctaggcaacaagagcgaaactccgtccaaaaaaaaaaaaaaaaaaactatagggaggtattatgacaatgttacactaaatagagcataccaataaagagacaggaattgtaaaaaaagaaactatgaaccaaaaataaaattctaagatccccccaaccacctgattgaatttcctcctcagccagggcactcttaaaatttaatctgaaagaatggttcaagccatgatggcaaatgggggtcggacatgccagagatgcctcattatacccctccagcattaataatacaggagttattaataagtaatttttaggcagcaagaaagggtgaaagttctcggtggaattttcctttaataaaaagcagcccccaaatcatttcttctctaacagaaagcagccacagaagtcaggcataatatgcaaactaggagcttttatatgtaaatgccagcagctgtacctggaagccaggtacattcagtatggtgtctcctcccctcttttccttgtctcctgccctcttttccttgtcaccacttttagggtttcctggcagcctcctggtaaaaccacgtacaggcatcatggccgccgccaggtggaggcctcatttgtataataaaaggctagggtgggagggccagtctttttggggctatgtaagtagcacacctggtcaacccaatcccctgagccctatgtatatcaatcactgccccctcaagcctctgtacaaaacctatggcttttcacagtaaatcagagaccctcttttgagctacccactttcttagcatgaggaagctttttctctctcttttctttttctattaaactttcctctcctaaacccacccctcctgtgtgtccctgtcctgaattc

SEQ ID NO: 204877 - DNA, 1000 bp, Homo Sapiens
ccatgtgacacacctgctcccccttcgccttccaccacgattgtaagcttgctgaggccctcaccagaaggatatgccagcaccacacttcttgtactgtccagaaccgtgaacaaattaaatctcttttctttagaaattacccagcctcaagtatttatttgtttatttgtgttttttatttttttgagatgaagtcttgctcaatcacctaggctggagtgcagtggcatgatctcggctcactgcaacctccgcctccctggttcaagccattctcctgcctcagcctctcaagtagctgggactacagatgtgcgccaccatgcccggctaatttttgtgtttttagtagagacggggtttcgccatgttagccaggctggtgtcgaactcctgacgtcaggtgatcagcctgcctcggcctctcaaagtgctgggatgacaggcgtgagccaccatgcctggccaagtatttctttatagcaacacaagaacagcctaacacggaggggatgggtcctggaccattatttagagtcatcccattcacccctttcagtttcacaacccatccaaagtaacctctcagtgttttgcatttttttttttttttttttgagacagagtctcgctgtgacgcccaggctggagtacaatggtgcagtcttggctcactgcaacctccacctcctgggttcaagggattctcctgccccagcctcccgagtagctgggactacaggtgagagccaccatgcccagctgatttttgtatttttagtagagatggggtttcaccatattggccaggctggtctcgaactcctgacctcaagtgatcggcctgcctgggcctcccaaagtgctggaattacaggtgtgagccaccacgcctggctatttgttttttttttatacttagcataattattttgagattcatacatgttgttgcatagatcctccattcactcccttttattgtggaggagaattc

SEQ ID NO: 204878 - DNA, 1000 bp, Homo Sapiens
catggcatttgtaaactgtcatggtgctggtgggagtgtctttatgctaatgagcagtgagagcaactagagatcacttttgtcaccatgtggtggtttccaccggtttcttcactgcatcctgttttgatcatcaggctcgtgattggtgctgggaaaataagtcccgttcatctcctacctgaatactgctgcagtcaatctgataaccaagagggccactgagtgactaaagggcaggtagacagcctggatacgctggacaaagggaggattcttgtccagtgtggacaatgcaaggcagtgtgagattttatcacactattcagaacagcatgcaactaaaacattatttccagaaatttctatttaatattatcaaaccatgattgaccttgggtaactgaaaatgcagaaagcgaaactacagataagggagtatggccatataagcaaatgatggagaaaggaaagatatttcaatacattttgatgagacaaccagttagcaatttaaactaaaagtatagctgaattattccctcactctttataccaaaataaattccagctgattaattttgaaagaaaaaaatgaagccataactgtaataaagaatatatcccaatttttcaaaattctgaagttaaagaacttttttaaaatcaaaactataaaatccacaacccataaatatatgtcgataaattagttcctatgaagatttaaaacttttctgttgttagaaccaaatagtataaacaaggacaaaagttttttaaaaagtgggggagagaatatttgcaatatattgaaagataaaatactattttccttaaaatataaaactctcaggctaggagaagtggctcatgcctataatcccaacacttcagaaggctgaggttggaggatcacttgaagccaggagttcacgatcagccctaacaacaaagtgagacccccatctctacaaaaaacaaaaatgacacaaagctt

SEQ ID NO: 204879 - DNA, 1000 bp, Homo Sapiens
gccttttcgtccccaagatgaagttctcaggtgcataccacatggcccttgcccctgacaagcagaggcatcaaatcaacgccaaagcacccacctcctcctgagcccaccccaaggggaacgtccatctcgccttcctgggggtggggaagagacgccaacatccccagaacgcccacatcccagggccctgcagagccctgctctcctgtgcagccacccgcccatcggggcccctgcctgctctcctctgcagccacccgcccatcggggccctggtgccaccaggggagcctgggcgcttccacttggggcatcaccctctgggcccccctcaccctgctcagggacgaggacctgaccacgacccctccatgctggaaagggaccactgaaaccagctccatccctcgtccctgactggtcagcaagaggagtgcccggggccacgcggtgcattctctgtgcccgtcagctgtggctgctctgcgtgctgccccacaccaggtccctgctgagcttctgtccacacggttctccctttcactaaaggacaaattttaccacgtgcacccacgcttacggcttcacacctgcaaggcctggatggcgttgttgtagcaggccagctctccagacacgctcggcgagttcagggccaggcggtgccacatgcgcgccaagtagtcctcactctcggccttgaatttctgtatttccatcgaaaaattctgcccgagcttggccttcacgatgaccatgtgcttgaagatcaagctaaagaaagggaaggtgagaaaccaacgtcaggatcgggtggcagaattttaaacgtgggtgatgcagcccggacttattcctccacctccagcttaaaaagacgaagcaaagcagagcccaggtgagcgggggtctcggggctacgcgggggtctcgggggtgagcgggggcctcggggctatgcagggttttcagtccccgctctccctgtgttgaattc

SEQ ID NO: 204880 - DNA, 1000 bp, Homo Sapiens
ttattaataaggtagaatttatgtttgcattttggcatttgttttctgtatgtattacatcttctttttgttcctttattctattactgtttttcatgttaaatagatattttctaatataccattttaattcttgttttattttactatatatttctaagttattttcttagtggttgccctagggatttcaattaacatctttaaaaaatatttttacaagtaattttttaaaatgttattattccccaaagagggtgcaccattcctggaggtactgcaatacctggagtggacagagtaagctcctatcccatctccctgctccaaaaacccatttaatatagtatcctcagatagaggacatatcagatattaaacttataagaacagatactacacttgatcttagccaaaacactgagaggtgatcaaaacaattgattttttttttttttttttttttagaaagaagtggggtctcacatgctgtccaggctagtctcaaactcctgggctcaagccatcctctcacctcggcctcccaaagtgctgggattcaggcatgagccaccactcctggccctcaattaataacttgacttaagataatctagttcatattaacttaatttcatagcatacaaaaactatgcttcatttcttccttccattattctatcatgaatatggcacctttttgtgttataagcccattgacacagttttataattattgctttatgcagttggttgtcttttaaatcagaagataagagaaataaaaatatacttattctgttctttatatttacctacacagttatctttattggtactttttatttcttcatacaagtttgagttactatctagtacactttgcttttagcctgaaggacttcctttagtagctagtgatgaatttagttttatttatttgagagtgtcctaagttcccttttgtttttgaagggtagatttcctgcatatagaattc

SEQ ID NO: 204881 - DNA, 1000 bp, Homo Sapiens
tctcgtctgctggaactctgctttcagcgaagatggaaagaccagaactggatttatccttctgcctaaaacaactagaaaaccagacagagtacataaaacaatggttttcagatggtagataatgggcagtgcaggactgtgatccccgagcaaagggaaaacagaggtgactcctacaattgagccagcttactgtctggagggagttttcaggctccagtgcaggtaaagggaacccagacagagcatggctctctggctaagttgaggagatagataccagagttcacagaggccactagaattttcaggacagactgcaagagaagacagagctctatagagagaggtctagagacttggaaaatgagtttcctcaagtctatggctgagttttgggctgtgcatgcacgagaagaacatgactggggccagagaaataatctctggaaaggagtagacagaaaaaaatcctagacctcacacagggctggaaataaattattcatgttctcaaaagtcacagtattatacagggcatgaggcagaatcttcaaaaggttgttgcctgagttgtgaaatcaaaatagatcaagattaaaggccgttctttacttacaccaataatcttaaaataaaattttaaaaggatctaactgatttcaagtacttaactgcacactacataaaagaattcaggccaggcgtggtggctcacgtctgtaatcccagtactttgggaggccaaggcaggcagatcacaaggtcaggagatggagaccatcctggccaacatgatgaaacccagtctctactaaaaatacaaaaattggctggccggcatgtgtaatctcagctactctggaggttgaggcaggagaatggcttgaatccgggaggtggagatagcagtgagctgagaccgagccactgcactcaagcctggagacagagcaagactccatctcaaaaaaaaaaaaaaaaaaaaaaagaattc

SEQ ID NO: 204882 - DNA, 1000 bp, Homo Sapiens
gctcatgcatgtaatcctagcactttgggaggccaaggcgggcagacctcttgaggtcaggagtttgaaaccagcctggccaacatggtgaaactctgtctctactaaaaatacaaaatgttatccaggtgtggtggctcacacctgtaatcccagctactcagaaggctaaggcaggagaatcacttgaacctgggaagcagaggttgcagtgacggagatcatgccactgcactccagcctgggtgacagagcaagactctgtctcaaaaaaaaagaaaaataaaagaatacaaaacaaagaaataattgcaatacaagatataacaacagctattagtaacacatagacatgagaatctacgaatttagtaaagagcttcttgaggagatgatgtgtaatgaaggctagcctttacagttgaatacaaattttaaatttcaggtcttgaaggctagagccattcctggtaataatgtcccattaatatagtcatgctgcctttctcatccaaaaacacagaaaactatttgagtgactattttctccattctctcaaggatgctatgtaacctagtcctactctgaattcctggaagatgttaattcttcacatacaatatatgccttgtggcataaaggctgaatttggtcataaaaccttagttgggtaaggctaggtgggttgtagctttcaaaaatttttcacctagtttagacgctgcaaagtgtaatgaaaggaccaatttcactaggtgttaagtgacttggattctaatccaagttactaaaaattaatgtgcgtctcctgagccccacctactcaggaggcagaggtaggaggatctcttgagcccaggaattccagtttagcctgggcaatatagagagtcctcaactcttaaaggaaaaaaaaaatgacatgaccttgagcaaataatttagcttctctattgtatatttgtaaaaggagagtattaaattagacctatagaattc

SEQ ID NO: 204883 - DNA, 1000 bp, Homo Sapiens
tttttatattaagcctgtaggatttcagcatactggcttctgctctgcattccaaccttgtaggattattttcaattcttcatcctgacatgtgcgatattaaaaatctctcctgacttggagtcatctgaaatatgtccataaagccctataaaactggccagtggctggaattgaaggggtaagaatggaaatgggcatagaagggagatatttacctgagaaaggtttaaaatagaaccaatcatggggcaggagtgtggggtggaaagagctctgggccagaagttagaagatctggtccctcactctttctgtcacttgtgcagtcttagattatttcatgtatctaagcctcagtttcttcataaagcaacaacagcaacaacaaaataaaataacgaagtgtggctagtaatacctggtaagattgggaatcacagaaaatgagtttgagcttccaaggaatcttcactgcaatttaagtgatgctaagggctatgagaatacctggaggtgctaggattctatggactctaaatgcttattgttatttgacttttttcctaaccattttcaggtttagatttgcaaaatattttcaattccttgtttttcccaatctcccctacattcatttgtaatcaataatgtcggtttttccatattgtcagccaacagcttagcatgggatatttctatcccagatattcctccaaaaagctaatcaaataataccagttttttgctcagacagatgttagtgaagattagagagagtcactgagaatcatgccctatgtcagtacgttgaatccatttttcaaagttttcagggtgtaggtctctctgttgccacgagatgagctggggttgagccctcaactggctggactgttggcatgtgtcctgtgaaagctttaaggaaccctgggcatgatctgatccacctacctcattttacagaagaataagttgaggccctaagaggaaggaattc

SEQ ID NO: 204884 - DNA, 1000 bp, Homo Sapiens
attctcctgcctcagcctcccaagtagctagggttataggcacacaccaccacacccagctaatttttgtatttttagtagagacagtgtttcaccatgttggccaggctggtcttgaactcctgacctcaggtgatccaccgacctcagcctcccaaactgctgggattacaggcacgaaccaccatgcctggccagcattgagttttttatctagattttatggagtctattctgggggaaaaatatgtaatgataagtctagcatgaataaatgcttgggaagatgagacaggtccagaggacaagatgtgaaaggtagtgagaggcccctggcattgggaaatggacactctggacagtgagtcatggataatagcaccctgtggatcccttagaaggcatatctcattcctggcccacacagcagcaaccagcctatgtggccaagatctttctttcactaattaacaaactaccagaaatacactaccccggctccacagggctaatttttggtctggggaaagaaggctgaggggcacaggtagaatggctcatactctctccctgggccctgctggactaaattgtgtctcctatgtcatttaaaacatcacagtaacccacggcctttaagagtcaacatgatggctgggcacagtggctcacgcctataatcccagcactttgggagacaaggcaggcagatcacctgagatcaggagttcaagaccagcctggccaacacggcaaaaccccgtctctactaaaaatacaaaaatgagccgggcatggtggcaggtgcctgtagtcccagctactccagaggctgaggcacgagaatcgcttgaacccaggaggtggaggttgcaatgagctgagatcgcaccattgcactccagcttgggccacagagcaagactctgtctcaaaaaaaaaaaaaaaagaaaagaaaagaaaaaagaaaaaacaaagagtcaacatgggaagtgaattc

SEQ ID NO: 204885 - DNA, 1000 bp, Homo Sapiens
gaaaagagaattgaaggtagaatctaggaaaattgctacaaagaaacaaagattcaaatgacaggctgagaaagagtacagaattaagaagattgaagagttttagaactattagaattaagaataagactgcatgccaagaaggatggtgtggtaaaatatgtcatccatttcaaagcagtcaatgaagataagcactaggagaaaagatggaatttggtaattatgcagtcattggtggcttttgaggaagtaatttctattaaatggcagaagccagaccgcaagagatgtgtgaagatgagaaagtggatgcaacaaggatagatgacccattttgaaactgacaatattgaaaggaaggaaggacatgagatagtaatttaagaaattggcagtttcaagagaaagtttttttggggaagaaatattcaagggaaaaaatgtatagtaggataaaggggaggtgaaagcagagaaaggatcaagaagtcaagtagaagtattaattttagaaagatgaaaaaggataataaaattatgggtaaagatgaaagtacattttgagcctttctatttgataggagtttaccttcgatgatcttataatttttcacgataattgagaagtaaggtcacctgcagagagtgaacttgatgtacaaggttgaggcttaagaatagtaagagatgtagaacatttgtttcaaaggctatgatggttaagacaaaaactgagttatccatctcctttcactctattcttcattttctatctgtcattgagctctgcctgttctacagcctaagtatatcttaaatgaatctctttatcatcactactgcccctgtttcaagccttcatgatttttttcctgctctgttacattatcttccttactggtttccctgccttcactcttccaggcagttttccacattgctactaaagtaatctttctagcatgcaaatcttctcatatcaccttgctcagaattc

SEQ ID NO: 204886 - DNA, 1000 bp, Homo Sapiens
tggtcaaagggtacaagctttcatttataagatgaatatgttctggagattagggagcgtccttagtcttttccctctccatgcagagggtaactatgtgtgatgacagatgtgttgattaatttgattatgggaatcaatatgcaatctatatttatatcaaataatcacattgtatactttgaatacgtataatttctattaattattcctcaataaaattaggaaaatcagaagcatcctaaaagttgcattaaaaacaatgatgaaaacaggccgggtgtggtggctcatgcctgtaatcccagcactttgagaggctgaggtgggtgatcacttgagatcaggagtttgagaccagcctggccaacatagtgaaaccccatctctactaaaaatacaaaaattagtcgggcgtagtcattcctgtagtcccagctactcgggaggctgaggcaggagaatcacttgaacctgggaggtggagggtgcagtgagctaagatcacgccactgtaccccagcctgggtgacagagcgagactctgtctcaaaaaacaaacaaaaacaatatcccctttaaaaacgcaatgaaaaaaatagctgccttaccaagccaccagtgagagcccatctctgaggaaaaggggtgtgcagccggacaggcttcagtttaaaagcttaaaccttgacttggacttactttatgccctgagcaagctatttaacttttttgttccttaatttctaaattatgaaatggcagtggaatgaaatggaagatgaaattgtgccttgttcgatgccctggggtctgaaaggtgctcctaagggtgtacagcagttagcaccgttagcgtcctgggcaaacccacagcccgcagatctcttatttggcagcgaattcctgcagatcagctctaagagccagatttcctcatggaggaaaagactgctactgtcacgggaaagatttgtttaaacatattttttagtacagt

SEQ ID NO: 204887 - DNA, 1000 bp, Homo Sapiens
tgtcctatgaccctgccatccccctctgcgagaaacacccaagaatgatcagtaaaaaaaaaaataataaattaaaaaaaaaaaaacataattaatggcttttccagttagaaaggaccaagaaattactggctatttttgagccaagagagtaaaagtaaaactggagcattgttctatcctggcacgtagtcatagcacatctacattttggacagttggttgatgaaacattaaaaaaaaagatacagcaaggacatttggatataaagaagctgaaatgttagattcttcagatgaggactgcaaagactagagatattatggtgggatgaacatactcttactaggtatatccagaaataataaaactgttaaaacatgaatgcaatagttttatacaaaaaaataggaagaaattttatcaacctttttatcttatgatacgatatagctgaacagaagaataaagtgtttaacccatttatgctggaggttgcaaattattttgtgtgaaaaatcagatcttggagatgaccttgagcagtgtgatataaataactcccacaagcttagtgttccaataatggaatgctaggcataagtaggttaatctggaacctacacagctgcgcccaaccatcctctctctgcttggaatggggaaaaaaaaaggtaattttcctcatcctttactctttctccatcagaaactgcttcaaagaaccaattagaaaagttgagggaaggtgttcctaaaaaaaattaatggaagactattttaaagagattgtcatcatggatctgggccagagaattttagaagcttacccagggatgatactgtattcctacccagggatgatactgtattcccaactgctgtctttgaactgaaaaaggaaatctataaatatatttaatttttatatcaatgaatttttatagaagtgctttttatatagtttatactaaatgattgttaaattaatttgaattc

SEQ ID NO: 204888 - DNA, 1000 bp, Homo Sapiens
actggctgatcccatggctcaactctattattattatttgtacaaatttatggggtatcatatgcaattttgttatctgcatagatagtgtagtggtcaagttggcttttcgtatatttatcacccaaataacacacactgtacccattaactaatttatcgtcattcacctgctcccactctgtcacccttctgagtctccattgtctatccttccactctctacacccatgtgtacaaatttttagcacccacttatgagcgagaacatgcaatattcaactttctgtgcttggtttgtttcacttaagataatgtcctccagttccatccacattgctgcaaaagatataatttcattctttcttatggctgaatagtattccatgaatagtcttccattccaaatataccacattgtctttgtctattcctccactgatggacacttaggttgattccatatctttgctactgtgaatagtgctgcaacaaacatacaagagcagatatctttttgataagtggatttcttttcctttgagtagattcctaggtcaaatggtagttccatttttacttctttaagaaatctccacacagttttccatagaggttgtaacaaagaaaagagagaagacccaaataaaaaaatcagatatgaaaaaggagacgttacaactgataccacagaaatacaaacgatcatcaaaaactattatgaacagcaattatgctcacaaactagaaaacctagaggaaatggataaattcctagaaacatacaaccactcaaggttgaaccaagaagaaatagaaaacctgaacacatcaataacaagtagcaaggctcaatcagtaatttaaaaaaatctcccaacaaagaaagctcaggactagatggattcacagccaaattctatcaaacatacaaagaactaaaaagaactaataccaatcctcctgaaactgttctaagaaatcaaggaataaggaattc

SEQ ID NO: 204889 - DNA, 1000 bp, Homo Sapiens
cgtagtggctcaagcctgtaatcccagcaatttgggaggccaaggtgggcggatcccctgaggtcagcagttcgagaccagcctggccaacatggcaaaaccccgtctctactaaaaatacaaaaattagccaggcatggtggcaggcgcctgtaatcccagctactcgggagactgaggcaggagaatcgtttgaacccaggaggcagaggttgtagtgagcagaggtcgtgccactgcactccagcctgggcagagagcaagattctgtctttaaaaaaaaaaaaaaaaaattgttttgagacaaggtctcactccacatcctagactggagtgcagtgttgtgaccattgccaactgcagcctccaacacctgggctcaaccaatcctcctgcctcagcctctcaagaacctgggactacaggtatgtgctaccacacctgggcaattttttttttttttttttttgtagaaacgaggtctcactatgttgcccaggctgggcttgaactcctggcctcaagcaatcctcccgccttggcctcccaaactactgaaattacaggcaggagccacagcacctggccagaagcttcccttctgtctactcctgcaacctaccagtcacaacagtgggggtggggctggctcctttttcatcttcacggccactttttttttgttttgtttttttttaagagatggggccttgctctgtcacccagattggagtgcactgtcatgaaccagctcactgcagccttgacctcctgagctcaagcaattctctgccctcagccccccaaatagctggaactacaagtgtgccccaccatacctggctaatttttgtatgttttgtagggatggtgtttcacctggttggtcaggctggtctcgaactcccgagctcagcaatccacccaccttggcctcccaaagtgctaggattacaggcgtgggccaccgtgcctggccttcacggccactttggaattc

SEQ ID NO: 204890 - DNA, 1000 bp, Homo Sapiens
caaacttgcactgacctatccatgccacagacctcactttccagctgtatggcaaacccagtgctcctctccagcaaggcagctgtttcacttggacctccaggaagcaggaagacaggctctttggccacacctggaggcaacacccattgttacctgtgggatctgccgctgctcttcatgatctggacagacttccttccctcacaatttgaagtttaaccctttctcctgccccagcgttcaaccccctacagggtctgctcccaggtcctctgtgagaccctccccactcgcatcccatagggcgagtgagcctgatgctgctcccacctcagaataactcagcagcccagttgtgcctgcttgaggtgctagggtctttcacagctcacagctctccctcctagctccactttagaatcacgtggggaactttttagaacacattgatgcctagccacttctgggatgacttaaatccaagtctctgagggaatgaactagacatccatgttggcatttaaaggcttttccaggtgatactaatgaataatcagatacattattgtggctttgcttttaagatgctgagattctcaacatactctaaaagggaggcagaattcctgccagggaaacagcttttcatgagggtcttgagtacagatgctcatttaactcagcaattgtcagaagcacatagaagagtttttacaaagagcatgttatggggccaagaaaccagctttcctttctttttctttaacgctggagaaggctttgactgcactatccaaaaaacagaggtcctcaacttcacaaatgagaaatacgtgtgtaaactgcaacaacagcttgagtgatacggacaaaagctaaaaacttgcattgttatgtaaatatgtcagtagattcggccaaactacaaagatgccaaaagaagcatacaaaatggaaagttatcaaattactataaatgatttccagactagaattc

SEQ ID NO: 204891 - DNA, 1000 bp, Homo Sapiens
ttttatgattctgtagtcatcatacaacaggaaatgttctgctataaggctgaaaaatcaagtggaactggaatcagtgttgttatgtgcagtcttgctgaaagctgttttaaaacaaataaatgaagtattaagaatgccatattaccaatcagatttttggcattttcaggttgtgggagagggctgtcgtcttgtcaggtttgctgactagattcagaggaaaatctattcagccttacacattactaatgatgaccccagaggagtgggggccgtgggaggctgacctccgcctccaaagcccatttacaaaaacaaaaccagaccctgctctgtggggctaaatgggatggccaaatgcggaggtgtgcatgcaaacgagtgttttcttcttcaatatacccagctcatttgaattttaataactcccttctgaagcagcttttgagtttaaatgtctggatgtcactcatcagagcccggtgggactgctgataggaaggatggcaactttagtgaactcttttgaggaataaatggttttagaaaataaaaataatgcttagcataggcagaaaagtttagggatggcatggtttcattgtctctgcttgctacttttaacttcagcaactcactagaggaaagaaatgtgatgggccatccccaatccacatttgtgctaggatgagtttgggcatggtggtctcaaatttagccaatcaaatttgagatagtgaatctgttaatctgttttctaatgtttagggctttctcacttaggatactgactttagtactcatgtgatagaacatataagatgttcatagcatccattctttcatgcagacccacattttaaaaagatactaaatagatgagattccctcagtttttaaataattcaattcatggttttgactataactgggtcttttttttttttttgctataccatgtgacattcttctttcttctctcatagccctggaattc

SEQ ID NO: 204892 - DNA, 1000 bp, Homo Sapiens
tattacaaatttgcaggttaatttaaagggacatttttctctttgtaactttatgaataaatggagaaaaatattctctgtatgtttcctttgttccagttttaaattttcctttattatatgttttacttttaggtcatttcccatttttctgacttggttttgtatggaatttgacagaacaaagaaagcatttaatgatggagttatataaattctttatcttctatgacaggctaaacttactggaaataaatgttgatgacaattaagattatattaaatatctgcagagtgtatttgtataaatgcttagaaattaatatacactgaaaaaatattaaaaagtattagagaagctaaaaaagaaatttttgcaaaagaaaattttcggagagaatcttgagatctgttacatgtaaattatgattagatcaacctttagaatatatataatctccatatagtgaagaaacttatgagatagtactagtcataaaagaaatgccagttcaaataaggtaggaaaataatttcatgtgtttttaactaacattttttgtttttaaacatattaaggctcagatttgtctgggtgtaggatttagagggcaatttggtaatacaatttaagtatcataaaagtgttcatacgctttaacacattaattccaagcataaaaattaatcctaaaaaaaaatttagaagcagtaacagtaccgccaccaccaccaacaatgtacatatatacaaagtttttatggaaacatttttttcaatgtccacatttttcaaaataaagatggctgggcacggtggctcacatctgtaatcccagcactttgggaggccgaggcagtctgatcacgaggtcaggagtttgagaccagcctggccaacatggtaaaaccgcgtcgctactaaaaatacaaaaattgttgggcgtggtggcacatgcctgtaatcccagctacttgggaggctgaggcaggagaattc

SEQ ID NO: 204893 - DNA, 1000 bp, Homo Sapiens
atcagctcatggacaacaatccagaagagactttaaaatgtattttaactattctggccatgaaaagtgacccaattcttcactaattcccatcaaaatgagaaccatgtgttatacatccaaaatgctataaacctgaacaacatttactaaaatgagatctcagacctatagttttatctgcacgcccacattgctcctagtaactgctgattttacagctgagaaaataaaactaagaaactaagttaacgaggacacacaatgttgataagcactagcactgggatttaatcctttttttttttttttttttttttttttttttttttttttttttttttttgctttagtccaatgctctttccagtagatcagaactgcctaacttcatcaaatatttccactctcagatgggcaaggagccagggggaaggtcaggtcccagttccctaacaagaatttctggtacactgctcagtgtttcacaaaactacattttagttcctctgacatattcataatttttcaagaaaaaatatattcaccttcaacatttttttgtttgcagtgttcttgccacagtctctccttagctgttcactcattgcttgcagctctcgtccaaagtggatcattctttctatggcggcctgacttcctccacacaactggcgtctcaactgacttgaatcaacttctgtaagaaaaacagacaagtattttactaccttatggaatggagtataatgaggacacgaacatacatttcttataccattttgtacatttagtaactattccctaatatttcatctaaatatgcagattgttaaaaattcatttttaatatgaaactgcagctaaaagatatactttatttagctctcaagagtctaggatccagtattcagcatgcagttgagaggggacaacctttcagtgttagagggtacttatgtcagaaaaaaattttagaaaaagtataattccctaaaac

SEQ ID NO: 204894 - DNA, 1000 bp, Homo Sapiens
gtttaagagaaagcatgaagagcctgtctgcttagcactacccttcattacctttccctccgcaaagcacaaaggaagcaaatcttggcttaaattagaaggtagcaagttgtcctctttttgatccttggatccccatttccaatgcactggtgctctcagatcttttgatattgcaaagacttcctcccttgtcaactgtttccagttcatctttccaaaacactttctacatcccactaatactaactttcaagaacacagcttggaacatgtaacttcctttttcaaacactggcagaaactccccattatctaccatggaaggcagaattctaagatggcccctaagacttcctgcaccctcatctacaagccctgcacctactgaggaaatccattgcatcagatggcattcagggtccttaagggtcatttcctggattccaggctcaggttacctgacactaattcatgcacctcaagctccaggtaaactggtaatctgagcctttgcccaagctaatttccaggtaaatctgtccctttattcattaagtttagaaatctgcattccaggaccaggcacagtggttcacacctataatcccagcactttgggaggccaaaatgggaggctcagttgagcctaggagttcgagaccagcctgggcaacaaagtgagaccccattgctacaaaaaattagccaggcatggtggcacacacctatggtcccagccacttgggaggctgagctgggaggatggcttaagccctgggaactcaaggctacagtgagccatgatcacaccactgcactccagcctgggcaacagagtaagatcctgtctcaaaaaaaaaaaaaagaaagaaagaaaagaaaaagaaatccgtattccttgcagaccagctcaaacaccccttctttcctactctttggactcaacattaatccatttcttctttccactgctccctcaagacattacctggaattc

SEQ ID NO: 204895 - DNA, 1000 bp, Homo Sapiens
tgaagcctcctccaacaagtctggaatctgtccaaatttaaattaacaggtacttctatgaattccctcagagaacacactgtggatgctttagagacctcttcccatgcatcctgaattatctgggttgcatatggtggccataagtagtccatgggcttctgatgtaaaaacaaacctgccccttttgaccctgctctgtacagcatcagggcagtgattgctgaccatatcctggaccctctggaaacagagggctctgcatccatgtccatgagccttcatgcccatctggccatcaggccttgggaagcagcaccccacagccttggcacagctgcagagacctccttgcctcaggatggagtcaaacctggaccccctgccattctcatctgcaggaaacactgccctccttcattctcaggctgtgttgctggaagtcacccgtctccgaggacccttgggatcgactgagtgaccagcagtgaagttcatccaccttctgaatggatgccatcatctgacatgatggagcgcagtgggatgctgctgccttccctcccttagctaggatgtccctgataaaggatgacacccaagcctcagcacaactggccaaacttgaggtggtcatctcagcactgatgctgggccaacaattagccccatttgtacatttttacaaatttttggcaattgtcaagaattgtccaccttccctccccattgaattaaagaaacttcttgcctcatggatactcagaatacaatcaaggtaacagatgcctttttttttaaccaaggacacagtacagatctcacagggacactccttatctcctgcagagttccagacactactgatggtgaccaaggcaacattcatcggaaaacacagtgctaggcttgtgaaagtgtccagtagggcttccactgcccctataggctgcaggcagctgctttagttgagagagagactgagctcctcaaagaattc

SEQ ID NO: 204896 - DNA, 1000 bp, Homo Sapiens
atctgggagtggtggtgcacgtctgtagtcccagctactcgggaggctgaggtgggaggatcacttgagcctggaggttggggctgaagtgagccataattgcactactgcactgcagcctgagtgacaaagcaagaccatgtccctccccacatccctcccacaccaaaaaaaaaaaaaaaggctaagtcacacacccaaggccacagctaacaagtagcagagcctacatatatatatatatatatatatatatatatatatatatatatatatatatattttttttttttttttttttgagacagagtttcgctcttgttgcccaggctggagtgcaatggtgcgatcttggctcactgcaacctctgcctcccgggttcaagcgattctcgtgcctcagcctcccaagtagctgggattacaggcatgcaccaccacaccaggctaattttgtatttttagtagaggtggggtttcactacgttgtccaggctggtctcaaactcctgacgtcaggtgatccacccacctcggcttcccaaagtgctgtgattacaggcgtgagccaccacacccagcacagagccaatatttgaactcaggactctgactcctactttccaaaagccaaagcagcacagatgcatggatgctcaatgggaaatgagagaatttggtccagtggctcacattttattgatggggatactgataaccagggatggggaactgacccacccagatttcccaggaccaggttagcgaagtcccagtcctgacatttttctcatcctaataggctggctcttccaatgggcgttatgcacctggcacagagcagctgctcaataaacctgcagaatgagaatgaatgtctatcgcttgcaccagactgtaagctttgttagaacaaagattctcttctgttcatctttttattctcaacatcttgcacagagcctgccatatggtaagtgtacatctcctcagtgaattc

SEQ ID NO: 204897 - DNA, 1000 bp, Homo Sapiens
aaagaccattgcatacactggggtgactaaatattcgtgcctttcaggtgcaaagttttgagtctgagttttagcctttctatgtcattttctcccccagccccagtaggtttttgtaagtactctgttttctttttatcatagagaggactcctgtgacagccacagtcttcagaatgctatttctgaaatgctacctttgagttggttcagccctcatttgagaaagtatttttaagactcagaagccaggattgttttttgcattatgatttttccttaaaatttctaagatatttgatggctttttggtattttttttcttttgaaggtacaagagaaaaagagagtagtgaaaaaagaccactctgttgactctttcaaaaaccagaaacatcctgaatccattcaaggtagtaaagaaaaaggcatatggaagccggaaacacctcaggttagaaatcctctttaaggattttcagctcttgtttgcatcccagtacagagaaattccattatgcagacccacagttattcagacttgtctgcattaaggaggaaacagcaaccagggctaccgctttgtcttcactgcactccccccaagtcatctcccctctcctcgctccacacgccagagtttcatgaatctatactttaatagttagtgttttttgatgccatgccagatttaactctgaagtggagttaaggtaggatgaagaatcttcttcccactaaagaatttatttctccctctggatttccttggaatagaattaaaatagaaataaatataaattacatctgatttcctgcctgctctcagtgttgcctctcccaaggtcattgctgttgggccgtactctgcagcagtcttcccagaacgctgtggagctcctcctgggaacagcccaggactggagagcgagtgccagttccacgtgcaggtgtcccagggtgtctcactgaagccttagtgtcctgagccgtaaacctg

SEQ ID NO: 204898 - DNA, 1000 bp, Homo Sapiens
ctaacattatcctctcaggaaagccttctcttatctgacttcactatctaaaattccccactccccaccctccctacccctgtacaggtcctccctattctactaatgctttgtggtttcagagcacttacaactataataatattctgttacttgtttatgtctctgctgatatctctccagtgttcaacacatagtatgtgctcaaaaaatattacttgcgcaaatgaagggaatgagtgaagcacctattagagatggtgctcagggctttacatgtattatctcatttaatcctctcaataatcccctgagagagattcaatcaccacagttttaaagtgagtaatctgaggtttagagaggttaagagacatcttcaaggtcacatagctagtaaacgagggaaggctaaactcatccagaatcctgtttctttccgccacctctcctgttgccaggcaggtgcaagcctcatcaactccctctcgaatgactgcagtggcctcctggtcagtgtcctggcctgcatccttggcccccagcagtccttctgcaacacaacaactgtttaaatgttttattttattttattttattttattttattttattttatttttattatttttagacagagtttcactcttattgtccaggctgcagtgtaatggcatgatctcggctcactgcaacctccgcctcctgggttcaagcgattgtccttcctcagcctcctgagccccgcctgtttaaaggttttcaattgtaagtcagcgcacctctcccctcagcttaactctcttcagtgctggctgggtgtggtggctcacgcctgtaatcccagcactttgggaggccgaggtgggtgtatcacttgagctcaggagtttgagaccggcctggccaatatggtgaaactccgtctctactaaaaatacaaaaattagctaggcatggtggcaggcacctgtaatcccagctactcaggaggctgagg

SEQ ID NO: 204899 - DNA, 1000 bp, Homo Sapiens
tttacagttaaatgtgcattcctaaatcaatccttgttggtttcctccccttctctgcccactccccccagtacttccctcttcagcaaatccttgggcagctcactgtggacgattctcttagtttgactgctcatagcaatgggagacatgctcctttgcattgcatgatttgatcaatggcagttagttttctcatttgctcagtaaatcttagctattgccttgcttaggactcttcttcacacataggaagcatctccaaaagctaatcgaactccattattttttaatctctcctaagttcaggctcatcttttcctcttgatgacaactcaatgggccctctgtggggctggccatgtgatgcaagccccaccacactctcaaatccaacaactgcttgacagattttgtttcccagttttacatgaaacatcacaataaaaggaaacaggaactcaatgaagataaattagaagcagtagctaatacctacagaaaaaaattccaagtagcacactccaagggatcattttatagcctttattctttatttgggagaaaatgagcagactagtcaaaaaatataaccaactaatttatatctgccttaccagccattagaataagccagtgaaacatgtctctggtgaaattcttagctttacattttcatcacaggcagtttcgcaagccataaaatgttatcaaatatctgcagaacagatcaatggtactgcaacagggaagccctttgtcataaaaggccaaagactggccaccatccttgaatctcggaaagatctgttagcaacctttttggtagtcacaggaacttctggaactagatggaaatgttgtaatcagtaactgttccccgtaattggctgtgtttccatttaagatcagagtggaactctgaatgagaaggtgggagatttaagtgtttcagaagcacttttcatggctggatctaaattgagattcaactgaattc

SEQ ID NO: 204900 - DNA, 1000 bp, Homo Sapiens
ttggattaacaatagtataattatgctagcataaataattgagctgcttactgtatttggaaatcaaggtaggtccagtaaagggaacttaattctaatttatgaggagtttggagagactgaaagtgagagagacttttttttttttttttgagatggagtctcgctctgtcacccaggctggagtgcagtagtgcagtctcggctcaccgcaacctctgcctcccgggttcacgccattctcctgcctcagcctcccaagtagctgggactacaggcgcctgccactacgcctggctaattttttgtatttttagtagagacggggtttcaccgtgttagccaggatggtctccatctcctgaccttgtgatccgcccaccttggcctcccaaagtgctgggattacaggcatgagccaccgcacctggccaagagagactttaattctaatttggccctagaatcattagtgccagttatgaaaatacaggaaattagcctctctgattctgttggttttcttcatgaactgagaaatggaagtatcatggttttttgtgttttgtttcctttttccatttaccttaggatttgaaacagcccatggctgaaaggaaagctcagctggatgctcttgcttttgatattcagttctttatctcagaacatgcccaggacttgtcccctcagcagaatcgacagatgctgaggcttctgaatgaactgcagaggtccttccaggacattttggaacagactgccgctcaggtggatgccttgcagggccatcttcaacaaatggagcaggaagccctggtgaaggtcagactgaaccagcagctgggctcagtttgtctttggggatgtcctctgtcattgggttttctggccagactctgtgtatcatgattgcaggagcctgggtttaccaattttgaaatttcatgtcatgcaggccagtatggttctagtccaggaggcacttgttctggctgtt

SEQ ID NO: 204901 - DNA, 1000 bp, Homo Sapiens
ggccatcataatggatggactgagggctttgatcccagggcaaaaacctcacagtgagaactcacagaagaggttcacaaatctcttgcaaacaaacattctttaatctgaacagaagtctcacatgcaaatgaagggccaccttattttggatgtcccgcccctaccaccacaaactcatcttgggggtgacagcaacccccatttctcagatcatttcccatgcacgccccagcttcttgggaatgagagtatccacaggggcttaagtgacagcactctggactccaccatggcacagcgtgggccctagacatgggaacatttctgcccaccaggtgggtggcaggaccctcagtggggtggattttctggcaggatggtgagtgaggagacttacagcaggcgcagggagcggagtccctggaaggccaaaggcgggatgcactgcagggcattgtagctgaggatcctgcggaggaaggagatggaggaagggcactgtgttagtgcctggcccctgtgggcacagccgccgcccaggacgtggaggtccctctcacccagcagcctcctcgggctctgtgaggggaggcagagcagccggcaagtgcatgggctgggctgcgccctaagaagctggtggtcttgggcatgccccctaatcccttctgcctcaatcagttcccccgactgtaaaatagggacaaaaataatgccaactccatagggctgtcctggggacgaaatccaggtgaagcacttagcatcatgcctgactccaataaatcctcaacaaaggagagttgctgttgttatgattgagaacattccctaaggggctgccccagcaaggtgcataggcgagttccctatgaaggtgacacctgactgcggggagctcaccgtctcagccgaccacttccagggaggacaggcaaagtcatctacaataatttactattgaaaagctgtgacagtgaggaaggtgctgtcacta

SEQ ID NO: 204902 - DNA, 1000 bp, Homo Sapiens
gagctggatgctgagcgggagccaggcgtgcccctgccccgcccctgccccaccctgcagcgcccagggaaggattccctctccctgcacatctgcgcactccctggccagtccctgccctgcccctgccccaccctgccctgcccctgccctgcccaggaagcatttcctctccctgcacacccacacactcgctggccagcccctgccctggcacagttcatgggacaccgttcagctgattgggccacagactttagtccccagataaataatgctctctttaaataatgttgttattgttattattatgtccaaaaatagaaagcgtaaagacagactcttttgactttggttttcaccactaagaacctacttcacaccatgagaacctgagtcaactccattttgttaggttgggaacataactttaagagcaagtgtcattaagttagacactaagcaaacatgtcttccttcatgtttctcgtgacggggtaggaaagcagccctgttttactgttatctttagttctacttggtgggaggtgggttttagccgcagagctgctggaagcggggtctggagggaatgctttcagcgagagggtgggcagagcacacagggctcccgctcagagaggagctcagctggggaggaggaggaggctgggaaggcccatcaggagggacagccggaattcccgcggagtggagtcttgctcccagcccttcctaactgaaaagactgcgaaggtgccccgggctgggggcctggggtgggcggctgacaggtgtagggcctggaaatccagtggagtctccagcacaggagcaactgtggaatcagaagcgctgtgctcctgctcctcgttccatttgagattcaagccaggaaaagaattcatagttagacagagggctgagctgacgtaaggaagaaacaaatgcacttttaaaaggagaaaatctccagtgcccagctgctccgtccgtagtg

SEQ ID NO: 204903 - DNA, 1000 bp, Homo Sapiens
acctttgccggcggttttttactgacggagtaagcactggagatgcttggtacagcgtcttccatcggtaaattgatttagttaaccttacaacatatctgcaaggtttttaatctttcttccaagaccgtttctcatggacttttctgtgtgtctgttgggggctgacggacttcgacgcgccagtcgcttgtgcttggggccctttgggtactaacagccacactgctgagcatgtgaaatcaggacccaggctgcacaccgccgtcggggtgagacgcccgtggccttgcatgatgaaactgggacccaggcctcactgctgtctgggtgagaagtctgtggccttcagcaagagcaggtttgcttgtttgggagaatgttctcatttcagttttttgaaagggttagagctgctaacttaacatttatatttggaggagagacttgttcttggtgaacgagaagtgtgtttgtaactaactgggttttaaaccatcaggctgccgacacactcactccccactgtttgcctcccggagctgtgagcgtccttaggtgacaaccccacaccaacgtggtttttgtaattttcctgacttgcaatggagacttttagaaggagatttttaaggaagcgtttggtttttatttaatttctcccatatcaggaaacacgatttctttttttacatacaataagagtaactttaatatattttatgtttacaacttaggaattgcaattttaaaagcaagaattcagaatgtcattagtgtaagccgtgtttcatatcagtgcattagtagtttttatattaatgtggggggggcagttcatattgaagtgtagaaaaataaattatagtaagaaagtgatgtctacatagaagacgaatcgtttttatgacctggttaattagagagttgctgccttgcgttcccatggtagctggacattcttatagcagcaaattccatctaaaaactgtaagaattc

SEQ ID NO: 204904 - DNA, 1000 bp, Homo Sapiens
atgattttcggttacttagctctgtagcgtaatttgaagtcaagtagcgtgattcccacagatttgttcgttttgctcaagatggctttggctattctgggtctttgagggttctatataaattttaaaattgtttttgctggggcagggcacagtggctcatgcctgtaatcccagaactttgggaggccgaggcgggcagatcacgaggtcaggagttcaagaccagtctggccaacagattgaaaccccgtctaaaaatacaaaaaattagctgggtgtggtggtgtgcgcctgtaatcccagctacacaggcgactgaggcaggagaatcgcgtgaacccgggaggcggaggtttcagtgagccagatcgcgccattgcactccagccccagcaatggtgccagacttcatctcaaaaagaaaaaaaaaaaaagagttgtttttgctataaggattgcattgaatctgtggattactttgagtagtatgggcattttaacaatattgattcttccaacatggaatatctttccatttttttgtgtcctcttcaatttcttgcatcactattttatggtttttattgtgaaatctttcacttatttggttaaagttaattcctaggtattttatttctagctattataagtagtattattttctcgatttttttgccaaattggttgctgttggcatatagaaattctactgatttttttatgttgacttcgtgtcctgcaactttactgaatttctttttcagttctaatagttttacggtggagtctttagggttttacaaatataagatcatctgcaaacaagaataatttgacttatttctttccagtttggatgccctatatttatttctcttgtctgattgctctagctaggaattccagtactgtgttgagtaggagtggtgaaagtggacatctttgtcttgttacagatcttagaggaaagacttttggttttaccaattcaaaatga

SEQ ID NO: 204905 - DNA, 1000 bp, Homo Sapiens
tggcaaagttggggcatgtggcaggatggtttcctgggcactcctctgctcttaccattttgtcaccatgatgctttctaaactgtttgttattcatcataactccttttattttgtctttacacttgtttgattttatttttgccatttaccttttgatattattcttttcctaatgtattatctttcattcatttaaaataattttcattttcttagattgactttgtaagaccttcatattgaagataaacacgaggaaactttgaattatcatagatgagtttctcacattattctcacatgcaccttttctctatcttttcctaccattattatttctctctacttattttctctaggatccattttttaaaagttgatccatgtgtaagcaactccatgactctgctagtgcaagcgttgcctagaattcttatttcatttctctgatgtcacctagcaatgtgtctgatgctagaatcacattaatgaagactgaagagttgagaaagaaaattgttcatcaaattagcttgactttcctggaacacgacaagcaactcaaatgcaccagatagaaactcacaagtagaaaactttcaggtaccatacgcctttcttacagagaagttaaaacctgaagagctgtttacctgggagcatttttactaacattatcccaagcactggtcctgggccttggtcgacaggcctctgaaacctttcacctgatttcacgtcaccatgaacatagacatggaagaccggtttggtgaatattggtgtcctggtgttttggggtggaatggaaattttaacccctgaaaatcacacgactacttctttgtatctgttaaagtatataactgattataaagtatggctacagttggaagcaaaagtgacatttgagggggagaaactcacataacctgaaagaaaggaagtaaagttagatagtatataagggactatgtctcacttccctggtgaattc

SEQ ID NO: 204906 - DNA, 1000 bp, Homo Sapiens
ttacatcagtagaatcagatggagagctccatgacctctttgacagagtattattaagaaataagtttcagcctgcaattataaaatggggtaaaattattcacttatggtattcaaaatgcaatttttttttggtaaaaagtattccagctaaattttaaaatggtgacctgggtttttttttgttttgttcttttttttgttgtttgttttttgagacggagtctcgctctgtcacccaggctggaatgtggcggcacaatcttggctcactgcaagccctgcctcccaggttcaaggtattctcctgcctcagcctcccaagtagctgggacttcaggcatgtgccaccatactaggctaatttttttttttttttttttagtagcgatggggttgcactatgttggccaggctggtattgaactcctgagctcaggtggacaacttgggttttcatacagcccagaggaacatctcctactcttggtctgaacttgaactgcagctgaaagaatggttaaaagaagaatctgagagttgagtagtgaggatccgatgggcagctaaggacatttctgctggtgagcacgaaagtgcccaaggcaggagtcagataaacatccttaagagataccagattattcttttctgtaaaggtaacccgccctggtttttttcctgtccacccaataaatttgcagcagtcagtgcacatggaaaggccctgctgcagccttggttcccgcctgggaacacgctcctttgcggtgtcatggtttactctgggttttgctttaatcgttatcttagtctatttgtgtctctctctgacttgtaggttttaacatgtgctgacttaaaggaagacaacaggctgtagacaaggggttgcagctccagtgctctaaggtccagtgaggtggggaagtggggggagtggcccaggcgattgggagggtggggactcatgggggcagctctggggacagtggaattc

SEQ ID NO: 204907 - DNA, 1000 bp, Homo Sapiens
tactacttgaggttattactaaattgtaaactttgcaattgcccatacctaagagcttctctttattattaatttgtggagatatgtattaagaaatacacatatttaataaaaagaagttctggaagattctgctttacaaattcagtaaagggggaaagacagacaggggatcaaaaaaaggtaattcagaggaagacagattttgaaattaaaaacaatcagcattttgtgagtatttttggtggaaacatactttttggtaatattgcatgaaaaatttaataattaatagagatgtaacaattgcaggtgttagccaagtatattatacaaatagaaataatcttaatcaaaggaagaaaaattccagcatcagctagtataatagaataaaaagtaggatgtatcaaataattggcagatgcggacaaattaataagaaaggaaacacatggtctcaaacagagatcactcccttgggatactgtaaaaagattttatcagtttcattttgcatagtaataaaacaattgtatcagaaccaacaaaaagtcttgcttatttttgtgtacattcatttttaaattgtaaggaatatagagatgcagcactcagcttccccttcaggaaaggtctagctcctgagcttcaaggagtcccagtaactgatattctcaggctaataaaacctttggggtcacctcagctttccaaacaagaatagggacaactaacatatttcctgagttacagataatgcacttgcaactatttgtgtcttgcatacttctggtgtgcccccaaatctccaggttatttaacttgcattaccttcatctaaactattttcaatcagtagaaaaaaatctattggccaacttaattttttttctcaaaaattatttttataccacttcatattttactacttttttcaatttagaatagttctatacatatatgtacaggaaagttgtgaagacagtacagagaattc

SEQ ID NO: 204908 - DNA, 1000 bp, Homo Sapiens
gagaccagcctggccaacatggcgaaaaccccatctctacttgaaaaaaaaaaaaaaattagccaggcacagtggcacgcacctgtaatcccagctattcaggaggctgaggcaggagaatctcctgaacccaagaggcagaggttgcagtgagttgagatcgcaccactgtgctccaacctgggtgacagatcgagacttcactacaaaaaaaaaaaaaaaaaaaaaaagaagcccagggtttttaaaataaaatcaataagttgattacaaatgtccctaaatgactgaatgtccaggcagtgcctccgaactctgttgcactgtccacatacacttaattgctaaacccagattcttctgcctccatcacaagattcaagacttgctgttcccttcctattctcttagtcaatgtggtcttaactgtcatcttgctggtttttctgcctctaactttcggtagttcctactaaaaagagatagtcttatgaacactggaggggtagaacatgctgtggctgatcacccacttttcaccatcctatttttatttgatgagattgaactacactgaacaacaaagcatgccttttaaaagaaggaaaaagacacccagaggcagtagagatgctccatatgaggaacacaaactctttgccttgtatatactgtgtgttgcaccagcttcctaacaagggtccatgtttctgtccttgtaccactacaatccactgaaatccgagtagcccaaggatgattttaaattctaaatcatatccacacaggccccccccccccaccccgccaacccactcccttggctttccatctcactcagggtaaaacctgagtcctcacgatggcctgttagggtttcatgcctgggctccctgtgatgtctctgacacctaccactgacttgggctctgctgtcatcaaacattgctgacttcctcactgtggccttttctcctgttattccttcagcttggaattc

SEQ ID NO: 204909 - DNA, 1000 bp, Homo Sapiens
caacaatacacctttctgagcaatgagggcaggaggaggcaccccttcccctgtaggtgaagggagctggagtccattctcattgcctttactgtggaaggttttccctgtgagtccacactacctcagcctacaggccacacactaaggaatatgcttgttgtttctgtttaaaatggaattgtattacttttcagaagcccatgcatatttagggtattagagtattcaaagagggaagagccagggccctcttcaagaggggccttcttaggaaaagaaccagcaacctcatatcagggctctctgtgcctggaaggatcagtccagtgagccagactgcatgtctatgtgtaaatgcacatcaggggacatgaggctacaccacctccaaagaaataatctatggctcttgtcgactcccattgcattgtgcctgaggggttatatgatatctacagaaatgatcaatgtggctcctaatattcaggaatgcgtatataagcaaataagttcctgctgacattatttacaaatcccctggtaagagacaatgcaagaaacacatctgtacttacagctcacggttcaggctcgaatctctctgatctgcaggcactaattcctctctgtgccctctggatcccaagctctgtttactgttaaaacttgagcttttcacgcttcaagtgatgctcctcaaacaaccaagaatccagacaataggcagtccacattccgcttagaatctaagcagctgttggctcttgtgttgggactatgtgtccaaatgtatgctgcatatgaactgctaggaatatgataaaatagttgggtgacagcacacccttgtatagtgggctaacaacgttattctttcccagagcaacattgacacgtcagttaaaatacaacaaataaacattttcatcttggcagatttatctgtttttatttttattttttttttgagacagagttttgctcttgttgctcaggc

SEQ ID NO: 204910 - DNA, 1000 bp, Homo Sapiens
aaccccaaaaaacagttactaaaattatatcacactgcctcccaagattccttcaggaatgacaaaatgttagaactgctgaagaaggctgggtgtggtggctcacgcctgtaatcccagcactttgggaggctgaggcaggcagatcacttgaagtcaggagttcaagaccaacctggccaacatggtgaaaccctgtctctactaaaaataaaaaaattagctgggcatggtggcacgtgcctgtagtcccagctactcaggaggctgaggcaggagaattgcttgaatctgggaggtggaggttgcactgagctgagatcatgccactgtactccagcctgggcaacagagtgagattccgcctcaaaaaaaaaaaaaaaaacaacttatcgaacaagaaaacggggatggaagaagggggctcttggctgttcttattcttgtcttcttcctgtcagggaaaagctagggccacaccccctgaagtgcctctgctaagtgtcgcaggggcatctaattggcacccttttcaacagtggatggacaggtgctggcaggagcggagaggacagggggcgaaggggtgaggagcccacctttttccgtctgtcttcttcctggagcagccgcagtctcttgctctccatctccttctgccggatgctctctttcgtcagggggttgcagttgttatgtccagggagcaagcggaagtagcgtttcttttcagggtcaaagtaaaacccaggtagctctttagacaaaaaaattaaatgcaccaatttcaaccactgtgaactgaccacctgagttgggcgcccagtggcctgtccccccacctcgtggctgcctgtcttttctgagggcggggatgagctgccttgtcaggcaacatcctggactgtgctcagtcctgggggaggcggtttgcctcatgaccaccattcctgacgcacccagctccttccctgagtgtttcaatttgctcctggaattc

SEQ ID NO: 204911 - DNA, 1000 bp, Homo Sapiens
aaaccaggtccctcccacaacatgtgggaattataggaactacaagatgagatttgtgtggggacacagccaaaccttatcagacaatatcactcccaaaggggtaaaatgtattcttaggagcaaaaaaaacaaaacaaaacaaaacaaaacaaaacaaaaaaccctttcctctttttatgtatgaagcacagatatgcacgtattacataaatagatgtacagtattatctatggttttaaattttcatgaaaagggtaatttggggaaacatgcccaaaaaggaagcttgaggtccatggttttcacatacactagacaaacactcttcctgctgtgttaaactattataagatgaaaatatttggctctttcattcttctggaaatgctcatggtaaccaaagttcccagattttcggtataaaatatgggctcttgctatctaaccatgtatcacttatgaaatcatctactatcttagactgagaatttatgtcttgaaacaaaaggcacaacctactacaaaactaaaaaagagacaaaaaatatgtacctatgtattagcccttttcaaatctttcctctcatgcccacgcctacccctaaaatacaatctttggcataaaaaggagaaaaggtgattttcccctttcactttatctacgactctcatccctcccctcccctccactgctccaccatcacccttccccactccagacatgagaagacttgcaggccaggccctgtctgaagttattatgtagatgatattgtcatctgaacccacagcctctccttttttctcttctctatccctttctccataatatgtatcttttcagtgccttcccctatcttaattggtctagtctacctcatttcaaaactgaaaaggatctaattttcattttcaactgaacatgacacagagtgcacactcacagacaaatgccttttccattaactgtggaataaaaagctttgactcctagta

SEQ ID NO: 204912 - DNA, 1000 bp, Homo Sapiens
aacactggacagtcaacaaggagcatgagagcacaggtgtccacgggagagcccagaggaggcgaagaaagccgtggtctgaaagatcagggtcccttaaccagggacactgacaggctggacagacaggtgtcctcatgcagatctggaccccaaagggaaacagagcaaggcaacttggggatgttgagagaagtgaatggccatggagttgatggaccaagtgagagggaccaagcctgtgaaatatgcagggaccagcctggagggctcccaggcatgctcaggggctagcaatgtgtcccaggggctctgggaagccactggaggtttgtgagctctgagccaactgcatcagcacaggtcagcacaggggtgacagactgaggccacggattcggaaccggatctgaacctcagttctatcacttcttagcttatatccttgggcaaatttctcaatgtctttatgcttcaatttcctcgtctctaaaaggggagtttcattatctcacagggtttcaataaggaataaatgacttaaacgtacataaaaggcttagcggccaggcgcggtggctcacacctgtaatcccagcactttgggaggccaaggcgggtggatcagctgaggtcaggagtttgagaccagcctggccaacatggtgaaaccccgtctctactaaaaatacacaaattagccaggcatggtggcgcacgcttgtaatcccagctgctcggaaggctgaggcagtagaatcacttgaacccgggaggcggaggttgcagtgagccaagatcgtgccattgcactccagcctgggcaacacagtgagactctatctcaaaaaaaaaaaaaaaaaaaggcttagcatagtgtttggaacataaatgcgtaataaatattagcaactattattactactgtaacagggcaaatattaatgtggggttgacacagcctttgcccctccctcccactgcctatcaatgagaattc

SEQ ID NO: 204913 - DNA, 1000 bp, Homo Sapiens
caggggaatgacgactgctgttgtgacttagaaggcgaagcagattatattttccaaaaatgaccataacaagcagtcccatcccacatgctcctcttgcagcgtgactgtgacactcctcccacttgtggtggggcgggggggggctgtgtcccctccgccttggaaccggaggagcttttgtaactttttatcatcagagcccagcacaaatgatgccctatgacttgtgagcccacaagagacaacgcggcttctccctgcctgctaaacacacaggcctggagcccactcaactgccccgaggccaccctgtgcagaagacttcctgagactccatggacagagggaggcccactgagcccccaggtgctccaggctcccactgttccagcttcagctatctgactgcaatagtatgagaccccaagccagaaccacccagccaaggccctcctgaactcctgacccacagaaaccatcagagacaatgaaatgaattgttcctttaagtcactaggtttcgggatggttttgttagacagcaacagtaaatgacacagaaggatttgtctggtgaccttggggagacagcctgaccagagacgaaactggggacagaagagctagcagaggagcctctacagcaaccaggtctctggctggatggccagagaggaggagagccaaagactttaaggtcacaacagataggacgaggtcagttactggaaatgggaagaagcccaaggagcctgagatgactacgtttcctagctggggccaactgctagaggatggtgccacagcctcaccggagtgtgtacgttttgtgtgtgcttttaaaacccactgtttttaatttcaaagacaggcacaggcagtaactcaaattgctaatgcttgcaagcagaggtcctgcttggcctgctgtagtggctggttaaggcagatttgtgcttaacagcatctgtctgtacataaacaaccaaccaaagct

SEQ ID NO: 204914 - DNA, 1000 bp, Homo Sapiens
gaggcgtgacagcagggcctcccagggctagcagtgcatcggtgggctgcagtggccatcggggctggggccttacaccttccaccatgtgtcaaaatgagtttaggtctggccgggtgagctcccatctgggtctgtcgtgacgacagctcggggtatgttggctgctttccagagacataccagaggcgccttaatctccctgacacgtcttcccagctcgctggaagctgggcccttccgggaaggttttctgtgggcaacaaatgcagctgatccagctgggtgtggattcctgcgagctttagtcaccgaggggctgtcctgacctcgctgagggctagtcctttcccacatttgcctcagaggatgggagaaagtgactctgtggtggcaactcagacacacgccttcctttttcccttccagtcccccgtctaaatctgtcacttaatggaaatgaggcctgggcgcccataagcccctgagccgctctgtgttgagcaccgactgtgtaccaggctctggctgggtactctgacaccttcacctagaagggccctgaccagggggagccagggacccctccacattcactgggtcagtcaagcctgggggctctaagtctgtgcagtacaattacatagcatccattacactacttaaattgaaattaatcaaaattaaataggaccaggcccagaggttcatgcctgtaatcccagcactttgggaggctgaggtgggaagatggcttgagcccgggagtttcagaccagcctgggcaacatggggagaccctgcttatacaaataattttaaaaattcactgggcatggtcgtgtgtgcctgtggtctcaggtacttcgcaggctgaagtgaaaggatcatttgaagcctgggaatttgaagttgcagtgagccgtgatggaactgcactctatgctgggcaacagtgtaggatcctgtctcaaaaaaaaatttatatagtttagaattc

SEQ ID NO: 204915 - DNA, 1000 bp, Homo Sapiens
tttgcttagaggctttttgctgctgggtcactgcctcctttttagctctaggtggagccttaaacccaggttcacctcagctcttagtaaactatcagaacgctgctcttcctgaatgggggaggtccccaggggattttcttggcagggtgggaaggctggctaggggtccatgcccaggggatctgtgggacaaacctcctatagtgtggtactgctaaacagccactctgatttggcatctccttttgctgagttacacaacagagattccagagctggggatggtagtcccacctccctgctttgcctctgtctgtcctcagggatatttctcccttcaggcacttgcgatgcttcccatggattaaggcagagcaggcctcctgccagggaacccaagatggtagagaagctgaatgtccacctcaattgcactttttccagtgtagaaaccttgagttggaggaaatgtttttgcatgcctggtgatcggcataatgtggggaatgttgttatggatgtagaaatccaattgtcttaccatctgctcagggttttttctggggtcctgggaactgtctcatcttcatatttgagttctgaggtccttctggtgataatttcagcactgtatatttgtttttatttttctgttggggaggggtgggtactaaagccagcttacttctatgccaccatttcagaactggaagtctttcacttttgaaagtttgattttagtgtgtctagatgtgggtgtctttgagttcatcttacttggagttcatttaacttcttggatgtttgtattcaagtctttcaccaaatttggagagttttcagccattatcttttcaaaatactcttgctacccttttctctctccttatccttctggaattcccacagtgtgtgtgtgtgtctgcctgatggtgtcccacaggtcctttaggctctattcacttctcttcagtcttttttctgatcctcagacttg

SEQ ID NO: 204916 - DNA, 1000 bp, Homo Sapiens
tagacttggatgatgcaggcatcatcatcatcgtcagctcatgtacagaaccatccatgtgccaagtcccaagccgataactttctgagccttaacttagttctcccagcatcccagttgtcaggctcccatgttcccagtcttaagaacaaggaatcccaggctctgagacaggaaggggtatggctgaggaggcagagctggagttgactgcagagactcctgcttttgttcaccacgtgctgctctgctgctccccagaaggtgccaagctccggatggggcccttactacctgtcaaatcagcaccgcctccccttccctggacagcccccttgaagggcgatggaaaaaatccagggaaggctgagtggaagaagcgaacttcagaaaaacatcaatagggcaataccatttgtgtgtgtgtgtgtgtgtgtgtgtgtgtgtgtgtgttgttgttgtttctttgtgttcttgttttgttttgttttattttttggagatggggtcttgctgcattgcccaggcattgcggcctcgaacttctgggctcgactgttcctcctgccttagcctcctgagtagctgggactacaggtgcgtgccaccacgcccactaatttttaaattttttgtaaagatggagtcttgctatattgtccaggctgatcttgaactgggctcaagccatccctctgcctcagcctttgaaagtgctgggattacaggtgtgagccaccactcctggacgaagaccattttttaaaagaaatgaaaccaaaagcatctatatgtttccatagatccatatgtatatgaaggcatagagaaaaatctggaaggatacacagctgacgggtaacagttagctccagagagggacagagtagagggtggaggtggctggggacactatctgtgatgcttaggtttttttttgttttgtttttgttttgacaatgacaatgcattcatatatcacctgtgtaattaagaattc

SEQ ID NO: 204917 - DNA, 1000 bp, Homo Sapiens
attattgcctttttaataatttttaaagcttgaaacaatcttaaactccaaaaagttgcaagtgtattacagagaacatttttttctcaacgaattttgaaattaagttgccagcctgatgtagcatcacctgcaagtgatttcctgtgatttttctacaaataaggacattttcctgcataaccataatataatcatcaaaattaggaaattaaccctgatgcattctttccctctaaacgtctattcctattgaagttttgccagttgccctaacagtgtcttttattggaaaaggatctaatcagaatcatgtattgcatttagttatatcctgttcctcagtctttcttcaactttccttgcccactcagactccaacacccaactgtgctctgccacccacatacatacagatgccatccttatcagctcaacctataatgccctgcactgggccatcctcccaaccagagacaccttccttactccattcaacctttaacatttcatcctaggacaccctcctacatggaagccttcttcatgctgcttaggctatgacaccttatgccaggtcacccccatgcatggaaggcctactcaccccagtcaggccctgactcttcacacagggcctctccccatgcctccccctgctgcatggatgcccttcttaacctgcttagattatggcaccacataccaggctgctcctccatggatacttttttctcttgactcaagccctgtaactgcttgccagattgcccccatagtgtaagatatttctcaccctactgaagttccaacacacctcaatgggcaattctcctatgcagatgccctccatgcccttactggaggccattgcatctccatcaatacacacatactgtggtataaatgtctacctcatcctgccctaccaacaactttaaaagtgcatagttcaggaaaaaaagggaagaagaggaagaagagaaaaaggaaagaattc

SEQ ID NO: 204918 - DNA, 1000 bp, Homo Sapiens
aaatttttttttttgtagcgatgaggtcttgctatgttacccaggctggtgtcaacctcctgggctcaagcgatcctcccacctcagcctcccaaagtgctgggattactggtgtgaaccaccttgcctggccaggatcattttttacatttaaaaaatttttataattttaggataatttttttcttcctgggttaattctaaaaacaatgatttgggtcagtaagtgagtgtttttaataatcctttttcccaaatagaggagatgtacccatcactgcccagccaccatactagatccaggaggccatgtggaaaggctcaaggtcacttggaagccataggtgctgagtttttaaattttgagctcaacttctctgcaacctgagaaagcttaacagacacctttcctttacactccttcactaaccagagcagaggctcccaatcctggctgcagagcagactcacccgtggaacttttaaaaacacagattatcagccgttccgaaatgatattttatcatctccaagatgaggataattaatgtccagattgcagggtgataaatgagcagatgtgtacaaagagcctaacacagtgcctgctgcatagcaagtcctcagaaggtggctgacgtgctctggaaactctttaagtgttgtaacaccgtgctactaaacagaaactggaactcaggagttgtttgaaataattgggtttgctaggttgatgtgaaatttggtttttccaggtaaatataattttgtacatgtgttttaaaacacaataaggaaaaaaaagtgagcatttttttttaatcattgaggttcacagtcggctccatgagcattaaactgactcaggttgcagggagcagaagtgcatgttcaggttgccttaattcagttctcgatggtggtagagcattgaaatcagctgtggagttaaaacccaaaaaaactaaaaacaccttcctggccccagccctaggaattc

SEQ ID NO: 204919 - DNA, 1000 bp, Homo Sapiens
ctccatctcttaaaaaaaaaaaaaaaaaggccaggcacggtggctcatgcctgtaatcccagcactttgggaagccaaggaaggtggatcacgaggtcaggagttcgagaccagcctgaccaacacagtgaaacccctctctactgaaaatacaaaaataagctggtcatggtggtgcacgcttgtaatcccagctactcagaaggctgaggcaggagaactgcttgaacccagaaggtggaggttgcagtgaaccaatattgcaccactgcactccagcctaggcgacagagtgagactccgtctccaaaaataaatgaataaataaataaaaataattaaaaatggagggatggaggagaataaattatgagctagatcaaagtaagacttttttttgcatttgatccctacataattcattgaacttttaaaaatgtgtctttataattttcagaaaaagtaccaccaggattgaatccacataaaactatggaaactgcatgtgctacattggtaaacacatatacagaaaccactaacaatataagaaaagataagttaatgtataaaattcatttaaaatgtttgctatttgcctactatacaccaggcactatgctggaaatgtgatggtgaagaacagacgtaacacttgctctaagagcgattacatcctagcggggaaaacatactaaatgataaaaaaaaaaaaaaaagtacaattaaaattgttattagtgttataaagaatccatatatggtgccgtaaaatttgatgatagggcacatgacttagagagcttctctaggaaagtgagaattggagctatgatggggaaaatgaatataaattataataactagcacagaaagaaagagcattccaagcagaaagagaagcttgtataatggtcctcctgtaggaggaagcacagttcttcagagggagtgagagcagaggggagctacatgaagctggagagatgggcagggccag

SEQ ID NO: 204920 - DNA, 1000 bp, Homo Sapiens
aagtgctaggaagagaaacaaacctagacaaggggatagaaagtaatggaacgctgatatttagatatattgattatagaaagcctctcagaagaatttgatagggagtggcagcataatttttttccctcctcatgtctctgggttatgataggtgtgctgagttggtaagaactgaatattcatttaatgtataacagtgcatgcaattgagacagttgctatggacaggttataaaaagaagaaatccatggatggatcctcatttatcagcaagtagagcatccttcagagagaataaaaacaactctctcttcatagataaccaaacaatgacacacaaaagttgcttgtgcccaatcatcatggccatgctggcagggaggatgcaacaggctccatcagagtgtttacagaatgaagactaatgtggattgaattaaatataatactaaagagtgtgtttactctggattgaattaaatataatactaaagagtgtgtttactcatcccctctatccatgtacctcctgtgatattaaagctttctgtaaataaaaaaggctctctaaaatatgttcattaacaacaatcatagatttaacctttttgttgttgctactacagctattgaaatatagacatcagaaatcttatgaaaccttgatctttaagtaaataataagccaaagtaaaaagcctttgcacatagcttctgtttctgtctcaattctagtttgttatatatagtttaataactgcccagtctttaaagtgactttatgatgtgacctcacataccttttttatgataccagaagtgtccatcaatcaaataagattccaaataactgtaacatggggacaaaaagttactgacttccctaggagatgtataactctctgttgagattttgtaggtccaaatctatcactctaacatgttatattttaaaattcatgttcttccaagtcattcttctctaggagtgaattc

SEQ ID NO: 204921 - DNA, 1000 bp, Homo Sapiens
cttcttggttgtgacagcttctcagactttccttgtttttgatgaccttgacagttttgaggagtactgcttaggtgttttgtagactctctcaatcgggatttgtctgatgtttttctcatggtgagactgaagaatgtggtttttgggaggaaggccacagaggtaaagtgacattctcatgacatcatatcaagggtgtatgctatcagtatgacttctcagtgttgatattaaccttgatcacctggcttgaggtcatgtttgtcaggtttttccattgttaagttactttttctttctcccttttcatactctactttttgaaagaaagttgggccgggcacggtggctcctgcctctaatcccagcactttgggaggccaaggcgggcagattacctgaggtcgggagtttgagatcagcctgaccaacatggagaaaccccatctctatcaaaaaacaaaattagccgagtgtggtgacgcatgcctgtaatcccagctgcttgggaggctgaggcagaagaatcgcttgaacccgggaagcggaagttgtggtgagccgaggtcatgccattggactccagcctgggcaacaacagtgaaactccgtctcaaaaaaaaaaaaaaaagagaaaaagaaagaaagttactatgtgcagccaatgcatactggctagtgctctacctccttaagagtgggttatctacagaaattatttggattttttccacaagggagattgtcagttctcctttatttatgtctttaattcagtcgtttattatatccatatggactcatgtttatgtattttctgctttgaaattataaatactattttattttcctgctcaaattttttcagttttggccactgggaacgctttcagttggctcctgtatctctttggcacacccccattgttatggttttctctttttgttttagctttcgttttgagcagtttcttactatctggcactacaagatcct

SEQ ID NO: 204922 - DNA, 1000 bp, Homo Sapiens
gcagaagcatgctacaggtcattactgacaatgtggtttgtttgggttttcttgagacagagtctcactctgttgtccaggctggagtgtggtgatacaatcatggctccctgtaactccacctcccaggccccagggatcctcccacctcagccttcccagtagccgggaccacaggcacgcgttgccacatccaactaatgtttgcattttttgcagaagtagggttttgtcatgttgcccaggctcgtctcgaactcctgggctcaagagatctgcctgccttggcctcccaaagtgcctggattacaggcgtgagccagtgtgcccagctaataatgtgctttttaataaacctttatttatgcactcataagcctcaactttttaatggtggatattcatatccagtagtaacactgaaaaactagaaggggtttttgtgacctccaaagcttgagagaaatcctatattaccctgcagtagggccacaaatattattgagatttggctggagtacattatcatagctaactcttgccgagtagaagggctgttggtagtgaccatcttagcatgtctagaatggggccggtggagtccacattcagcaaaaccacacataggtcaaatactggaactgaactaatccagtgtgtggttaatatgagtacatgttaatacccaggatttttcactaggtggaggagaaaaaaaatgaaagttattggtggaaatattgaaaactattttttttttttgtaaacagctgaattagtcagttgttgggatgggactctgttgatacggtttggtttcctaatagctaatggtcaagtagtcccagtgcactattggttgtggggcttatgtttagcttagcccttccctggtttatagatcactgtggcaaaaagacctcttaggccatcaaatcccatccctgtcagagaagacttaatcccatgactgaggctgtatcagatactaagcaggtac

SEQ ID NO: 204923 - DNA, 1000 bp, Homo Sapiens
aactgtgcacatgtgtatttttcatataatgacttcttttcctttgggtagatacccagtagtgggattgctggatcgaatggtagttctacttttagttgtttaagaagtctccatactgttttccatagtggttgtactagtttacattcccaccggaagtataaaagtgttcccttttcatcacatccacaccaacatctattgttttttgatttttaaattatggcctttcttgcaggagtaaggtggtgttgcattgtggttttaatttgcatttccctgataattagtgatgttgagcatcttttcatagaaaaatagaattgtctattcatgtcatttgcccactttttgatggtattctttttattatattatatttttattttttttgagactgggtctctatcacccaggctggagtgtagtggcatgatctcggctcactgccacctctgcctaccagattcaagtgattctcccacctcagcctcctgagtagctaggactacaggcatgaaccaccacacccagataatttttgtatttttagtagagatggggtttcactaggttggccaggctggtctcaaaccccagacttcaagtgatctgcctgctttggcctcccaaagtgctggggttacaggcatgagccaccgaccaccgcacccggcggggattgtttgtttgtttgttttttcttgctgatttgtttgagttctttgtagattctggatattagtcctttgtcagatgcgtcatttacaaatattttctcccacctgtctgtttactctgctgattatttcatttcctaggcagaacctttttagtttaattaagtcccatttatttatttatttttgtttttgttgcatttgcttttgagttcttggtcatgaactcttagcctaagtcaatgtctagaagagtttttctgatgttattttctagaatttttatggtttcaggttttagattcaagtctttgatc

SEQ ID NO: 204924 - DNA, 1000 bp, Homo Sapiens
taacctacaagatttaaagctacatatttactactctgccagaaaatcagttgcaaagtgataactatggcaaaatcagaccctaaaataatttaggcctgtccaggaattaaaaacaaacgtggaagacaacagataaggcaagaaacaatcacctagtaaattattcacattaacacgtgcacatcttctcctcacctaacaaagcacagaaggatacggcatttctcactctgtgattcttagttcaaaatgtcccaaaatatgaaaatagaagcaacttccaactgagaaactgttttttccccactaaacaagcaaagcctatttcttccctgtggacccctgacacagctagctgcagggagtgttgctgagtgccatggactcacctcctcgtcctcatcatcaaagagccccttgcccccactgaacaggccacctccagagccaaatggcgagaagtcctcgtcggtcagcttggggggtgcgaataagttatcctcttcatctagcaaacagaaagcaatgttttgcaaggagtattaaagacgggtccggaactcaaattcctgggttggcgtctgcaatgtctccaaactggcatgaagtttatctgaccctctttatcgaagtgtgaggcagtctgacgaatttcacactaaccccctggcacagtccactgacaccctcaaaagactctctgggcctccactctcaagtctgtccatgtctgcggcagacagcattcattctctaggccagcaccctggatctagatttactctgaagcaagcattcaggtcagatgccacattcaagacccattccccaaccaatctgggggaaggaagggcagaataaacaaagggacctgcagactgacacagggacaagtggaatgtaatggacatggctgtttaataggaaaaggcctggtgtatcctttattgaaaacaaatgctagagatccctaagtttctatatttctaaagaattc

SEQ ID NO: 204925 - DNA, 1000 bp, Homo Sapiens
caacatggtaatgggtgggaaccagggatgggtatagtgcttctcagtacagagagaagaactaggaaaaaggaagagtaaatgcagataatttttctggcttatcattttgatgtttgtaagttttaaataataatttattataaatgcaaatattaatgtattattttaatacagtagacccacacactggtcagccctgtatagactttttggacaaccctgagaagtggaatacaaactatacattgagcagcatcttacttgccctacaggtaagaatggatttcatataatcctctctttaatacttttaattaccctaattattcaaactacaaggattaaaatatacaatgcatatttaagtgtttaaagaatttgagaagtttatttaaatccatacttctatatgaaggctacaaagtggaacttacttaaattataaaaactattatttaaagtgaaattgatagttaaggcccctcaagaccaaagaatgcatatcttataaaagaataaaataattatttagatggtttcaattctgaaaatataaccttaggttttcttttggttcctaacttcacttcctgatgttgagcaagccttttagatctttcttcatttatggaccttgccttcctgagagaggtggatcgaatgactacaacttaaaatgttcacttttgttttttgtttctgacagtgctagttagctactttctgtcccaatagtgttcacatcaaacccagtgaacaatttataccaaggattttctcctctcctcagatgcctgtttctcagatgccacctttacccactggacccatggtccttagaagcatacctcagtgttgtgctatttcttttcttttctttttttctttttgagacaggatcttgctctgtcacccaggctagagtgcaacggcacaatcctggctcactgcagcctcaacctcctgggctcaagtgatcctcccacctcagcccctc

SEQ ID NO: 204926 - DNA, 1000 bp, Homo Sapiens
aagcataccttataaatgtgcttcctactatgcagataacctgtatttcattctgtgtagaattccatgcaaaatgagatttcgtttgtagagttaaaaaaataaatattttgttttacagtataatgaagatgtgagactatgaagaaatatctgtcatataccatcatgaagaattattttggcggtgttggttctttggagatgatctacaatcttcagtttgaatatactagtttagagagcatgaaatgttattatataatgttttaaagatgtggacttggcttcaaaaataataacttatacaagaattcaagggaaaacatatcaacaatgtatattagatatgaaaatctcaagattagaggacaatactttctcttgtaattttttgtttggcctagccagcaactgattattttgaaaccaactgaataagatcatacttgacttagaatcaaacttaaaatcatccatttttttcccaagatacagtatttgccttaggaggctgctcataactttttatacaagtgtaagaagttgccaaggtggaattaaagttaataacatggcaatgttaagttttgaagcttcaggccttcatttgatatatgcttaatcattttaaaaaatatattatttttaacaactgaccagaattttacctaactgatgaaataattgtgcacactgaagacacggcttctcatcctggtttgtcactttctgcattgccatggggaaatttcttaacttcacttatttcttcatcatgattattgctactatattagtcaatattaatttaatacagaacaccaaagaggttaagaaaattaagttctttttctattttaaaaaattttctctctcttcatcaagccgcaaattaaattaatggcaatcaatgagtttgggtttaagatatattagagttgacacttgattaggcaccatatctatttaactagctatttttagcacatgagaattc

SEQ ID NO: 204927 - DNA, 1000 bp, Homo Sapiens
gcccacctttgcctcccaaagtgctgggattacaggcgtgagccaccgcgcctggccagtcactttgttcatttttgtgaaaacatgtgccaaacacccaaatctgaataaccacagtttgtcagtcattttttttcaagttaaaatctagtccattccaggaaaatacaagtaagaaattcccacagggctatttccttgagacaatcatagttctttgatatgcagcagaaatgctttatgtacacttcccattcatcacacagaatattaaaaatatgcgttctcaagggtcaagactttttttttctttttggagaagtctcgctctgtcgcccaggctggagtgcagtggtgtgatctcggctcactgcaaccttcatcttcagggatcaagcaattttcctgccccagcttcctgagtatctgggactacaggcgcccgccaccatgcccagctaattttttgtatttttggtagagatgggtttcaccgtgttagccaggatggtctaggtctcctgacctcatggtccgctgcctcagcctcccaaaagtgctgggattacaggtgtgagccaccacacccggacaagggtcatgacttaatacaattatttatgtttactgcttattcaggaccttcttaagtgaaactggcttgtttttttttcaactgtgagtgtatggtggtaaagaatacatgtctactagtatagtttggtgccactgccttaattcagcctaagatactaacagttttacccaccattgctttcgtatcattagtgcaaatgtcaaaacaatgaaaaatgcaaagcatgtcctttttttttttgagatagatggtgatgatcacacaatattgtgaaagtacttaatgccactgaactgtacacttaaaaagtggtttaaatggttaatgttatatatattttaccccaataaaaataaattatatcatttttaactctgtatttcaacctgagattttaaaatg

SEQ ID NO: 204928 - DNA, 1000 bp, Homo Sapiens
aaaggtaagttcgaataaggtggggattgttccaaatgtgtcgcttaggggatgtcactgtgatgtctatcctaaggaagatccttagccaagagccttaagtacacctgaattaggctcactagcttggagagttctgcagaagacttgccaagctgaatgtgaattcaggaaaataacagtaggacagcttgctgttgcctggtaatccattctttataagatgctgcctaatagcaccttgttcttgggccaggtccaactatctagaggcaatgccaactttgctgaatcttgcaattctcagcttcaagccattatcagagtatttatgtgtatgtttccaacttcccagcaataattcttcgtttgaaatctgaaatcatctttgaagctctggcagacagagacagaagagagaggtgaagatcaagggcagaaatgataggaaggatgtccatgccttgaaaagtgccttttaaatatcccagatcctccaagcacctcctgaaatctgctgtgtgaattctgttaggtagaataattttattcctaggaattgtttatgtatgtccactgtcccaggaactcccaaagttgatagagctgtcctgtcttattccttctataatattctatatttactggagcttgtactaactggtattttggcacaaaatagagaataagtagttcccaactagggacaattttccccctacagatatttggcagtatctagagacaattttgattgttaagacatggggatagagaagttgttgatgcttgcatccagtgggtagagccaggggtgctactaagcaccctacaatgcacagggcagccacccacaacaaagatttatctagtcaaaaatgtcagtaatgcccagcttgagaattcgtgccatacagagaaaggacatagataagaaaagaggagtgaacaacactgggctttggatattgaatattaaatagattaacatgtttttgtt

SEQ ID NO: 204929 - DNA, 1000 bp, Homo Sapiens
tctggttgacaaatgtgtcacccatgtaaactcaccagaaatatctagagccatgaacacctagtggggtcagcaataggtcaggcagtaattgctcagtgcctcgttcgctagcagcagtgggaactgctgtagtgtaaattggttttaggggccaaattgatcaaccaaaagaggcttagagatttttggtgtttgagttactgacgagggttccaactttctggatcacgtgatgaaatgcatggcagttgactctgctatcctctaggttttgtgtctcccttccaacccccatcagcaaccgtttcttgttcttgaggctgcttagcctaagaacttttggtctttgctgtctgggagttacaaatccacaatggcagtgaaagcttttctttctccctcatcctttgtcctttcctacttttggcctttttttgcttttgcaccagttacacttgtgtccatctgctagacacccacagcatcagggtgcttgggcgtggttcctgctgggcagttgaggagctctgggtccacgacccagctctccaagccgcctcaccttgctttccccttctgaaataccactcacctacctgcccacagagggagacagtgagactaacgagaagggcatagggagtaatgagaagaaatgcacagcgtgttctggactcctcgaagagaagtgtttgttcaaggcattattaatatttttgcaaggcacagtaacattgattttttcatccaagaaccatttcgcatttgcacagagtagtcactagagtgttgaaccattttcttttatacatggaggaagtggctcatcctcggcctaagagcaccaaatttgagttggcattttttatttccagttccaggcatgaatctttgctccattttgcaggtagctggaaaatcttctgtttgtttaaatccacgttgggtaatactgcatcattttaagttttctatctggagcccggtacaggaattc

SEQ ID NO: 204930 - DNA, 1000 bp, Homo Sapiens
tcattgcaaccccttgcctcttttaatcccttaaatatcagtgttccttaggatcttattcatgttctttttactttctcttactaccttttgttgaattatcaccaatgctaatggcaaccaaattcatatttcaagctagacctcttgagctccagagctatacttccagttgaccactggccatgcccctctccatgaaccacaatttcctaaatatgttttttaaaaaagtgctcattatgtttcctcaaacacttatttttaaataacccaattttttaaatgggcaaagaatcagaatagatagttcccaaaagaagacatacaaatggccaacaagtgtatgaaaaaaattttcaatatcactaatcattacaaaaatacaaattaaaactgtagtgagagatcgcctcacccctgttagaatggctattttcaaaaaaagatgaaagataacaagtgttggtgaagatgcgtagaaaagggaactcttgtgtgtagtcagtcaatgggaaggaaaattagtacagccaatatggaaaacagtatggaagtttctcaaaaaattaaaaatacaactacgatatgggccagcaatctctttatcttttggataaatcctggatatttacccaaaagaaatgaaatcagtatattaaagagatgtctatacccccacattcatagcagcactattcacaatagccaagatatgcaatcaatctttgtccatcgacagatgaacagataaagaaaatgtgatctatatgcacaatagaatacacttaaaaacacttttaaaaagaaggcaatcctgttatttgcaataacacagatgaacctggaggacattttgttacatgaaataagccagtcacaaaaagataagtactgtatgatctcatttatatgtggaacctaagaaagtcaaacctagagaaacagggagtataatggtggttgtcaggggctggtgtagagggaaggattggagaga

SEQ ID NO: 204931 - DNA, 1000 bp, Homo Sapiens
gggagagaaggagttccgagtccccttgagccgggaaaggtggcgctcagaagagcgcgggaaggggcgcccaggctcagagggaacgagctcggacgcggggcacgctccctggcagctcccaccggcccggcctgactcccccgagcccccggccccggcgccaactgctggccggggcgggggcgtggtccgggggttccggcaggcccctgggcgcgcgtggcgcggcgcgaccctcacctgcgatgtgctggcgccgggcgtcgtccaggtgcgtggacagcacgtcccccatggccaggaggtgtcgcggcccgatccggccgacgccgccgctgttgcccgcgctgctcaggcggacgccgctggcgccatggagcccggcccgccctgcttcccccgctcccgccgctcccgccgcccggctgcggcttccgctccggctccgctcccggtcgggccccgtccctccagccggccgccttggccccctccctgccctcggccctgcaccccggcgccccgctccgccccaccagaccacgcccccgcaggccaaccccgccccctccccgcccgctgccctgcgcccgccgcgtcccaccccgccccgccccgccccgccctcggtcctgcacccccctgcgccccacccagcccctccagggcccgccccgtatgccccgccccctccgctgcctccggcgggcggggcacaggggcggtggacgccgggaccgccctggagaaggagacaaagagaaggtcccagaaagggagaccgcggagagactgcgaagagcgcacccgccctgtacctaagcagagaaagagacggggctggtgggggcatctgaaaaactgggggtgctctgggggactccagcctgagtgtcacccccctcccctccccaaccttgcccgcgcgggaaaagaatcgcgccgaggaggatgtggggcactggcaggggacgcctggacctacgggccggaattc

SEQ ID NO: 204932 - DNA, 1000 bp, Homo Sapiens
gcacttcattaattctttggttatgggacatgagcaatgtatagaggagttaaaaacagtccctggccttctaggagcttagagcattaaaaaggagctttctgtcttttcaacgccttggttgtgtaataatgtaggtgagttacacccgctgatggatgagtagtatgtttcttgctgtaaagtggaaatagaaaggaataaatggtgagcaggctttaggaatgtatttggtcatttactaacattgtatatatgaggattttcagacctgtgctgaatggaactgcaagttttaagtggaggggctgccaaaaatgaaggcacgtgctgctaagatgctatctggcgggagggatggaacaggaaagcggaggtttctttgggaatgcagtgagtggcccccttgggattatgtgcacaacttcagaaaatattgattatatttaaaaaatattgattttaatgctgggtaataaagcaatacatgttcctatcaaaaacatttgaaccgacagcaactaaaaaaagccacagttctaccatgcagaagtaaccattgttacaaaactttgctgtctgtttttttggcatagggtgttttattaatattgacctttgctagaaacaaccttttctcttcctctctatcctcacaccctctctcccaggcactgagaacaagatggttaccagccaagagacataaaagcatactctggctggctctatttgaaagatggggcccagcaggcgaaatgtatgaacacgtaggggctgtctactgaagtgagagctttgacattacgccttcaaattattcctttccttgcctattctacagaagactcataagccttgagcaattgtgtgtggagttatgctcctgggtggcaacataaatgctaaagtaggaaaaatattagtaaagatacagtctgggccccaaagaaccacattagagtcttaactccaattatagtcttggaaacctgaattc

SEQ ID NO: 204933 - DNA, 1000 bp, Homo Sapiens
tcttttttttttttttttttttttttgacaagctctcactgtgttgcccagactggagtgcagtggcaggatcatgattcgctgcagcctcaactcctgggctcaagcaggagtccagctaattttctatttttcttttcttgcagagacaaggtcttgctatattgcccaggctggtcttgaagacccagtctcaagcgatcctcctgtctcagcttcccaaagtactgggattacaggcctgagccactgtgcccaaccccatttcttaatagtgtattgcacctgaatattgatttaaatatacttttgaagtttcttaatggactttgaatgcaatagaatattaaattaatactcaataaatgtatagtataatattgaattaataaatctggcaatttttaaaaactttaaaatcaagacataagacatatagtacatagccactgtatagtgctcatgtgtttttaatctctattttttaatatttcttctgtaatcaatcacattaagataataaaatcaatacattataaacatttaaaataaaatacttgataatatgctttataaatgagaattttaaagatttagataaataccatcatttaaaatattgttttggctatcaaacaatgtgaatgtcatactaggactagtagctgaaaagaagtgaagatttgcctttgattatgagtctgtgcctcttgtgaggtgctaaagagtctgttttttgtttgtttccatgtattttgttcagttagcagaacattgctctgccagagtgggccctcttctcaaaattaacatttaaggccgggcatggtggcttatgcctgtaatcccaccaatttgggaggctgaggcaggtggattgcttgagcccagaagtttgagaccatcctgggcaacatggcaaaaccccgtctctacaaaaaatacaaaaattagccatgcctgtagccccagctacttgggaggctgagttgggaggatc

SEQ ID NO: 204934 - DNA, 1000 bp, Homo Sapiens
taaaaacttacacaaaacaagaagcatatagggcgtattgttagaggtaggcgtgtgaataacactaagtgacagctctcagcttgttagagggaaaggatgaagggaagagcctggggaaaattcatacagggcctcacagccagccctaattatgtcattcgtagggggatcccagtgtagagattacacagtgcagtgtggttttaaacttttgagtcatcaagaaacagttatgctttatttgagaaagtgggtaaagatgaaagctagggacttcttccccaaaggaatgcccatagctgtgataatgtgtgggaattacaaacccagtagaggttatacatagattcttggtgtaaaaacccatagttttgatttgactttaggatattgatctctgttcctgacctaaaaatgttttcaacttttttcttttctctagcattcctgtttcccattgcttattgcatgaggactttgtggtagagcttcagggtttgcttctgccacaggacaagaaagaatacaggtaagggtccaaaaggaacatctaagtgtatttgcttttttttttttttctccctgaaagagttgtagccaggtatgtattaggattgttctttaaaagtcattttaaaaaacaaaatttgtatatgtattaagtgtcttttggctgtcactacctaaataccaagcagctagttaatctgagaagtctgatttctagtaattttcacgtaaatggctccacaatcatccctctccaactgtcaggtagcctataatgacagctgaccattggccactaacttgcccttaacttgtcaatcttctaattctggtaatagaacaaggtagtgagtaaaaatggctaaacatatttagtcctcaataaatgttagtttcttttcctttatatgggaatttgggaagggcagagaagtctatagagctgggagatatttgtcacgagtattcaaagataaagtaggaattc

SEQ ID NO: 204935 - DNA, 1000 bp, Homo Sapiens
acaatgacaatttctcagtaaatatatgaaataggctaaagcatgtttttcagtcagaaagcaattactaaatatttaattaagggcaagtagttttcactagataaaatgaagacactgaatttaattaagtgaatactagctatctccagttattattttgtactctattgagatactttacatcagtgaataataggagtcaatgttctggtttgattatgttcctaaattcaataaaattccataaccaaatacccaggtaaaacaacggaaagagtagttaattgagaagaatgattaacagtgtttctgacggtactgtattatcagtaaggcactgccaatctaaaaattcgcaactggaaatatcaccaatacagaacacataaaagaaagaagaagctggctttcagttctcaattttcaactatccaaccaagggggagaggcctgagcagttaaaatatatgtgtaagtcagccaggcgcagtggctcacgcctgtaagctcagcactttgggaggccgaggagggcggatcatcaggtcaagaaatcgagaccatcctggccaacacggtgaaaccccgtctctactaaaaatacaaaaattagctgggcgaggtggcgcgtgcctagagtcccagctactcaggagtcagaggcaggagaattgcttgaacccgggagacggaggttgcagtaagctgacatcgtgccactgcactccagcctgacaacagagcaagacttcgtctcaaaaaaaaaaaaacaaaataaataaaaagtctagtcaatgtagtaaatataactaatatagtttgctcagaagaaaagctctcaggtctttattctgaaggtgcttattttacgcatataataaaaactcagatattttcctaacctgtaagagatggactacaagataggcacattgcaactgacagtattttgacaacaaaagaaaaaacaggaagtacaaaatacaggatggaattc

SEQ ID NO: 204936 - DNA, 1000 bp, Homo Sapiens
tgatctgggaaggtgttatatgggtgttttgattttgcagaaattcaagacgaacatttatggctcgtacacttctctgaacataggtcatatttcaatataaagtttacttaaaagaaaaaagaaactcaagaaatcaacaatggccctccataaaaatggccagcagaagtctgacttctgagtaaaaacaaaagcacaaataggaaaccattctgtcaaaagtctgttattaagagatagtatcagctgcacgcagtggctcatgcctgtaatcctagcactttgaggcagaagcggaaggatctaggttgaggcctagagttcaagacaagcctgggcaacacagaggagacgccatctctaaaaaaaaagtttttaaaaaaattagctgggcaaggtggcatgcgcctgtagtccttgctactcaggaggctgaggcaagaagaccacttgagctcaggggttcaaagctgcagtgagctgtggggtgggcacttgatctactccaagaatagataaaataaaggatacgaaaagaaaagaaaaataaaagacttgactgatattttgagctctcctgttattctgaaagctgctctcctgaagtttgagattcctatggggaatactaccaaaaatttacagtgaatgctcagaacaaaatatgcactggcaatgcactccagtctggggacaaagtgagaccctgagtttatttcattaatagacagcagtatcaggttcaagatccttaaaatggtctcttaaaaacatgaagaccctaaagacaatagaagaaaggtataaatgggctaagttttatgaaaattttacacttctgaaaaatatttaagataaactattcatagctgtgtggtgtttttgtttttgtttttgtttttgtttttgagacagggtctcgctctttcaccctgactagaatgcagtactgcaatgatgactcactgcagccttgacctctagggctcatgtgatc

SEQ ID NO: 204937 - DNA, 1000 bp, Homo Sapiens
acacaggcctaaattaggagaaacctgggaggggaggttagaagggaaaggaatggcctaagtgaatatggtttccagggatagaatgcttatcttcccactcttttaggactgacattcttgcaaacagcaaaaatctccatgtaattgagagtgtgatatacagatgatttggagaagagtagcattctaagaattcacaaggtctacaaagggaagaggttctgtaaaatacaagggatcccatataagcttctagacagctgctgggagagtaaatgtaaaaacatagggaggcgacaaaacactgctgggaaagatggtgtggggagatgaatacagggaagggagagggaaagaaatggtttgccgaaattaatctaggcagcaaacaaagcagtaccagatatgacatactaccctactggggcaccgacattcaatgtggaattcagtgaggtggtacccataccaattctggttgcattgggatgtgtcactgaccaacaatcttaagctacttttttttttctttctttctttctttttttttttttttttttttttttgagacggagtctcactgtgtcgccagactggggtgccgtggcatgatatcggctcaaggcaacatccgactcccgcgtttaagcgattctccttccttagcctccagagtatctgggactacaggcaggcactaccacgccccgctaagttttgtatttttagtagagacacggtttcaccatgttgggcgggatggtctcgatctcttgacctcgtgatctgcccgcctcagcctcccaaagtgctgggattacagtcgtgagccaccgcgcccggctcttaagctacttttcattcagcttcctcccttatgaaatagtgaaccatacatgtcaaatagcctacagtaaagtcctctctgagcttgtaaacactgtttaaatgtagtaataataacaattaatacctttcacaatccttctttgaattc

SEQ ID NO: 204938 - DNA, 1000 bp, Homo Sapiens
ccttgagaagggcagaggggacccgaatacgggggctctggccggccctgctgccagatgccagcagccgtgggggcttgcccggccagccctggcttttcccaaccctcagagtgccccttgtgcatgcagcagacactggtgctggtcccattcccgggagcacgcggtgccactggctgtgtcttgcctggccaggtgttggtttgatagactcgaaaacctcatttggatttggcaggattttccctaacatcagtcattctggaaaaaacactttgaatttttaccatatctgggtatttttaccatatctgggtacttgccactagctctatttacttcacgtttcttaaaattgattcattttattacttaaataaatgtattttaaaaggaacttttgatgactactataaatggaaaaccagaatctctcacttaccataatagattaatctaaaaataaagaccacatgattacattaaaatgtatgtccttgctctgcctggagtcaaatagtatgtcacccgtgtgcatgacacactctgggaagcacaggggtgggtggaggaaagatcagagaaaatccgtggaaagtatgaagtagagagcaccacaccaggaagacgtggttttatttcagtacctcatgtctcgcggtggcttgcggctaccagtaactggcagaattctcaacattgtggccctcagccacctcctccgagctctctctcagcaccaccatccgccgtggcttctctgagggaggcccctctggcctctgcttgactatgatacatgtcgagtccatgccgagtggcagaaaagctccgttttcagctgaaactacctccctggcctcagggggcctcattggctctgtctttgtactttctcaatggctcctgatgattccttggttatctgaaggcctgtttgggagacggttcccaggacagttgcttcaggcttatatgtgtgtgctttctggaattc

SEQ ID NO: 204939 - DNA, 1000 bp, Homo Sapiens
taatttcccttttgatttcctctttaattcatgggttacttagaattgtgttatttaattttcaagtacttggcgatttatctctctctgttattcatgtctaatttaatcccagtgtggtctgagaatatattttgatatcaataaagctactccagctaccttttgattaatgttatcacagtatatctttttctatcttcttacttttttttttttttttaagagatgaagtctcacactgtcacccaggcggagcacagtggtgcaatcatagcccactgcatcctcgaactcctgggctcaagtgatcctcctgcctcagcctcccaagtagctggaactacaggcatgcaccaccaaacctggcttctacctttttactttgaaactattctttgtgtatgaagtgcatgttttacaagcagaacatgatgattgatacagtctggtataaatatatattcttgctatttgacttctatttgttccacctgttctgttatctttttctgcctttctttgtattattttttattctgttttctctcctgtgttttctctcacaactcttcattttgttgttttagtggttgcattagggtttatagcatctatctttaacttgtcagtgtaccttcaagtgatattataccacttcacatataacccttatcccccctacatcatataagagccttacaatagtatatagtacttctatgtctttcttcctgacctttgtgctactgttgtcatacattttatttttccatatactataaactctaaaacacattgttatttttgtttaaattgccaattataagagattgaagtaataagaaaaagaacttatagatttacccatatagctatcatttccagtgctctttattccctttttgtagattcagatttcaatctgttatcgttttccttctgcctgaagaatgtcctaaatatactgtgggtcttatagtgtgggtctgctgaattc

SEQ ID NO: 204940 - DNA, 1000 bp, Homo Sapiens
tagttgggactacaggtgcccgccaccacgcctggataattttttttgtatttttttgtatttttagtggagacggggtttcaccgtgttagccaggatggtcttgatctcctgacctcgtgatcctcccgcctcgccttccaaagtgctgagattacaagcgtgagccaccatgcccggccactttgaaatcctttttctgaacgaaactgaaggagtccagagtgaattgataactctaattattgtgtgtggggcaagcaaaatgagaatctggaattgaatttttttttttttttttttttttctgagaagaaatttcactcttgtctcccatgctggagtgcagtggccagatctcggctcactgcaacctctgcctcccgggttaaagcaattttcctgcctcagcctcctgagtagctgggattacaggcatccaccaccacacctagctaatttttgtatttttagtagagacagggtttcaccatgttggccaagctggtctcgaactcctgacctctggtgatctgcccgtctcggcctcccaaagtgctgggattacaggcatgagccaccgcgcctggcctggaattggatttttaaagatctgagattctaaggaagcagaaattattcacttgagcttcaaggcaatgactgtagaatcagatctggtattggaagtcacttaaatgtcagacacaacaacacatatggaaagcatctagcacagtccacaataatgtttttcttcctttctgagccttccttttctgacctctagaaagaaggggtggggctgtgttatcaagatatttggggactaaataagataacagcatttgggctgggcaaggtggctcaggcctataatcccataggccgaggcgggtggatcacctgaggtcaggaggacgacaccaacctgaccaataaggtgaaaccctgtctctactaaaaatacaaaaattagctgggtatggtggcgtgctcc

SEQ ID NO: 204941 - DNA, 1000 bp, Homo Sapiens
ctggtatattataaccaaggatatacattgagttaatgtaaaattataagggattactaaccttttgtttgcaatttgtccaattccacaaaggttttaagtatttttaggtacaacatattgacacttttttttttaacatagtgttaaaagacctaagaattgcaactaacatatattcattcacccattcatttatccaacaatgactgagagcatgtaaagggacacagatgtaaatgaatgagtatattcaagtatcatagctttcattatagaggcatgcacaggtacagtatgaacacaagaaaagttgtgcagtaaggatgaaattaggaaatgcttcataaacagatgtcccttgagctaaatccagatacataaaagtatgtgtgaagagtggagtattctgagaggggacaacgtgagaaaacactgagattggaaatactatcttgagtttggggaaatggtaccagttttgggatggagaacaggattcagtggatagaaaagaggcctgaaaataaaattggagaaattctgagaggttaaatgaatgacatcactatgccatgttaataccatgctaaagaatttcaacttctttattgatctgtgagccacagatgtgctttaaacatgggaggcagaggatcagttttgagttccaaaattatagatcactttgactgatttttggaaggtagatcaaaggatctaggggtagatgcaaggcatcagccaggctatctcaataggcctagtagagatagaatttgtacaattcagtgattcattcagttaacagatatataccaactatgtgctaagttcaagtaataaaatagcaagtagcaaaaaagaaaagctttccagaggatgttaacactgagttgagatctgaaaaatgagtaggtgtgagacatatcaagggatgtggtatgtaaaagggagatgaaatttatttctggacagtggtccatggagaaattgacta

SEQ ID NO: 204942 - DNA, 1000 bp, Homo Sapiens
tgatcatttgaataactcattattatctacaccttttcccagaccaaaattcttcatcatttatgtagtatatctaccttcttttctcattagtctctattaattgaaatagtacactactgtgtcacacaatgttgttggcaaacacatacatgtttttaaaaataactgaagtgagcccagattattcaaaaataatcttttaatttggaattctcactaaaggtaatattttggcatgaatgcagttttttaaaataacttagataaactccaggatccattaggactattgttgttattttaaaattaagatgtgttaatctaaccaaacattcatacattagaacaacgtattaaaagttaatcaattccttgataatgatttcctgtgtcactttagtcaataccatagatagtattggcagtccatctacaaataaaaagtaaatcaagtgaaagctattatacctgagaaggctgaggaagacaaaactacatcgtgatgcctaaattatttttccttagtgcttattttcttacatgccttctatgtggtaaaacacaagctctcagccacttaatggcatgtgttccatggcaaattaaaccgatttgtttcaatttatttcaagtcacatcacacaatgcagcaaaagaatgccacatttcattgactaatccacccctgaaaattgcttggaatgagttagtgagaaattgtgtggggatttactctcattgccttgggaagaatcaaatccttattataaattggagctaatagtggtcaccgtgtagtgtagttcaaaatcattaggactgtgttatatgactctagagtatagtatatttttaaacattgagtctgcagtcttaatattttatgaatattttattttataagttgtaagttatgagttttcataacccatgaaaagacctcagaggtacataatattgaatggttgttcatgaaaaactgcatatttgtgaattc

SEQ ID NO: 204943 - DNA, 1000 bp, Homo Sapiens
tatatgtatatatgtatatgtgtatatatgtatgtgtgtatatatgtatatatatgtatatatgtatatatatgtatatatatataaaaaatacaataaaatcattatagcacaaatgcttggctcttggctgttttgatctaatgactaggggaagacagcaagagttgactgttttgtctacaaacatttagccggtagctccgttttcagcctgatgaggcccacctatatgagtcgtggcatttcccagtcttgagactctgcagttcggctggtagattggctttctgctcccgtgaggcatcgtctgcttctcacacacatcgtgtgtgtgtgtgtgtatccttgggttttctcagctctgctctatcatttattgcttctccactatttttttttttttaaagacagggtctcgctccgttgctcaggctggaatacagtggtgcaatcaccgctccttgcagccttgacctcctgggttcaggcattcctcctacctcagctctttctgctttctaaataactgggactgcaggtgtgcaccaccacagccagataatttttaaatttttggtagagacgggggtctctctgttgcccaggctggtctcgaactcctgggctcaagtgatcctcccactttggcctcctcaagtgctgggattacagatctcagccagtgcacctggctatttctccactgactgttttccagaagtatgtagaagatttttccctgctggtgacatctctcatgctctatgtggtgttatgtcttttttttctttccaattctcactttaacagagtcccagaggagaggacatatatgcttgtttagtttgccttctttcgctggaagctttaaaataagttttaagactgggtacagttggcttatgcctataatcccagcagtttgggaggccaaagtgggaggatagcttgagatcgggagctctagaccatcctgggcaatatagtgagaccctga

SEQ ID NO: 204944 - DNA, 1000 bp, Homo Sapiens
ccttttaaagtctagtaaagaagagctcaataattcattgaaagctactactcagattttggaagaattgaagaaaaccaaggtatgttcactttaatttgcttcatgatttcaaatggtttatacaggtggtagtgattttaatggtatagcattaaacgttttcattttcattttatgaaaatttttggtagtcaaaaatgatgtcattcatcagttctctgctgagttatctttaaaaaaaatcagtgggtcatctacagtctcatagcttgaataagctatccattgcctcatgcatcctctcaaactagaggatgttaaagacttcttgagatagatttgaagatccagccacacagcagatgagggcaggcctcttaagctatagaaaacagtctgacgggcaattccaaaatcttgaatgagctgtctccaacttcactgtcaccatactcacttttctgtggcttacggggagatcaaagtgtggcagagcaccttggtcaggcagacgtgtggatattctcctcttcctcttcacgcaaggatcatagaacttttttttttttttaggaacaatgaaggtgaaccctagtctcaggattgctagtctcaagatggtaccactgtaattctacctggaaaaggaggtgttttcattcctacagatatttttcataagataaatacccacagtgtatagtaatgaacctggataataaatatcttccagcaaatattttacttagaagacgattatattttttaaattttgagattaattgaatatatacaaacagaaaattaagtacaaatttattatgtttatggctcttatacaactatcaaggtaaaggaaatttaccaattaaatacaaagtagtaaaattcaaaatcacaataattaataatgttctgctgctacaaaatgagatgttgggtttaataatagaaggaagtagcactgttgaaatagaattaaatgggtcttgaattc

SEQ ID NO: 204945 - DNA, 1000 bp, Homo Sapiens
gcttggcataggaggtcctacacagtctgccctgccctcaggctgtggccaagagcccttccttctactgctaaagatgaagctctgcccagcatcgggaggtgtgcggctgttgccccagcctggacgccctcctgtctctgcgtggtgatgtgtcatcatggaggcttttgctctccactccttcatctaactcaggcctcactggctctcttatctcactgcaggcttctccttcatggcacctgtcccagctgtgggggacacacttatctagttacctgcatgctgtgtgtctcctgctctggaaggctccaggaggaaagagacattctttttgttttcttcagtcccaaccctctaatccttggtgcctgcacgttccacgattccatgcttggggacggaaggatgtggggatgtggggaagtgaggaagggaattggtttctgaccatggcctggaacagctactacaacggaggggtctggcctctgaaccaaagcctaggcgccatctttcctggagcaggagctgtatttttctacaagcttctgttttctcttcttacctgagctttgggtgacttgtggccatctgctcagagtgacaatagcagtctgcattgtgtttatcttgctctcagtttctttatttagcaaggccactgtcttcttactgagtcccatctgcacctaagtgagtgcacactatagaatccggccctgttgatggaaaaatgcagcccaccattcggcacttactagcctggcaatcacacgagcatccaccacattcccggcacggagctgggtgtggtgcccttcccaactcctaggacctgacccacccaacacctgaggccagatacttcacccctagcggctgctcattcaacccaagatccaactagcaaactgtccaaggaaaacagagcttcaaaccttccagctgcagaaagtcaccaaatcttacagcaagcatcctgggtcacaaggag

SEQ ID NO: 204946 - DNA, 1000 bp, Homo Sapiens
ttaaatttgccttctgtctaggttctgattctcagaatattaatctaaaaaaagtacattttggctgggcgcggtggctcacgcctgtaatcccagcactttgggcggataacaaggttggagatcgagaccatcctggcttacacagtgaaaccccgtctctactaaaaaaagaaaaaaatacaaaaaattagccggacatggtggtggacgcctgtagtcccagctactctggaggctgaggcaggagaatggcgtgaacccaggaggaggagcttgcagtgagccgagatcgtgccactgcactccagcctgggcgacagagcaagactccgtctcaaaaaaaaaaaaaaaaaaaaaaaagtacattttcctacatctatttttgttaaaatagtttctttccaattatgtttaaaacccaagtctggtcaacatatcacatatgtagtataataaatggctaaaataatagaaagtacaaaatcacatttacctttgtgtgaacagtgaattttactttatcccgctcactaagagcatcagaaatgtccacctgcagagcagcatcactttgaagatctacatttattgctttaagctagaaaaagaaaaccagtatcttcatgaaaatcatgttttatataatttcattttttctcttaagacaatgcaaaaacaaaacaaaaataacaaaagattattaagtctaaagaggtactcatgtccatttaacatacatactatatacattttgaagcagctgctttgggcaacgctattaccttaattctatagtattcaattctagaattttcattttatagtattcaactatattctgctttgtgtaagtcactgagttaatcatgatttattatagtttagttacagtttatttcaaaaagaaaactcttttcagccagatgtgatggctcatgtctataatcccagcactttaggaggctgaagcgggaggactgactgagcccaggaattc

SEQ ID NO: 204947 - DNA, 1000 bp, Homo Sapiens
aagatggtagggcattgctccaaaatcctaggggtctccactgtgattcacctatggggacctgccaaaggctccagacagcatccctatttaccactgacacctcaatcatgactggatctgctgggttatgtggcccaagtggcagcgcagcttgcacagcagcctagacctgttgcagagtcttctcctgcactcacaactagcagccttttgagtcactcaataaataggccagagcaacacacacaaatgaggaatgtgatgtcctcaaaatccaaatgggcccactaggcattgtgtttctttcttggttgtaggagtggccagatgcaataacttattattcaccttaaaaggaatatcttgacaggccctataccaccagacctctagaaatttcactgaggtagaaggcccctgaattttagtcagatttatttcccattccctgacatgtgactgtctcaccaataagtccagtgtggttgctacttcttgcttactaggtccaatcaccataatgtcaccaatgtaacggaccattgtgatatcttacagaaggaaaaagcgatcaaaatttctgcaaacaagattatgacttagagctgaagagttaacataccactgatttagaacagtaaaggtgtattgctgagtttgacagctgaaggcaaattgcttctggtggccctatggacagggatggagaaaaagacatctaactcatacaggatgtatctcaagtcaccattcttctctattcttcccactataattttctctagtggctgcatatatactctgctatttcaagctactgctgttcttacacagcagctatttggggtttataacagtttgattttttttattttatatttaattttttgtttcattaaaaaatatgtagtctcttcccattcttttattttatctgagtggattctaggagatagattctaaactaaggtaaattctcatatttctattggaattc

SEQ ID NO: 204948 - DNA, 1000 bp, Homo Sapiens
agaatttcttgtgttgtctagatctaagaataagggattatattttggttcgaatatcctccacacccatgtctaatattttattttatcaaatcaggacactcataaaaaagaggtgtctatcaattggaagcataaatactatattaagaaaatgtatttaataattgaaagtaactgcaatcattgtaaatttgagatggaaattaaagaaaataaatgagttctcaaggattaagagatactttgcatagaaaagtttctgagttgagtatctgaaaacatattggttttttattccatttagtttgttagaatacccagcttatttctcataaaaatccctgattccggctgggcacggtggctcatgcctgtaatcccagtactttggaaggccgaggtgggtggatcacgacgttaggaatttgagaccagcctggccaacatggtgaaatcccatctctactaaaaatacaaaaaattagacgggcatggtggcgcatgcctgtagtcccagctactcaggaggctgaggcagaagaatcgcttgaaccagggaggcggagattgcagtcagccgagattgtgccactgtactctagcctgggtgacagagtaagactctgtctcaaaaaataaataaataaataaataaataaataaataaattaattaattcctaattcctgtccctcccccagtctcattcacaatccctaacccaagggagtgtgattggtggtgataaggtgaggtgtgtgttgaatggggctcagggatctgggaatgataatttcccaaggagaatacgggcgctggtacagaagaagggagaatggttcggttgttgggtggtcaaaacacagctgatcatcagagtgtctttttctcctatacttgtatgttgagatttttttccactttaaggcctaataaatgctgccttttcaatgcaatcttccctgatactttctattcactcctcaaaacagaattc

SEQ ID NO: 204949 - DNA, 1000 bp, Homo Sapiens
cagtaagaaaagtactcttgctatgcaaacaccacttcgagtgcccttgcccctctttctgtcaaattatgactcaccaatgccgttctctgtgggcgtcctaggccacagctgcagctcctcatacccctctcacagcactcatcactgtttacttacattatatttattcacattcctgttttatttctttccagcaaccatctcagggccttacgtggcattgcacataataaatgaaaggcctcgtggagccagaagacaaagagtagaccaagtggaggggcaggagggagcccttcactcctgggcctgcaccctggtcatggcacaatatgtctctgatgtttatcttttgtataatgaaattgcatgggtaaaagttttccttctctctttccatgtatctcaattccttactctctttttgtctctctactttgtattcattttagtctgtttcgtgttgctataacagaatacctgaggctgggtaatttataaagaaaagagttttattttagctcatggttctgcaggctgggaagttcaagggcatggccttggcttctgatgaagattttcatgctgcatcataacaaagtgaagaaagtcaaagaagtggacatgtgtgaggaagaaaagcaagccctaggggtatcctgcttttataacaacccactctcaagggaatattgctgtgagaactaagcgggtctagtgaaagcaagaactcattcactatccagagaataccaagccattcataggggattcccgtctgtgactcaaacacttcccactaagccccacctcccaaaacattggggatcaaatttcaacaggagtttaggtgggaacaaacttaaatcgtagcactatctttctctcctctttctggccctgatgctaatagggctaatatggcagtctttgaagcaggaccagaacatgggagacaatcatagccccaaatcttcccaccccaggcagagaattc

SEQ ID NO: 204950 - DNA, 1000 bp, Homo Sapiens
aggctcaaggacagtgaaatacctgttacagatgagcattaaaagaaaaggctgtcaccatgatgaccaaagatgggctagtctttggtctccaacgtggatctccaatattgtgagtaagaggctgggatacaagtatcttattgaaaaatctaacattcagagccattaagaagtgggatgggtctgcttttctgactccagagcccatcactagcacttctacagcacttgctgtttttaaaacacacacgttttcttaattaatccccatggaggaagcgtaacacagctgttaatggttcatggtacaggctttaagtcagattgccctgggttagaatcccggcttccacgtaacttctaggttaccttgggcaaaatttaacttctctgaacaccagtttccatccataatgaagatataataatagtgcctacctcgagggttgttaagattaaatgagataattacataaaatatctggccaaggtgcctagcatctaacaagtgcccaataaaagtcagctgtaaatgatgtaaatcatattctcataatttacaaaacatctctctgcttccccattcccagagaacaattatgataggcaaatgcaggaagcaactccaaattcaatgctaactccataccagatcctaagcacgttggctcagagcctgacagtctctctttagtcatagttcccactgactagagtcagcctcctgcctatgttaggacaaagcctgcagtttctcctcatcacatgacttttctcaaaactttgtctatctcatattccttctcctcagccctgggcaagacatgacacaggccattggagcaagatgtttcatgaagtcagcaaggaagacagtttttcttagactattttttggaaaataaattcctcctttcaagtaaaataacatcgactgaaatcactagcctatgccagagacatcagggcattgttaaaagaaaagccttgactaagc

SEQ ID NO: 204951 - DNA, 1000 bp, Homo Sapiens
atagacaaatccacactcataatgtggcatttaatatagccactcagtaattgatagagcaaatgggaaaataattcctaaaaatatgtataatttaagcatcatgattaataaacttgatctaataaacatatattgaatactgcatgtaataagcacattcacagaaactgaccatttactggattgtaaagcaggtgtcaacaaatgtcacagaaatgaaataatcataagcatatttcttaacaaaatacaagttaaacatcagtaccaaaaaaagacatcaagaaaaccttcatatgtttggaaattaattaaatacacatctaagtatctcaagggttaaataagaaattacagtggtattaaaaaaatagtttgaactgagcaataatgaaaatactacctaacaaaacttatgagatttagctaaagcaacatttaaaggaaaagtatattacaggcatatattagaaaaaagctaaaaattaattattaaaaattaataattcaagaaaatagaaaaagaatagcaaaacaaacaaacaaacaaaaacaaaaccccaaagcaacaaagaaggtggaaggaaggacatgatagaaataagaacagaaactaattaaatagtttccatacactatggagacaataaagccagagtgattctctaaaacacctaataaaattaacgaacttctcgtgagaccaaaaaaaaaaaaaaaaagagtgatagcacaaacacacaaataaataatatcaaaaaagaaaaagagaacgttactaaaaaagtcagaaatattaaaaaaaaagtcatttgaacaattttatgccagtaagtttgaaaatgcagatgaaatgaacatattctagcaaagcacaatttacacaaactattgaaatagaaaaacagaatggtgctaaaatcagaatggcctttcaatacatttgaagtattgaattaaggaaaatttcaggcttcgatagcttcacattgaattc

SEQ ID NO: 204952 - DNA, 1000 bp, Homo Sapiens
ttacactacaatatgtgtaatatttagaatttgaattaggaagaactttaacttttttattccttagggtattactgatctctaaacaagatgtttaattagcagaattatagcatcttagataaaattggttatttttaacttaatcacgtagttgatgctacagaaatgaattcatggcctttcttgtggtgctcgtctttttcttgtttgatgttgctagttgaacacatctcaggttgtgagaagtgcatatttagatgggaacatcttggagagatcttgattggtagagagtaactttatatcagtgagtataatgcttatcagtgaaattctaactcatttaattattacttaattttctgattatgtttttgtatttgagagaagattatttccattatggcaaagtatggatggatggacattgctattgccatttcttgacttagcacacctaggaaggcattttgaaacatactttttaaaaaaagaattgcatatctgtgcacctacaacagtgggtgtgctgaaattctgacttgggttttgatgaaagaattccccaattcagttaaattcatccttgactgtcgtgtgccactcatgttcacttggttaaaaaaaaattgttttttggagattatttgtagaatctcggttctgtaaccagatattgaatattaccactggagggaagctttgaactcatttatcacccttctgccaaaccacaaaaatcctctctctctctctcatgcatctatctatctatctatctatctatctatctatatcttactgatttattcatatatatatttcttcatatatatgatatatgacactgtatatttacagcatatatattacagcacagctatttacagcaacctggatcattcattcttagccccttctcaagaatggaagtttattttaaaccagacataaacaggacataaaatgaaatattaaaagactggataatgcattt

SEQ ID NO: 204953 - DNA, 1000 bp, Homo Sapiens
tggactgcaaatagtttggcactccgctggagaagtgagaaaggaaacttatgaagtgttggcacaagcaagacaaacaattatataattggttagagtggcaagttcctagttggaggttagttgatagtttctcaatggctagaggtttgatttgctttggtaggaactcaaagcgctagagccatgccaatctaatagccccccagttacaattatttttaacagcattcattaaaaaatagaattgttacacaaaatttattcttaattgtgacaaatattacaaagcaaaagcaattcgcattcattacattcattcatttatcaaatgtatatgtcagggaatatccagggtgaaaaaaaaaaccatgaatattacagttcttctatcaatagcctaacttgttatctctaggaagatagataaataaaaacacagttaaagatgatgaggataaaatagagaccaatagatagtaatacagcattctagaggagaggctaagattctacctgggcaagcataaatgaaggcttctcagaggagtttacattctgtgtggttatggcagaataaacagaatacggctgatagaaaagttagagaaaaggaatctaagtagaggatacttttaaaaaggcagtggtgtacaaagaatgatatattctttaaaaaacttgttgtttcaatcacaacataggtgggaactattgtataaaatgcagagctgaaaataagtcctccttgtccttttggagctcaaagtctagaagttgaaggaaaaaaagtacaaataagtatatgttataaagtgtttattgtattagaatcctatgccacatctataatctgatttcaaaatatcagaaaattattacttttaaatgtaagaaaatgatcacataaatatccatcaaattagtgtgggaaaagagcaagagggaataatgatctacttaaatatttaaaatataatctttaacacctttataattt

SEQ ID NO: 204954 - DNA, 1000 bp, Homo Sapiens
ttataattatttaagggtctatctagaattcaaataggcttggtggcaaaaaagaaaaggagttgttcattcttttaggcaactcggtacttccaccccctctatgtttgggcattttcatatcttatgaatattgtggcatgtggagtctgttccccactctaaatgctgattaggccagacacttcatttctcaaactgcctttccctgggctgtaggcatatgacctttgccctgccaatcacatacacctataccggagatccttgcagtgccaagcattatagaaaacctgagttcttgggcaccagcagggacagctgaggtaatggtagtgctttgtgtctatgcttgctatgtgtggcagaggttgctgcttgtctattctttccttcatccacagtaatgaaacctcttcttaactgggcacatgccattcaggataaagactatattatcccgtgtccttgggggccaggtttggctaattctggctaatgagctgtaactagaagtgttgcttgacctcttctgagatcttccttaaaggacagctggagtttcatccgttcctcttttcttttggcttgaatgtgtatcaggatggctgaagctggattagtaccataaacaatgagaaaactacagtagtggaggcccagcataggggagcaagaaaatagaaggtgcctgcatctctggggccttcaagcaacagaatttaccgatcagtcctggacctctagactttcatatgagaaggagaagtatacatctgtcttatttaaggtcggtaatttggggtctctgttacttgctgctgaagttaatcttaatcaatgcattgtcagtggtgcaagctgcagcgtgaaggtgtgcaggctgcagggggccggttctagggtgtgatttgaggcttcactcctgattcattgccctggtctggtttttcaaccttaacttgtgattctatgacacacatatcattttaatgaattc

SEQ ID NO: 204955 - DNA, 1000 bp, Homo Sapiens
atgtattttggggtattgcccaagggcacagaattatcagcattcttcagtcacagtatggttacagcaagcccattaaggtttattgacatgagttgggaatcaatctcttagctggccatggtggctcacacctgtaatcccagcatttttggaggctgaggtcaggagtttgagaccagcctggctaacatggtgagacccctgtctctactaaaaatacaaaaattagccaggcatggtggcacacacctgtaattccagctactcaggaggctgagataggagaatcacttgaacctgggaggcacatgttgcagtgagccaagatcgcaccactgcactccctcctgaacgacagagcgagactccatcaaaaaaaaagaaaaggaaaagaaaatcaatctctttacaggcgagtagggtaggtaaaataaattgctaggcaaaattttaaagctttaaaaaatggtttactaataagtagatgagagagttaaagagattgatcccttcatacatagcagtgtgactggtaaacttgtactcataagctcatatttaaatatcttctgaattgaacctccttagaagttcatcagtagcaatcagtagcaatggccatcacatatgtaagagcactgagtgtataacctcacgtagttcgtagcttttcttctcttgatgagtagtctctttccaccagatttattatttaattgaacaaattataggcagggaagttctaggaaacaacctttaattaccttgcaaaaggaagaatattttataaatatagatagtagccttttaaagacattttttagttttccctaagttgtgtatatcccatagagtaaagcattgagccattgattgtcattaaagcctaaaaagagtttgattctaggtgtttcctaacactgcctctttcccattccttcttctcagacaatagaatctaattggagatgtggaagacatagtttacagagaattc

SEQ ID NO: 204956 - DNA, 1000 bp, Homo Sapiens
caaaaacagaagggtcagcaacagccaagtgataccaagaacattttcatgcttcagaagcctggaaatgctcaggaattctggaggtgcagtaactcggaaggctgaggaaaagttggtatcagggtgggcaatttgtggtctctgccacaatctacaactgaaaatcaagggcaagtggcgtaagcatattgttatgagacacagacacaaacagacaaaattgctaagttttaaatggctcctgagaagtgggaattggggatgtgaaatggcctttgcaaaaagtgtaacagtgacaaagttatggcagtgtgtagatctgacctaactgactccatcttgcttctgtgttcattcctgggcataggccaaactaactttgggaagaactttaactttgacataaagattgtaacagccctttcctgaaacaaaccccattcttgcatgggaaccacactgcctttgtaggactaacacatgagccacaatattatggtttagtgtcacagctgttttagaatttatctagcaggttttctggtctttactggaaagcccaagaaagtaaaaatagccgggtgcggtggctcacgcctgtaatcccagcactttgggaggctgaggcaggcagatcatgaggtcaggagatagagaccatcctggcttacacggtgaaaccccatctctactaaatatgcaaaaaaaaaaaaattagccgggcgtggtggcgggtgcctataatcccagctactcgggaggctgaggcaggagaatggcatgaacccaggaggcggaggttgcagtgagccaagatcgcgccactgcactccagcatgggcgacagagcgagactccgtccaaaaaaaaaagaaaaagaaagtaaaaataataataataataataaaagaaaaatagcccgggcacggtggctcatgcctgtaatcccagcactttgggaggctgaggcaggcagatcacctgaggtcaggaattc

SEQ ID NO: 204957 - DNA, 1000 bp, Homo Sapiens
acactttgagaggccatggtgggcggatcatgaggtcgggtgttcgagaccagcctggccaacatggcgaaaccccgtctctactaaaaatacaaaagttagccgggcatggtggtgcagcctgtaatcccaactactcagaaggctaaggcaggagaattgcttgagcccaggaggtggagattgcagtgagccgagattgcggcattgcactccaggctgggtgaagaacaagactgtctcaaacaaacaaacaaataaaaaagtgagtatctgtcctaagcaacacattgtcaagtgcggcctatatgatttcctggtggtcagataatgttgcattcatgctttctgtaggaagtggggtttcatgaaacagcatgaactatgaactttgaacgaagagtcacgggcttatccctgactctaggacttagtagcgtggttaatcacagccgcattattaatgtctccagttctccaaaatacggtaaatgacaccataacagatcttttgtaaagctatggtggatatttttaaaggattatttattcatagtaggtgtctgataagagctacttttagacttttggacttgtagataacttcttttaatttcctattaaaatacccaggaaggtacagaatccagtgttggggctcataaaccaataccctaaaatacagcgctttgacatcctgaactgaagaagcctccaggtctctctggccttccactttacccactgtctctcaatcttctctctctcccaagcagacgatgaacttgttcattggagttcccttatctgcccaaactcccagacctgccaaagaagaaaacaatcacctctggctctttccctgcgtcttcagtaactgaactcctatcccaggaacaaagactgaaatctgtcaacacacctgaacagactcctatctgctttgcgggcccaacagatggtcccaggccatggtatgttcttcaagcccactgaattc

SEQ ID NO: 204958 - DNA, 1000 bp, Homo Sapiens
actacaaaagtaattgtggttttgcctattacttttgcaccaaactaatatttactgtttggtaggtggtctggcagtttgattatagtgttcatgcaatgagagcttgacactttcccaacacttgcttgtttctttgacttgctggagaatgaaattaatgacttattattgggtgtatttatattttttaaataatttgttttattattaaaacaattgggataaacttcattaaaatttacctttaattaatagtttgcctatgcacaaaatgtccattatatagctcatgaatgtcaaaaactttatctgctgtcattttaagtacatacaacatcaggcatggttttgtttttttctttcttaaagttttctaggctttggttccctgtctgtgaaaaaggagtaacaacagcacctacctcaaagagttattgtgaccagtaaataagataatacatataaagcatttagaataatgccccagtttaaggtaaacccatatatatctatataaatatgtatagatgtacctgtaaaaacatctacaataaagtttaaattttagttcctatatgatccccaaagattaacactagagtctaaggactctagtatagttttctatctcttaaacatatttgttctccattttaaataaatatttcagtgcttatatctttaagtagcaaattcttttatatcttttatttttttagagccaaggtatcactatgtttctgaggctgcactaattcctgtattcaagtgatcctcccatctcagccttctgagtagctgggactacagacacatgctaccacacccagcatgtagcaaattctttttccatcgttttattgatattcaacatgcaaaaaaatttaatcttatagaagtatataaagtgaaaagtaggccaggcatggtagctcatgcctgtaatcccaggactttgggaggctgaggtgggaggatcacttcagcccaggaattc

SEQ ID NO: 204959 - DNA, 1000 bp, Homo Sapiens
attgttggaggttttgcagcagaggagtgatgtgatctgatttagcattcaaaaggatttatttggaaactgtattaataagagactgtagaaaaacaagggtggaagcagagactagttaggaggcttttgtgttatccgagagagagagatgtcagtacaagtgacgggtaaaatttaatctgctgttcctcagtgagcagtacatttggatattgtacctatattgattcttttttttttttttttttttttttttcagacaggctctcactctctcacccaggctggagtgcagtggcatgatcatggctcactgagcctcaacctcccaggctcagttgatcctcctacctcagcctcccaagtatctgggattgcaatctctttatgcctcaggcagccaatggtgttcactgacatggggcttggtgatgagtcaagctaaagacccaatggcaaattgatgaggtctgttatagcatttaaaaggaatctaaacacaaagcaaaatattcaaaatatctaaatatctcatctgtattttctcatctttgtctatctaaatttcatctatatttgcttatgcattcttgttggggagtttctacttctttttactgtcatatttgctgactcttaacatgtgttttctgaggtattatatctacaagttatcttgaatctcaagaacccatatgatggacagagtctggagtggtatgggtcctgtacctcttccaacctttattcttccctcagagctgctaggtccaccctagctggctgatttcaggacccgtctcatggcaggtggaaaactacatgtcagggagacttaaagctggacccagatttccttatggaaaacaagatcactgcaagagctgtctagggcctgtgaatgtggggtgaactgggcaggtattcctctgctgggagatgccagggctggcaggagccagacatgcatcacctaagatatgctgctgtggaattc

SEQ ID NO: 204960 - DNA, 1000 bp, Homo Sapiens
aaatatcattgttttgccagtttgctaccaccagcccacacccctcttcccgttgtccaaaaagggggtggttagagttttcttgagtgactgggctattatgattagcagattactaaagctgtgtgattttaacaagacgtaaacacatatgggaacccctccttccatatcttgctaatgtcaattagcaacatattaatcttgctaatgtcaatcctgtcacttcatacatttataaatattagggacatttaaaagagttgtcggactgtgcgggaccttggcacactgctgacggctgcacactcatcactgcggggctcatcacacattgacaccagcaccatattttgctgggtttcctgatctcggttgagtatttggatttgaatgggatggttttaatgttgctactgactactacagtgatccaaataaactttaaagctggggcctccacgccataggcagattttcataccagttgcctttacctcagtagttttcagctggggcaattttgttccccaggagacatctggatacagtgttggttgtaacagctgggcagggggtacttctgtcatcatctcatgggcacagggcagggatgctgctagggcaacccctcaccctcccaaagaattatcaaaaacatcaacagtgccaaagctgagaagctcagctttaatgtgttcattgagcaactaaagaatagactcagatataggaaagtatttatttatttatttatttagagacagggtctggctctgttgtccagatcataactcactgtaaccttgatctcctgggctgaagcaatcttctcaccttagtctcccaaagcatgctgggattacaggtataagccacagtgcccagcctgaaaagaatactttaaatgggcggggtaatggtggcttatgcctgtaatcccagcactttgggaggcagaggcgggcagatcacctgaggtcaggagttcgagaccagc

SEQ ID NO: 204961 - DNA, 1000 bp, Homo Sapiens
atccactgggtgaagccagctgggctcctgagtctggtggggacttggagaatctttatgtctagctaagggattgtaaatgcaccaatcggcattctgtatctagttaatctggcggggccttggagactctttatgtctaaataagggattgtgaatgcaccaattggcactctgtatctagctcaaggtttataaatgcaccaatcagcactctgtgtctagctcagggtttgtacatacaccagtctacactctgtatctagctaatctagtggggacgtggagaacttttgtgtctagctcagggatcgtaaatgcaccaatcagcaccctgtgaaaatggaccaatcagctctctgtaaaacagaccaatcggctctctgtaaaatggaccaatcagcaggatgcgggtggggccagataagagaataaaagcaggcttcctgaggtagcagtggcaacctggtagggtgtgcttccaaagtgtggaaggttccttctttcactctttgcggtaaatcttgctgctgttcagtttgggtccactcagcctttatgagctgcaacactcaccatgaaggtctgctgcttcacttctgaagccagtgagaccacgaacctactgggaggaacgaacaactccagacgtgccaccttaagagctgtaacactcactgaaagtctgcagcttcactcctgagctagcaagaccacgaacccaccagaaggaggaaactccgaacacatccgaacatcagaaggaacaaactccggacacgcggcctttaagaactgtaatacgcactgcgagggtccgcggcttcgttcttgaattcagtgagaccaagaagccaccaattccggacacaactgaattagggcccaccccaatgacctcattttaacttggttacctctatgaagagtctagtcaaataaggtcacagtctgaggtacaggaagttaggaggacttcaccatatgaacttaaggggag

SEQ ID NO: 204962 - DNA, 1000 bp, Homo Sapiens
aaatgaaatgaaattcacattatgctcaaattgctccctgacatactgatggcattggaacattgtgttgtcaaaacaggcattataacaaactgactatatttcctaaaatcaagaatgtcctcttacataaccatagtgcgatgatcaaaattagaaaattaacattgatacaatacaaatctaaaatttggacttgattcagaattcaccaactgtcccaataatgactttttataccaaaagaaaatcctggatcacacaccacgttccgttgtcctgtcctttagcctcctttaatctagaatagttcttgggttgtcctttgttgcaagacattaacattttgaagagtacaggccagctattttgtagaatgtccctcaattcaggtcaaaccctctagtcttacctcaatctgtcattgttagtgaaagcactgttaatgactgaaatcttcctgaaagtgattcaagtatgaaggtaggctctatgtcttttatcatagcacccctttgaaaaatcaagtgaaatctacattgggaaacctagaaaatggcagttacccaactgcccttaaaataaaagtcccttcttttaagagaattaaaaactaaaagatgcacagaaaacccatctgccacagaaagtaaactggcttcctatagcccaaagtataggaagtacctatcactcaccagacagttgtttttagaggtctcactatatcttctaagagctgcaatgtgtattaatcaacaaaaagaaactaataaggctgcaggccagagctcagcatgaatcaaagaagctgcatcttaaacctggataaataatgcagatggtagcttcaccaggagttggcactcacaaacaacaatcatgcacacaagtacacatatgacattttatgtaggaaatgcagggttacagcttaatgtatatcaaaatgagaaagaaagatctcattctggctttctctatctctgctgttgaattc

SEQ ID NO: 204963 - DNA, 1000 bp, Homo Sapiens
gtgtatactgatgcctttccaacgtgtactacttacactttctgatgtttgtatactgactagttcaccaaaatttcagaatatcaaaactataggggccctctggaaacccttaaatggtagggttttattaaaaaaaacaaatggaagtaaaccttatatgtaattgggatgggtagaattaggaatggctactatatattccagctttgtgaaggtgtcataatggaggaagcttattgtcctccctactgttactcctttaacttgcacacctaaccttgagtacatctcatcatattctttaccatatccctggcttgcagctctcttctgcatcacatcctgggaaatccttcttgatgacttctctatcaatattagaaaacacctttgggtctctgacctcatacccttcagctctcttctgcagccgcctaccagcaccaccaaatcttggttttcatcatcatttggaactaccttaccataataacttgaatccttgaattacactatgtgatcacagtctcctatttatccagttttcttacactcctacattcactgaatttgtgttttcatttgaatacatgatgtcttccattttctcaactcttccttactctcctcgagtcacatgtcttatcttccttaaaagattatatactcttcaaagaaaggaatcaagccttctacctactcattactttgcatggaatcatgtttgtcagttggtagatatttccaagccaagagtgttgtttgaccaatcaagaaaacaattataccctgacttctgaagtgggatatgcattgcatcaaggatgccatcttgggacatatgcatttatttgcagtttggttttacagtagtgggttatatgagcagtctctcttgaattcaaatcctgactgtgccattaaatagctatgtgaccatggacaagttacttgtcttagcttcaattttctcatctgcacaatgaggcacaatgat

SEQ ID NO: 204964 - DNA, 1000 bp, Homo Sapiens
agagacatagattcccacacaataataaagggagactttaacaccccactgtcaatattagatcaatgagacagaaggttaacaaggatttgaactcagctccacaacaagtagacctaatagacatctacagaactctccaccccaaagcaacagaatataccttcttctcagcaccacatcacacttattctaaaattcaccacataattggaagtaaagcactcctcagcaaatgtaaaagaacagaaatcactacaaactgtctctcagaccacagtgcggtcaaactagatctcaggattaagaaactcactcaaaactgcacaactacatggaaactgaacaacctgctcctgaatgactactgggtacataaagaaatgaaggcagaaataaagatgttcttcgaaaccaatgagaacaaagacacaacatatcagaatctctgggacacatttaaagcagtgtgtagagggaaatttatagcactaaaagcccacaagagaaagcaggaaagatctaaaagtgacactctaacatcacagttaaaagaactacagaaacaagagcaaataaattcaaaagctaacagaaggcaagacataattaagagcagagcaaactcaaagacatagagacacaagaacccttcaaaaaaatcaatgaatccaggagctggttttttgaaaagatcaacaaaattgatacaccactagtaagactaataaagaagaaaggagagaagaatcaaatagacgcaataaaaaatgataaaggggatatcaccaccgatcccacagaaatacaaattaccatcagagaatactataaacatctctatgcaaataaactacaaaatctagaagaaatggataaatttctggacacatacactctcccaagactaaaccaggaagaagctgaatatctgaatagacaaataacaggctctgaaattgagcctggaccaggaccagatggattcacagctgaattc

SEQ ID NO: 204965 - DNA, 1000 bp, Homo Sapiens
gggtagcttcactgtttgtttgcaggtaatggttctggtagaggttccattttaattgcttgtttcttgtgccatgaccaatcattaaataatttgtatatcatctctaaccatacaaataccacagcaacctatacctccaacaccacacacacacaaaactcatgcccagactactctggttggttcccccacagacagcatggttctccaaatatggaaaatttgcattgatctatcacaacattcctgcatacacacacttagaccacaactgcttacagtataattctttctttttgaattaacctttgttttaattttattttatttcttgagtttattgtaagttatttttcttctttccttcaaactgaatatttttatctatattagttacatattactgcataataaattacccaaaatttgatggcttaaaagaataaatatttattatctcacagtttctgtaggtaaggaattcaggagaggcttagctgggttgttctggctcagggaatccatgaggctataatcaagatgttgggtaaatcatctaaagtcttcatgggctggagaattcactgcaacagtagtgagccactgacttgatggtgggtaggaggcttcagttcctcaccacatggatctctccacacagctgcttgagagttctcacaacatggcagctggcttcttcccaaagcttcccatggcaggccttctttccaagacagaacaaggcaaaaattaagtatttcatgatgcagcctaggaagtcacacaccaccagttacacaatatcttactggttgcaaaaatcagccctatcaatgtggaaaagcactacacaggcatgaaatggctcattgggtaccatcttggaagctagctgccataccatttcttcttaggttcagtttccagattatcagatcttaggtgtgaagtgtgtttagacattaaaaaatcagaacactgaggacactgagaattc

SEQ ID NO: 204966 - DNA, 1000 bp, Homo Sapiens
ctgggcccagctcttactattatttttaatttatacataataactgtattataaatatataaatacatatttatggggtagagtgtgatatttcaatacatgtctacaatgtataaagatcaaatcagagtaattagcattttaatgaccttaaactacattttagagcaagtcacagacatgtcatgtcactaaaaatgtttcaatacacatctctaataaggactctgggtttcatatgattaccatgcaataattataccaaaagaagagttataaattccttaacgtcatctagaacctagtttgtttttagatttcctcaattaccttaaaaaaaaatttttttttttgagatggagtctcgctctgtcacccaggctggagtgcagtggcgcaatctcggctcactgcaagctccacctcccgggttcatgctattctcctgcctcagcctcccaagtagctgggactacaggcgtccgccaccacgcccagctaattttttgtatttttttattagaaacagggtttcaccatgttagtcaggatggtcttgatctcctgaccttgtgatccacccgcctcggcctcccaaagtactgggataaagttaatgtttcaaaccaggatccaacaatacctacaaactgcattttttgttaggtatctcaagtgtccctgattcgctcttttaaatgcaatcaatatgatggaaaagcctagccactgttctatgaaatgttccacattctggatttatctgattgcatcctcatggtttcaattagcttgttctcttatctcccatatgtcttgtaaattgatagttaaatccagagacataattagattcacttttaagactttaggtaagaatattttatagatggtactgtgtattttctttcataccacatcagcaagcacataatgtttggctgtcccacttttagtggtactaacataagtgggttcaagtggtggctgctcatttctt

SEQ ID NO: 204967 - DNA, 1000 bp, Homo Sapiens
aaactagaagcaggtaacagctacaaggagggtaactgaggttccagataaggaagaactttttaatatccagaggtatccaacagtggagctggctgtccctacaaatagagttccctcgccatctaacagaagtatttaaacagaaactatatgctcagcctaccagaaataaggtagaaggttccagcttcattagggaagttaaactaaatgagctttcctacccttttaactctaagacccttttcaattttatgcatttgtgggagctgggatgttattgtcatttatctcctaaataatttatctatgcattttacaagcatttgcttggtacctatttcacgtctgatgctgcaccaggtcctgggttggggataggacagctgagatagacaggtgtggtgtctgcttatgagaatcattgaagggcagtgctagaaaggccctccgagtttgtctggtccaggcccttattatacagaaaaggaaactgaggtcacaagatgggcagacacttgtacagtattatacagcattagtggcagggccaagatcacatcccgacctctgcattcctgtgccagtactcttttcctcaccattcctcctctgaagagcgcttccttaaaaatagttctaacaaaaatgaagctgcttcttcatgtcattttactgatctcatgtaggcagtattgtgtcaggaatcttatatttgaattgtagcaacgtttggtttcctggatatctgcttcagaggtcatgtggtgaaccctccgagacaccagtcaaagtttgctgaacccaaacctccaagtcgttcacctgaaagatctaaaccaacagaaatgaaacaaattggcattgctttgtctcactatctcgtgagatgcgtgagaattcttaagcagacagttactgcctgtgtcatgggtaaaatcccaaatcattttgtggggtttgttattgttccaacagctataagagagccaatatc

SEQ ID NO: 204968 - DNA, 1000 bp, Homo Sapiens
tatacacgtatatatggttctatatatatttatatagagagagaaaaccaaaaagcatctgagacagtactcaatcaatttagatgtgtattttgccaaggttaaggacgcacgcccaggagacaggtctgtgcctttctccaaagataatttgagggcttcagtatttaaagggggaaagcaggctggaggagaaagagggagggtgtggtcacattactgaatccacatgttgcaagggaaaagcaacaggtaggggaatagttaatgatatatttctctgacgctcagtaaatctgcactttacgtaagataaggtgaacatacgtggctacctgtgcagatatttaacctttgatctgtaagctctctgcttaggaataaaaggaaaggcagcttcttgcgtgactcagctttcagcttaattttttccttttggcagagtgaactggggtcccaagtttttatttccctttcactacacacacacacacaaatagtatgtttagataaacccacatgtgtatatgtgtgtggaaagatgtgtgtgtgtgtgtgtaaaggcaacatgcaggccagacaaagcacatctgcaatgtagagctgtccttcaggtaattaatttggtctatttcaatctgtttctttttcatccttctcttatctatagtgactggcactgttctctgtaccttcatcaaatgttatttgaaatcactgctaatggaaagtaaaggattctgccagtacatcacctaagcccttgtatttcccaaaatacctctgcagaggtttaatgactccaaattccctttaccttctgatgcaagtcattaagaaaaaagatgacctcaaatattgtcttcagattcaattcattaagtgctgggcactataagatccagagtcaggggagagcagaaactgtcagaaaaagtaaaaaagtgaaatgcctcaaaatcatgttaattgaaccatattaagtatgtgtagtgaattc

SEQ ID NO: 204969 - DNA, 1000 bp, Homo Sapiens
aatgagaccctgtttcaaaaaacaaacaaaaaaagtccttagaacagtacagaacagtacagttagttattaataggatgatggtgttggtgctaattgtcctcctgtcctggcgtgggagaagaagtccgtggacaaggcttacttggaacaggagctctggttggtgttttacgatttctctgtggtccctgggaagaaggaccttccccagctcctcctcccacaccccaaagtcagagctggtggaaacaggaaggggtgtcgagagctggggctggccctacccacccgcaaggacttttgttcggcttctcctagggtgaccttggacccctgggcactcctggggagcagggcctcattgggcaacgggtaagttgaagcaatttattcttcctgaaagcccccagggtgtgtgggtgccgcaggggaagagaccggcttttctcaatctccctaagcctcagtttcctcagttacagaaatagactatgaatgtctacagcctcgcccagtctctcttggtaggccagcatttccacagtgtagagaaaggcattttgtggtctgtagtcccagctactcggggggctgaggcaggagaatcgcttggacccaggagttggaggttgtggtgagccaagatcatgccactgcactccagcccgggtgacagaggaagactccatctcaaaaaaaaaaaaaaaaaaaaaagaagaagaaggatgttgaggttcagtcgagtctcggcagtaaagagaatgatgagcacgcatcctatgcccactgtgtgtcgagcacttttctcgaggcacaaggagcacagcagtgagtaacggaggcctgtctctggagcttgcattccagcgggttgataagtgatacctgccatgggtacaagaggagcatggaccacccaactggcacatcgttgccatcctgcacctgacggcccctgaggccctttccagctcagactctgaacagcgatgaattc

SEQ ID NO: 204970 - DNA, 1000 bp, Homo Sapiens
tttcagattttgtttggaaatacttctctggaccatcaccctactccccagagtttctaattctaactcatgaccttgtttccttcctccctcttcaacctgttacaatttcctaaatactttgcacatttacctgtaaaagctactgacttcaaaaggactttaaacattattccaaagtgctagtggacatggaatacaggagtgaacagaaagtgttaggaggggatgtagataatgaatcctatgtgatagggaagtgcaagaaaggagtgagagttggagtctaaagttaatacaaaaaaggaaaagttcacacagttaaatttattcctgaaatctctcaaaacgtcgggttccttgacaaataacaaaatgtattctaacaacacagtttgtattaatgaaatataattttagtaaatattatttggaaatcaggccgggtgcggtggctcatccctgtaatcccagcacgttgggaggctgaggcaggcaggtcacttgaggtcaggagtttgaaaccagcctggccaacatggtaaagccctgtctctactagaaaaaacaaaaattaactgggtatggtggcacatgtctgaaatcccagctactcaggaggctgaggcaggagagtcccttgaacctgggaggcagagcttgcaatgagctgagatcgtacccactgcactccagcctgggcaacagagcaagactctgtctcaagaaaaacaaacaaacaaacaaacaaacaaacaaacaaaaaacacaaaagctatataagagaagcagggaaaataaactgagctcatgaaatgacagtttgagaaagtaatatcatcaaatgactcgaggtaaggccatcactcaaaggaatttcattgggataatgtgagttaaataaatacaaaagaaataggacattattcaaaactgttactgtcatttttaccattaaatgtaattgtcattaatctcataaatctcccctattgaattc

SEQ ID NO: 204971 - DNA, 1000 bp, Homo Sapiens
aaaagaaatataccgtcgctaaaattcaagtgatttttgttttgtttaatatgaatatcatattagagttttctaatacagaatcaacatttgttacaacagacatatactaattattattgatctctcaattgccgtgcttatagtgtcctcaagtaattaagtgtgagtaactcttggccaactacaggcatgctcattattaagactcattcatgaatgccggcctctaagaaacttttcctaaatacccacaagagctcaaattcagctaaactttctctgcatcactccatgtcttcaaacttttacctaattatttaatcacaatttacaacccttgagggcactcttcaaatcaccaaatttgtgtatgggattgtttgtggtaccataatatattcccacagcttcacccactgtttgttgcaaggtttgcactcagtgactgtctaatgacttaacactttcagggactaattaatctaataattacaatttacagttccccaaggattacaataagaaattcaaagtatttctataaacttgaaaagaaaaatatattaaaagcttttgaagctaaagtgatgcttgtccagtatattgcagagttcattgtaatgattcttaattaagcaaaatatcccttaactccattctatatttttatatttaactacataatttgcaataattaatttgctattatttatattttttgtaaagcttgtaagtattgtttccatgttatatgttttccttttatttaccttgatggatggtcactttagattagggtttgtaactctaactgaacagtttttaagtaaaagttgacctgctagacgattgcacattggaagaagtcaggcataaaaaaattatgtcaaagtgaaataaatgtatgtatccgaaaatgtgaaatagcagtacatataattcaagacaaaaacaatcaagtttctgaaattgtttaattatgaaaaagaaagaattc

SEQ ID NO: 204972 - DNA, 1000 bp, Homo Sapiens
atcagagattagaaaatacttcaagtgcagccaattctacaggtccgcatttctcaagtcgctatggtcccaatatcaaacaagttctgcaaaatccgatataacatggcaccaatggtaattctgtgttcacattaaatccaggtatttcctagtacccacacaagtaaatcacagacatttctggcccatcttcagagatttttactcccaccgaaaacaaagtgggttcagcaagctgcagctgtagaaaattttaggacaaatatctaaatgtttgcataaattataaattgttattttgcatccacattttgcatcctgatacattaacagtattagcccagagaaactttcttctgaaggatgaggtccattaaggtgactgggtatgagatatggtcttgtccaaaacagacagcccaggcactggtcttcctgtttggacctgcatagatccgaacccaaagtttcattggggtatctctaggaacgtaatatactaataagtatgcagcttatgggatagaaatattagaccagtgctttgcagacttggctacccattggaatcactgagaacctttaaaagatacaaatacctaggcttttctcacagatatcctgatttaattgctttgtgatgcagccttggtagtggggggtgaggcagaggggagggctggtcaaacaagcttcccaagtgattctcatccgcatacaaaattgcaaatcagtgttttagagcaatgcttctcaaacttcatcatgcacacagattatctggggatcatgttaaaatgcagattctgcttcaatggttttgggtggggccaagattctgtagctataaacaagctcccaggtgaagccaatgctgctagtctaagaccacatgttgatccttccgtaaccgagcccagattcattctgctcatcacacgacacccaataagttgacagacatggagttggagcaaggaaggtgaccttatttcga

SEQ ID NO: 204973 - DNA, 1000 bp, Homo Sapiens
aaatatacatttcttgttaactgctatggactaatttgtgcaccccataattcatatattgaagtcttaatccccaatttgatagtattctgagatggggccattggagaggtaactgggattagatgagatcataagagtaagttagctcatgaatcccatctgaattagctatttctggctattattgagagctgtagttgagagcctccctgaaaatgtacataatattttctctacaaattattgctttgtcctgactgtacacttcaactgattggcaggtggcaccaataaggccaagtttaaacagcctgtcatgttacaaagtcacaaatcccatccttagccacgactagtcatctcagaaaaatgggacagaataaccctaccactggaaaatccacccaaagttcatttcctctcgagcaggggtatataaatgccatgcttataaattgaaagaaaatattgttataatatacttttgattactttcttgtaaccagctattttttttttttttttttttttttttttttttttgagacagagtctcgcactctcacccaggctggagtgcagtggcgcgatctcggctcactgcaagctctgcctcccgggttcatgccattctcctgcctcagcctcccaagtagctgggactacaggcgcccgccaccatgccccgctaattttttgtgtttttagtagagatggggtttcaccgtgttagccaggatggtctcgatctcctgacctcgtgatccgcccgcctcggcctcccaaagtgttgggattacaggcgtgagccactgtgcctggcctattgtaaccaactattaacattgataactaattgtttccctctttattgactcttgggattataaatggctcttcatttatgttaccccagatatttaatttttacaatgattatgttttcagaatccaaaactatttactttgtgtaatttcagaaagaaatagggaattc

SEQ ID NO: 204974 - DNA, 1000 bp, Homo Sapiens
accaagtgttgattgtcctgaaatgtctagattgccttacaactacagccattagtttgggggaacatacttaggtatatggtcataattttcagaaaacatggtttcctcctttagtctttgacatttgtttagaatatcagagaggttcttctgaatttgggtgctgtatacacttatgaccttcagaattaatgctgaatcctaagccctaaaatgattcttttgagaaagcatgaccaagacttcgtaacagataactgccgttctcagatttgtaggtgggtttaactatagcagggtatcttaaatggcatttctatagtgtagggtccttgtgatcaatttatgttgctttttgatccagttactatacagacatgtttgctggtgttattgagatggaaggtgtctggggcaaagctaaatcagcctgtgacttcattcagcccctcagactgaaaaatgtgctgagcacagattctccttcaattcctattaccctttattttatgttcacattgaggatcctgccagttagagtggcctctgtgtaaacgaagaaaatgatttggagttcagatccatatttctgaaagtatccaggctttgagttgtggagaatctggagcccagattcaaatgactgagtaagtgacgcatagctacttaccgagaaaattgggaagatgcaacacactctgttttcaaagaaacattttgaggttggaaagtatacagacatagaatttcaaagggcacatgtcaagtttagttgtagattaacatgatgctgtgtgtgttgatttcatgatgagagagcacttttcccttgttttttttctccgtttgctttctggaactgatggacatgattgcagatggtgtcagatttgttttcttagaagtaattattattaagcattgaagtaaatggtacttctcgtttgtggaaactccacagggtaaacctctccaggcaacactatggaaggaattc

SEQ ID NO: 204975 - DNA, 1000 bp, Homo Sapiens
aggggccacacagcctgcatctccctccatcgtcccgactgcatgcttttgattgtttcataataaaagtggccggctaaattatgactacttgtgatttatttgccatgtcatttagacttttcatatgtataaatttgccatttgaaaagaaagagaaaattcactgctattccccaaggcctcgtttttggggagctcctctaacatcatgaacagaggctttgtgacttctaaagtgattagctcctatccggaggttttggaacatatctgtgctcagaagcagtctgccggggtgaaattctatctggaatagtgtcctaaccccatcggagagagactctgaatttttaaaacgcctgttaaggacccctgggtatgagccccgcacaaacatgtctgcggcacccacagctgtgcctcaatgaaggcccaatttctccattgcacagatgaaattgcaaaggcccagcaatgttagccaaattccccaagcttaatgccagagcctgcttccactccaggacaaagtggtttcaaagtccatacttgccccaccctggtggcctgccctggggaaggtcactgccaagaaggctcctgggccgtcttgcagctgctgcctcttcttttaattacgaaagaaatgcatcatcatgaaaaatcaacaatacacaagatataaagttaaaaggcaaagtcccccctcatcctctctctcagcccctcaagtatattagaagatctttttagggttgaattttcactctgcaggagggtgttctgtatacaaagaatacgaccctttcttcctctttaatttgcttatagctggtacatttcaaaaaaataaaaagtgacccatgcctttgatgttttttttttccccttatttttgtcaacatattgtggagaatgctgagttctttgaattgtttttccctctgacagcaaatcaccaagatgtacttttccagagcctaacatccttgaattc

SEQ ID NO: 204976 - DNA, 1000 bp, Homo Sapiens
agagaaaggtgaagtccaacttaaatcataaaacatgattcataatgtgaaaggaaaattcttcagtgaaatagagagcataaatgaaaaacaatcacaacttctgtaaatcaataacacacagagaaatgcaaaacgcactgggaagtctcagcagtagaattaaacaagcagaataaagaactctaagataaggcttctgaattaactcaatctatcatagacaaagaaaaaagaattttaaaaacttaacaaagtctccaaaaagtttaggactatgttcaacctccaaacctaagaataattggtgttcctgaggaataagagaaatctaaaagtttggaaaatatgtttgagggaataatagaggaaaacttctctggtcttgctaaacatctagatatccacattcaagaagctcaatgaacacccaggaaattcatcacaaaaagatcatcacctaggcacatagtaatcaggttaactaaagtcaagacgaaggaaataagagatgtgaggcaaaagaatcaggtaatcgataaaggaaaacctatcagattaacagcagatttctcagcagaaacactacaaaccagaagggactggggtcctacttttagcctcctaaaacaaaacgattaccagccaagaattttgtatccagtgaaactaagctttgtaacgaagaaaagatacagttcctttccagacaaacaaatggtgagagaattcaccactgctaaaccagcattacaagaattgctaaaaggagctctaaatcttgaaacaaatccttgaaatacaccaaaatagaatctccttaaagcataagtctcacaggacatataaaacaataacacaatgaaaaaaaacaaaacgtattcaggcaacaaatagcgtgatgaatagaatagtccctcacatctcagtactaacattgaatgtaaatggcctaaatgccccatttaatgatacagcatggcagaatgaataagaattc

SEQ ID NO: 204977 - DNA, 1000 bp, Homo Sapiens
gcaattcatcgaatgcaccaccagtctcattgttcctgaacacctccgtttctaccatctatatccacagccaaaccctacacgccatctgcaccctaaaaatcttaaattccaatattctactctgaccagaggatttctatccttttcattatctcccttttagctacaaacacttgtatatttacttcatccagacttttaatcctttgaaccaattatgttatctcaatctttcagctcctcctggctctatcgtcatccctatccagtctaaacttcacattccatcactctgaccattctttcaccaatagtttcaactcctttgcaatcttaccatacgcacgtaacaaaatccaaatactgtatcaatccaactatttatcatctctggttctactgaattttgctgccaaaagtcacagaatcatatgaactagtattattacaaattaatgatccaggcctatctgggaaaccttccaaaaactgtagttagctctttctcctattccctatggcatctgaccagtctcttcttgttggattctctccctccttatcttctagacatccactgtcattaggctgttccttctgtctttttcactgggtcatctttcctacagggtagtgtttcccagcgtttcccttctgctttattctttcttattctacaaactctcttaggcatcatccattctcacattgttttaactacctataaattgatagcatcctaatctctatctccagcctagaatcctctctttaactccaggccaaagcagccaaatacccactgaacagcaccaattgtgtgacctaaacccatgtccaagactactgatcttattctccccatacatctgatattgctcatgtgattcctatctcggcaagtcataaacctaggaggtatccttgactccatcactccttcatcccctacatccatctggccactaactcaatcaccttaatatatctggaattc

SEQ ID NO: 204978 - DNA, 1000 bp, Homo Sapiens
gcattttttgtagaaacaaggttttaccagcagggtgcagtggctcactcctataatcccagcacttttggaggctgagctgcctggattgcttaaggtcaggagttggagaccagcctgaccaaaatggtaaaaccccatctctactaaaaatacaaaaattagccagatgtggtagtgcataactgtaatcccagctactcaggaggctgaggcaagagaatcacttgaacccaggaggcagaagttgcagtgagctgagatcatgccactgcactccagcctggatagcagagtaagactctgtctcaaaaaaaaaaaaaaagaaaagaaaaagaaaagaaacagggttttgctatgttgtccagggtggtctcaaacccctgggctcaagcaatcctcctgccttggccttgcaaagtgctaggattacaggtgtgagcaaccacatctggccaatttttttttttttgagatggagtctcactctgttgcccaggctggagtacagtggcgcaatctcgactcactgcaacctcctcctcccgggttcaagtgattcttctgactcagcctcccgagtagctgggactacaggtgcgtgccaccaagcccagctaatttttttatttttagtagagacggagtttcactatgttggccaggatggtctcgatctcttgacctcatgatccacccaccttggcctcccaaactgctgggattataggcatcagccactgtacctggccaaatattttttaaagaaacaaaaaactgagaaaaaatattttatatttgcccacatatttaccattgctggcattcttcatttatttgtgtagatccaagtttgcatctggtattactttccttctacttaaagaacttcctttaacattttttataaaatgagcatgcaataaattctcttgacctttgtctgaaagagtattttaccctcattttttgaaagatatttttgctgggtatagaattc

SEQ ID NO: 204979 - DNA, 1000 bp, Homo Sapiens
aaaaaagaaaaagaatatctttgcttttttctatttagtgaacatttaaactttatgtagaccttttttttttttttttaaagcatcgggtcgtaatctatgtcagttggaataatttaatgtggaagatatttagatttttttcccttctctccttgttttccaaaagaataaagcaatctagggattctaaccactaagtgctggaactgaagaatctgttgttaggccttgagttctttgcatggaacgtctttaagtcaagtaacattttaaaaactcttaccatgtgccaggaactgtgtgtatcctaacttatttgatccccacaataacatggtacatagtaagtcaagtttcacagatgttaagtaacttactgaagattacacagctaatgaactagggaagtcaggattcaaacctaggtatgtgtgattctaaactgtggtttctcacatgctctgcagaccctgtagaagaacagcttataaaacagctagactccaaacttggttccagcatgtgtttagcaaaaattctgaagaaataggctgggcgcggcggctcacgcctgtagtcccagcactttgggaggccaaggtgggcggatcatgaggtcaggagtttgagaccagcctggccaatatggtgaaaccccgtctctactaaaaatacaaaaattagccagacatggtggcaggtgcctataatcccagctacttgggaggctgaggcaggagaattgcttgaacccaggagtcagaggttgcactgagctgctgagatcgtgccatttcactccagcctgggtgacagagcgagactacaactcaaaaaaaaaaaaaaaaaaaaaagaaaagaaaaaaagaaaaactgaagaaataggtaatagaagccagatgactttgcccatttgtcacattgtttttggacttttaagttagtctaaatcaaagcaaccattttgtgtattttgacagctaatttagatgaattc

SEQ ID NO: 204980 - DNA, 1000 bp, Homo Sapiens
taggttcaagtgcctcatttgaaaatcttttacttaattccaccaattgaaacgatgacatcatgttttcagagtttacctttcttggtaaacatcaccaacaaaaggttaatgtttatgaaggacatcttaaatcttaatttgatgcatacaataatttaaatttttataaacttttactaaattaaataaaagctgctttgaggttgtaagtgataatgctagaggtaatgattaaaggcacctgcccctcctcctgatgcatctaccttctgtatcctctgataaaaatcaaatgaaaattaatctcaggttcaaagtgatgttaactgtattcaggagtcttaggatgtcctttacttcctttgaagcattacctgatgacctaactacaatttcagcatagctgttgatttttgattgtaggttttattttgtttttttatttttacattcttgtggggagggggatttaatctcttaaactttgttggcaaattacattgatgaatgtgttctgacaggaagctttactgaaatgaaaaggagttgtgtgtaagggtgggaataactattctatgagctttttcatggttctcgttgccagggaaaccactgctttgtctgtacatgtttggaatggctgcctcattagaactcaggctcctagatagtcacttgtaatagtggtaaagtgaaaggaatgaacctattttagttgattaacttcaaattaataaaaatagcatatttaaaagatagatgtttaaaagctaaacatatagaattatgggggaacaatgaagtgaatattgattaggcctattcagccacttgtgtgagtggaagaataattttattttttactttctctttgcctttttacatatttatggggagtaagcaaatggactattatatgttaatgccaccaaataaacttgggatatgatagatcctgattttttcacaaatatacagatttttttcttatgaattc

SEQ ID NO: 204981 - DNA, 1000 bp, Homo Sapiens
tgctgtagaagtggatgtgaatggtagaaaattagctatagcagtccttggagagtctgcacttacatccaagaaacataaggagaagaacgagaggtggagggatgtgagcccatgtctcaaatataattgtcccccaataacctgttgatttctcagaatactgaagttagagaaaacaaacttaattgtcgaatgtcaggattttactgccctagcatgcaggtgagacttttgcccaccagtactatttcattatcatcatcacagtcttcaagatgaatctcctaagtccagagaaccttggtctgaaatcctcagaaaactcttttcacaaactttattctattactgaaataccaggggtttggtctaggtcccattgcttagtgcacagaaagccaattactgagacaatgagtattgccagggaaaaaggctttattagggtgccgcagttgaggagaatgggagatcagtctcaaatctatctccctgaccaactaaaatttggggggttatagcagggaaggaatgtaaaacaggaattagtgaggggtaaggaaccaatcatgaggaatgaggcatctcattttctgtatgctacgatctggtgaattttagtttcttgcctgagggtcagtctcctgagggaggaactcagatataaatttcaagttttaagactgggagggtacatttctacatttgtttaaaaaactgtaagtgtaatttctgtgggacagttgggctggtttcatgatgagactgaaagagtgctaatggcccttgtaggggtggagggaaaatttcccctccccttctgaaggttttctgaaaagtcaactgacaaaagacagattaataggagaaaaagcaaacacaattttattaacgtggggtggggaaaatcaagtgtgatgacccagtgtctaagtgtgttgcagaagcttatatacccatttccaggggagagggagatgaggaatgtagagaattc

SEQ ID NO: 204982 - DNA, 1000 bp, Homo Sapiens
atcaatctttgaatataaagacatccatagcaggctttacccagccagcttctttgagactcttcacagggtttggggtctacagcatatacactaaaatattcatacttcaaaaagcaataaagtaagtggtatcattcttccaaaagttacaatggtagtgtaggaattcatagcatggtttaggtcatgtttgctactgtttctactctatcaccatattaactgtttcctacacaattctatattcagctgagtttcaattgagaacaaaaccatccttgtactaccaccaatacctggcactagctctttgctagtgttattgttctgctgtagaaagtatccttgaactggaaacagtccacaatcaagtatctagtcattcaacactataaattcccgggtgactttttgaaaaaatagtatctcttgttgcaagaaatgctgcatctgtgagtccatgtttctcacttgaattggatggaagtggtgaatttcagccacagtgtccaaagaaatcctgttcctgtgattccgacatcatcagcctctgcacctctgtcttcccttctgccacatgttgcctactctccgtgactttggttagagcttccttgtgtatgtggatgatgtccgggatgttggcctggtgtccctgagacagcactaacaggtccatgactgggtcccattcctggctgggctgattggcaaagaactcaccgacagtgttgaaggcatctctggtgaagtgatggcctgctccagctgcaagacctggctgaggatgaagaactggccaccttctgatgcactttcttaaagcccatcaccatcatctgcttgcatgtcaactcattggctgagaaattgagctgagtgccctgttgtctatcttcttggtaaagcactcaaagccgtcaatcttgttctcccactcctaaaggttgagggccaccttgggggtgggctcagggtcagaaagaagctggaattc

SEQ ID NO: 204983 - DNA, 1000 bp, Homo Sapiens
tgtcattaaaaaaactccttttaatcatgtgtaggtatctacatacattccagtatatggatatactgtactgtaatttaacactttttaattatttattatacattataatgttttgataataaaagaatcatgtgatgaacttttctatatataaatatatctctctgggccgggcgcggtggctcacgcctgtaatcccagcactttgggaggatcacgaggtctggccaacatggtgaaaccccatctctacaaaaatacaaaaattagccgggcgtggtggcacgctcctgtagccccagctactctcaggaggctgaggcaagagaattgcttgaacccaagaggcagaggttgcagtgggccgagatcgcaccactacactacagcctgctgggcaacagagtgagactacgtctaaaaaaaaaaaaaaaccatatatataaaataataaataaaatatattttaaaatatatattatatataaattatagtaattatatattatatgtaaataaatattttatatatttgtatataataaaatatatgtatatttttatatatataaatctgagttctttcaactctcttgttgcccaggctgaagtgcggtggcgcgatcttggctaactgcaacccccacctcctgggttcaagtgattatcctgcctcagcctcctgagtagctgggattacaggcaggcgccaccacacccagctaattttttgtatttttagtagagacggggttttatcatgttggccaggctggccttgaactcctgacctcaggtgatccacccgcctcagcctcccgaagcgtagggattacaggagtgagccactgtgctcggcctctgtagattcttgaaagtgtagttactggctgaaagagccatgaacatttttagaactcttcatgcattttgtcaaattgcttttcagaaagaatatgccagttcacactacctgcagcatatataaagagaattc

SEQ ID NO: 204984 - DNA, 1000 bp, Homo Sapiens
gtatttttatgaattttttataaaattctcagaaaattctcattatagaagtaatgaagcttataagtaattcagacagaaatagcataacttggaagttttccataatccgtgggggaatatatctatattccatagatataattgctattactagtttagtgtctggttatttttcaaaaccccaactgtaccagtgttcttttttttacatcattctaaaatgagcataagataaaatatttgaatcttggatatatcactttaaacaaaaattagtggctaagtctacccaaagtagagtcctagtgcactggtagcagtttttgtgccttcttgcaatacgtttcacctggcttgggaagaaatgccgatgattaagcttccagttattttggacagaattttttgtttgagtcttttaaagttcttttcagggaaccaaatcaatttggaaataaagaggggaaaaatcaagtaagctctgtaaagttactttgtttctgcagtcaggtttttcagagtcccatattttgaaaattttctttggggaggggttgttaagatatattgaactattactactgttgcaaagaattgatgtgttgtgctcatagaggaaattagtgaggtaaatggtcagtcaattttcaggcatcacacttttctaattcccttttaggagaaaagtaatgctggtgcttcctagtacaagattagtggaaacagctatttcttatactggagttttgcaaacagcatgtttaaattgtgcttactcagccatttagcagtcaatattttacagattgtttaagattccctttcagccagtttttatctcacacttaaggtagggtttctttttttcaggttctcaggaattcttccgccaaaggtgaattctgcaggtacacataattgcaacagaacttaacacaaattttgccgcagaattcgagaggcccctgcttctaagtttatgtagctaaatgaattc

SEQ ID NO: 204985 - DNA, 1000 bp, Homo Sapiens
caatagctaggactggactattggtttcttaagccatagccaaactgtgatatggtgaagctttagcagaaaaccatgtgacttgatgagattgcccatgcagaaatgcaggcaaagaattcagcaagaggtatgtagaccaccttgggaatttgtacctttgtacagtatgcaggccacaaagcttcactctaaaaatgacttacatgtagaattattatctcagattttaaagatgtgtttattcctaagcctttagaaaatataaacacaacaacaaaggcatacatacctatctcttgtaactggactacattcacagagctccttactaaattctggaagaggttttgctaagcttgtagctttactattgtaccctacaaaccaataagtttgagtttaattgaaccaagatagcaaatggatttcagactatagtacctcagagaaaatagtctgaaaccaggtcaatcattttcagacacacgaaagagggatgaaatattaaccatagattgtagaggaggatttttgtggtttgtaacatgattggttatggtttttcaaatctaagtagcaagcatgagtccagactgagaaagcctctgcccaattgattagaattggagttggttcaggttgacaaagtgagagtttaggatgtgaagaatgactgaccacctataaaccaaaatttggactgaagttgtttcttcaaagaaacagatttctagaaaaccaatcaccatcatcataatcatcatcagagtaaacaagcatttaatctatctgattttatccagttttcctctgagaagatgccattggcaaatgaccagactgttctctacctttctacagagctataacttcagtcaagtgagtgacttgcacaagatcatacagttttatccaatatctcttatttttctacatttctacaattatcatttttttgatcctgaaagctaagtatgtagtgaaagtcatggaattc

SEQ ID NO: 204986 - DNA, 1000 bp, Homo Sapiens
taccatttttacacctgaagaatttgttttattctgacacaccagatagcttcatacataatgaattgtttccaaaatattatttagagcgatgtggaatttttttttttgggggggggcacatagcatttgtttctcaagtctctttagtccctcttttaatacacaatcctcccattaccttttttgttgttgttcatttcatgatactgacatttttaagagtccaggccattttctcacagagtttcccacaatttaaatttgtctgattgtctcatgatatattcagattaaacatttttattaagaatactacataggtgattttgtgtacattccactgtatcacggcagggggcacatgatgttagtttctcctttattggtgaggttgagtgtgatcacttggttaaggaggtgtgtcctgcagatctgtctgccatgaaagttccttttacctttgtaattaactagtgatccaagaaaatattttgaggccatctggttatcctgcacccataacagctttcatccagtggttttaacatctattgatgattcttctctgcatcagttattacattggtgatttcagaattttgaatgtttttgtgaaagggaaatttgtttaaggtttggtatattagagagagaagatacatacatgcatgtgtttgttaatatttaaagttacttttaccaatcaggcaacttttaggtgaacttctagttgtttgcgtggtcattgattgctttattcctactttgtagcatctttaaaaatgcttaccaagctgggcacagtggtacacaactgtaatcctagcactttgggaggctgaggtgggaggattactgagaccagaagttcaagactatcctgggcaatgtagtgagactttgtctttgcaaaataaataaacaaataaaaatgtttaccctagctatgctgttaagccacactattactactgaatacaaaaaaaattaggaattc

SEQ ID NO: 204987 - DNA, 1000 bp, Homo Sapiens
aatagcaggggacttcagtactccactgatagcaccagacaggtcatcaagacaaagtcaacaaagaaacaatggacttaaactataccctagaacaaatggacttaacagatatttacagaacattctacccaacaacttcagaatatacattctattcatcaacacatggaacattcttcaagatagacaatatcataggcacaaaacaggtctcaacaaatttaagaaaatcgaaattatatcaagtactctctcagatcacaatggaataaaattggaaatcaactcgaaaaggaaccctcaaaactatgcaaatacttggaaattaaataacctgttcctgaattatcattgggtcaacaatgaaatcaatttgaaaattaaaaaaaaattatttgaacagaataatagggacaaaacctataaaaaacatctgggatacagcaaaagcagtgccaagaagaaagttcatagcattaaatgcctacatcaaaaagtctgaaagagcacaaatagtctaaagtcacacctcaaggaactagagaaataagaacaaaccaaacgcaaatccagcagaagaaaagaaataactaagatcagagctgaactaaatgaaattgaaaaaaatacaaaagataaatgaaatgaaaagctagttattgaaaagatacataaacttgataaatcattagtgaaattaacaagaaaaaagagagggtccaaataatctcaattagaaatgaaacagttgatattaaaaccaatacaatggcaatacaaacgatcatttaaggctactatgaatacctttacacgcattaactagaaaacgtagaggagatggataaattcttggaaatatacaactctcctagattaaaccaggaagaaatagagactctgaacaaaccaataacaagcggcaagattgaaatggtaatttaaaacttgccaacaataaaaaactccagtaccagatggattcatagctgaattc

SEQ ID NO: 204988 - DNA, 1000 bp, Homo Sapiens
aattaaatcacttctagccctcaattacattaaattagttcaacttacatctttattgcaacctattaatagctttgtgaccctggctacaccatctcaaccatctggacctcagtgctctataaagtagggataataacttgcttcagatctaacaagataatgcctgtaaaggtcttgtgtaattggttaaccaagtaaaataattgttaataataaaggttagggttttttgtttgtttgtttgttttttgagacggagtcttactgtgtcacccaggctggagcgcaatctcagctcactgcaagctccacctcccgggttaatgccattctcctgcctcagcctcccaagcagctgggactacaggcgcctgccatcgcgcccagctaattttttgtatttttagtagagacagggtttcaccatgttagccaggatggtcttgatctcctgacctcatgatccgcccacctcggcctcccaaagtgctgggattacaggcatgagccacagcgcctgaccaaggttaggtattactattctgtgaacttgtcttagccagccatcatttatttgcaagtaacagaatctcacttaaaccagaggaaaaagggggaatttatttagtcagatacaggcgtgtttctttctttctttcttttttttttttttgagacagagtgttgctgtgttcccagactggagtacagtggcacaatcttggcttgctgcaacctccgcttggtttaccaagtaaaataaccctgggttcaagcgagtcccctacctcagcctcccgagtagctgggactacaggcacgtgccactatgcttggctaattttttgtattttagtagagatgaggtttcaccatgttggccaggatggattcgatctcctgacctcgtgatccgcccacctgggcctcccaaagtgctcggattacaggcgtgagccactgcacctggccaatacaggcgtgtttcaaagaattc

SEQ ID NO: 204989 - DNA, 1000 bp, Homo Sapiens
tctggccctgaagctgtgggtggccccctgaacccttcccaaggtccctggactctgccttcctctccatagggcacaggaggacctgaatgaaaagcagaaattcagccccctttaggctggcccagcccagaattcatcagaaaagatgctgagtccagggctgtttcagggctgtggacaaacagggagggaatgggaatctgtccagttgccaccaaagaaaacacccagaaatgccagtagcagtctccctgacccctcctgccattccatggccctcttggggagcagagacccagaggggcaggagcaggcatgtcgcctgggcagcacagcagcctagccttcaggcactccacagagggaggacagaggggtgctgcctccaatgccacaccctggggcaaaccagccaaggggcagcggctggaccatgggggcatctccagcctggcctgggcccagagcaaaaagtccttatttggggtccagggatggggagtcccagctttcagcaaacaggcagggttgggaggacagcttaccaaggccattccagctatagcatgagtctggaggagcagtggcagggaggggcagggctacatagctctgcaggggctcaaccagacctgccagctaaagggtgggagacaggagcactggaaccaagggtgggggtgctggaggaagctaggggaggcctttcccaggggctccccattccccatgggtctccagccctggaatttccatagctctgggcctctgtacctgtgtccctgactggatggcccccactggggcactccagcccgtctcctggactctgtcctgcgtcagtgggggtcagatgagccccatcttccataagtggaggggacgctcagaggtgaaggggcacaacgtcgcccaggcagagaaggccagagccagcttgaacaaagctggacatccatgccagactcaccgccaacaccccacagccccagaattc

SEQ ID NO: 204990 - DNA, 1000 bp, Homo Sapiens
tggtggcaggactggaccatcctgtgcctcttgaccccccagccaggactgtctcccacctcaattaatagaagttctctgtggcttctgtggcatgatgcgcactgcagtctatggcccctagtcctatggaagcaccggcatggccccaggggacatcgctgtatccacggcaagagggagtaaggaattgtctagcatctgaacaatagagttgccctttcaacctatgtcctaaccacactgcagctgctggacagaagaaaggggagcccagcaaaggtcggggaactcgtcctggcagccttaccccaggtcttgcttacctaagctaaggcgggcagaagtgctgagccttctaaaaatcagacatggtagacatggtttgcagcacagagagaactgctctttgggctgggctgggcctcctcagcctggctgcactgtgatggagaggcctttgggtgctatgtgtggataatcaagggttggctatacttactattcttattgatcctttcatgcaaggatctgagagcagccccaaaacaccagctagtggtaagctttgcttcttccgatggatggatgggaccctgcagcatgactgggtggtgaaatgatcaatctgagtgggggtcagctggccaggcaggactctacattgcttagtcctgccttctcccctcactgagccacaaggctctccttggcaggtggtggagcgcccagcagctggggtttggtgcaattcccagggccaggtgggaggggcagggtagatgaaggagacagtcagatgactgctgcatcatcagatgactacagggccagcactgcctgcccagggtcagtgtccagcctgcacctgtgggctggacatggtgtttctccaagcagaggcctcctacccacacttctgagtggggagcaaaaaggccacaggagcaccgttggctgccagggcgcagagtgagcgaggcctgtgagctggaggggc

SEQ ID NO: 204991 - DNA, 1000 bp, Homo Sapiens
atcctggtgcctgcatcttggaggccccaccctagcagaagtagagtgtcagagagcaggcagtagaatgatgggctttggggccccacttcctcactgactggctgtgttaaggaggcttccatcccaagtgggacacgtggaatgtgggacattgatagtccttggcacaaggtggtggcccaactgctgaaaatttcacaagtggtgacttgggaaaatgtcccagtggagaataacaccctggatggtacaatagtacacatacttgaaggaatagagggaacaaggccaacaagaactgtggatttggctgggtttgacaaaggtgtgacaccctgcagagggatagtgagaaattcagggcatttaacaaaccgttaaaggctgaatgtgagagcctgagctgcccctttggtagagcacaaagaaatcattacctttgccataaaaccagactcgggacttgatagagttgctgagggccatagatgtttagatgtccagggaagacaggtctattaagctaaggtaggtcctggttagggaaacataaaatcttgaaacatgagtggggacctctgggagatgtctgcaagaatctgcagggtctgtagacccctcctgaactgccagcatttccagaggtggcccacctttctgtagtaggagcttgcatttcctccttgtaggaagacactgcagaaaccttgcaccccccacaccaacccctctctcctcaaggaagcaggagccctgtcctcaggagctgctccccctttgtcaggctgctaaccaggattaaatcctagaacttggcttgggacgtgctgagtctgataagggaggaaagagattacacctcaaaggaggtgtgagaattagctagcatgtagcatgagaagccaggagagtagccctgggattggattttgggggtgcttgaccaggaggctggaacatgtgactaaataagagataatttgttgacctgggggca

SEQ ID NO: 204992 - DNA, 1000 bp, Homo Sapiens
tgttatgtatattttgatgttccaaccatcacagtgatgacatttagtattaattcattccttagcacttgtaccacttcctaagtgtctttgtttaaacacagatcttaaaaagaaactgttatgttctttcctagcttttttgctttttctttcctgctataaaattgtgttggctgctcatgcttctttgagattttatttcttctccgggtggagttgtggtgtcttttttttttgagacagggtctcgctctgtcacccaggctgtggcagtgccaccatcatggctcactgcagcctcaacctcctggctaaggtgatctccacctcagcctcccaagtagctgggatgacatatgtgtgccagtatgcctggttaactttaatttttttgagacagagtcttgctctgttgctcaggctggagtgcagtggtgcaatcatggctcactgcaacctcacctgcccaagttgaagtcatcctcccaccccagcctcctgagtagctgggactacaggtatgtggcaccacacctggctaattttgttcttaattttttttttttttggtagagatagaatattgctatgttgcccaggctggtctcaaactcctgggttcaagtgatcctcctgtcttggcctctcaaagtgctgggattattggtgtgagcctccatgcccggccttaatttttttttttttcaaacattcatttgtagagagggtcttgctttgcccatgctggactcgaactcctggcttcacacaatcctcttgccttggcctctcaaagtgctgggattgcaggcatgagccaccacacctggtggagttgtgatttttgctaaagggcagagtacatgcttcagattgaacagtggggaagagacaagtgcataagatgccttagaagctccgaagctatagtaatcagatctcttagttatgtgagagaaactcaatctgaaacagtttagatgaaaagggagaattc

SEQ ID NO: 204993 - DNA, 1000 bp, Homo Sapiens
agtcccctttccttctgtgtccatcctgggaagtggtgagggcctgaggaggcaacgggacagcttcctcgaccacctgctctgagggcaccatgggggactctggcctctccctattcaggggtgcttgaggctgcccagaactggctgaggctgactgctcctgggaaggtcttcgtggccgctcttctgctttttcttcttcttcttcactgctgctctcttccttctcttgctcctgttggtttaacagctgaagagtcaccatctattcaaaagccaaggaagagatggtcactgaaaggaacacagtagccactcctaattcttattaacactactggtcatgtagtttaaatgactttgcttctttcctgttaaaagaggctgactatatctgtcaagtcactccaggcatcctaattactgaggaacagtcctgaataattttcttttttttttctttggagacagggtcttgctctgttatccaggctggagtgcagttgggggcaatcatggctcactgtagtcttgaactcctgggctcaagtgattctcctgcctcagcctcccaagtagctgggactacaggcacgtgccaccatacccggctaatttttaaatttttaattttagtagagacaaagtctcattatgttgcccaagctggtctcaagctcctggcctcaagcagtcctcccaccttggcctcccaaaatgctgggattacaagcataagccactgtgccagctttgaacaattttttattcatgatcccttagaaggtacttaagcaacaaaatgcccaatacgatgaaacaaatgacagctggctggctgtaccttgatcgtattcatgatggttcccagaatggtcctgccattgtaagattcctccagctcaaactctctccgtaaggactggaacacctggttcatgatcttcttgacctgtgtgaacatcaaaacacatgctgtcaaaatcaagtcactaaa

SEQ ID NO: 204994 - DNA, 1000 bp, Homo Sapiens
atgcaaggaaatgcctaattctttatatactggtgtcaggtaataatttgctctgcaacttcaaaatcatggcagaacatctgtacaaataaccctactagtttagaagacactagtgcccattctttttggttccagttgctcacattccctgtggtatatcatagaatattgccatatagaatgtgtatttaaggaggaaaaaaaattgtgagattacttagtcacaattggagctctccctgcttccatcatttttgggtgctgagtttacttgaccttcatactgcttagtatgtagaaattttatgtgaaattaagtactactgaagaggaaaggtcaccttggctgtctggagtcatcagattttgtatgatgaacattttatttgcaaagagtttgtatatcatgaagtcttaccattaatatccacttgtttgctcatggggtactctatctccacccacccccccaaatctgtaaagaattataactttaggcatttgtgataaaggcctgaaataaaacacattgtttcaattggatggttaattcctttggggaaaaatttggttataaatctctggttgaatttaagaggcaaaagttcagttcatttttaagactttatttctttaaagcagtatttggttcacagcaaaattgagaagaaggtacagcgaggataccccctacccccacatgcatagcctcccctattgtcaatatcgcccaccagggtggcacgtttgttacaattgataatattgataaactgacacatcatcttcacccagagtccatagtttagattaggtttcactcttggtgttgtatgttctgtaggtttggaaagttctgttattttaagatttgagtttctaactgattgagctattgatcatacttagtgacagtgcaaattataaaatttgaggttagaaattccttgttaaagtttcaaatatgtttgtgcaaatttacatcttaatatgtaca

SEQ ID NO: 204995 - DNA, 1000 bp, Homo Sapiens
gtgtgcagcttttggggaaaagtttttttaacctgagaaaatcatacttaaaatagtaaaaaggtgaagcacgcatttaagaggggatggtgatttatgaaatccactctgcctgtagccagccctccttgacccagtcatttagtgcagaaactaatatggaaagaggtgtggtaagagttgagctttatttcaaaacccattgtgttctttaaaagctccatttaaaaaatgtagcagttggtggctcagttgtgtcacagttcattccctgaatacagaagcttaaacaaatagtaagtctgtaggcattcttcactgccttggctgttaatcagaattgttagatcctgaaatgtattgtgatcttaagggaaaacctttagttccctcacaggtgaccccagtgtagagtgtgtgcactgatgcagaaatgagcaaagtgcttgcttccatccctgtgtcacatatgcatagtttttcttgggacttctaagcctaacgggatttttaggagtattaaaatatatttaacttgctcccttcccccctgctccatggtgtgtgtgtgtgtgtgtgtgtgtttgaaggcctccacatttctcttacacaataaaaagaatcatttttgttgctctttcaatgtcctccagtgcttgtattttcatatatatagtacatttaaaaagcagatgggtagatatcagggcagtgacgttcctgcacaagagtgtctgatagttgagagccaggtgataattttctaattagaaggtaactatattatgggtattttgctgccagtacttctctcccaattattttttaaactttaccctcttcactctatactatgtatatgactgatttacaaaaagtacacttttgaaggaatgggatgcatcctctctttaggtacattacataaaaacactcaaagatgtagccttttttcattccttttcctggtacccttattgctcatttgaatgtgatttat

SEQ ID NO: 204996 - DNA, 1000 bp, Homo Sapiens
gggccgggggcctggaggaggacccaggtgatccccaggccaggtttcggggactgcggccccccgagggggtctcagcttctgggcgctggggttgggcagccgggaggccgcccctcccccatcgccctctcccggagcgtccgccccctcccccgcgccacctgcggggtcggtcagatccgggcctttgtcccgcgccccagccccgccgccccgcctggctcccccccgagcaaacacagctgagcgcccgggctcgcgtgccgcccccgccccccaaatctccgggccgcggggtggaggcttagcagggcagctgcgggcctgcgggcgggcggagctcggggcgcccctctcccgctcgcaccgccggggcgcgcctttgtcatgcagatggcccgctggcggccggcctcgcccggcggcgctcgggcagctgacctggggggtgggggacaactccgctcccacatcatgccgaggctcccgtgaagaccgcgtcgtccttgccctgggacccgctcctccctccccccggcgccaggtgacccactccagtcgctgggcgtccctggcctgtgttcttgctcgcactccctgcaaaggaacctgctgtccacacacctggagccctggagcaggggctgggatttgccgctgccaagggtgtggggcacatgtggggggcagccccatccctcccaactggtcctaggccagccagacctctgtacccactgtgggtggctgggacccaatcgctgcccattcctgcctcagtcttcccatctgtactatgagcgctgctccagggcagagaggactggtgggcttaggaggaggcaggagccaggtttgtcccaccggccttgcagccacctggtgtggtggccttgggatgatacgtctggcctcacatgcagcgatgtggcctggggatgtggatgcccgcagctcagggccctcgtgggcaatgacactcatgcttaggatgcca

SEQ ID NO: 204997 - DNA, 1000 bp, Homo Sapiens
tccaccttccgggttcacgccattctcctgcctcatcctcccgtgtagctgggactataggtgcccgccatcatgcttggctaattttttgtagagacggggtttcaccgtgttagccaggatggtctcagtctcctgacctcatgatccacccacctcggcctcccaaagtgctgggattacaggcatgagccaccgcgcccggccgaccctaggtccttagataagctcaaccaattgtcagaaaaattttaaatcaacctataagctagaagccccctgcttcaagttgttccatctttctggaccaaaccaatgcatttcttaaatgtatttgattgaagtctcatgtttcactaaaatgtgtcaaaccgagctgcaccctgaccaccttgggcacatgttctcaggaccacctgagggctgtgtcatgggctgtggtcactcatatttggctcagaataaatctcttcagatattttacagagtttgattttttgttgacactggcaagtttatcccatgctaaacttttactatgggttgggttttgtttttttgttgttgttgtttgttttttgtgtgttttgttttgagtaacttcagtagtaaccttaacaatagtctgttttgacaggtttttgacacattcttactatagtcacctgaaccaatgaaatcctctgcctggggcatttgaaaaatctttgtaatatggctctagcccatttttctagcctcatttctccatgttctagcaacatcttgcacatagccagatgtttcagtcaaattaaattattttgattacttgtgttggcaagaagagtcaaactgcaaaatattttaagagatttattctgagcctaatatgagtgaccacagccagtgacacagccctcaggaggtccacagaacatgtgcccacggtggttggggtgcagtttggggaggcatgagacatcaatcagatacatttaagaaatacattggtttgatc

SEQ ID NO: 204998 - DNA, 1000 bp, Homo Sapiens
tagtgtggtgaatggttttatcaggagtggttgttaaattttgtcaagtgctttttctgcatccactgaaatgattttatagtttttcttcttcattccgttagtgtggggaattatactgattgatttttttgaatattaaacataaaaagctataaatttccctctaaacattacctcagcctcacccaatatattttttaacatggttttaacatgttcatgtagatttttattttccaggaatggattatttggcccatggatcaatcagttggtagaatacagattgtagatagtataaatgaatggttacacccaaatgttggcaatttgagacaatttgtgaaacagcaggaatggcaaagtctttgtttcatcagcaacttcctaatggaatttgttgacggaagtgatttgatttttatccatttagtgatgcttatatcatggcaaagtccaagccattcacatttcccttcaggtgtgttctaattcatgatcttaaatcatgataggctatttccttaaagtgatgtcattgtttccacctgggcagaggaagatgatgagtgttggcgatggcagaggaaggggatggacacaagtccaggaataaggaaggcaaatgtcagccagcactgtcagccacctcccttgtgtgcgggcactgggctagatcacctgcatgtgttaggtgtgagtccacagcactgaggagatggaggtctgtaggaagtaaatcatctgctgcaggtgacatgagtaggggcagaaacgaggctggagccaggtctgctagccctcaaagctggtggacttttcccaggcagtatctacctttttttatcatgcaacatgaggatatctacattttggagtgagtgtgagctttgaggataaagttgtaacagaagtttccaggataatccattaattgataccacctatcttattgatttaataattgagccactgttatacttggccagttgaatat

SEQ ID NO: 204999 - DNA, 1000 bp, Homo Sapiens
gtaaggttgttagagcctgacattaattggggagtgactactgcttagaaaaggggaagacttcaaaattggtcctttttgtaaggttcttttccttacaaaagattccctttgggactttggtcctgaataaggtactggcagtggatctagaaagttatgaaaaacaaattggcagagtggtggtacttttaatggggaagatcagtggactttgagaggcttcttgttaatgtgccttatattttatagcttgacatggtagggaagacttccttagatgtggaatcaatgatagtttgagatgaacttagttctttgaagaagggagaaaaaaaatgaatacaatgatatttttcagctaaaattgagcaggcaaaatgggggaggcataggtcctggggtcccttaaagattcctggagccagtcttgtctcaatcttaggcatttgtcctaagtaaattaaaacaagtgttagaagtctgagacctaggtggtggttgtgggaatcataaaggcttgtgccagtctgaatttccctcctcctcttttagataatcattccatttaaagtctgcagtggggacactagagaatgtctttagggaagcattatgttcacgttctttgaaaatagaactgttggtttttatagacacttcagggaggatgccgagtattgctgaatggatgtggttggggggtgtagcaattgttttcgtgaccttgacttgaagaattttcttgcctacctttgtcagtggtggaagatcatgactgggcaatttttaatctctatagctacagatcctgcctcatgtagatgaaaattagttttgtcttggctgaattttaatttgttagagtaaatgagctgggatgtctggcattgaaatggtggggtggtgggaaaccaaggagcaagatggctgtttcagaagggtcagaaatgaagataggaggcaagaagtcccagtaagaccaataaagagagaattc

SEQ ID NO: 205000 - DNA, 1000 bp, Homo Sapiens
gcctgtaatcccagcactttgggaggccaaggcaggcagatcacgaggtcaggagatcaagaccatcaagatcaaggctaacatggtgaaactctgtctctactaaaaatacaaaaaattagccaggtgtggtggcgggcgcctgtagttccagctacttgggaggctgaggcaggagaatggcatgaactgggaggtggagcttgcagtgagccgacattgcaccactgcgctccagcctgggcgacagagcgagactctgtctcagaaaaaaaaaaaaaaaaagtctataaaaccctgcctctgatttattcttctgtgtctctctctcttagttcactaagttccaggcacattggcttcctgtagtgtcatgaacgtgctaagctggttcctacttcagcatctttatacttgctgtgctcttctcctaatatcctggcctggcttgttcctcctcatcattctggtctctatgcaaatggcatttccttggagagacctactccaattatcctatttaaaatagccttccccctgcagtgagccaagatgcaccactgcactccagcctgggcaacagaacaagactctgtctcaaaataaataaataaatagccttcccctattcaccctagtcactatctccctaccatactaattttttaaacagcacaaatacctaaaattacattgtttattggtttactttttattgacctctaaaatataagctccatcagggagggaattaactgtcttattctcatctgtcagtccctaattgatatacaataaatatttgcttgatgaatgtttaaaactaaaactagatactaagacctaattacaaagattgtatgctaatgattttttaatgtagaagctaataacagtacacaaatccatcatttatctcagaatgagtcactataaataaatgttgattttaaaaaatatcttaagcggaggcaggaggatcacttgaggcctggaattc

SEQ ID NO: 205001 - DNA, 1000 bp, Homo Sapiens
cacaaagaatgaactctaatgtaaaactatggactttgggtgataatacgtcagtgtaagttcattaactgtaaaacatgtaccattatgtgggggatgttaaatataggggagggggctgggcacggtggctcacgcctgtaatcccagcactttgggaggccaaggcaggcagatcacgaggtcaggagatcgagaccatcctggctaacacagtgaagccccgtctctgctaaaaacacaaaaaattagccaggagtggtggcgggcacctgtagtcccagctacttgggaggctgaggcaggagaatggcatgaacctgggaggcaaagcttgcagtgagctgagatcgcaccactgcactacagcctgggtgacagagtgagactctgtctcaaaaaaaaaaaaaaagaaaagaaaagaaagaaaaaagaaaaaaaaatgaaaataggggaggggccaggcacagtggttaattcctataattccagcactttgggaggccaaggcaggaggatcacttgagcccaagaattcaagaccagcctgggcaatgcagtgggaccactgtctcttaaaaaaatatttaaattagctggacttggtgggatgtgcctgtagctactcaggaggctgaagcagtaggatcacttgagtatgggaggtagaggctgcagtgagccatgattgtgtcactgaactccagcctgggtgacagagggagatcctgtatcaagaagagaaaagaaaagaagaaaaggggaaaaaaaagaaaagaaaaggagggaggctattcatgtgtcaggacaaggggtatatgggaaatctctctgcattcctctcaattttgctgtgaacttaaaatggctctaaaaacttttaaatctttaacttaaaaaaaaaatctgaggcactgagaagactacagtgaagaaacacttttactgtatggtccagtttgaaagaaatgtggtaaggatgcaatctgcctgagaattc

SEQ ID NO: 205002 - DNA, 1000 bp, Homo Sapiens
cttctaagggaatttttttccactcgccaggcccagcccaggcatatcttttcacctggggaggctggcccagccctgccttctgtcctggggcaggagcagcctagctggagtcttctacacacacatcctatcagtgtctgcttagcccggctgggggaccctgaccttacaggcaaagagaactggaatgggggcagggatgtctggttttcctgtgccagcagcgcttcctccagtgcagtgaaagagactaaagctagctgtaggggggcactccaggcctcatgtgctctaccaggaggagggctctgatagcgcccactgatcagtttttccatctgctgagggaatattcaggtgctagggctgctgagaaccgacttgtcccagccaagattttcagtgcccacaggcagtgcactgccctgagagccctggcatcccattagttcccagtgctccaagatactagcctaggatcatgtgcccggagggaggcaggtgggcggatacatgcgcacactgcatacctgagacaaggagccaggcctgggatgacccagctgccatggttttgagaggcaggccagaaggcccaaggaaggggggtgatgtgatgggggaagcactgggcattgtgaagacacagaccagggacctgacctattgtggcaggtcagggaaggcttctcagaggcagtgacatctcacaagggttctgaaggaagagcaggagtttgccagcagcattgtttctcccgttcgccacctgtctctcataacacactttgttcaaactcaattttgggagctttgttctcccaaataaattctggatcttctgttagagacaggaaggcaaccgagtggcccagacctgggttcgagttctgactgtctcttaccactagccaggtgaccttcctttccttcacggtagcaagccctataagaatgaagccatatatctggccaccagcgggagctcagtgcctgc

SEQ ID NO: 205003 - DNA, 1000 bp, Homo Sapiens
tctggcaagcaaatatcatattctgtgctatgggattgtggctgatgcctagtttcattataaatgaagtgtgtatcttaatttttggttcatttaggcggacttcagagcggggaattatataaattggcattctctatcatttttgctggaagctcactctggtctgtaatgctatctaacaaataaatttttatttcattgttattgaatgttcattaaatgtccccaactagactagaaggttgctgagcacagggattttgtcactttcctagctatggtaagcacagggtaagcccaagccttcagtacagtacttgttgagtcaggataggtcaagagttgttatcagctgtgttctgtttactacctgtgctattaagggcttaatgacaaaagaaaaattgtgttcgatatgcctgtaacaacaactaagtgaatggtttgctctgtttctcctgaagtaggatttcacagcatcaaacaaacctttgcatttttccttaagaccaaagattcaatcactcttaatatctagaactattagctatcctttattcagttccagattgccttcataataatcatttgaaaattaccttggtgatctcatgttcatgtcctttgaaccttttcaccacatttccagttttccaattataggccacaactgtctgaagagagtgaagattgtagtttcattactcaattcttgttaaagtgacactagcctctactgcattctcaccttactttctccctcctcactcactccctctctgctcaggaacttgctcaaagcattcggggttccctgttgtggccgtccctcctcacgtgcccctcctttgagtttcttttctttcctcctggttgttctctgtctccctccgacactggaccactgctctaaacttactgatgggtttgggctaacattccccaaggagaactgattcccctggaggttctgactgtagatggtgaaggagaattc

SEQ ID NO: 205004 - DNA, 1000 bp, Homo Sapiens
aaataatagtccatatatctataaaaaagttaaaaggtttgacgtcaaagaaaacacaagacttatatccatttaattgaatgccttaaaataagactgttgcaagttaaagagtagaattacagacaactgaggatgccagatttcctgaagggcccctgggagaaaagagagtggaagaagccaaaatccggggccttcagtgtgaagcagacataatccattcacaataggcctcagaaaaactgaacttgagggacaatggccagtcgcttcagggggtctggaaacgataatgctgtgtccaggatctggtagccctgcccctccatgaccctaagagattatcctagattcctgggagttcactcctagaaaactgggatttggaagatttggatttggagagtgggccctatattagtccattctcacgctgctataaggacatacccaagactgggtaatttgtaaatttgtaaaaggaagaggtctaattgaatcacagttctgcagggctggggaggccccaggaaacctacaatcatgggggaaggggaagcaaacacgctgttcttcacatacccaaggctgggtaatttgtaaatttgtaaagggaagaggtctaattgaatcacagttctgcagggctggggaggccccaggaaacctacaatcatggcggaaggggaagcaaacatgctgttcttcacatggcagcaggaagaagtgcggagtaaaagcggggaaaagttccttataaaaccttcggatcttgggagaaccttctcactatcaggagaacagcttggaggtaaccacccccatgattcagctaccgcacacaaggtccctccctcctcaacgcatggggattatgggaaccacaattcaagatgagatctgggcggggacacagacaaaccacatcagttcccatcagctaagagttaccagccaattcattttgttttttctagctagaatttggttgtacctt

SEQ ID NO: 205005 - DNA, 1000 bp, Homo Sapiens
ccgggccgacgcgtcacgagggcggggaagcctgcccaaagatgctaggacgcatgcgccagagactgggccagggagccgccaggaatgctggctgcactgctcgctggatgtccagtaaagccaaggctaatattttgggaatgttcaccactgccctcagctcctaatccccagtaggcggagcagaggatttctgttccttcagccagccagttggtttcactgtggagacgttggtggctcccttgtgaccgagagaaagtcattcaaaataactccgtgtttcttaagatgtctgaaagcgacagctctgcacctgtcatacaagttaaattcatccccaggcagtacttgggcttcacaagtttcataacttgtatcaaacttagcaattttctcttggatgtgtctttctgtttgaattagtcaaccataaaaatagagaaaaatcccgagaatcatgttttgcgtgtgctttttaattctttccatttttgcattatggatacaacccttaaaagagaaaaaaactagttcgagattgagagtggcaacctggcacacataagacaaaaaaaaattatactttaagaatctgagatcccagtttcatcatatttgtacagtaaatctttgtttgcactcttacctatttaaacccactttgtcaggtatcttatttttatttatcatgagtaataaaggaaatttatgcagtaataatgaaacatcataagagaggggtgtggtgctgggcttgtcattaaacaggctgaacctgtcattaaattctcttctgaagatttaaatgccaagtgctttttttccccttcctaatcttcctaggtgagtttgaatcaacatttattacttaaaatatttaaaacatttcagcggatgctacattggataggaagagaaccgcaagttatggatttgttgcctaaaaactttggtgaggaactgcataagtggacctctcctaaaagtgaacaat

SEQ ID NO: 205006 - DNA, 1000 bp, Homo Sapiens
cgattctcctgccccagccttccaagtatttgggattacaggtgcatgccaccacacccaggtaatttttttgtatttttagtagagtcggggtttcaccatgttggccagtatggtctcgatcttctgacctcagatctgcctacctcgacctcccagagtgctgggattacaggcatgagccactgcacccagccggagacagggtctctctgttgtccaggctggcctgaaactcctgggctcaagtgatccgcctgcctcagcttcccaaagtgatgggattacaggcattagccaccacgcccagccagttgttgtttttcagaattgttttccctatttttgtttgtttgacagtacatatatatttcacagtcaactacaaaaaaattctgggattttgattggaattgcgttaagtctacacatcagtttggggagaattgacatctgtgttgagtcagacaatccatgaacatagtctatctctattctttatcagcgttttgtagtatttcatatgtatgttgaactggctggaatgcagtggcatgatcgcagctcactgtggctttgacctcctgggctcaatggatcttcccacctcagcctcctaagtagctgggactacaagtgtgtgccaccacgcccggctaatttttgtattttttgtagagatagggttttgccatgttgcctgggctggtgtcctggactcaagtgattcacccacctctgccttccaaagtgctgggattatgggcataaaagtcaccacacccagccagtatacatatcttgtacatgttttagtaggtttatgcttcagtgtttcttttacttatttattgcttcctatcccacagcttactttgtttcttgagctgttgtaagaggttgttttttgaattttggtttctgactgtatatttccagtgtttaaaaacaaaactgatttttatgtgttgttcttatacctcataaccttgatgaattc

SEQ ID NO: 205007 - DNA, 1000 bp, Homo Sapiens
tgacttttcaaagaaaattgtacttgaattattactataatattagaataaaaatgtttatcaatataaaagctgactaccttttaatttctaggcttcatgatcttaagatgaaagcttccgtttcatgttgtcttccttgcagagctgggttcttctccagtgaagctgagactattatgacttaactctaccctgatgtagtagtgtatctcaaagcaagtgatcaccaaagcatgtgaggacttatcctgagtcttaacacatcagcatttctagaggagcagcccaggcaaaccaacgtgaccctcaacccaaatcttgagtggcttctcttctcattgcccacagagtccagctaggacccaggctttctacaatcctcctacccaacctccttatctaccactccctgccacactgtacctttatttggtcactgaacccctgcttattccattctgtcaacctgcatctcattctcctcccatcatttttgcttgtcagtgtcctgcctgacctcctgggccaaccatgaagctttctctggtacccctttctactccatcgtactttgatcatgcctctcttggtgcccatatgtcactgtgttttatagtatatgactagtctgtgcaccgattaccccagctagatcatggtctccctgaaagagggacgggtcttagtcatctccggtgatataccagtaaatgtttgacaactggttctgttgagtggggagctgagccttgatttgtagtgtctgaaaattctcatattgtaaatggtcccaccattgttgattttcagctaataatatgacaagactgaatgtggagttgggaagagactcacctaagcagctcttgagaccgcatatgacaggctctccagcacaccaccgtctgagcatccacagccgtcagaatggcatcttacacacatcaggcactccttttgtgcttgctaattgatgggcagatagattggcagacag

SEQ ID NO: 205008 - DNA, 1000 bp, Homo Sapiens
acactattaatatagtattattattaaaaatagtgataacaataaactagccctagaacaataggaaagaaagaatagaaaaaggaaaagagaagtaagtgcagggagagaaacaatagaaggcagatactttatcacgttcaaaatcattcaaataaccatcattaaatctactttcaattatttcttcagaggcaagaagtgttaggaagcaaataaatacctgagtttcatagaatgaggataagtatgaaagacagtaaaagagtggcagaaagaagaggtgagagatatatcttaactaggtaatcaaagaatgcaagtgtgtccaagtaacttaaagggggaaaaaaaaaaccaacatacctcaatttgagatgtatcaaccccacaacatgggaccttgaaatatgctggccagtcttgctcactaagcctgtcctctgatttgtaattaaggctatgtggaggtggggtgggcccaaggtgtgcctattgagagattgggaaaggaaattacatatgcccagacagtattacttaaaagcattgagtacatcaaaactttaagaaattgcaaatataacacaccaatgaccaactaaacacattttttaagagttaatagtttctaaggctgatagtagccaacagctaaataaactttggtgagaactaaagtaacaaagtgggaataactgaataatttgctgattgataatggatacacttttgccctgcctagctcaatttcttactcccttttcttccacttaatatgacacttttaactgctgttagggaatactaatcacccccacccccatcctcccgccccagccccccgccccgctcccttgccaagtataagaagctgtggagaacacaaaagttaagacatactccttgctcacaagtttacaatctagtacaggagataagctatgaacaaaacaaccttaacaaaaacagaataggaaaagaaacaagagcagaattc

SEQ ID NO: 205009 - DNA, 1000 bp, Homo Sapiens
ggtggactctggttgacccaggcttatgtatgtatctcttctgacccaaaaactctgcccagggggaaacagtgtcttgattggccctgaatggtcacatgtccacctctggggcaggggaggagtggggtctatgccaactcaaccacatgggctgagaacagaagagggtggttccaaatggcagtttgggcttcttggccagagaagggacaccagaaaggcagaaagaatatgagtctactaaagaaggattgctcttgaacagaaagaagtgcctcttatctcctcagactagaggggaggagggaagggctggtgccaaagtagacaactttgaagatgcaggcatgacaatgagccctagcacactgggtttctccacagaagtggaggccggtgcctgtgcagagagggtgggagtggaggtcagttgggagactggtgggaaagagttaaggtttagaagagcagcagagggaataggagaaggagctgatagtgacaaaaagattgttacgagttaactgactttgaaaaccatgaatttgtcatagccataatctgcgcaattgtacaattttctccacaggctcagtcctgaataatgatagctatggccatttgtgtagaaagggcacagtggggagcccaatcttcctacccattctggagcaattaggctatcaggcagatccccaggagttgtatttgtacaagggctctcaagcctcccaagagaaaagatgaagaggaacagcaggtgagctctgtgacacagggttgaggtgacatgacccaccacatctcaggaaaccccccactgtagacaggaaactcattgagtggcctcacattgcccagtgctcggactattctggtccctggcacattagagatgacgactgtgcaagctgcacctttggctggcgcctggcaaatgcttcatggccctgtcccttgtgcttttctccctgttagctttcaactgtcttttgtg

SEQ ID NO: 205010 - DNA, 1000 bp, Homo Sapiens
taccttaggctactaatgcatttgattcttcttaaccccaacctgttgttttaggtgattgaacctgtgattcagccttcagtaggtgttagaggcatccaacacaggtggcaagtatcgtctacagcacctctacttcacagttacattcagctgctgtgattcctggccgaccctattattcatacttcagggtttgtgtgtttatatagaaaaggaaatgtggctctcaacccgagatcgcgctgctgcacttcaacctgggtgacagagtgagactcagtctcaaaaaaaaaaaaaattgctttataatttaaaagattctttgctttgctttctcttttaacttactgctgcctgggaggaggtgagcatttacgtctccattctacagatgaggaagatgaggctttaaaaggttagtagctgtcccagggactcaaagctagtaagtgacagcattacaagtggcacctaagccttctggtttcaaatccccttactgtgccatatggtacagtttcccactgcgttgtacatgttgtggaataagaataaggctcacagctgttactagttaataacgtattcaccattggtagaaaactcagaacttgtggttaaagtggattttgttctcttgcccaagactgttaaccatcatcaacacaacagctaaaatcagcctgttacgctcacctgctgtttaatatctagattcataaagatgagagaatggaaaaactgcaaaagtggtgaaaacaaattctgataataggttaatcagaattatctaggaaacagttattagatgaaaggggctaggtaggtcacaaaggtaagttctcttccatcaaggaactcttgaagtggatgccattagacctttacaaacaacggatataccgtgtgctgtattagaggtatggaaccgaaagtaaaggacagatgcgcccttgtcttgtcaacagtaagagcctcttgtccatcaagagaattc

SEQ ID NO: 205011 - DNA, 1000 bp, Homo Sapiens
cggtcttgatctgtttaccttgtgatctgcccacctcggcctcccaaagtgctgggattacaggcgtgagccatcacacctggcccagaaacttctttatgatatgctaagcatgaatctggtcacaagctagctcagtttgttttgctgttgtcattaacaaaaagtgataaaggatttatgattttaactatgataaatatatattaaaatgcttgccagattcttgtatcacggttatcatatacaagagacttcatagtttcatcacagcccttcacaagtattctggattcattttccatatggatgaacttacacacctacaactatttaattctcatcttgattgtatcctaagaattttctgatggattgagattcaggaaataaacataaaatgtgggccttaattgtagcatgtagcaaatcttagttatgtgtctataaacttaagagagtacatcaagaggagaatgacctcttgatgtactctcttaattgaggaaggctcctcctcttcatgaaaggatgtggagcttgtcacccactgtctacttaagtgcaaggatcattttaaacctgccagatccaggttagtatacttcttctctcgtcttggttttagtactaagaaaaacaactcataataatttaagacatgttctatacaggttgattgcagtggaggtgtagacaaccagttaggtatattctttaatcgctctgttgcagaagcttgtattacttaaaatggtattccaggcactagtcattctaagtcttgcttcattacatttgagtgtcttattttccttgtcttttattgccttctactttggtggttgtttatagccctgctgggctcacttgtttctttatttaagagttcactgggtttgtatctgatcttatctttagtgtcaccaccttcccacctcttgctggttgatttaatattcacagtgacattacctccaactctcttgtgagtgaattc

SEQ ID NO: 205012 - DNA, 1000 bp, Homo Sapiens
ccccttttctttgaggaccatttcaatgagaaccaactaagcttgacccaacctaccagccccagccctagaggtgatcatgatgcccagctctggtgaaagactctacccttggatcatagcaactgtttcagtactttttttttggaatcatcaggaaggactcttgctttttctagcactgtggtctgtgaggacaaagtaagtgtgttatttgtagcactatctcttgctacagagagggaagagagtcatcttcagaaggaaaaaatgaggctaaaacaaaaggaaaagtgtcaagagaaagaaggagaacatttcttgatgattttatataagcccctgggtccagctatgcatgacagcaacttgggttaaagctctgtcgcttatgggaccattgacttaaatataaaataaagtattaaaagctatgaacttttagatgaaaatacagaaaaaaaatctttgtaatattcagttaatcaaaaatgtcttagatgaagccccaaaaaccaaatgcacaagaacaattaataaattggaccccatcaaaattaagagcatctgctatttgaaagatagtgttatgagaacaaaaaagaaaactcaaggggaaaatactggcaagtctcatatctaataagggatttgaatccagagtatataaagaaactattaaaatttaataatgagaaaataagcaaagaaaaaaacaaaaaagaaagaagcaaaataaacgtgaacatacactttaccaaatatatacagatggcatgtacgtacatagatactaaatattattaggcattagggaaccacaataaaatactattgtacaaacaggaaaatgtctaaaattttaaaagaaggcccatacaaaatgttggcaagagtgtggaattcttatatactgctgataaaaatataaaatggtacaaccattttggcaaacattttgacagtctcttaaaactaaacctaaacctattaattatta

SEQ ID NO: 205013 - DNA, 1000 bp, Homo Sapiens
tgaatatagagtaaatgagggagggaaaggaggccccagtgatctcaggttgaagcttcagtgcttttacctttgtcctttctgagggctttctgcctctgctggcctcccgcttgattttaaattcagtcatcctgaaacatggaaatttgtgtcatggtaactcttagcatgaactccatgagggtggggaccatgcatgttttactgttgcatcccaagtgcctagaaggattcttagtgtatagtaggtgctcaataaatacatacttcacgacaaagctggggcagccttgatttgcttgtttgctgcactaaaatattcatctcaaaaaggctactaagctgatttatccttttggtggccttgtcttctacccttgcataacccttttgtatctaaaactgggaagggttatcacagcccccagggcagggagctcatgagagagcccatagacctgcacagcaggaaactgaaaatagctaccaaagcaatcaaaattaaacctctggatccgcctctctgggcctggccctagagggcatcttttacactaatgatggaaaattaaattaggccacctttagaaaacttcacaaaattaaatactgtttgccagggagggaattaccctatggagaaagtaacaggggagcagggaaacaggctggtcacagttctacaacaaaatgattggctggtgtcaaatttccttactctgtgcttcattttattcttcttaaatgtgtaaagggaatcaatttagaatttgtgcaaaacattgaagaatctcagaagggaaagtgtgtgcaaaataaaacaaacacttctttccttgtcttctctccttgttaccaaattggcactggcctgggagtccatcagatggtcttgaccttttctgggatacaaatacctttgagaatctgctgaaaactgtattttctccataggaaaaaaatcattcttgcaaagttttgaattttaggagaattc

SEQ ID NO: 205014 - DNA, 1000 bp, Homo Sapiens
caagagactatataatattttagcaaattcctaacaatgttcaaggctaactccaaaattagatgcttattctcacaaaaaagggccagaaattttgaaaaagttaggtgcctaatcagtgattgattgattgattttctaaggtctgaaaatgtataaagagtttaggcaaataagaaattaacagattgttgatttaaaaaaattatgtcttataggtaagtatttgtgccttgcaaaatgttaataccttagaattatatttttaaaaaattctgtaagacttccatgatgatgaagtcatcagaatccctttgagatggtaatgttacagtagactgctttgagaaatcacggtttaaatcttcagcctactttttcccccccttttcttagccccaaactgtggggacctctctctctccctctgaagacagtagaaagccaaatctgtaaaaaaaattcctattacctcactaatgctcttgaccccattccttggataccttggttggtcccttccaagggagattggggtagctgctttaccatcgtggtacctgccatctgagtttccaccttgcccgagatccctgaaggccaaaaatttctgcctactgggaagaggcagaaatacctctatgtgtgcgctgtttctttaaaagaaagtgtagcggaagtgatgctgcggggaacatctgcactcagggctgagggagagcgcgagatgcactgcagctggtgtaaggccctggcaggctgaggcgctgctgtctataggggtttacttctgtctgcattgaaacatggcttgggaaggggttggtggcctgctgccagcctcggttagcctgcccttctctttcctctttcctcctcgccgccccccacccaccctcactcccctccctcatgctttaaagtcgcatttccaggccagacgtagaattaatctctgggcacttcacattgctggcagctgaaagcaggatgtgggatc

SEQ ID NO: 205015 - DNA, 1000 bp, Homo Sapiens
aattggtaatctctcaattccgtaaggtcagggaagacacagagagggtaccaagatgagcaatgatgtccttcaagataagtaatcatatcccagctgaagcatcactgcctgagccaggcttccctagccccccagttgaagccaggtcccctgttaaatgttttcatgtacttgccacacttccccttcatagcagtgatcacatgtgctaaacatgtcgttgcttaatctgtcttcccagtagactctgtgctccacaaggatagagactatgtctatcacattcccaaaatctggcagaagactaggtgctcagtcggtacttgctgattgaatgagcataccccattcagtgactacagttttaaagagaactaacattactaagtatgcactaggcactgtgcgaagtaccttacatgcattgcctcatttaaacctcataacacacctaggagacaggtattaaccacacaaagacactgagattcggaaattaactaatttgctcaaggcgacccacaaggctgcagatttgcacagctctaggggtactgttctcatagaattcagtttgttgtgttccagggggtgctgctgtgtaagattggcatcccagagctgtgcaatgtggtggcccaggtcacactgttagtaagttagtaagtgatacagctgcaggtctgctgatttcaaagccgtgtcctcagcccccatgcaatgctggctctccacctagtgactctgaatctagtatctaccatggacctggtacacagcaggtgctccatcaatgcttattgagtgaatgaaacagaaggtagaaataggaccatttggataaatagttttgtgcactatgagaagccaaaagatgagacttaacaactgtttgtggaattcataacttgtttttcttttttagaacatgcttaatagacgatcttttagtgatgtcttaccagagtcacccaagtcagcgcggaagaaagaggag

SEQ ID NO: 205016 - DNA, 1000 bp, Homo Sapiens
cactaattgttgaagttacctcctgcatgagaatatctaaacttccatctcaccagctttttgtctcagcgtctagtttgtttgagccataccttttttctataactaactttaccatttcaaaggggtttaacttttaatggcatggtgagagcatgaagaacctcagccctccaagagggtgaatgtgcaagatttggagagtataggaaataactcactctaaaattgaaaccaggagagtggaagaaaattgaagtaatgaccaggcgcggtggctcacacctgtaatcccagcactttgggaggccctggcgggcggatcacctgaggtcaggagatcgagaccagcctggccaacatggtgaaaccctgtctctactaaaaaatacaaaaaaaaaaaaattagccaggtgtggtgacgagcacctgtagtcccagctacttgggaggctgaggcgaagaattgcttgaacccaggaggtggaggttgcagtgagccaagatcatgccactgcactccagcctgggcaacagagcaagactctgtctcgaaaaaaaaaaagaagaaaaagaaaagaaaatagaagtaattaaccatctatggaaataaccccagaaaatgagaaagaaaaaaaatggaagtaattaaccatctatggaaataaccccagaaaataagtcactataagagaagattcataagtgtgttgctacaaaaatggtggggagtcttccaaagcttgggcagacccagatttgctccctagaagcatctgagagagggatcaatttatagcttaaccaatgtatcatctaatgcattttaactccgagttaagataatggtgaatgagaaatgccttgatgttgataaatattggagaaaatgccaaagaagaattcatggtctgcctattattcttaatgctagacaagaagaggctgccatgattctaggggtctcttttttccctttacttaaagccttatacaagac

SEQ ID NO: 205017 - DNA, 1000 bp, Homo Sapiens
ccgaaagtttgatgactcaataagctatatttgttatgccagaacgaacagatggtataatgcttcaaaaacatgatggttcacttaggcagcattccctgatggcataattcatatttcaataatttagcaagttaattgaggaataactcagaattaactatttagaaaataaaattagcatccaaattgacacagcaaattaaatcctaaaagaaatgaaatgcagtggctgagaggatcataaaaaatgctaacaaatgggattatgtagcagctttgcagtttcctgttatttggcaaggaaaacctagagggccatttttatgtctgggtctaatagtagatatataaaattacatggatcaagaagtaggaaatagcataaatgtttgattcaactcattgtaaataattctcttcattttctaaagaatagtaaaatttttatgtaattttaaacaagtatagcctggtatcattgggtaatgtgtcacaaataaaaattaatattattctcaacaacttttagtctaagttcatgtgttttctagaattgacataacacgacttgaactcctgatttaatgcatcttatggtcttgcttatcattgttcacaagttaatttatttgaaaacgtgctaaataaaaattctgaaaaggcagaagatgtgatttgtagagtctgagaatagtatgacatgcttacaagccaacaagatattcttctgagctggtacatatgttttattaggttactggagtaaaatacattttttctttgtaattttatgcatttagtgagattatataattcattcatttctatttttttcctagtattttaagtatttcactttttatgtatagtttcatattgacataagaagtaatagtggaattccatttcgttttcctacattattgttcagctgcctcatcaccatttactgagcaattcatacgttcaaataaccatgtaatgcttcctttattat

SEQ ID NO: 205018 - DNA, 1000 bp, Homo Sapiens
aggattacaggcacctgccaccacacccagctaatttttatatttttactagagacggggtttcaccatgttgatcaggctggtctccaactcccaaactaaggtgatctcccgccttggcctcccaaagtgctgggactacaggtgtgagccaccgcgcccggtggattagagtattttaaatagcacatcacagtggacttttaagttcacttagcaaatagttgttgaatagaaaaagtaaactattggtcaactttttgtgactttgtgggattattggagttgaccttagtctattactataccaccgtgactaggtattagaatcttgtttttctaattagattttctctttttaaaaaaactatttttcactcttctgttatagataaaagccaaactatagccagctttcaatagtatatgaatatcacagaacaagaaatagcttcccacacaattatggtgtctttttcatatcttaacaattacacatttctgaaatatgggcttatgtagcttatatttaattgcctttttatttctttagtgttataattaacttagttgccttctttgtgactccgttaaatctcatgtcagtcaaatccctgtagtgggatctttgttcagcagagcgagtggattttttgcctcagcttacacgagtgggggtgaatattggccttgttcctttagcccagctcaaggacttattcatgcctgtagtctaccaccatgaattaggtctggtattgagtcttggaagcatggggtttgggttaataaggcatattccccagttcttggcttaaaatttcacttgggaatcttttttggtgagtatatcaaataaaatggcaaagatgtgcagattaggatgaatttatcgtatgttttgataatggaaattgtttgtaccctctaacagtgatttgcacttatttgaaattactctccaagggtgtttgacattctagtgttcagttaagaattc

SEQ ID NO: 205019 - DNA, 1000 bp, Homo Sapiens
aagtatgtcctgtgaaatatgctccattgcgtggggcatacttatactaaaaaaaaaattattctttgttttttgacattttgatttagctgggtgatcttgctaaatctggtaacaagaacaggcacacacttacacagacacacaagaagatcagcaaaagaatcttttaacccactaggcctaccataaaacaaagtttcagaaagcccctgccataaacttctaattcaatctttggagctaggagttctacacatcattgatacagcatgatcaccaaactctgtccagtacaaataatatgtgaccccaaattaatcactgattttttacttcctttttcttcttatcctcaccttcctctcccatcagcagattcctaaacactcatccctcttttgctcagctatgccctactagctacctatgcctttatcatcccattggattctcatcctaatccacaatattcccaaagtactccttcctcctccccacctgagccaagaccacctttggtgttacctaaacttatcatccagtacaactacctgtcttcatgctcaccaatgtcatcttcagatcccagcttcctctgtgactcagcccctgacttaattttgttctttctatttgaaacccctaccatcaattaagatttgctttaacctccatattaatggttcttaaaaaactcttgcctttggctgggcatagttgcttatgcctgtaatccaagcattttgggagtctgaggcaagaggatcacttgagttcaagagtttgagaccagctgggacaacatagcaagaccctgtctctacaaaaaatataaaattagccaggcatgatggtgcactcctgtagtccctgctacttgggaggctgaggtgggaggatcatttgagcctgggaggttgaggctgcagtgagctatgatcacaccactgcactcaaactgggtgacacagagtgaaactctgtctcaaaaaaaaat

SEQ ID NO: 205020 - DNA, 1000 bp, Homo Sapiens
gtaaggtgtcatccacgtagaggatgtcgtccttcttaaagctcaactcttgctccacatctgccagccggtcgtacagggccctggaccacagcacagaaggaacacgatcaggcggctctggccaccaaggacgaaccaggtgccttctgtggccaggcccctaaggctgccattctgctttgggctgtctccaaacttgatcaggaatcgccgagggtggtgattctcaaagtggggagccctgtgttttacataaaggggcaaagactgcctttgctcccctaacactgagggcgcatccccatcaaagaactcaccaagatctgaggccataacttccctttccaggtggcctttcccagttgcctccctcctcgaagcccaggcccggcccctggttcctacagactggaatctctctaggatggaaatatgtcatcttctaccctagagacagggagttgtaccgcatcagtgttctcatgctttctgtgatcttggatcttaggaaatgtgaagaaagctctgagctcctcctagaaagcctgctgccatccctaaatgcccacagcatttcatacagtagtaagggcactgaagatgcctggaagtccacacacactgcagagggatctgcaaacctggcttgggggacaccagaaaaagaggagcacagcacacaggaaaacggggcttgactgcctccaaattctctaggtcttaagccctaaagagggggcccagctggttctttaagccctaaagggttgttctaagtcacaatcatctcaacataaataagcgtgcagattgagtgtcaaggaatgatgatcatggccccagccttggggggcaagaaacagagagccattcaccaggaaaagagtctccagtgaaagcctctcctctggttccaaatctcccaccgattccccagccactggtacctgatgtagaagctgtcaccaggcaggcccttggccttcgtgaactcctc

SEQ ID NO: 205021 - DNA, 1000 bp, Homo Sapiens
agggggtgagatttttaaaattgcattaatgaatgaaaccaatcaatccattgctccatgctgtgtacaaacactgtaataaatattggttgacttcttataactaaggcaataggagcttctctcaataaactaaattccaaggaaagaatgaaggtaggaaagtagctggtttatttgcacctactatatgacaggccttagtttaggtttgtttgtttgcttgcctggagacagggtctcattctgtcacccagtggtgtggtctgatcatagctccctgaggtctgtaactccttggctcaagtgaccctcgtgcttcaccctccgagagtagcagggactacaggcatgtaccaccatgctcagctaatttttttttttttttgtcagagtcttgctctatcacccaggctggagtgcagtggcacaatctcagctcactgcagctctgcctcccaggtttaagcgattctcctgcctcagcctcccaagtagttgggtgcctgccaccacacctggctaatttttgtatttgtatttgtatttatttatttatttatttattttgagatggagtctcactctgtcacccaggctggagtgcagtggcatgatctcagctcactgatcctccacctcctggattcaagtgattctcctgcctcagcctcccaagtagctgggattacaggtgcctgtcaccacgcccagctaatttttgtattttaagcagagacggggtttcaccatgttgggcagtctgatctcgaacttctgacttcaagcgatccacccaccttggcctcccaaagtgctgggatccagctaatatttaaattattttgtagagactgggtctcaaaatgttgcataggctggtcttgaactccttgcctcaagcaatcctgccaccttggcctccgaaagtgctgaaattgcatgtgtgagccaccatgcccagccagtattttcacataaacattatttcagtgaattc

SEQ ID NO: 205022 - DNA, 1000 bp, Homo Sapiens
ctactcccctcctctaggagctgccaaatcacaatgctctgctcccctattctcacctgctggcatcagcaggaacccagctccccgtcaagaccccctcaggttcctcccctccacacagatctctacttcctcaggccttcctggagtcccaagaagtagctgacttttacccaattcccaatctgatgtcagtttttaacacttcccagtactaagcccttcccaagatagaaaacctacctcttcaaatcataacatttgcagttacagtatcttagagatgtcaggagttagaagccatggacaccctctagttcagtggctgtcaaccttaacacacttgtctttaacctaatacctattttataatcttcacctttatgattctgaagtaaagttcaagtaatttatctatacataatcctgtgtgtatgcatatgccctttatgataatattaaggagaaataaaggaaaataatttaaaataggtttctcaatatgtgcctggacactaacagacataaaatgaagtggtcaactgtttattatatttacctatagaatgagttcacatttggaaaaaaataagatcagaaaacattctgcatgagaaatacaaaaattaaaaggataaagggacacgtgtgttcatcttcacaaatgaagatgtgaattagggccaggcgcagtggcttatgcctataacctcagtgctttgggaggctaaagtgggaagactgcttgagcctgggggttcaagatcagcctgggcaacaaagcaagacctcatctctataaaaaaaaattaaaaattacccaggtgcagtgatgtgagcctatagttctattaatagctactcgggaggctgaggtgggaggattgcttgagcccaggagctagaggctacagtgagctatgatcgtttacctgcactccagcctgggtaaacagagtaagactctgtctctaaaaataaaaaataaaaaacttgagtt

SEQ ID NO: 205023 - DNA, 1000 bp, Homo Sapiens
tttctacaccaaacggctctggtgagcacgtcatttttccgggcagggaccttcctgagcgcagcctaccccaggggctcaggctgacttagcagtgtgcctctctcctgccacaggcaatccctccccctccccaggctcgcacacagccggtgggagcaagcacacgggagaatcatgctttcccctttcccccgaaaccaggcgtctgagttacaatgcacactacagcgttctgaagagaggcagcagcgatgtattttattgatttaacaaagaaaaaagaaaagcacatttatggagatcttgttaaactttaataatccggccaatttaaaatctccattacgctgatgagcacccgggacctgaacgaagctctcggagagtttaaaagcctccaaaggcgaccaagagccaggtctggccgtttgcccaaatcccaaacgcccgaaggaaactacttagatcaatttcaatcacgtcctagggagcagcttctttgaggaggaaaaaaacaggagggggagggggaaaaggcaggagaggactgtgaacaattaagcaggcgtgtgaaggttgcaacaccctgcatttcatcttccttaaagctttcgaggcttggaaacccacagcctctatttgatctggcaattcactttgtgacgaaaaacaaacagcacagcagggcagggagacaacagtaaaccctcctgcgatcgctggagagacaatgggaggagtgtcagtctctctcccctcgggcgatgctacctataagcacggggacctggtaagtttcttaaatttccaatgcccccaaattccagttctacgacaatgtcggaaaccgaggtccttctttccaaactaagacttgaagcagtttggacgggctcattgtcacaagactgacaagtcactggggtgtacacagttttatttttatttttcttggtcaacaagagaagcagggaagacaaataaggcagatctaggg

SEQ ID NO: 205024 - DNA, 1000 bp, Homo Sapiens
ctctttgtgtaggaatgcagggtaagcttactgaatatattcttaaattgaacacttattaatcttctagatatcaccttttgtcagaactcaagagttatgaagggcccttgccatatcgatgctttctgactgagcttctctctactgaatacaagagaccctaatagttaggcaggaatataattgcccctaattcagcctgaagaagttacagaagatggaactttgtccttctacaacccttaggattaagggttcccttgtaaaagggaggggggaattgtcagaagcgtttaaaccagagcgattccatcttgtatagaggctgggtaaaacagggctgagacctactgggctgcattcccaggaggttaggcattctaagtcacaggatgagataggaggtaggcacaagatacaggtaataaagacgttgctgataaaacagtttgcagtaaagaagccagcccaactcaccaaaaccaagatggcaatgaaagtgacctctggtcatcctcagtgttcattgtacactaactataatgcattagcatgctaagagacactcctaccagcgccatgagagtttacaaatgccatggcaacatcaggaacttactctgtatgctctaaaaaagggaggaaacttcagttctgggaagtgcccacccgtttcctggaaaactcatgaataattcaccccttgtttagcatataatcaagaaattactgtgaatatcctcagtctagcagcccacgttgtgcttatcctatggagtaaccattctttattcctttactttcttaataaacttgtcttcacttaaaaaaaattagaatttattagcaggtttttcaggtttaatattacagaccagtggaagaagaaagaaagttgtcgataattggatatactttttgaaaaagtatgcactatgtatgcctacttttgaaagtgcgtgcactgcatatgtaagtaaaagttgatgttgaattc

SEQ ID NO: 205025 - DNA, 1000 bp, Homo Sapiens
tagatcatatcattagactaagtaaaaacttacagaacactaataaaaaactggtgtgttcgtgaagatcactaattgtgttagtccattcttgcactgctataaagaatacctgaaagaaagtataatttataaagaaaagaggtttaattggctcaagggttctgcaggctgtacaggaagcatggctggggaggcctcaagaaaccttcaatcatggcagaggggaagcaggcttatcttacatggccagagcaggaggaagagagagagaggaggtgctacacacttttaaacaaccggatctcatgagaactcactcactctcatgagaatagcaccaaaggggaaatctgtccccacaacccaatcacctcccaccaggccccacctccaacactgggattacaacttgacatgcgatttgggacacagattcaaaccatatcactaactcaacatcaagcagaacaagaattaattacatgggactgaactgatggaggagtgaaatgatttttatgtctatttgtttgaaacattgctgattcttttcatgttttgttttgcggaatcaagaaaactttatttcttttgagctacttgtaagtcacagaaattgggtaaaatatactgttttttttttttttttttgaaacagagttttgctcttgttgcccaggctggagtacaatggtgtgatctcggctcactgcaacctctgcctcctgggttcaagtgattctcctgcctcagcctcccaagtagctggcattacaggtgactgccgccatgcccagctaatttttgtatttttatcagtggggtttcaccatgttggccaggctggtctcgaactcctgacctcaagtgatctgccctccttggcttcccaaagtgctgggattacaggcatgagccactgcacccagcctaaaatatacttttgggagcagattgagacatttacctttctctctacctgatttctccagaattc

SEQ ID NO: 205026 - DNA, 1000 bp, Homo Sapiens
gactctcaaacttgtcagtaaggccccattggtatacttatatgtaatgacataatccaaattattttattaaaatgagaaaaaagaacctagaaaacactaatagttcaatgatcttatttattttctaattaaaagagacagattcttaacgatctcatgagggaggtaaagctcatagaaaataagtgacttatctaagttaacattgtgattgagtataaagctgggatgactaaaggtttcttattcctaacttagaaataagttactcttggtcaaaaactttgttcttagaactgtttaaagaggatttaaaaacaactaaatggcagttttcacaggctttgaaaagtcctatctccttgtgtaataaatggcaaatgactataatcctaggaaatactgattatatatatatatcaatcaaaatcactatgtgtgccaccattatcatgattaagatcccactgtaacaaactccatgataaaaggccattatgcttcataaaacaggagagaaaatctggcaatcaaattctaaacctgaaggatctggagatgatgaattacctttctgttgtagaaaaaaatgctataacttagataaaggaaaaatatgccacaggaactaccagtaactaactctctttccctccaaatttctgacatgtttttatttgatatggtaggtgatttgcaatgctctatttttgaggaaattcatagatggaaactgcttttaaagagaatacatcttcataacagcatttttggtcacaggttggaactgtactttgtaaataagaaaatcatggttggtcgggtgcagtggctcacgattataatcccagcactctgggaggccaaagtgggcggatcacctgaggtcaggagttcgagaccagcctggccaacatggcgaaaccccgtctctactaaaagtacaaaaagtagctgggcgtggtggtgggtgcctgtaatcccagctactcagggg

SEQ ID NO: 205027 - DNA, 1000 bp, Homo Sapiens
ggaaaaacctgaacaactccctccatctatgtttctgagatcactaaaactcctgttgctcagctgagccagtgagccatgagccagccctcataacgctgtgttgacaacagggaaaatggcagaggcgtaaggatacaggtaacaggggcaactgtcagctgcctctcctgccccagtcctcaccatgaacagctcccttttcttggctggccgccgtatggcttgtagcgtttgtgtgccccacacgaagagaggatctcaagccacatgtgactgtgaagactacacccctcacaagaatgcgctgggaatgcgctggagaaataaccatcaaagccagtccacggtggcggggaagccacagatggaagcgctctctggcttaaatccaaggttccaggagggaaacattgacatggattctaaataacgaacacaggctcacgtgaaacaactggaaaaattgggcaccgtttcacaactagggtgagttgggagggagggtgggaaaggcggggacaggcgagctgagccccatccgctggtgcaccggggcggttgggtgtcacctacagacagaggccagtacactaacaactgggatggtgattcactccctggtcttctacagattttaacttgctcctcatattagcttgtcaggcctttattccaccacacactgactctggcaaccacacatcacctcagattgtttgtaaagagccccccttccaccctccccccaccccttccctattgcccctggagagctcaatgaccacacatagtccttctgagacctcagtccatgcctgtgagctactgcccaacagggaccacctgctggcatcctcagtgtacctaatggcaggtccatcagtgtggcttgaggaagatctagcaggagccacttccttcatagtgcatgattctttagagttgaagcacaaaaaagaaagaaaagcaactgcaggtgggtggtctttgttctatt

SEQ ID NO: 205028 - DNA, 1000 bp, Homo Sapiens
gtattccaggctgagaaaatcacagcacaaagaagagcacaaaggaaggaaactgaaggcatgcacgaaggactccagcacccgggcacgaaggcagcatcactgaaaactgaggctgaacgtaggatggggccacatcctgtagtcttaaatgcttccaagtcctcccattttcctaaacatctcataattaatttactcccaaaggcacagcatctttgagcaatgatataagtagacattttccatcaactacacttctacccccactattcaaataggcacaaaataaatcctatcactgttctttttctagcctttttagctttgaaatatatggcccaggaagaaaaagtttacaatcaccttttaactgtctgccaggatataagggtgaaaagtttgccatgagaggcctaaacttcataactgtaataaaatggcccagattgtggatttcttggttttgatattctccatgcaccattccagaaaggtagaacagtttggcaacctaaacattaaaggaaaattaaaaattaaatttcaattaaattctcgtcaatactgcaacaaaataaaagctctaaacaagaagcaatcctaagaagggagacttccagcaaagccactgtcctgaggcttccagagccttgctggattctttcaggacttattagaaccacacagaggcagactgctctgcaaccaagccggggcatccatctaagtatggtgaggagagggaggtgaggcctctgagcacagaaacggttctgtggccgatggaccacagcagtatggaaaggaaggggcagtgcctggtcctgtaactgggagaaacttctgatgtactctattaagtcccgactccaaaacacccagacattgcctggtgcagcaggtacggagacaaatgagatacaccaagaggcccagaataaccactctcttgagggaaaccttccagagactgggaacacatacacaaagggaattc

SEQ ID NO: 205029 - DNA, 1000 bp, Homo Sapiens
ctccaggttcaagtgattctcctgcctcagcctcccgagtagctggaattacaggcacacaccaccacgcctggctaatcttgtatttttagtagagatggggtttcaccatgttggtcaggctggtctcaaactcctgacctcaggtgatctgcctgccttggcctcccaaagtgctgggattacaggcgtgagccaccacacctggccatttcttgactttttaacaatcgtcattctgactaagcatgagatggtatcttattgtggttttgatttgcatttctctaatgatcagtggtgttgagctttttttcatatgttgtctgtgatacggatgctcttctacacagctcctgaacctctttgtatgtttccatttcaatacgtgagcattttcctttgaaggctctcttcagagcttccatctttctcttcatttctgatttgtcttcatttcagaatgattcctaattctctagagctaaaacaccctgctttccaggctccccatcatgtcatgatttcatattacttgaaagtagcatggtgctcagagagctgatcgaatgcgtctgccctgactccctgtgactggtttggggaaggagtgtgtttctgtgggacgaggtatatagagacttgtccataaagagggatcaagtggcccaccgtgtggtggctggcaagaaatgggatgtcttaaaggagtgtaaaggcatgcattagtgagaaggaaggacgagaactcatgagccagtcttgaacgtggcagatggttgaaagctggtgtgcttggctgaaggaaaacatgccatgggatgtatacatatgaaaacatgaaggcagtgggtaccgcatgtgaatgggactgatcctaattcagatatagcctgtgatgatcttggcaggtgggaggtgcctagtcaatcagggtggctgtttttggttggctcctacctgacacctgataaaaattacctttaactctcaaaattaa

SEQ ID NO: 205030 - DNA, 1000 bp, Homo Sapiens
cagtggcacaatcttggctcactgcaacctccacctcctgggttcaagcgattctcctgcctcagcttcccaagtagctgggattacagatgcccgccaccacgcccagctaatttttgtatttttagtagagtcggggtttcaccatgttggccaggatgttctcgatcccctgacctcatgatctgcccacctcagcctcccaaagtgctgggattacaggcgtgaaccaccaggccgggccaagccagattctttaaagtggctctatcttctctgtaatttgctcccttgccactttgatgactccagattctactcctattcccattgtcttttaactcccacttcagggcctttattcttgctgttaccatttcctagaacaatccttccagatacctacctcaaatgctgcatcatctgtccatctttgttcagataccaccttttctttgaggccttctcttaaacactgtcgtacatacagttttgcacatacattttagttgtaggataaattgctaaaaattaagttatttgagcaaattatctgcatgcttaaaacgtgaatgactactgccaaatgacccttctagtacttgctaacgtttgccagtgtgagcatctaccatcactttttttttttttttgagacagagtttcactctcgttggccagactggagtacaatggcatgatcttggctcacagcaacctctgcctcctgagttcaagcgattctcctgcctcagcctccccagtagctggaattacaggcatgcaccacgatgcccggctaattttgtgtatttttagtagagacggggtttctccatgttggtcaggctgatctcgaactcccgacctcaggttgcagtgagcagagatcgcgccactgaattccagcctgggcgatagagcgagtctgtctcagaatgaaatgacgtgacatgacataacatgatgaaatgaataatgaaatgccgggtgtggtggc

SEQ ID NO: 205031 - DNA, 1000 bp, Homo Sapiens
aaggttgcagtgagctgagatggtaccattgtactccagcctgggcaacagtgagactctgtctcaaaaaaaaaaaaaataaaaataaaaaataaaatagtgcctggcacatagtaagtactcaaaaaatgttagctataatgatttatattattaagtagtcctcatgactgtgtgattaccatctttttaagtgttttctagtcaattcctagtaactggagctgtagttcttagtagctggagttatcaacatatctgccttctgtgctagtaaatttttatacatctaaagttttaaaacctctgcataaacattccccctggaaaactagaatcaatggtattttattattcctacattgacattttaatagccaagaatggcttttaaaagaattaggaagacacatggcatctgtcagtcttgatatcatagttcctgttatgtttctgtttccatgtgaaccctgttttttcaaaagtttgtaagtcttttgctccatggtgagattcagcaacaagtttctattccaaagaacaatatttgtcctacttaaacctactctgatttccattttctttgctcaatggtttgtgcttctagaacttgagttctgtttgatgtttttgcaaatacaatttttcatatttggtaattttgaaaaacttaaaagctccaagtctagcacgttgtcctttgatttttaggtagtgagctgcttaatttggttttaatttaagataagggtttagaaaatattaggaattcactagaaatatatctctgttctacaaactaggatcctaggctgtattgggtgtttcttccttatagagaaaagagctgattctactttccttgaaaatttaaagtatagggcagtggttaagaacactaaaatcctggctcttctacttaacatttgtgtgatcttggacttgtgtagcttgcctaagcctcgaattacccatctttcaaacgggaacaatggaattc

SEQ ID NO: 205032 - DNA, 1000 bp, Homo Sapiens
taccaagttgcagggtagaaaattctacaaaactattttgtatttctataggcagttgacccttgggcaacatggatttagactgtgcaggtccatgtatatagcagattttttttcaattaaacttggatctggaacacagtattcacaggaagggaaacctaccatgtgaaaggcagactttttgtatacgcagcttcacagggctgactgtaggacctcagtggacatggattttggttttggggagtaacctggaaccaatcttttgcatataccaagaaacaactgtacttgcaataaaccaatggcaattgaaataaataaaattccatgtacaatagcattaaaaaatgttaagcaatgaatttgacaaaaatacaagaagtccaaacactgaaaactacaaaacattgctgaaagaaatttaaggcctaaataaaatatttcacgtacgtggtttggatgactcaataaagctaagatgtcaattctcccccaaaatgatcaataggattaatgcaattttgattaaaatcccagcaggacttttttttttttatcaaaactgacaaataaacaaacaaagtagatataagggaagttcatatgcaaatgcaggcatgcctgaagtcttaaagaatggagcttcaatgcttgaacctcattttctctgtggaaaatagttgcaaatgtaagagaatatgcacatctgagttacaaaaagttagacattatgtagattatagtaataaatgtggcaatattattgaggaaaacagttttctaatgtaaagccagcatttgggggaagatagaagagagaaaatgcaggaagtatttttagaaagtcaaaatgaagaacaacacagaaaatgtctgtacccaaaggagggtgcatataaataattccatgattacccataatttggggttttggtacaaagtctttcccttctattctctctaatcttcataagaaatcagataaactgaattc

SEQ ID NO: 205033 - DNA, 1000 bp, Homo Sapiens
ctgaatacagcacaccaatgggtcttgactcttgatcgaatttgccagtctgtgtcttttaattggggcatttagcccatttacatttaaggttaatattattatgtatgaatttgatcctgtcattatgatgctagctggttattttgcccattagttgatgcagtttcttcatagtgtcaatggtctttacaatttagtatgtttttgcagtggctggtaccggtttttcctttccatatttagtgctttcttcaggagctcttactagggaggcctggtggtgacaaaatctctcagcatttgcttgtctgtaaaggattttatttctccttcacttatgaagcttagtttggctggatatgaaattctgggttgaaaattctttgaatgttgaatattggccaccactctcttctggcttgtagggtttctgcagaaagatccgctatagtctgatgggcttttttttttttttttttttttttttttcttctgtaagtaacctggtctttctctctggctgcccttaacattttttccttcatttcaaccttggtgaatttgatgattatgtatcttgggattgctcttctcgaggagtatctttgtagtgttctctgtatttcctgaatttgaatgttggcctgtcttgctaggctggggaagttcttctggataatatcctgaaaagtgttttccaacttggttccattctccccatcactttcaggtacaccaatcaaacataggtttgatctcttcacatagtccatatttcttggaggctttgttcattccttttcattcttttttctctaatcttgtcttcaggctttatttcattaagttgatcttgaatctctaatatcctttattcctcttgatcaatttggctattgatatttgtgtatgcttcacacagttcttgttccatgcttttcagctccatcaggttatttatgttcttctctaaactggttattctagttaggaattc

SEQ ID NO: 205034 - DNA, 1000 bp, Homo Sapiens
acattaacttccaagctcccattgtccacctgctcaactgcactgcgtcacatttctagtcctgttgactgtctgcgtcctttgataagccaataacgtgcatgctctgttatttgtttcttttccatgctgctgtagctaagcagaagcagaaatcggtaagtttacattgacataagctgtgtttatcctgccactggcatcattagcattaattcccacagttgtattaaatacaatcatttctgtcccaagcaaagaacctatcaacagctaattgagttcatgcatttcaaaccaactaaattcagggagtgacctgttaaaacaccattacagtacttatcctttttgatggaataatatctaccaccaagggaatttgtttcaacattcagggatgtcaaacactgacagctccacataatgcacctaaattgtgcatgcttattctatctctttcttttatccagaaatttaacttatgatcaaacatattaaagcagttattaaattctgacttatgatatccagatacatagcttgtactaaaaaaaaaagtattcaagttttaatttagtcagtatttaaacttctaatccactaggtgcaaaatctgcagatgaacaagaccagtggaaaactgcaggcttgttttggcggtttactgtgagtttttcctattgtcatatataaatattctcccgatgttcttgccttctccatcagtcagattttaccatctcaccctttggacagtgcagccagtggtcatgcgtagagcctttgccattggccatccaagatgctacacagcgaggctccttgtcccctaaatggaaactatagggtattcctgagctctccttacttcagacaaagccttttcctcacccattttgtagctttaaagcattattttttaaggaccactaacctccccccaaatttccctttttttcccctcttttacccatcagtttccacagctaccatgctg

SEQ ID NO: 205035 - DNA, 1000 bp, Homo Sapiens
aaaaaaaaaaaggaattgacttttttttttttttttgagatggagtttcagtcttatcgtccgggctccagtgcaatggcgagatctcagctcactacaacctccacctcctgggatcaagcgagtctccttcctcagcctcccaagtagctgggattataggcatgcaccaccacacccagataatgtttgtatttatagtagagacagggtttcaccatgttgctcaggctggtctaaaactcctggcctcaggtgatccacccccctgggcctcccaaagtgctgggattacaggcgtgagccaccacgcccggcctcttttcaggaatgaaatgtaggtatgtgaatttacaatcctaaataattttttcaagcttccctgcaatagctcaccatttgtattttatacattcacttatgttctgatgagtagcctagatcactacaaagaacagaatgaaaggatgattaaagccacataaaagtaagtattgaaaataatttaaagttaaatcatccatatattttagagaactaaaatggccagtactggcaagaatgaaagcatcaaaatctctcatatactgctgaaacaaactggtaaaactttgtagagggtaatctggtaatatgtctccaactaaaataagcacagacctttgaactggttattctgtgtcatatcagtttgttctgcagacatgcttatgcaagtccacaaatattgactccaacacttccggtaataatgaaaaacaggaaaaaactaaatgtctatcaatggaggatagaaaatttaaactgagctaaatgataaaacatactgttaatgtagccattagaaagaatgaaatagtgttatataattgtgagacgatatccattatatatttttaagtgaacacaaaacaaattgcagaatattatcatcttttctattttctaaaaatgagtacaaatgactgtacatgtgcattcatgtatgcagatgtaagca

SEQ ID NO: 205036 - DNA, 1000 bp, Homo Sapiens
gttagccacctccctctagcacattcattttaagcactgtaaatggaggttttaatgaagcaaatgaaaagagggttaagttggggcatgggagacagaaaatgaatgggttgttgatgaggtgactaaggatgctagtgggaagactggttaaagaaatgggtttgcaaacaatttcagaatattttggggttctcagaaatagtcataagcagcccacatttgtacttcctacgtgtatgaatgctaccagagttatgctcacccgctctaatgctgttcctctctccaaggctgagataccagaaaaaagcctacctcacgggggccatgctgccaaagcagttttaaatatgtacagtactcaagtgcttactcctcctggtcccttctgcctgctcttcctgactcacccccaccacccgctcatccctatatgggctgtagtgatgttatcataggttctgtgtccacccaaaacctggtcacaaagctttcaaagggaatatgtccaagggtgtggctgcactatgacaggtagccttggtggtcagctgtgggcttggccagcgatttttcacattctgtagccactgctaagcccatccctaccccaattttccactcatgctttccaattgactgcaaagctctccagctggtgaccataggagctaccaatgccagggagacagcccattgcttgtcccattgtaggggagaatccgactgggaggtgggtaggcaggaaaagtggagaagagcttttctcttttttgtagaacactcagcctgctttaaagctggagaacctggcccctccttaatattcttgcagctttcctgactgttttgtacaatttttgcacatgtactccactgtgttaggctcaggaagaattctaacttctattctacccagcaaaagaggtgctgaagacccatcctcttttggggtaacctgacataccttgtttggaatctagcttttagactgatc

SEQ ID NO: 205037 - DNA, 1000 bp, Homo Sapiens
ttcttttttttttaattttttttttttttttttttttgctgttgcccaggctggccttgagcgcctggcctcaattgatcctcctgtttggcctcccaaagtgctgagattacaggcatatgccactgcacccagccagaaaattattttctagtggcacattgacatgttttacttcctagcctaacccttaaatgccaaagaggaatgaaagggaccatttagaatgttgtcactcttttatcccaaatgaataaataatccttctgaaaaattagaatcttaaatcttttgagatagtcaaggtagtgtgtcaacaccttctacctccaatatgaggttgttttgtatacattttaatttttttttaaggagcaaccctattaactgaagctttgaatgcattttttaaaatagcagtgcatttctgttcatattcagatttagtatttgtaaatgtggcaagtttcttttttattattatttcatgtatactgggtttttaagaaaagtacatgatctagtggcaaactatcaaaaacacccatttcacatgtccatcttggctctttgagttttaagaatttactggcctcctatattttggcttggcttatatgtattgaaagagtatttacgggccgggcatggtggctcacacctataatcccagcactttgggaggctgaggtgggcgaatcacttgaggtcaggagttcaagaccagcctggccaacatggtgagacccccgtctctactaaaaatataaaaactagccaggcgtggtagcacgcacctgtagtcccagctacttaggaggctgaggcaggagaattgcttaaactgcggaggcagaggttgcagtgagccaaggttgtgccagtgcactccagcctgggcaaccaagtgagactctgtctcaaaaaaaaaaaaaaaaaaaaggagtctttacataattggagtcaatttcctttataactttgctcgctaatcactaat

SEQ ID NO: 205038 - DNA, 1000 bp, Homo Sapiens
agcaaccaaagaagaaaagaaataaaatatatctgaattataaaggaagaagtaaaaccatccctgtttgtgaatgacgtaatcctatatacagaaaaccccatagatcctgccaaaagatcattagaaataataaacaaatttaagaaagttacaggatacaaaatcaacacacaaaaatcagtagtatttctttacatcaataatgacctatgcaaaaaggaagctaaaaaaactactgcatttatgatagcatcaaaaattaaatatctaaaaataaatttaaccgaggatgtgaaacacctaaacactgaacattatactttcataaaggaaatgaaaaaaggcacaaataaatgaaaagatatcccttgtttatggattgggaaaattaatattgttaaaatgttcatactacctaaagtgatctacaaattctatgcaatccttatcaaattttaatagtattttatacagaaattataaaaacaatcttaaaatgcatatagaatcacaaaaggcccaaaacaaacaaaacaatcttgagaaagaaaaacaaaataaaaagtgggggcatcccacttcatgatatcagattatattacaaagctattagaataaaaatagcattctactagtattaaaacagacagatagtccaataggacagactagagagccaagaataaaacccaagaatacacagtcaacaagggcacagagaatactggtatgttttggatatggttgtccacaccaaaattcatgttggtatttgatccccaatgtgtggtggggaaggtggggcctagtgagaggtgtttggatcaggaggagagtcctcatgaatagattaatgccctcccaaaggagtgaatgagctcttgctctggagagatggaattctttcttgcaggaatggattagttcctggaagagtgggttgttataaagctaggaggtcccttaggttatgcttctttgcatgtgtctacttccc

SEQ ID NO: 205039 - DNA, 1000 bp, Homo Sapiens
taataaagaatgtgatattttattcagttaatatgttaagtgtctaatataaagtaagaagaacataataagttaaatcctcaaataattgtggaacttcattattgatgaaccttgctgatggctacttacgtttttaaaactcctgataattaaaataaaatgatattaggtcaatggacagatagaaaaaagtagagattttataaatcaaagtagtcatgattttataaatcaaagtagtcatctaatcatgtattttgccattacttttaatggcaaaaactgcaattacttttgcaccaacctaataatttcaaattaattgtttctactatttggcaagtgccttaccctctttattttaaatacagaaaatttaaccacagattgttttataagtcacatatgacagtacctggaagtaggagaagttaaatgatctaatgacttatagcagggctggttctcaaatggctgcattagaatcacctggaagaattattaacacagattgctggcccccacccagagattctggcttaatatgctgcagtatggcctgaaattttatattctgaagaagttcccatgttaaatgaagaagttgatcttgcctggtctgaggaccatatttgagaactactaataggagagattccttctgactattgatatgagtgttaagttcagataaaatattgcattatttcttcatagtattaggatctaacatatcccttgtcttgaatttttcaggctttttaaactagctttcaaactaagtggatccaacattttttcctccaatatttttatatgcttttctgtagagctattggattagcagtaacttctctccctctaatttggttaattttcaggaaagcattaatctttgctccttctattctcaactagtgtttataaataaaactggtatagatgaaatatttggctttagttggcatttcacagttctaataaaatgcaggaattc

SEQ ID NO: 205040 - DNA, 1000 bp, Homo Sapiens
gagttgactagttgaacatgtgcatgttctaccagtttaaaataaacagataaaatttaattttaaaaatagtctggacacggtggcttacgcctgtaatcccagcactttgggaggccaaggtgagaagatggcttgaggccaggagtttgaaaccagtctggacaacatagtgagactgcatctctacaaaaattttttttattagcgaattgtggtggcatgcacctgtagtcccagctgcatgggaggctaaggtgggaggattgcttgagcctaggagttcaaggctgcagtgagctatgattgagcctctgctctccagcctgggtgacagtacaagaccgtttctcaaaaaaataaaaataaataaaatggtcatgatatgccattttctactcattacctaaatacattagcaacaattttataatacattaacatcctattataattaggggtggaaaaactcatatattgctggaaagaatgtaaattgttataaccattttggattttaatctctctggtaaagttaaacattaggatacctgtgatccagcattcactgtcttgggaatctagcctacaaaaataagaattcagccgggtgcagtggctcacgcctgtaatcccaacactttgggaggccgaggcaggtggatcacctgaggtcaggagttcgagaccagcctggctaacatggtgaaaccccgtctctactaaaaatacaaaaattagccaggtgtggtggcatggcctgtaaccccagctactagggaggctgaggcaggagaattgcttgtacccgggaggtggaggttgcagtgagccaagatcgcaccactgcagcctgggcgaaagagtgagactccatctcaaaaaaaaaaaaaaaaatgagaattctagtatataggtcatacataaaaggatatttattatatcactgttttgttgccaaaaggagggataactctaatatctatgaataagaaaatgg

SEQ ID NO: 205041 - DNA, 1000 bp, Homo Sapiens
atgattggttttgaaatgtgaagacatgaaatttgggaggggccaggggtggaatgatatggtttggctctgtgtcaccacccaaatctcatcttgtagctcccataattcccacatgttgtggaagggacctggtgggagataatttaatcatggggataggtctttctcatgctgttctcatgatagtgaataagtctcacaagatctgatggtttcaaaaatgggagcacatgctctctttttgcctactgccatccatgtaagacaagacttgcttctccttaccttctgatatgattgtgaggcctccccagccacgtggaactgtaagtccattaaacctccttttcttcccagtctcgggtatgccttcatcagcagtgtgaaaatggactaatacaagcaacatcttcgaaaaaacacataaccagggaaaggaattacattgaaatggtaacagtcatctaggttactatacactggtggggttatttttaaagttatcctatagcttgataatcacacctgttacttagtttttgtgtgtttagaattgatgtgccaactaagtaccttaattaagcattgcttgatcccacagtcctcatgggttcttaccctagttatcagagagtttaaagtcaacatttaagcctatgatttattaagcatctactacaggcacaaaagggttctgtgtactctgaaacagattattgagatgaagtccctcttatgtataacagtttaatggcaaagcaaagctcagtgggtcccaaataaacatgccagacagatagcacactctctgaaagctcaggagatagagatatctttgtgggctgctttggtggaggacaggaggaattattttttgtgtctatcagagtaattgtttttcaagaaacaaaccccactttaaaagcccaatgaaaccaaaagatcctcccagaaaacatttaaactcataaaattttacatttaatttcaggaattc

SEQ ID NO: 205042 - DNA, 1000 bp, Homo Sapiens
cccagctactcgggaggctaaggcaggagaatcgcttgtacctgggaggcaaaggttgcagtgagccgagatggtgccactgcacaccagcctaggcaacaggagactctgtcaaaaaaaaaaaaaaaaattagaatttgggtagctttggaggagatagtttgggtgtggaacggagtgagggggacctctagtcattgtcatggtgatactaaccatcaaatactgagcctacactccaaacacatcatttcattaatcctcacaataaatcctaacgtcagtggtatcaccccaattgtcaaaaggaggaaaccaaacctcagaaaacatttttgagtttcaaggtcacagagctagtaagtggttgagctgggttcaaacccaaactcatttgatttcaaagcatgtgctccaattttaacttttattatcttattctgaataatctgggagctgagaatattctggaaataaaatccaggttagagacctgccaagagcctagacagtgagttaagctgggctaaggcactgagtaaactcagaaatgtctgtttgtcatctccctgtgcttactgctcctgttgttaaagatgtcttagcatcttaaacaactgagcttgtgctgaaccagtgaactacattgggtgtgggagctggtccttgggggaaaaaaatctctccctgcacccatatgtttagaagcagaaagttacccgtgattttaagaaagctgccttttaggagactgccctgggcctggcttatcacatgaatacagaatactggtttgcatttcaccagcctacatcagatgtttgttttagcataccatacattcttaaagcatgcgggacaaggagatgcactccaggaagggccctttcaaagtttcgactggctgtaacctcttttgacctttgctctagtgcacaggctcatcctagtcaaagacttgtcttcagcattacaaaatttagaaaccaactctgaattc

SEQ ID NO: 205043 - DNA, 1000 bp, Homo Sapiens
tcaagttggaagaactttttacaattcttttaatgtaatttttaacatagccccttttctgattataaaagtaaggcacactcattgaaaagttgggaggaaagtataaaggagatattttaatgtcatcttaaaataccatttgtaaactggggtatatcatggctcagcagtccttattctcctctctcatacacacatacacatatagatattcacaaaataaaatataaactcctcataggaaatcttgtaattcttcaaccaaaggctagtctaagcaacaagtcaacccaatgcatttattcggtgggctgaaagtttgtacagtattactcaaaattgactttaacaggcagggcacggtggctcacacctgtaaacccagcaatttgggaggccgaggtgggtggatcgcttgaagtcaggagtttgagaccagcctggccaacatggtgaaactccatctctactcaaaatataaaaattagctgagcatggtagcacatgcctctagtaccagctactcaggaggctgaggcaggagaatcgctttaagctgggaggcagaggttgcagtgagccgagatcatgccactgtactgcagtctgggcgacagagcaagattccatctcataaaaactgtgaactaggcaaagtttgtttccaggaaataatcacatccccatcttaataatcccatccctatctaatattaggcacaattcttagctggccccatgatctccaatccttggtgttacatcctgtataatattctttccttgagtgtgggtgggacctgtgacttgcttctagttgagattatctacattacataaggctccatcttggagtaagagatttctctgctggccctgaagtagcagctatgttgtgaacagccaatggagaaagccatatggcagagacctgcaacagaaggtggacctgaaggtggcctctggtcaccagcaacagccccaaggaaatgaattc

SEQ ID NO: 205044 - DNA, 1000 bp, Homo Sapiens
tctcataaataaatctgacacttggcattactagattccctgtcccataggggccaaactcagctgacactttcattaatcagcattacccactctgtcccaaagtggaagtcctttgccagtgtgaatgcaaagtgtttaggatgcataaggtacaaagcaaggattaaagatgttttcttttttttaaaatattgagacagggtgttgctatgttgcccaggctgatctggaattcctagcctcaagtgatcctcctgtcttggcctcccaaagtgctgggattacaggcatgagctaccacacctggcctctattttttttaaatagctcttgatgtcttttttaagtttatttttgccagaaagaatttttaaaaaacatgtcaggaaatatatttaatttattaatattgatattactggtattgataaaatggcattatttatagaagctttatttggagttgcattagaggtattcaaaatgtttgacgctttcttctttgatgatgtcctagacctggtataacaaataggttctcttcatttttcacttcaaattggttggcagtgattgtgttgaaatagatggtgagaccagagatagatggtgaaaccacatctggtttcagcagaaaagagagagatgatctagcagagctctctcagcccatgccttcagaacggggtgggttctggttgtttgcatcatatgcaaccacagagttccattcctaccctcacagagtaccatcatcttcagtatccttggcttccctttatacctcttcccaagtctatcctcagatgcccttcctttggaaacccagataccgttctttcacaagagggcacttggcaatggtataactcaattcacatgaataaggcctgaccaatcttggtatcttagctactagtgactgaatttcataaccctaagtcataagtggatttctctgacccattagaagacaaatcctaatgactaagaattc

SEQ ID NO: 205045 - DNA, 1000 bp, Homo Sapiens
tagcttatccttccaaattaaatccattactaaaaggaagaaatttgaagcaggtttgtagatgagctgctgtgtggaaatgaagcccatttttagaatcttgcatgatataatttttttccttgacttgctttagaaggccccaaatgaaattacttaaagaattccctcaatagtgacaaatgtcctttaggagcagaatgttgatatattgggtaaaaaactccatactaaagtacaaaaatggaaatttaaatcatgcctctggccagcagctgtttagatttcagtagatcactagttttatagactttgggtttcattctgtgaatggacaatttagagattctcccaggtcagaataagctccatgattttgtaattttaacgtgcatgtttttgactccttattccattggttattataaagtaatttgtgtatttctgtagcatcctaatctgttataaaatggtctttaaatttagaaataagctagtttgggggcttttactttatgatgtaatatcaattaaattagactatggtattctaattgtatgttttaaatgcttattgcatatatacacacacacatacacatatgcaaacacagacaatattatttttatcctggcagaaacactattcaattttaaggaagttccccacccccctagaactataagtatgttgtttgatttttttatgtgtcaaatctctttgacagagggatcatttgcaaactgtcttactttccctcagatttcctaagtgatgctagcttcttttcccaggcagtcttaatggctacatagataataaagtttttgtgatgagcccagaatcttgtatagttactgtgacaactaagttttttctcaagggtagtttcagcctccacccatgtaaatggtcattcattttattaaatactttacattgaagattttttttgaaattttgaaatttttaattttttgtttaaccagttggaaagaa

SEQ ID NO: 205046 - DNA, 1000 bp, Homo Sapiens
gttttaggcagtgccctctagatgtgtccatgatggggaaacatggctcagctgccagtataatgctttaaaagagtggccacttttgaaggccttttacatctaggatcctctatgacttaaaatatatgggccacattggaattccttgttccccaggaccttgcagtggatgccttctttcactgagcattcacagggtgcctattaggtgccaggccctgctctgggctaggggctccattgtgagcaatcctcagttcattgccacatggagcccacctctgcaggcatcaagagggtggggccgtcaaccacatctaccagtgctaagcatcaaggacaatgaaggctgagaatagcctgctggatttggctatatggtaggtaaggacttgtttgattctggggaaagcaatttcagcaatggggaggagaaagcagccttgttgcagggagctgaggatgcttagtagtgaggagatgaggagaacggtgagctagcatttatgaagcaacctttgcttcctatgtgataattacacttttcccaactttcagatttgtgtttcttcccttgccagaagttagtctctttacagactggacttgcaactttccggagtcattgtctttgcttgcattcctaccagaatccctagtgactctgcggatcatgtttaatgataatgttgacactaagtcattgtgagggtaaaatatgaatctggtaacagaaacgtttttctcggtggagagaggtggggccgggaaccaggactactgatgcttctctctgcccccactgtctaactttacaggcagctcaaatcactcagaatccagtttgcggccagtgcagacttgcctctccctcccagtcttctttcttggtggtgactgggagagatttaggagattagggagggccaagaaacaaagcatgaattatcacggttgctgcacaggtgtggtcctctcagtctctctgcctgaattc

SEQ ID NO: 205047 - DNA, 1000 bp, Homo Sapiens
ttaagaaatattacaaagccctctgtacatgttatctgctagggctttaaatctgtaactgtagctagaaataggattctttcttataagttgcctaattcattatatttacacctcttctgttctttaaaatagtcccaaagttccctgaacagtgtttaattttggggagggatcttttaatcataattttaaactcagaggatgtagaacatggcttcctataatactcttctcaaagtattggtttaagtcagtggttctcagtctgtatattgtggaccctgggatgtgggtgatgggggtagtagctttatggcattttgcaaagcatctgcaaatccatacttgaagcaagcattttctgtagaccaaataatttatttcatatatctttgtacagctcttcaaatttttatagctatacttctgactaataaactccaagttcattttaaatcttcactaaattcttagcagcctttttccatcatgtattttctcagtacacagaagctgaaaggacaaccttgatggttttgggtgaccaggatattattttatattaaaagagagcccttatattcaggagcctttggggagagactatgggttttctaggtgtagaattatatcatctgtgtgagagatggtttgacttcctctcttcatatttggatgccttttatttctttcttttgcctgattgctctggctatgacttgagcacttgggaattcttgttttttggttttttttttcacattatgataaatatatattttcatagtgccagatttactgtaatttcttattgttattaaaacctaacacttggtcatatgctatttactttatgtgtttctaatttttatttgcgtatttggcctaagcatgtttatatctgcttctgagtaatttctgcattttatatgtttttacttcataaaagatggaggccacctcaaaacaaattaggcatcaaaggaacatacctcaa

SEQ ID NO: 205048 - DNA, 1000 bp, Homo Sapiens
cctcacttctttgtaatgggaggggtttgtgaatgcacctgtctcatgtgcccactgctcgttagtgttaaaaactagtggtccacaggtctggggccaggagatcctttggattccaatctgaactttgccagctactttccagtgttgtgcccctgggcaaatttaacctttctgatcctttgttttctcatctgcaaaatagggatagcaatatctaccttgaggttgttgtgaggcataaatgtgatgcacttggtgtcaagtacctaatactgtgcctggaatatactaggtactcagtaaataatatgattagtaccttcatatatccccctgcccattctgaacacttgtgagagtagcagagtgctttgctcatagtaggtgctcaatatatatttttaaagatccgtatttacatatatacagacatgtggatatacagtcaacatacatgtgtaagtgtttacacacatacatataggctgtaggagctcaaaaacagattctgaaggccagaagggattctttcatccaatatgctttggggcagaaccgggctgtccagagaaagaggtggaactctttctctctgactccagtctgggacatatactcagcctggctcactgttccctgagagtctggtgaccatcagaccagagggagcagaaggaaagtaccagcttcagtacctcgctgctttctccagccttccttggtgcctacttactatctccaggctaaagttagagcaggaaaggctgagcaggtgggaggcggaggaaggtcatgtgacattcaacacggatgtagtgggggagggaagattttccaaatgtccctgctagcatccagcctagccacctggagacagcacccactcagtatgtcctgggccaactgtggccaagcctccgaaagcctcttctctgctcaggctcagagtgatgctgcagagtgaagctttcaggggagaagccattgatttctgatc

SEQ ID NO: 205049 - DNA, 1000 bp, Homo Sapiens
caggttgtgccaccagctaatttttgtattttttaataaagatgggttttcgccatgttgaccacccaggctagtttcaaattcctggcctcaagtgatccacctgcctccgcctcccaaagtgctgggatttcaggcatgagccactgagcctggcctaaaagtcagtgttttaaagtattaaacaaattaataattagtgatcatttttcggtgatgatcatagaaacaaatttgtctgatttattatccaaagttacctataataatgaataggcaaataatttctggattcagtggtagatataattttgttttgtagctttgtgattctttattttttttttgagatggagtctcgctctgttgcccaggcatgagccaccacgcccagcccattctttgattttaattagtttgttctgcttcgttattacttttttagatcgtctagaggtttcaaaagggagaatttcttgctgaaaattagtgttatgattaaaacatattcattgctttggacctttccaactgttacatgaagtttctttttaagcatacaagaggaagtgtacgtggagtttctatcttgacgtttataattattctttgtgatggactcctgtaagagccaattaatggttttattgactgtgtatgattaagtatgctctttccttaaaatatgtgtatctaaattctttaaaaagttacctacttggaagggttagggaagaaaaagaacagcaggcatattagtgtctgtaatacttgagaaacattaggtcgtgcctcattttgagcggctctcttaaatactttacaaaagaataagcatttgcttgttccctgcttaatgctattttggtactgtttagcagcatggaataaatgttcagcagtgtgtgctttggacaagaaatacaccaaaaaaaccctttttttcccatcagtggcagacaaactgcagaggtcactgaagagcccacagtttggaaac

SEQ ID NO: 205050 - DNA, 1000 bp, Homo Sapiens
ggccgggcttggtggcgggtgccagtagtcccagctactcaggaggctgaggcaggagaatggcgtgaacctgggaggcggcgcttgcagtgagctgagatcgctccactgcactccagtctggatgacagagcgagactccgtctcaaaaagataagaaattaaaaaatttaaaggcatctcagatgccttgcaggaatgtgggataaagtgctcagaatgttccctggcagatagtataggcttgttttccgtgaagagcctgtaactgccacttggttccccttccacccctgacattaggaaatagttgtgcaatggttgttactctcagggtggtcacttaggcaaactccagaggagggtgtacttccactgattatccttctagcccctttcccccaaatccccaaggaaggctgggaatcatcaaaatggagttggcctttacttgtcaacaattgagtaaatcctaaatacggacgaacacccaagtagctcctgaattacaattaaaggaaaaacatttcttaaaatggaaggtgtatgtactttgtagcggatattctgtaatctcagtcacagggccatgtcttactctatattgctagtgtctggcccttgagaccagcttgttgctcagattggacacagacagcaacactgccactgactacctgggtgagaaggtgggcaagttagccagcctctctgggcctcagatcttgtgtaaaataggtataacacctaccttacagggttattttcagaaattaaagatagtatatgtaaatcactcagcatatatagtaggagctgtttaaagtattgtaaatattatgtaataattgagtatattcttggtattctgtggtaagcttaaatttaagaggctttattctgtgatttgagcatcattctttgctggtgaagaaaagaagacaaggaattcatttaatatttgagtgcttacctacctgaagcatagcattgaaccaga

SEQ ID NO: 205051 - DNA, 1000 bp, Homo Sapiens
caataattcccgcccaatggccttcattttgttcctccaacacaacaagcttattcctgtctcaggaaatttgcacctgctcttcctactgctaggaatactcttcccgacacatctgcacagctgcttccatctcatttggggtttccctcaagggttacctcctcagtgaagccttccctgaatactccagcaaaggcagcccctcagtcaccctgtcctactttttgctctttttattatttttatttttattatttttttgagacagagtttcactcttgttgcccaggcttgagtgcaatggtgcaatctcagctcactgcaacctccgcctcctaggttcaagcgattctcctgcctcagcctcccgagtagctgggattacaggcatgcaccaccacaccccgctaattttatatttatagtaaagaagaggtttcttcatgttggtcaggctggtctccaactcccgacctcaggtgatctgcttgccttggcctcccaaagtgctgggattataagcaagagccaccacgcccggcctgctcttttgtcttcttcataacccctgttagcaccggacattgccctgttcacttacctgttccttgtttaattctatctcctattctaaaatacaagacttacaggcaagcacactggctttcttccccctgaatccctagccctggaacagtgcctggtacccagtaggtacttgatgagtgtcacctgcctgcctggccagtatttattccacatggcaccacctctggggattctggccatctctgtctctcccattgccttctatcttagcaacaatctcaggaaggtggttcctctcagccctgcaggggcccaggctaagcctcagtgcattgcatatggacatctgaatacacctttgctttggaataccatgttccagctctcctttcagtccatgaaaggaacaggaattctgcccctttgacacagatggcccggtgaattc

SEQ ID NO: 205052 - DNA, 1000 bp, Homo Sapiens
aatgactgattcccagtttggggcagaaaatatacattttgacctttgtcatatcatctagtcacatcagatagcaacaaaactaccgaagactactagggccatgtaagaaggattcaggagccagttggaaaaggcatccacttactgaagatgacacaatttatgcttcaataattccaagggactgaaaatgatcaaatatgtttaaatccctaagttcttaattatattcaaacatttttaatcatcacatttggaggatgctagggaaccaattctcttcccgggagaggagggtgggggacccattccttatcttagaaaacttacgagagaaaagaatctagtacttttcccaactttcctacatggattgtaccactgggtaacctaatggtagatgagaggaggcatctctttatgaaagtattgcaactaatagaccggcgggcgcgttggctcaagcttgtaatcccagcactttgggaggctgaggtgggtggatcacgaggtcaggagatcgaaaccatcctagccaacatggtgaaaccccgtctctactaaaaatacaaaaattagccaggtttggtggcacacacctgtagtcccaggtactcgggaggctgaggcaggagaatcgcttgaacccaggagttggaggtgcagtgagctgagatcatgccactgcaatccagcctagcaacagagcgagactccatctcaaaaaaaaaaaaaaaaaaaaaggtattgcaactaacaaatgaaaaaaaaagcggtagaattagagtattacaattttgtaattgtcagtggattaatggctttaggcatcaggcatccatgactattaacatagcaacagagttgacctgcgttttgtgcttcctgattcaagatccagtagtgacttagtcttgccatagagtctgaacctaagtctcatcataccttgggatccagctgctacatcgtaggaaatccagaacacattgaattc

SEQ ID NO: 205053 - DNA, 1000 bp, Homo Sapiens
gggcagaaaccctacaagccagaagagaatgggggccaatattcaacattcttaaagaaaagaattttcaacccagaatctcatatccagccaaactaagcttcttaagtgaaggagaaataaaatcctttacagacaagcaaatgctgagagattttgtcaccaccaggcctgccttacaagagctcctgaagtaagcactaaaatggacaggaacaaccagtaccagccactgcaaaaacatgccaaatggtaaagaccatcaacactatgaagaaactgcatcaattaatggatgaaataaccagctagcatcataatgacaggatcaaattcccacataacaatattaaccttaaatgtaaatgggataaatgccccaattaaaagacacagactggcaaattgaataaacagtcaagacccatcagtgagctatattcaggagacccatctcatgtgcaaagacacacataggctcagaataaaaggatgtaggaagatttaccaagcaaatggaaagcagaaaaaagcaggggttgcaatcctagtctctgataaaacagactttaaaccaacaaagatcaaaagagacaaagaaggtcattacataatggtaaagggatcaattcaacaagaacagctaactatcctaaatatatatgcacccaatacaggagcacccagattcataaagcaagttctacaaagagatttagactcccacacaatattaatgggtgactttaacaccccactgtcaatattagacagatcaacaagacagaaaattaacaaagatatccaggacttgaactcagctctggaccaagcagacctaatagacatcgacagaactctccaccccaaatcaacagaatatacattcttgtcagcaccacatcacacttattccaaaattgaccacataattggaagtaaagcactcttcagcaaatgcaaaagaacagaaatcacaacaaaccgtctcagaccacaa

SEQ ID NO: 205054 - DNA, 1000 bp, Homo Sapiens
ggtttaattgcccacctttggctaaacattgcattacttttgtggtggttttaaagatgaagattaaaaaaaaacttccctcaaaaactaggcaacagcaggaatataagtaagacacatatatatcaatagctatgctataaaacaggggttggcaaactatggcctatgagctaaaaatagttcactgcctggttttgtatagcctgcaaactaagaatggtttttacatttttaaatgattgggggtaaaaaagaataatatttcacaacatgtgaaaataatatgaaattcaaatttcaatgtccatgaataaagctttattggaacacagctacacccatttacttgtaacatgacttactgcctatggctgtttttgcactataatggcatagatgaatggctgcaagagagaccatataaccacaggcctaaaatatataccatccagtcctttgtagaaaatttttgccgacccctggtatacagcatatagggttatgtgcttcaaaaacagagctgaacagattacttcaagtttgagatcagggaattgtaacttaggaggtaatatttgatatggaccttgaagaatgagtaggagttcaataagtaaagggatttggtattataatagaaaaaaaaccaagaatggcccagaaacaggacagcacaggttatgtttagtaataaagcagaaaagaaatcagcaagacttaacagatgattgaatattagagaagaggaaagacaaagatgtcttaaattttgcgccagagtaactggaaaatggtggtatcattaataaaaatggagagtaagaaagacatagggtcaggacaagagtcaaggatagatatatgaacacagagaagacagcagggcatccaaatgagtatgtccagtaggccactaaaaatatatatctgtacttcagaaggaaggtattactaaaaatagagttggaaacaatccacataaatattaaagcagtag

SEQ ID NO: 205055 - DNA, 1000 bp, Homo Sapiens
tctctcaaatctagagccaacaactaatgaaacataggtttcagtgaccacttaagacaaagaatagagctttaaaaataaacagaaatgatcactaaataagttaccacaactcacagcaaacagccacaaagcctagggagggaggagaatttgatttccagatttactacagtatggtattcaacatgtccacttttcagcaataaaaaatgatgagccaggcaagatgatttgcgctacaggtcccagataactcaggaggctgagatggaagaattgtttaagcctaggcatttcagtgccctatgattgagtctgtgaataaccactgtactgcagactgggcaacataggaagaccccatctccaaaaaataaaataaataagcaaataaaaaaataattagtcattcaaatgaacaacaaaatattattcacaggaaaatactaatgaattaacagaaactgtcttaggaagcacagacgtaatatttattaaactaagcctttaaatcaactttcataagcatgttttaaaagcctaaagaaaaatgaacaaaaagtaaagcaagtgagtaaaacaatgttccaccaaatagaatatatcactaaacaaatagggattttaaaaaagtcaaccaaatagaaattctagaacaaaagtatcctaactgaaataaaaaatttactagagggctttaacggagcacttgagcaagcagataaacgaattgataaacttaaaaataagtaactaagagtctgctaaaaagtaagcacaaaagaaaaaggtaaggcagaagtttagaaacaaaactttcaaaatctctgattatcaccaacatttaaactctgcttgcaagcaccactccctctgtgattctgtgtggtgtccaaggtgtttcttccttggcatgtgagaatatgtagttaataagctaaagtcagttttaccagtgccaggcatcatgtgtttggtcatattcttaaccctaata

SEQ ID NO: 205056 - DNA, 1000 bp, Homo Sapiens
aacaaaaagtaatcatttactattacaaaaattattaagaaccattacaaaaattctctgcctactaattttcaatcaccatagaaatacagtatttaataatgctgctgctgtacttacataaaacatattaagaatagatgttatatttctgtgtttgaatattgagcttaaacataaaacatgtttgaaatgtgtttgtgtgtgtctctcacacacacacataacatgtacatacctgaaactcatactgcaattgcaacacatcttaagtttttccttttaaacataccaagataacattctaaaatgaagaataatatctatgtctctcttcctactacatactatctctctatgtatatgcaattgctataaacatatcttcatatttgatatatataggtacatatatatggatagataaatatagatatatgagagagaaatggagattagagatctatgtttgccataaatcatacttgttaacataaaccatctgattaaactgatattttgtggcccaagacctgagacatgcaaaactattcttagcagatagaattttctaaaagctgagagctcattctccaggagctggccaaggaccagtcctaaaggcagacctttcttggaaatgtacagagtctgggcaaacaagacctgctgagttaaccctttcctatacatatgcagacggtattcagcacagggcctgacagaaggcagtgtttgttattattattcatagcattagcccatttcttgttgtgagcaacatgaacaaggagactaaggggaaaaaatgcccttttttagggtgaccaccctaactgatttgaaagtctacaattttttcagtttaaaatggtatttatttgtaacatgtactattgttgaataacaatttctaataaaaaaactacgctagttttctgcctatggagaagccacctttttattcttttactttcttaataagcttgctttcacttaa

SEQ ID NO: 205057 - DNA, 1000 bp, Homo Sapiens
ccatttaaaatcatagccccatcccctattggcgttccctgttcccctttactgtgtcattttctccagggtatctatcactctcggatgccacatatgttttatttacttgtttattgtctgtctccatctactagagtgtttcttctgttttgttccctactattttctaacaccaaaaccagtatctactgtattacttagtgatcaattaataaatatttgttgcatggataaatggtggacaactctgtgaagtagatggtatttaaatgcattttaacaaatgtgaaaatgatatagaagggataagtaatttgcttatgttcacagaactaaatgtgatcaagccagtctttgaacccttctctgcctggctccaaacttttttacttttctcactattcaacttagctttctgttttttccaaattcacagtcagttttatcctatgttttaactataccgaaagctttgtaagggcaagaactaggaatgttctgctcacagatatattcacaatgcctagtatagtgtttatgtgcatagtaaatattcagtaaatatttgttcaatcaatcgaggacagaaggaagagggtatgagtaagaaagaatagagccacctttaataacaaaatccagatctttcaaatattgttattagaagatttttagggagacggagtacagtggtgaggactgtcaggtggccccttcctttatctaaccctgactttccccatctcctggagagactgtcacttgaagaacttctgccaccatcatgctgacttcagatggccagcttctctttaatgccttaaaaaaaaaaaaaagaggaaaggggtgtgtgtgtggtgggagggatactttctcttggcttctctaagcaaagctaaaaatatttcactaaagattaaaagaggacaacagagaaattaaccttgagaggacaagaaatccagaggagtagtctggtttccaaaatgcagaattc

SEQ ID NO: 205058 - DNA, 1000 bp, Homo Sapiens
gcctataatcccaggtattcaggaggctgaggcaggagaatagcttgaacccaggaggcagaggttgcagtgagctgagatcgcaccactgcactccagcctgggcgacagagcgagactctgtctacacacacacacacacacacacagacacacacacacacacagatcaggtaggatgtgaggtgtgtcctcatggccggacatggggtgggtggggccaaacaaccacagggactcgtcctgtggccactgctgctcaggaagtggatcccaaggagcagagtcgccagacccctcagttcccagctccacatttaaggcaggtctggccatgagccaggcctctgcatgtgacctggggcctcactgtggcatggctgcctgtcccacctgtggatgttgcctgtgctgtgtagaagccacatagcctccggggcggctccccagaatgccacatttcctgtctctggctctgatggcgtctaggctggcaggggtcccggccccagcagtactgttgccgggcagagctcagggccacgtgcagttgggtctggctgagagcatctcatgggtttatgagaacccttccagcacaaaggggcatttatcaggcagggatggcatgtcttggtctgaacacaggaaacacagaaatagcctttcacagagtgccagcagggctgggctcgcctgctgtggagggtgtcggctttccaactccttctccaagctgtgcgacccgtccatgttcccctgtgagttgttctgtcccagacagggcattccctgagaacgctcctgctgcaactggagggagagaggcagggaggggaaaggggaagacttgcagggagaaggaagaagggagacagatggagacagacagaaggagggatggaagaaatgagagagagagagggagggagatggaaacatagattgtctccactgtgacaccctgcctccatggttctccatgatgggaatggaattc

SEQ ID NO: 205059 - DNA, 1000 bp, Homo Sapiens
aaaaataatgttaaatggttaaataaaagagacatctttatatctctgtttatcttaattaggcttgtcagaagtcttttttattggtcttttcacagaattagtttttgattgtttgatcacatcttccttctgtttgcaatcttgtacattgtaatctcttctattttgtaacattcttagtcttgaataatacaaaaaaaagtatatattttccctaccacactagtctctctgtttactgtactcctgtgcccactggaatgaaatgttccttaatttttctatttttgctgaaaaccacaatttcaacagataatttaaattatacaaattgttatctcaacaagattacttaagacttgtcaaacacattgtagcatacatttctgtaactgttgttagccaaataattaaactcttcaatctgcgatttctacatatccaacgagaacctatgtctttttttttttgaaggcaattttataactttatttgatgtatttgacgatcagcgattagttctcatccacattgactgtagattttcaaaagtggcaacaggtacataggtaaccaaagtatagagcttatttggtgaatcttcatcctcattacgttttcgggacagccgcacacggattcggtatgggacattcttattcctttggcccagacagctttgttgagcctgatatcaatgcgcgcatctggagttcccatctccttcatgccaaatttccgaagctctttgagtgcccgaggggcacacttcttgaagcccactccatggatgtgcttgtgaatgttgatggtgtattctcgggtcaccacctcgttgatggcagaacggcccttttattcttgccacccttctttgcgggagccattctgccgggtccaagttggaaaggaagagcgcgagggattgagggagaaggaaagccgagaatctatgtcatttaatagatcatgctttgggtgtcaagtctaagaattc

SEQ ID NO: 205060 - DNA, 1000 bp, Homo Sapiens
ccagttatgctatggcttttccttaaaacgagctagaaaattttcatcctgtagtcccagctacttgggagactcaagtgggaggattgcctgagccttgggaggttgaggctggagtgagccttagtcccaccattgcaatccaacctgggcaacagagcaagaccctatatcagaaaaaacaaaaaaagtgcaattagtagacaatttaatagaataacctgaaaaatataaagaaccatataaagccctccagcattaggctttcaggcctcataagccataatttgattggatgagggggcagtggttctaaatgtatgcctgagaattttgaacaatgacagaaggtgacaactctgaaaaattcagtttgctttgccaactcgctattggcaatactctttccataacatgggtttctttctttctttttttgttttttttaaagcagttgtttttacttggtttctccctgtgaaactacaggaaaagtgtcagtatttctgtgaatgcctacacttaaccttcagtaccctatgggacaggtgaccagcaggcagtactttttcttcctgtcccatgtagtgtttggtaagaattttgcctggtacgtacatggcagaaacataacaattttgtgtgggttgtagagttgtgcttctttatttctttattcagcccataagtatgctatttggtctgacatttttaccttttttttggctgactagcagggagcaagggctgttttgtcatctcagctagcatgctctgctttcccttgcctgtcctctagaagtccaaagttctgtgtttctgggattgcttttccctgggagtggagatgagcactgtctttgcccttcgcaggcttctagtctcctaggctgtctagagaaagcttgtgatagaatgggctgataacagtgctgattttggactatggtctaaaagacatttttgtattcataaccgctaagagaattctggagaattc

SEQ ID NO: 205061 - DNA, 1000 bp, Homo Sapiens
tgtgggttctgatttctccacatacttgccaatacttattatctgacttttgattctagctataatagagggactgaagtgttattttattgtagttttgattcacatttccctaatgacaaatgatgtgaagaattgtttcacatgcttattggctatttgtgtattttctttgagggaaattttttctgtgctgttgttgttgttgcttgtgctggtgtcatagctaagaattctttgccaaatccaaggtcatgaaaatttacccctatgtttttttgtaagagttttgtagcatttgctctcttacattaaggtctctgatccattttagttaatttttgtatatggtatgtggtaagggtccaatttcattcttttgcatgtggatgtttagttgtaccagcaccatttgttgaagactattctttctccacttaatggtattgacaattttgatgaaaatcagtcatggatttatttctgaatgattaattctatcacattgatctatatgtccacccttgtgtcagtaacacactgtcttgcttattcttgctttgtagaatgttttgaaaaggaatgggaaatgtgagtctttctacttgactcttcttttacaggattattttggcttttctgggtaccttgcaattccgtataaattttagaataagcttgtcaatttttacaaagacattaactaggattctgaaaaagaatttgttggatctgtacatcagaatgggaatattgctatcttaaacatgttaagtcttctacatgaacatgggatgtttttccaattatttggatcttctttaatttcttctgagtataagctgtacacttcttttgttatatttactcctaagtactttttaaatgttattgcaaataagatttttaaaactttatttcagattgtttattgcatatgtataggaacacaactgatttttaaaatattgatcttacatcccaaaaccttactgaattc

SEQ ID NO: 205062 - DNA, 1000 bp, Homo Sapiens
cagtttgggaaatactgcactgtatacgtgactgcctccccatcagtctatccgtttagcttttgaagtgaaataaatccagttagccaggcctggtggtgtgcacttgtagtcccagctactcgggagcctgaggcgggaggatcacttaagcctgggagatggaggatgcagtgaactattaatatgatcatgctactgcactccagcctgggtgacagagtgagaccctgcctctaaaaaaaaaaaaagaaaagaaaagaaaaagtgaaatatgtccatgatggatgaattttttttttcactcccaaggaattccaactgccaccttgccaccttgccaccttgactggtactttatgagtgtaggacaactacctaatcatttctaatcctgtcccctccagtttcacacatgctgccaaagaaatcttcctaaaattacccttgattcatgccagctttctgctcaaaaccctaacaggatcccctgttcccctctagtaggaagcttggacctactctttgagagtctggataatttggctttggccaactatccccactctccatctcctcctccctctgcgcctatagactgctcacccccattcccaaggctttgacacttttaccttagaaactttatttgtgccctcctctggcctggaaagccctgaccttcattcttcagacaaaggcctggctcctgccggttcttgccaccaactgaaatctcttcccgtctcaacccaaccagctcatagcctggccctttcattttgcccttgtgttagttacattaaaattttgtcttgctacgtacgtgttgtttcattagctatatatgttttttattatgatcagaaaaattctgttatctattatatttaacattttatggtttttggtggcttttcctttttccattttaaagcttgggtgggttttcctttttgatgttctttttttagaaagataatttattgaagtggaattc

SEQ ID NO: 205063 - DNA, 1000 bp, Homo Sapiens
ccaggtccttcaggacgatctcccaattagcctcaaaaaggtgcttcaggtgagctctcactcccctctaataaataaacgaatccacacacgccccggtatagccaggtgtctcaaagccaaagcttggctgaggagctggtgggtagagctcactgtagtgggtctatcccaggcccagctgcctctcccaccacaccccagcacctggcttcacttatctccctctccctctgcacacacgtgtatctgtctgcctcagccccacccaacccatccatctccactggggaaattgtgaagccaaacttgctttcttcatctcatgttgtcggttttctcagtggggggatttggaaagagtcaggaccttaccaaacccccccccccccaccccattctaaagctgagtcagaggaagggctggggcttgtgctgggtcctacacggtgcttcctctctgggcaggaagccgagaaggggtggctcagataccttccttgacctccgcacacaaccccccagaacaatgctccaggccaggcagggtttcctggcccctcccctgggatccccccaccagtgatctaattgctggtgctcttctgtgggcctgaggttttctggttagagaggctgggagttgtggacaggtctagggaggtgacctgccctctggtgcccacagaccagtctgcctgagcccctgaggatcaagttggagctggacggtgacagtcatatcctggagctgctacagaataggtaatagtgatggtggcaataacagtgaccacatggccaacaacttgtatagcatttattatgtgccaggtactaagtgcttgtgctcatttaatcctcataacagccctataagggatatactatcatgtattattgtcctcactttatacatgaggaagtcaaggcacagagagattaaataacttgccccaggtcacacagctagtatgtggtgaaaaccagattggaattc

SEQ ID NO: 205064 - DNA, 1000 bp, Homo Sapiens
tgtccagctttgttccattgctggtgaggagctgcattcctttggaggaggagaggcactctgctttttagagtttccagtttttctgctttgttttttccccatctttgtggttttatctacctttggtctttgatgctggtgacgtacagatgggtttttggtatggatgtcctttctgtttgttagttttccttcaaacagtcaggaccctcagctgcaggtctgttggagtttgctggaggtccactgcagaccctgtttgcctcggtatcagcagtggtggctgcagaacagcggattttggtgagccacaaatgctgttgcctgatcattcctctagaagttttgtctcagagtagtacccagccgtgtgtggtgccagtccacccctactggggggtgcctcccagttaggctacttgggggtcagggaccccctttgaggaggcagtctgccccttctcagatctccagctgtgtgctgggagaaccactactctcttcaaagctgtcagacagggacatttaagtctgcagaggattctgctgcctattgtttgtctgtgccctgcccccagaggtggagcctacagaggcaggcaggcctccttgagctgtggtgggctccacccagttcgagcttcccagccactttgtttatctactcaagccttggcaatggcaggcacccctcccccagcccagctgccaccttgcagtttgatttcagacagctgtgctagcaatgagggtgggcataggtctctctgagccatgtgcggcatataatctcctggtgtgctttttgttaagccctttggagaagcacagtattagggtggaagtgacccaattttccaggtgccatctgtcaccccattctttgactaggacagggaattccctgaccccttggacttcccaggtgaggcgatgcctcgccttgcttcggctcacgcatggtgcgctgcaccctctgtctggcactccccagtga

SEQ ID NO: 205065 - DNA, 1000 bp, Homo Sapiens
gttgttcgttcctcccgtccagagttgttcattcctcctgctgagttcgtggtgtcgctggcttcaggagtgaagctgcagaccttcacggtgagcgttacagttctttaaggcagtgtggacccaaagagtgagcagaagcaagagtcatggtagagggcaaaagaaaaaagcttccacagtgtggaaggggacccgagcaggttgccgctgctggctcgggcagcctgcttttattcccttatctgaccccacccacatcctgctgattagcccattttacagagagctgattggtccattttatggagagctgattagtccgttttacagagagctgattggtccattttgacagggtgctgattggtgcgtttacaatccctgagctagacacagaatgctgattggagtatttacaatcctctagctagatgtaaaagttctccaagtccccactagattagctagacacagagcactgattggtgagcttacaaaccttgagctagacacagggtgctgattggtgcgtttacaaaccttgagctagacacagagtgctgattggtgcatttacaatcctttagctagacataaaagttctccaagtccccaccagattagctagatacagagtgctgattggtgcatccacgaaccctgagctagacacagagtgctgattgatgcatatacaatcctccggctagacataaaagttcaccaagtccccacccgactcaggagcccagctggcttcccctagtggatcccatgccagggccacgggcggagctgcccaccagtcctgcgccacagcgcctgcactcctcagcccttaggtggttgatgggaccgggctccatggagcagggggcagtgcctgttggggaggctcaggccacgtgggagcccaccatgaggggtctcaggcatggcgggctgcaggtccagagccctaccccttggggaggcagctgaggcccagtgagaattc

SEQ ID NO: 205066 - DNA, 1000 bp, Homo Sapiens
ggcatttcccaagagtgtagaagaggaagcccaacaggctgagtaagctatttcttcaccttgtatatttaagttagagtactacctcttttgtgtgaactttagggagtggtcagtaaatgccacttatttcaaattgtttcactttggcttgctggaaagtagatgtattttagagcaaggtcatttggtatatttgtaaaaatataccagactttcttgattattttctttaaattaagcttactttttgaaatattatttattttaaagtaagattttatataagttctctaaatagaataccactatcacttcccataaatagaagataaacccatttcccgttttgggaaatcgcttagaagaatgaatttggaatttggaatcagaagaccggagtagtcatctcagctctgctacttctgtgttttctggttctgggaaaatcacttgacttctctgagtcccagtctcttcataaaaaaaaaaaaaaaaaaaaaaaagggacgggataacaatgtcttctttctttctcaaaatgacattaactaaatcaagctgcaaagggaaatatgtggttctttttatttgtaagcttaaagtccaagcagttatgacaaatgggtttcacctgaagtgcaaatgcccatttattcctagtggttcctggacccctttattgagaagggttgtgatgacctgccccaagcaaggggggaagaaggctgctactgcatagttcacgctacttaactcctgcctcctctttaccgagccctcttagctcaccagaatctgcatctcagaagccacctcccattcagcatgaacttcctttttataagagcccccaaaagtcacctcaggtaaatcacactcatgaaatctcttttcagcctaaaactgtctcctaaaatgaagccctcccaggcccttctaattctgtcaccactttctcactcctccaaaataaactgcttttcagtccaaggaattc

SEQ ID NO: 205067 - DNA, 1000 bp, Homo Sapiens
agccagcatgcctttcttctgcctggttttctaattatctatttggcaactagtgatagaatagtgacttattaagaagcaaacacatttttcctggatccttttttttctctttaaaagaagcagaggacatttgtataataaacatttatcttccctttcttcttctctattagtcaataaatgtaaaattattatctagctcagtttataagtggtcacttatgaaatacttaataaaaataaatatctctaggaatcaccagacatcataaatattctcagtggttatatatttattttaaacattttatgttagtactggattcctttacctctgaaaaaatggcttttataaacttacactccacacagtatggtgaatttgctcgatggaaaaaatggcaatcctttagcttgcattatttgcaattaaagtacgcagtgttccctaattcaatcctcaattttatattttaaaagaacagaccaagctttacttttagacatacatcttaaatgtgctcagaagacacaggaggattttttgacttatatcttagaagatatgaggaaattaatcaaaaaaatatattttcctacttgaacaaaactttgaagtattagataggaggatacaattttaatattggagtagagagaaagtaagagctatcgaaagaagtttcaaaaattatgtcagcatctttcatagtaaatctaaactttgcttgagtaagaaattctttatactttcatgcagaaaagcaatggaacaaaattgctgatggaccatgacattctctttgcctgaacaaagagacagctgataatagtgaaagttgtacaggtattcaaggcagtcattcccaatcatttgtcaacctcagtttccaaggatgttgtgtcagtttgcaaagtcttgtctacacttgaaaatacactaaaggattcttctgtctacccgaagaaaatttgttcaattccaactattgaattc

SEQ ID NO: 205068 - DNA, 1000 bp, Homo Sapiens
tgttcccctcgtccagatgtgggtgcctgcagtggaagctgcttgaggcacatctaatccagctgcaaccttgcatggcgccagtgcctggagatgcctgccccaccacggcagctagcttgcttggctgtgcacagtggccagaccccatgcccattcgctaacacacccctcgctgctccatacctggcctacccttggcaggtgtgggatctgagccagtagcataagtcaagcacaacctgccaggctgagtagcgggaacaagcccagtgagcccaagcaaaactcgggcaaaggtgccactagccacagaggtttctggctggaaaaataacaccctaaggatcctgtgacatttttagacatgcaccaccatgcctggctaatttttgtgtttttagtagagatggggtttcgccatgttggccaggatgatctcaaactcctggcctcaagtgatctgcctacctcagcctcccaaagtgctgggattataggcatgagccactgcatctggccagctaatttttaaaattttctatagagatgaggtctcactgtgttgctcaggctggtcttgaactcctggcttcaagcaatcctctcacctcaacctcttgagcagctggactacaggcatgcactaccacacccagctatattttttattttgtagacggggtctcactttgttgcccaggctggtcttaaattcctgagctcaggcaatcctctggccttggcctcccaaagtgctggaattacaggcatgagtcgctgtgcctggcctgcctctattcttagagtcaaacattcgtctgtgtttggaatccttactcctaaattgaggaaaaacttctcggaagtagcacttctcaaattataatctatcacattaacataggctatgactttaactggcaaagctttgtttttctcatctgtagaaccaaaataatagacactaatgacattgttttgaggatttaatgaattc

SEQ ID NO: 205069 - DNA, 1000 bp, Homo Sapiens
cacacaaatgtatattaaataatactatatatggtgttccacacttgcattttttgtttttttgtgtttgttttgtttttgttgtggtggttattttggtttgtgcctaatattctaccacagatgccatgttttgagatgcaatatagcatgctcagtaagagcatggatgtcaagctgaactgtctaggttcaaaccccagctttgccaattaccagctattggattctggacaagtttacttaagttctctgtgcctttgttttctcatctctaacatgggaataataatagtatttacattgtattgtatcaaatgacacttgatacacatatgtgggtataaatgttagctgtcatcattagtattacatattgccctacctcattgtttctcatcactatataatatcatgtttttaaagtgctttttatttaatcagacccttttttgatacatatttagattgtttctaattcttcactattacaaacaataatcatgagcagtggtaagtctgtgtatttgtataactatttccacaaaacaaaggtagatgtaaacatattgagtctaaaatataaacattgttgtacagtgtacactcacaccaaccatgtaccagtgtgtatttccctacacttttgctgctgctggatattatcaggcttaaatatctttcttggttttcttctagtattttatggttgatgagctagttctttttccctgctcccagaccgtacttacatttttattctatctgaaatgcatttttgtgtataaggtgagatagtgacctgtttttttaaaatagttaattctgatacccagtatcttttccctcactgatttgaaatgctatccctgtgacataacaaacacccatgtacacctagatctctttctgaactcattctcttctgttgacctgtctattcccaagtaccatcaattttaatcatcatagcttaacactgtttaatgtatttacagcc

SEQ ID NO: 205070 - DNA, 1000 bp, Homo Sapiens
atatttctattaaaaaaaaataagagctacattcccattttactcctcaagaaatactgtagtattttccaaaatcttcaacactaaacccttttcttatgttatatttaactaaacttaattttccttatgttagaatatttaactaaactcaattagtataattatccttatgttagaatatttaactaaactcaattattatcattatccttatgttagaatatttaactaaactcaattttcttccattatcttatacatatccatataatacaatttaatttagagttcttacctgtaaagttgaatacgtatatggatagtgataagcaaagtagcaaacatcatctttatgtggaaaattgacagtaaatgtaattgtatagtaggattttcccttttgcccacctgcagcaactgaacttcttgagaaatgatttctgcaataaaaacgcataaaacatgttcatttcatccacatgaaaactgattttccttgttacttttattaaatagaacttcagggaaaaaagaaaaacccgagtctgtaaaaagtgtaacttaaataccctattttaaaaaaacttagtactaataaagcagtaaactattattagccaatgacattacataacttttcacttctgaatttactaattaaatgagctaatactcttcacgtcaaaaaaatttttagaaccccattctttgacatccatacacgttactgaatctagaaaatgatcatcaatggctactacaatcaagagaggaaaggttgatggacacctttacgtggatggatcaggctacaagacctgggttcactaatcaatcttaagattacaaaaagagaaacaatcagagatgatgttgtttcctgatgtgatgcaatgggaattcattgcaccacctattaagtattcttgccaaaaccaaacctgaagttgatcaagcttctagatctaactaacagtttataggaaattggtgaaac

SEQ ID NO: 205071 - DNA, 1000 bp, Homo Sapiens
ttttccttacttgtattatcagcaaatacattattttcttcattatagtgtatatagtttcatttgatcatacgataattacattataactgcacatctcttctccatttgtcattcacttcccaacttttttcaactataccgttacttaaatatattaacataaaaagtagttaaattattagtattcaatctttctcaggttaagattcccttctttgaatcattctgtgttttcagttcccttcatattcatatctagcttttcttgcacatttcctattgacccctacaccccatacactatttctgattacattttattgctattttggaggtagtcattgtttggggaagaagaatcacatatattttcaccatacctctgatgtcttccagcttttcatcattctttctgtttgtattcatttcagccttttttttctttttggacaactttagtatacaaattttttgtctttcttggattttctgtctcctttacttctttgctttcattcctttatcacattatcaagaattcaaatctctcagctcatctcctctgcagtcaggagacctctctcctagagccttccatcctcagcttcagcctggctcctacatctggtgcacagctattatactgaggctacctctcatggctcatagctattatcctggggctgcttctcaccagtaaacaaaggccgatccactgtttcctatagcctcctcatgtcttcctcatggagagaatcttccttcatttaatgttagctagctaatcagctaacattaaaacaatgagattatcctggagtattccagtggacctgttgtaattacaagagtccttaaaagtaaaaaagagaaacttggaagagaaaaacagggaacgacagcatgagaaggactcttcccagcatttcccactgggcccatgagccgaggaatgtgggcagtttatataaaatggaaaagccaagggaatgaattc

SEQ ID NO: 205072 - DNA, 1000 bp, Homo Sapiens
tattacttagttggagggctgaggagaaagtggtgtgaatcagaaagcctgaccaatgtccgtggatgaccagggacacggggcagacacaaggccgtttctgctgcagatagtgagaaggccatgccatcatatctgcgtttctcccaaagcaacaaatccatcaacacaagactatgtagaatccagccacggatgtcagactgacaagtcagaaatgtggtagatccatagtggccactctcaaggacaagcaactgactctgttttatgttttgccaaataaacccacaggccagcgggtgggcgctagccttttcataagtatgccaagtcaaaccaccattaaaaccattcccttggccactgcggtccctgtgggatgaagtgtcctcgcctccactggactccagtgtgtgttatcttttcacctccttcctgggaagagttggtggttgctcagcaccacatgtgacgactaggcacaggccctggctgctcctggcacccaccaccggcccacgccgggatccagtgctggcactgtttgctctgcgtctccgccccgtggctccctcccactgcccacccccgccagctgaaagaagagacaatgtattggcactgacggccatccccatcctacctttaggaggaggtggtgatgcatgaagataatatttcgtcttgccaatagacaaacaggctttttggatcaatgggacacacacacacacacacatacacgtacgtgtgtttgtgctgcattttacagttgtgccaaactgcatgaaattggcttttctctcatctcaatttggcggcatgaagcacaaacatctcaaaggaaaatcagcaactgtttttatccatagtctcttctctttttcttattcatctgatccacgggcctatctgagttcttattttttcacatcctcactgtaagttaacagttttggtaagacaggcatactcaatcaggccatttctcttcatg

SEQ ID NO: 205073 - DNA, 1000 bp, Homo Sapiens
tcaatcctatatttaccaaatgctctgcctattctttgaaaaatttctctctggaataatatttttcatcagagctaatttcagaaaacatggttcatgattgcaccttggctctctggcagctcccagctgtgagacacctgttcacccctgagtacactgagttcatccacctattagatgctagtgatctaatgacattccgcaaatcagaatgaactgattggacatcgtgcatcttgacagtgaataactcagtgttcacggagttcatctgctccttcttgaaactataacatgagatcagtcagaccactttcttccttgtatggtctcactagctttagctgtaggttcattttcttttagggacagtggctttattctagccatacccctaactggggcatctattttacaaatgaatattctaagttgttctcaaggaggaggactagttgagagggagtagaggagttaagacaaatttaactccctttagggacagaaacaagataaatgatgatttatcagtgaagaactttatattttgcaaagcccttttatgtttatttttttatttgatccctagactagtaataggcttttaaaatttccattttacaggagagcaatctgagactcagaaatttggtaatttgccacaatttagctgtaagagaacaagaggacctaaaactctttattcctctgtctaggctattgtctcttattactaaatcatgttgtctatcaaataaaaatatacaacttagtcctcaaacttactaagtaatcatgggcaaactgaaggcaagaggtgtgtcattacttaatgacatagggcttgtatatcaacaataaggatcattcagtacaaacactgtgttctcctgaatagatcattaacaaaatgactagagaaatttattctgtattctacctacctttgccagctctctggaaacaaagtaggtggcccacccagtatgattgggga

SEQ ID NO: 205074 - DNA, 1000 bp, Homo Sapiens
ttacattgtcagagtgaaatttaacagaacaattttaggggaaagatcttgggggcctacaaggaatttccttgtgagcaaattgtgagggaagtatgtagcttttttatctttgtagctattttattaggaacaaaactggatgcaggtttgggtgacccagttcccagcttgacttttccctttggcttagggaatctggggtactgagatttattttcctttcacatcacccaggccttatttgatctcaggtcttcccattttgcctcacctccagtgctctcttagaacagaataccttcccagcaaggatatcacactcctaacttttaatctattgccttcatttgcagactgttcaatcattgttttccccctcccattctgttgcaacccattgtgaaattaataaacaaataatatctattttagtttggccttgtctctgtacctgtcaaagctgtagcatcctcaagggcagccctcataggtgaatttcagccattcactctaatttcaaacagttctcgtaactagagtcatgtaatagctctcatatggacataaggctactgaacttgcatttggagagatcctgaataactccactaacagggggaatgattttcattaaatcatcaacattctatgtcttatttttttttttttgctaccaagagatcatatatggaaaatggaaagggaaaaacaagaaattagatatatttatctgtacgcatacaatcctttaatatacttgggtttttctgtctttatttctattctaaggcttggcactaagtttcaacagtacatgaaggatggctctatcgtaaataaactgtcctaggtttctaataggccctacccattcctatgtgaaaattaatctactgcattatgttgcctttggtttgagtttttatgaaaatactatttaacattagaatgcatcagaaatatgtctagttattcttatattattcctggagaattc

SEQ ID NO: 205075 - DNA, 1000 bp, Homo Sapiens
cctagaaaataaaagctgagggatttcatcaacaccagacatttcctacaggaaatgctaaaggaagttcttcaatctgaaagaaaaggatgttaatgagcaataagaaatcatctgaaggtacaaaactcaccgatagagaatacaaagaaaaatggaatactataacaaacactgtaattgtggtatgtaaactacttacatcttaagtagacagactaaaagatgaactgatcaaaaatagaaacaacaacttttgaagacagacagtataagaagatataaacagaaacagcaaaaagttttaaaaaagcagggaggtaaaattaaagtgtagagtttttattagttttctctatgtttgtgtattagtttgtttatgcaatcactattaagttgtcatcagtttaaaataatgggttatattattttcaagcctcatgataacctcaaatcaaaaaacctacaacagggagaggcagggagaaggcacagcaagatggctgaataaaaggctccactgattacccccactcctgctcccacaaggacaccaatttaacaactatctacacagaaaaagcactttcataagaaccaaaactcaggtgagcactcacagtacccgggtttaacttcatatccctgaaagaggtgctaaagaggataggtgttgaattgccaacaccaccccctccccatcctgtggcagtggccacatgatacagagaaggaatctgtgcaattaggagagggacagcagcagttgcaaggtattgtactgaactcaatggtgccctgtcatagcagaaaacaaaactgggctgaactcagctgatggccacaacagcaggagcatttagaccagtcctagccagaggggaattgccaatcccggcagtcagaacttgagtttcagtgagtctcaccaacgtgggctaaagttctctgggatcctaaataaacttgaaaggcagtctaggccacaagagactatact

SEQ ID NO: 205076 - DNA, 1000 bp, Homo Sapiens
ttctttagccaaggcgctatgacttgaatacccagctctattaagcttataagaaatcaaagttcaggagagaagttagagctttgctgcaccacacaactctggaagctcctggaatattttcttagaagaaggagaaggaagaggaggaagaggcaaagcaaaactaaagtacagtcggtagcctttgcagtgcaggagcccacagttgtgatgtgcagatctggcttctccaggggcggggctcaggcacttatgaatgaattggcttagaagcctctactgtgaggttctgggtctgtttatcaaacccatgccggaaacgtcggagttgttaatagctttggagtgagacataccagggttcaaaccttaattacatcagctgctagctgggtaaccttggcaagttacctaaactaagctgggtaaccttggcaagttgtctaaatgaagctgacctctgtcaacctaaataacaaagaaggaaactatctaaaggacaatggtgtttattcgggcgtaggcattaagatgggcatgtgtgtgccatggtaaactaattgcttatccagagaagtaaaaagagataatttttttttaagaaaatgaggattgcagaattgttttgagataattatcctgggccacaaggatcaataacaagggtgatgcctgtctgaggctggacaggcagttgctggcagatgtcctggcagaagtggttttttgtgaaaagttgcaatgcctcactcatgagagccctccctccatggccttccccagcgtgtcagggttttaacatagggaactccatttggattctgaaaattttccctcatgaggttgcatgaggactaaacgcaacagtgggtatgaagggcttggtatagtacctggctcgtgtgaattactggttagagaagagatgtaggaagtcaaataggataagtaaaagaggacttgtcaaagactactggattctttgtagtatgaattc

SEQ ID NO: 205077 - DNA, 1000 bp, Homo Sapiens
gtctatagacatagttgtttccacttcttggctactgtaatgctgctgtgaacaggagcgtacaaacatctcttcaaaaccatgctttgaattcttttgggtatatacttacaagtacaattgctggaccatatggtaattccattaatttcttgaggaagtgctattcctgcttttcatagcagttgcacattttacattcccaccaacaatgcacaagggttacaatttcttcatatcctcaccaacacatgttgtgttgctctgtgggattttttttggtagtagccatcctaatgggtgtgagatgatatctcactgtaaacatgatctacatttccctaatgattagtgattccagcatcttttcatatgcttgctggccactggtatatcttctttggctaaatgtatactaaagtcctttgccacttttgaaatcaggatattgggtttgtttgttgctgagctgtaggagttcttcacatattctgaatattaaccccttaacaaacatatgatttacaaatattttctcctactctatgggctgccttttcactctgttgtctcctttgattgtgtccagaaatgtttaattttgacatagtccaatttatctatttttacttttgttagaggtattttctggcagaacagcatgaatacgtcaatttcctgagatggaaaatgttggcttctcttaaaattaacacttaatttagcagaacaggaatttacattgaattatagtcaattaagtgaaacaacagattcataaaaccttcagagaaaggttttgtaaatgagttatatgaactattattaaatattctttgaggctcctctaaggactagatataaaaaactgtccagtgatgaacagcatttattctagaagaattccttaaactatagagagggcattttgttccgattctcaaatcacatctgtcttagtccacttgggcaactataatagaatacatagactgggtgg

SEQ ID NO: 205078 - DNA, 1000 bp, Homo Sapiens
tagttccagaagaattgaagacaaaaactgcaaccaaagtgagctcctctgatcccaaaatcatcatgaacttaactctccgtatgaatgtatatatccaaattcacacatgtcagccactatgtaactgggagctctctgagttaatttccatgtagaataccacgtgtattaaaaggtaagtattaaaaatgaactaatttgaagctggtatattattaatactcaatagcaactgcagtaattatatagaacttagacaatcaaaagttgtttttttttttcagggattagtattttactgctgaaattgttgagaattgccagcgcataatgataataaaaacagactgacttttaataggttttattattgcttttaaattatttacagtaaatgtaccccttcctggctatatcctggacagacctctcttccaacccagcccttgggacaccactgatgtggagaatgaattgaaagagagcaaggaatttccaagaggcctgttagggaatttaggtggtgggacttggtgactgattgaatatgcaggtgggaccagaaacgggctgtgttagcccccagctttctagatgggccagcaggtaggatgtagacttcttagtatgtaggtaaggactgaagccagaggaatggatgccattgcctggggaaacagtgttatataatagttctaaatcttaatgaactccaacattgaaaagaggatacattggcaaatattatctccattttgcaactggaaaaccaagagactgagtagttaagtcactttcccaaagcaagttagcagaagagccaggattaatttttggcctcattctgggcacccagttatttaatttaaatgcattttaagaagacatcatccttcctaaaacctctggagatactgaaaagtaacacaaaggcttatggctctgctgtgccagggaaaaacttcctacagacgtcagtctctgacagctggaattc

SEQ ID NO: 205079 - DNA, 1000 bp, Homo Sapiens
atccagatgagagataattaaggtttggatgatggcagtggtgaagccatggtcagattctggattaacttataacttgaatatggggtgagacataaagaatcaagataaagatttgttgtgaacaactggaaggatggagttagcattcacagatcaggaagattgggagaagcaggcttggaggagatgatcaagagtttcattttggatgtgctaacaggttagggagaaaacagcaaaggagcagccagtgaggcagaggaaaactggaaaaatatagtgtctcggaagccaagaggaaagactgtttcaaggaggagagactaatccactgtgtcaaactttgctaaagtagaggaaggattgagaattgtcctaacaattgatttcctaacaattcaattcatttaaattaattatagattatggaggtgaagtaacttggccaagggcatgcagatgaaaccagctatataatttttgggggacccatggcaaaatgaagacagagggcttctccttcaaaaattgctaagaatttcaagatggctatagcagaaaattaaacctagcaagtgtttcacaagtgtttcattggatccttgaagcagacttataacatagctattattgtcctcatttttctgatgaagaaactggtgctcagtgcattgagtgatataactaagatcacagagtgagactggtagttcgcaccagaagctgggccttcagcctccaattccctctaattccttcttttttttttttttttttttgtttttgagatggggtctcactctgttgcccaggctggagtgcagtggcacaatcacagttcactgcagcctctacctccctgggctcaggtgatcctcccacctcagcctcccaagtagctgggactacaggcatacaccaccatgcctggctaattttttgtattttttttgtagagatagggttttgacacattgcccaggctggtcttgaattc

SEQ ID NO: 205080 - DNA, 1000 bp, Homo Sapiens
ccatggtttccattagggtgtatgcttggtgttgaatattctgtgggtttggataaatgtgtaatggcatgtacccatcattatagtaccatatttaacagttttactgccttaaaaattcaatgttctctactgatgtatttttctttctgtccccaaccttggcgaccactgatctctttactgtctccatagttttgcctttttcacaatgctgtatagttgaaatcacacagtatgtagccctttcagattggcttctttaacttagtaatatacatatgaatttcttccatgtctttcagtggcttgatagtttatttgttttcagcactgtataatgctacatttccttaatgtaccagtttgtttgcccactcacctactgaagaagatcttggttgcccacaagttttggcaattatgaataaagatactattaatgtccatgtgcaaatctttgtatgagcatacactttcaactcatttagggaaatatcaagtagcacaagtgctggattgtatattagagtatgtctaattttatagaaaaaactgcctaattatttaccaaagtggctatatcattttacatttacatcagcaataaataagagtttgtgtcgctccacatcttcaccagcatttggtgtagtcagtgttctggattttggccatttaaatacatgtgtagtggtttctcattgctgttacaatgttcatttcattgatgacatatggtgttgaccatatttttgtacgcttatttgccatctgtatatcttttttcatgagggtctgttccctatattttgtcaaatttttcatggacttattagtgttcttactggtgaattttaagagttcattgtatattttatgtaaaagtctgttatcagatatgtcttttgcaaatattttcttatactatgtggcttaccttttcattctcttaagaagcattctttggagggcatacatttttaattttaatgaattc

SEQ ID NO: 205081 - DNA, 1000 bp, Homo Sapiens
tgccgtcagccaagatcgagccattgcactccatcctgggaaacaatagcaaaaatctgtctcaaaaaacaaaaataaaataaaataaaaaagaaaatgttctggaattatatagtaatggtggttgcacacctttgtgaatacagttggcctgtgaacaatacgggtttgaactgagcaggttcacttacttccagctctgtcaccccaggacagcaagaccaatccctcctcttcctccttttcaacctacacaacatgaagatgatgagagtgacaacctttataatgatacactttcaggtaatgaataggaaacatttattctcttccttatgcttttcttaataacgttttcttttctgtagcttactttattgtaagactataatatataaatgtatattctaaatacatctatataatatataaatgtatattctaaatacatctatataatatataaatgtatattctaaatacatctatataatatataaatgtatattctaaatacatttatatattatataaatgtatattctaaatacatttatataatatataaatgtatattctaaatacatttatataatatataaatgtatattctaaatacatttatataacatataaatgtatattctaaatacatttatataatatataaatgtatattctaaatacatttatataacatataaatgtatattctaaatacatttatataacatataaatgtatattctaaatacatttatataacatataaatgtatattctaaatacatttatataacatataaatgtatattctaaatacatttatataatatataaatgtatattctaaatgggtgaattctatggaatgtgaactgtatctcaataaaaggaaaaatgcagaaataaacacttttgtacatgtattgttataaattggagattttctttctcaaggatatattcccaaatgtgagatggctgtgtcaaagttcta

SEQ ID NO: 205082 - DNA, 1000 bp, Homo Sapiens
taagtacaaaggttctaaaaagattactttcacttctccctagatacgttaaatagcatagctgggatattatttttctttggttttgtcagtagcatgtttgatataaattatattaagtggtagtgtatgtaacattgcattgtgggtagtagtttcctgctttagtctagccacatcctcagctgtcatatgagcatgtttcccatattttctgcaagttctcgcctttttttattattacaaaaatgacagcattcaaagatgaattgttctaataattacaagaaacatgaattacttatacagctacattaaacaagtatggatcactctgcacttcaaagaataatcaaagaaaaaaaagtaatcctcataattaaagtgttaatactatgtgaacaatgtattaaagtaaattagcataaaaggattcaagaaacaattaaaaacagctgaaagaaattaagtctctataatcagatgccaatactatctaacaactgaggcattacatattagaatataacaatttctaatgaatgttaagagctccaaatctaccgagtattcattagtgaggattaatgtcaatatcccctactagaacttaagaatctactttgaggctgtatagaaatgagggaaaaaaggaagagaacccaaaaaagcctgaaggagaaagaaagggaaagaggaggaatgggggagacaggtagagggagagagattggtagagagagagagatagggagagggagggagggaaggcaggagagattgacttagcattttctcttctggcattccacataatctcacatttagacagctgctaaaactaatcaaatgaagttgttcaaacaatcagggaaatggtgctagtttgggtttttacctgatctaattaaaataaactgagaaaaatgctcttattacaaaaagtactacaaaacaatgccttgtatacatacgcaataagacaaatgtgcatgcagtt

SEQ ID NO: 205083 - DNA, 1000 bp, Homo Sapiens
aagagtaaacaagaaattgaaatgttacactcaacataattttttccccatttttgtactgaaaggacaatggcagttttaaaaggatggcaagcttctttggaatttacccatatttccagcagtctagtgctgctatttatttttgcatgttacctttgatagaaacatgtgtttttatgttactatggccatagtttatatgctattagtagtaaaggctttgaaattggacagatctaggtttgaatgtcggatcctcaactaatgagatgcaagtccttgaacaatttatctctagtcctcaatttcctaaagtgtaaaatagggctaatattaccttttgtatatacttgctgtaaggataaaaaaagaaaatcttagcacagtgccactaggacgaactccatgaattatggctactatttctttctaaaatttcatttcaaatatttcagtatttctacacatagacataagtgtttcatgttgaaaagccacaatttcctaaatcaatcccctaatgctggatagttaagttactgccagtttttattatcacaaacatgattacaatggacatcttcatggcttagctttttcattcttttatcttatttctctggcttctctaaattcctaacggtgaaattactggtttttgcttttaaaagggtttttattagcatacaataatatcaccagcaaaataatgcacagttcctgagatcttcatattttatacataaaatagtattaagactgaagagcttctgcacagcaaaagaaactaccatcagagtgaacaggcaacctacaaaatgggagaaaatttttgcaacctactcatctgacaaagggctaatatccagaatctacaatgaactcaaacaaatttactagaaaaaaacaaccccatcaaaaagtgggcgaaggacatgaacagacacttctcaaaagaagacatttatgcagccaaaaatcacatgaaaaaatgctc

SEQ ID NO: 205084 - DNA, 1000 bp, Homo Sapiens
ataaaactactggatgataatagcattgatagacaggatatgtgagtagtgaaggttgtgcataaggaaacacagattttgtgttatgtgcaaattgttacctaaaataaatcaattgcagtagaacattaaagttttcaaagcaaatattataacagaactgaccttactaccaatctgatatagttagatttgcccattagaaagaagtttgcattattagccaattaaatgcaaaaacttcatttacatttgaacattttcctgattttcttttggaagtagttaattgggtctcaaaactgacatgaataaaataaaaaaaaactagtacttaagttctcaagctaacctactaaaatcaattttactgtttgattttgttacttttgttactcttatgagctagattttgattagcagtaacattttttttcgattgggacatcagttctcaattctaagttgaggtgcgagaccacaattctgctgtaatttgaagtttggattcctaatttgttcttttatcttccatattttagcacagtggagatttgtttacttctgtgaaggtggctccaaggcagtgctgccacttatggttgctcaaactgttacccaattacctgtcacttgttatcgctgatttgtagctgtttcataaaatttccagtagatggcagtagagtttcttcaataaaggactccctttctaatttgtggaagtcatttgtataggctattgtcatggttactgttcccagtttgtacagtcaagttctgtggaaatgggtgcccaagaagaccagagtagagtactccaaaatgtgatacccacactagaggctcctcttaatcagccctaaggccaagttcttaggaaaccactgtggtggttggagaatcaggtgggaagtaggaatgatttttagattcagcctggacatctggaggagatgaatggcagattgaacacaagcatctaattatactcctccca

SEQ ID NO: 205085 - DNA, 1000 bp, Homo Sapiens
ttcttcaaaaaaatttttttttggggggacagaattttgctcttgttgcctaggctggagtgcaaatggcgcagtctcggctcactacaaactctgcctcctgggttcaggcgattctccttcctcagcctcccaagtagctgggattacaggtgccctccaccacgcctggctacttttggtatttttagtagagacggagtttcaccatgttggcctggctggtctcgaactcctgacctcagatgatctgcccacctccgcctcccaaagtgctgggattacaggtgtgagccaccgcacctggcctattctctttaagttttttttaccattcacttcaatttcacgtgtatgcgtgtgtgtgtgtgcacatatatgttagtaatggaaaaaacaccatttttcctttcttctgattaatttcagaagactttctggacaaggaaaggataattctaaagtattcagaagagacaggtttttcctagctatgggagaggggagaggcttaggacagggcttcagaataagttttgagggtcatcaaaaatggtagaacaggccgggcgcagtggttcacgcctgtaatcctagcactttgggaggccgacgcgggtggatcacctgaggtcgggagtttgagaccagcctgaccaacatggagaaatcccatctctactaaaaatacaaaattagccgggtgtgtggcgcatgcctgtaatcccagctactcgggaggctgaggtagaagaatagcttgaacctgggaggcggaggttgtggtgagctgagatcgtgccattgcactccagcctgggcaacaagagtgaaacttcgtctcaaaaaacaaaacaaaacaaaacaaaagtagaacaggcagcttcaaaaccccatccctccattagggcaatgattaagctgcaaaaactgtcagaatctacttttttggaattctggaatctaataataaaaaacctgacaacaaccagaggaattc

SEQ ID NO: 205086 - DNA, 1000 bp, Homo Sapiens
caagagcagagttcttggagctcaactcgtactttcatgattctcttgtgccttctggccctgggtgctgataataacagcagaggatttgtatggctttactcacctagacaccatatgtagttttaagcccggataacaacttcggtttggtaatgtcttctttttcattttctcaggtccctaagtttgattttagaaaaccctcaaatctgaaggccatttctctgttggatatgtttgtgtgtatatccgctttatcaggaatgcggttgcattcaggtctgttgtcctaagcgcctttgtttgtggctgcattccatgcagttccgtctttcagtcctatgtatttactaactattcaaatgccttgtggtattcacacacagattatgtaaaataaaaaaatacattattaaggctgtgggtgctgtgaatggattattacaatttgcctatcatggtaatggcacctgttagaggtgtgatacaaaaggcagtgacaggcagtgtaatttagtaattgtggccattgtactgtatggctggtcagttcaccaggcaagtacaaaggaagcagtgttatagcagagcaggggtgggtacgcttaatagagagagctagttgtgtactgaaagagacttttggtggaaggctaactcccagggggcaacttagaatgagttgaaaagaatgaacaaaagtacaaaaatggtacaggttttcctatttcagctcttaaagtgacagacgagttacgttggtgcacattgccagcactttctcttactgccaaaacagcttttttctcccagaatacccaaagttgccttgtcatatggcagtcacatataatgttctcttttcttctcctgtatgtaaaacacattgtgtcaaagttcagatctaattggcataggggcaaatgcactgtattcaagaaaaccatttgtttagcatctacaatagtatttaaagagcacataagtaaacagattc

SEQ ID NO: 205087 - DNA, 1000 bp, Homo Sapiens
tcctggctgggacgggaggcaggaccttatggggtcaaggctatgggtttagagcccagctgaacttgggttccagttccggctccaacacttaactgtgggatcctgggagcctcactggtctctctgaggctgtctctttatctttgtacatgtgaacagtggtccctgctgggcaggctgatgtgaggttgagtgagagaaagtgtgcaaaagtcatcagcacagtgcctagcagatatttatgctcaataattgggagggttggctgggagtggtggctcacgtctgtaatctctgcattttgggaggctgaggcaggaggattacttgaggtcaggagctcaagatcagcctggcggccgggcacagtagctcacgcctgtaatcccagcactttgggaggccaaggcgggtggatcacctgaggtcaagagttcaagaccagcctggccaacacggtgaaaccccgtctccactaaaaatacaaaaattagctgggcgtggtggtgggtgcctataaccccagctactcgagaggctgaggcaggagaattgcttgaaccggggaggcagaggttgcagtgagccgagattgagccattgcactccagcctgggtgacaagagcgaaactccatctcaaaaaaaaaaaaaaaaagaccagcctggccaacatggtgaaaccccatctctactaaaaatacaaaaattagccaggcgtggtggtgggcgcctgtaatcccagctactcaggatactcgggaggctgaggcaggagaatcacttgaacctgggaggcagaggtcgtagtgagctgagattgcgccactgcactccagcctgggcaacagagtgagactctgtctcaaaaaaataataatgataattgggagggctggttattgttgtgatcgtcattttctctctgctccaccttacttccttccaccaagagtttgggctgtgagcttgagctgggctgtgtcacttgcaaatca

SEQ ID NO: 205088 - DNA, 1000 bp, Homo Sapiens
ggtagggtgtggtcgagtcagcacgctgcagtgccaagtacttcacaagagggtgaggactgctaaaggcagcaggtgccaaagcccaggatgctgggctggagtccctgaaatccctggggccgaagtcaggatggatggcaggatgtgtggtgggagagtgagttagcacctctgtcatgggaagggcggagccttatcctccagttaccttaaggcagacaccttcctctcaatgcggaccagagggagggcagcttctgcagccaaagaaagcaactgctttgggattagggaacagcccccagagaaaggctttgacgtcgatgaactctggaaatctagcctgcccctgctcctgcggctttgttctgaagggaggctggccctgttcacttgtttaaaccactgccaagtgccagtctttgtgcctgttagagaaactgacacttcaatagaaattcatcgattggggtccgggcgcggtggctcacgcctgtaatcacagcactttgggaaggcgaggcgggcggatcacctgaggtcaggagttagagaccagcctggccaacgtggtgaaaccccgtctctaccaaaaatacaaaaattagtcgggcatggtggtgggcgcctgtaatctcagctactcgggagcctgagacaggagaattgcttgaacccaggaggtggaagttgcagggagccaggatcgcaccactgcacttcagcctgggcaacgagaggaaaactctatctcggaaaaaaaaaaaaaaaaagaagaagaagaaagaaaaaaagaaattcattgattggggctgaagataaccactttgccaatgactgaaaatggctaagctggtaaagctagtccttgaatttctcaggcaccaatacagctttttaaggatcaatctgagctgcttagaagggtctaaaagagagagagctcctctctggaaagctcgcactggaatggagaacacaagcaggaaatgtgaaa

SEQ ID NO: 205089 - DNA, 1000 bp, Homo Sapiens
atgcaaacattattttctacttgtggctgtatgtggaagaggttggggggcagtttccttacctgtaaaatgcggatgacatactgcttccctcatttggtgatcatgaagattaagtaaataaagcaggacctttgaccctaccctttttgccagaggcacacccagatcccatgccttttccagtgtaatgatctttactccaagatcttagaaaacacccacaattcatctgtcattgtgacaaatataaagtatagcaacatgctatgttgaactggaaaaagaaatgtaaacgtctaaccttaaaaaataagtattttcagacaggcgtggtggctcacgcctgtaattccagccctttgggaggccaaggtgggcggattgcttgagcccagaagtcccagaccaccctgggcaacatggtgaaatcccatctctacaaaaaagttataaaaattagctgggcatggtggtgcacacctgttgtcctaactacttgggaggttgaggtgggaggatggcttgagactgcgaagttgaggctgcagtgagctgagatctgccactgcacctccagcctgggtaactgagtgatattctgtctcaaaataaataaataaataatggtacagaagccttaggaggataacaaaataaataaagcaaggatccaaagaagtatgggacatgaggatctagattttgtgtggccagaagcttacataatttgggtggctttctttaagaaaaagaatgcaaagtaagatacaaaagtaagtatgaatgtagacccttggaagaggctgtgcaagtgaggggccctgaagcttaaacctcaccagcttcccagtaaaccattgtttctgtatgttttgtctgctctttaagatatctgaagtatttataagaatcagccatcctaaaactttaattgcactttaaaattttaagcatatttaattaaatgtgtaaacaatgtttaaatacccaaaggttt

SEQ ID NO: 205090 - DNA, 1000 bp, Homo Sapiens
tagaatcaactttgaagttaatgtagtgagcttatctagttctgctgggacaaagcagaagagaatgttttatttggtacaagccattaataagagaaaacaaagcaaaacaactggaggtaactagaaggtaacacaaaaagttagtgtttgattttgacatcaaacgcttccctggacattcaagactttatgcaaccactttccaaccctggcattactgggaaagaaaatttcaaatgctattttatagcactggatctgacaaagactcttccatcaaaacgtcagtcaagcttctgcaagccctttgcttgactaggccagactttgggcttccctctctgtccttgtataatagaatccagttttttttttttttttttttttgagacggagtctagctctgtcacccaggctggagtgcagtggtgcgatctcagcttactgcaacctctgcctcctaggttcaagcaattcttctgcctcagcctcctgagtagctgggattacagacacctgccaccacactcagctaatttttgtatttttagtagagatggggtttcactgtgttggccaggctggtcttgaactcctgacctcatgatcgcccttctcctcagcctcccaaaatgctgggattacaagcatgagccaccatgcccggccagaatccagtttgagcaagaatcctgctaagccaaattaaccaagacccctactctggtatctgaccacccttgccttcagcaataaactgtcaagtcaatttagccagaaacaccttatccctgacaattcctcatagtaattttccatctattgacctccaccctgctccttgtaataaatccctacttatcctttttggagccagagttgagtccagtctttttccctcactacaagacctgatgccaatcaccatggaccccttgcataaagcctaccttgccatctttgacaagtatcatgaataatttttctttaacagatc

SEQ ID NO: 205091 - DNA, 1000 bp, Homo Sapiens
ggcgcagtggcttatgcctgtaatcccagcactttgggaggtcgaggcaggtggatcacgtgaggtcagaagttcgagactagcctggccaacatggtaaaacactgtctaaagatacaaaaaagattagccgggtgcagtggtaggcgcctataatcccagctactcgggaggctgagggaggagaattgcttgaacccggaggaggagattgcagtgagtcgagattgctccactgcactctagcctgggtgatggagccagactctatctcagtcaatcaaaaaaaacaaaacgttgataaatatgttgacgaggccatggtgaagaatagagtttttcccatcgtggttgacactgatttgtgagtaattgctcatcttctaatttttttaaaaaaatagacacagggtcttactatgtcgcccagtctggtcttgaactcctggcctcaagtgatcctcccccacaccttggcctcccaaagtgttaggattacaggtgtaatcttataatcctacaggtggcacccgccagcacgcccagctaattctatgtgtgtggttattttgttttgttttgttttgttttgtttttgagacggagttcccttctgttgccaggctggagtgcagtggcacgatctcagctcgctgcattctccgcctcccagattcaaacgattctcctgcctcaccctcccaaattgctgggattacaggcgcgtgccactacgctccagcgtgggcgacagaggaagactccatctcaaaaaaaaaaaaaagaagaaatgaaagaaagaaatgaaattggaaattggcttaaaaactcaactgagtgatcaccacttccttctttaagaactatgctcacaaaccattgattcgaataaaaagacaggaaatctgggttctagtctagctatttgtagaaaacagaagaagttacacaggtttccggtcttcagttccctaatctgtaaaacaaaatggctgaattc

SEQ ID NO: 205092 - DNA, 1000 bp, Homo Sapiens
atgaaaggtgaatggatttcttttcattttttctttttattttccatgaatcccaaaatacccagcaagacatgctgtctctgagaaatatcctgttacctaaaatgtaatcagttcagtccaaaaccacctgcccagcaaggcagataggaaaattaaatgaagagtatgttcctccagctataaactaaggtgaaatttctatagaggcagaaaaaaagtaaaagtaccagagaaagctaggtttttatagaaaatgctacctgccaccaatatagttagaaaatagaggtttagtaaacatcagaaaaaggaggacaatctagttcttcttattctgtttcttggtgcttgctggtattagaaatccagtcctcttggcaagatttctgagaagcaatggacatatttttatgcccatcactgacctctttgagtcatgttcttatggtggattctttcccattttctcttccagacagggcgcctcccacattgcacttgacggctggctacccaaacgtggccttctgttgggctgttgtatttttatgtagtggcttgccaaatcctgtgcctaatttaaacttgacccattcccagcctccctgcactgtctctgggtttgctgttgtgcccatgggcagggcagctgggcctgcagtgtagtgtagccatcatctgtttcaggcttagctccacccagctctaatcaaggcctcaagaagctctttctattcacaaccatgtggaatgcaacatttccacaactttgcaaagcattttgtaaggttgcctttaggtcaaggtgaacttaaaaagcagtcgtgcaatgaggctagaaaacaattgctggatgaacgttaagaaaccactcattccccaccttacgaaagtgaaaagtcataaatgaattgattttgtttagcataatcgaatgacttcttggctagtgctttttttttttttttttccatttctcctcagctgtggagaattc

SEQ ID NO: 205093 - DNA, 1000 bp, Homo Sapiens
gaggaggaagaggattctaagaatgtcaaaggaggaagcatttcctctagctatttgattgtgaggttaattttatgaaacaaaataggtgtgaaccttttacttacagcttttttatctcacccaatactgcggccgggcttccctcatccggcttttctttcattcaaaaaagaaaaaaaaagtgttatcaaatcccagaactcagtcccccagcatctgtttacacttcatagagtgactgagtatgtgtgaaaagaaaatggcagcaacaagaaataaggaatgaccccattcctaaactcgaggatattcagtttctcccctctttcattctccccttcctcaatttccatccaaacaacctcactctgtgtgtgtggaagtttgctatttgatgctcaaggttaattttaatacttaaatgattcagctgttagttcttcagcaacctgtgtgattccctctgcttttggtgactgtataataggtacagagtaaacaacaggattcgttttcacctacactcacaatggaaaatcctttcatttgctttaaagtcatacctctcaaaaactaaaactattttaaatactttattatttagttaaaactattcaagcatatcacaaaacatgactgaacaaagaaatatgaaaaggaagtgtcggggaagaaaggattcaaagttctgatggagtcccaacaaaacaaaataacaatgatcattttagtatcttatacattttccttttctatttcaaagaaaatctcaataagcatgctagcctgtaacatcatggttttaggcttctagttctgttcctgcttaactacattcagtcctgtctgtaagaaccccactgggagacaaaaaacattccctttgctggcaggtggtctttttgtaagcacttttcaattgaaaacatatgtgtctgggtgtgaggaggcttctggtaagttagtggggagcttatgccagggaatgattgaattc

SEQ ID NO: 205094 - DNA, 1000 bp, Homo Sapiens
cttcccagtgggcagaacttcaagcagtgcacctggttgtgcacttttcatggaaggataaatggccagatgtgcgattatatattgattcatgggctgtagccaatggtttggctggatggtcagggacttggaagaagcatgattggaaaattggtgacaaagaaatttggggaagaggtatgtggatggacctctctgagtggccaaaacctgtgaagatatttggatcccatgtgagtgctcaccaatgggtgatctcagcagaggaggattttaataatcaagtggataagatgacctgttctgtggacatcactcagcctctttccccagccacccctgttatcacccaatgggcccataaacaaagtggccatggtggcagggatggaggttatacatgggctcagcaacatggacttccactcaccaaaactggcctggctatggctacagctgagtgcccaatttgacagcagcagagactaacactgagccctcaatatggcaccattcctcggggtgatcagtctgttacctggtggaaggttggttatactggacctcttccatcctgaaaagggcagaggtttgtcctcactgaaacagacacttactctggatatgggtttgcctaaactgaacacaatgctctgccaagactaccattcatggactcacagaatgccttatccaccatcatggtattccacacagcattgcctctgaccaaggcactcactttatgactaaagaagtgtggcagtggatatacgtggagccaagatggctgaataggaacagttccagtctacagctcccagcatgagcgatgcaaaagacaggtgatttccacatttccaactgaggtaccgggttcatctaactggggagtgccagacagtggttgcaggacagtgggtgtagcacaccatgcgtgacccaaagcagggtgagggatcacctcacctgggaagggcaagaggtcagggaattc

SEQ ID NO: 205095 - DNA, 1000 bp, Homo Sapiens
gatcacatttaaaaatgcatataactagttcccccaaaacaatcttttctcagatactaatactcattccacaatattaaacttcagatttcaaatataaggttttctatgattaaacttttagacactggaatcagacatatccaaagaatctctggtaaatctgacacacctgaattgatgtaaatttaatagaagcgtatcttgcttccctttgcaggtaatattccttttcacttgactaccacataattttaagaagaaaccagaataactctcattcatcacttttagtagttcaaaaagtctgaatctactcaaaaaaatctccacactttgatatttctaagtttaaatttgttttatttacactaattcagtttattaccttttagcggtcttaaatattttatgcattacaaaaatccttctttaaaaggcatcccatttatactttcaaaccactttcttaacataaatgcaaattaacacactccagaaaaaaaaattattgttaattccttaattgtactgtacctcaagtctatttaattctacatagttataggagagaaaaataaaaacatctaggtctagctacttgataataggtaatactctttattccaaattaaatatataacagtataataacgagcataattccgaagacaatcaaatgacattcaagtgatctaacagaaaaataagaaaatattttgatacagaaaactaaaaacatagcttagttcataagtcattagggttattacattacattttatcatcacaacaatagccacaaccccaggctatatctcatggtccctaaatctaagcagattgtttttagttgggaaaaagattatcataaacttatattttactaataatctgaaggatctcaaatatgccaagaagcctatgtctctaaaatatagcttcatcttttgaaataattgatgcttcaggaacagcaacaataaccattatcatcaag

SEQ ID NO: 205096 - DNA, 1000 bp, Homo Sapiens
aatgtggacaatataattgactcagtgggttgaactttttgaatagggaatgattaagacaataatagtttgaagggttagtcttgaaaaagagatgggctactctttcctctgacacagaaatgttggagaagaggttgaaagacagcaaaaattaagaaacatagaagacatttaaggatttggtaccaaaactgaacaactaaaagttacttggtggggctgggacttgaaagtggaaaaggtttccaactacttttgtgaggaatgtcacagaaattcatcaagaggcagagacaaagattgcatattttcattgctggcctgcctaaggcttgactgcagcagtttagaatgggcctattttcctaactttttctgtagcgcatggcaatttggaatcagaaggcagatagcgggtaatttctggagtcggcgtgtggcatggtgggtccaggaaattggtggtggtgataagggacagatagaaataatgacagagggttagtaagtccgtgctggttaagaaaactggaaaaccaaaatgatgacttctatcagaagagaaactgtctctttccctgtctttctctttagcgatgaaaccttcgctagaaattcccctacagacttctcgtgtctcattggccagagttagattacaagttatgctggctatctaccttttgcctctccagtcttttctacgctactttgtttcctgggagactgacgttaagaactgcaacaatagtctccagtgccctgtgtgtttctggtaggcttggccagtgggagaacttcaggagatctaagagcagagagtaaggtgggtgtatttataactaaggttctctccctggtaggtaaccattgctcctttctaatatttctctctaaagagttctctctgggttccactaaccctttacccgctttgccctttctggcctcaggatggtaacagctttcctgatgtttattactagccctagaattc

SEQ ID NO: 205097 - DNA, 1000 bp, Homo Sapiens
acccaccaggccccacctccaatattggggattacaattgagcatgagatttgggtggggacatagatccaaaccatatcaccaagtcctctggatttccttccaatgttcctattctgtggccagagtaaatggctcaagtgaaaattcaactaggctctaatccaaggaccttgggttggtcacttacctacctgagacaacgtttactcacttataaataggaataataaaagctaccccaaggcctattgtaaggattacatgagataatgaatattaagcacttactatagtatcttgcacataatcggccctcattaaattcttgttgctgttgagattgtagctgtaaagccaccgtggcctttgacgtcatgaacagtgtcggctaggtgatcgaaacatctgcctcttctctgcagatgtcagacgttgtcaaagtcaccctccaatgacccaactttacttctggcaccatcctgggactgacaatttgtcacgcagacacaaagaaaaaccttctcatggaccctccaaggagtctaggttcttattatgaaccctcgttttatctgttaattcagtacatatttatgaagcacctcttctgcatttattccctatgctgggaataaaattttagaaaaaacaaacataactcatggcatttatggtctttgtttttaattttttatcttattttatttttaattaattaatttttgtttttttagagaccaagtctcactctgtggcccaggctagagtatagtggtgcaagcatagctcaaggtagcctcaacctcctggactgggagcgatcctcccgcatcagcctcccaagtagccaggactacaggcgtgcaccaccaagcccggctcatttttttttttttttttcgagatggaatttcactcttgttgcccaggctggagtgcaatggcgtgatctcggctcactgcaacctccacctcccaggttcaagcaattctcctg

SEQ ID NO: 205098 - DNA, 1000 bp, Homo Sapiens
tgttcccttttctctgcaacctctccaccatctatttattgagtttttaatactagccattctgactggtatgagatcatatctcattgtggttttgatttgcatttctctaatgatcagtgatactgagctttttttcatattctttttggccacatgtatgtcttcttttgaaaactgtctgtgtcctttgcccactttttaacggagttttttttcttttggaaatttaagttgtttatagatgctggatattagacttttgtcagatgcatagtttgcaaatattttctcccattctgtaagttgtccgtttactctgttgatagtttcttttgctgtgaaaaagctcttaagtttagttagatcccatttgtaaatttttgcttttgttgtgattgcttttggtgtctttgtcataaactctttgcctgtttctatgtccaagatagtattgcctagattgtcttccaggcatttcaaaaaacctgctgtttattttgttgatcttttgcattttttgtctctttcatttatttccactttgatctttttttttccccttctagtaattttgggcttggtttgttcttgctcttctgtttacctcaggtgtactgttaggttgtttatttgaaatttttctactttttgatgtggacacttattgctataaagttctctcttagtactgcttttgctgtataccataggttatggtatattatttctattttcatttgtttcaagaaatttttacatttccttcttaatttcttcctcaacccattgatcattcaggaagatgttgtttaatttccatgtgtttttatagtttccaaagttcctcttgtcgaattctagttttattccattgtagtcagaaaaaatacttgatatgaattcagtttttaaaatgttgttaaggcttgttttgtgacctagcatatggtctatcctggagaatgttctatgttctgatgagaagaaggtgtattct

SEQ ID NO: 205099 - DNA, 1000 bp, Homo Sapiens
cccatattataacttactgtcatcaacacaatttcgtggcagacaaagaggtatgaaaagtattcaagctctggtggaataaaattaatatgtctttacagctgaaggagaaggcatatcagtgattctcaaccttggctgtatattagagccaccagaggagatttgaaaaatcctgatgcctaggctttagccagaccaattacagcagaattttgggagatgggtggaaaggtcacgcatgtagttgttaaaaaacaagtacattaaaatatcataagatggccaggcacagtgactcatgcctgtaatgctagccctgtggaaggccgaggtgggcggatcacctgaggtcaggagatagagaccagcctggccaacatggtgagaccccatctctactaaaaatacaaaaattaactgagttgggtggcatgcacctgtaatcccaactactcgggaggctgaggcagaagaatcacttgaacccaggaggtggaggttgcactgagctgaaagcattccagcctgggcgacagagtgagactttgtctcaaaaaacaaaaaaaaaattcttaagaggctcacgtatctactcaaattgtggtagaagtttctattcttgcaacctgagtgaggttgcaaactttgaccagatgaattacagaagggtgtaatttgaatccagtagaaggatatggactagaagtcccctgttgtcatggtgactacaaaaaggactcactgtatccacatgtagctcaggtagaatcattctggaagcctgcaaagttcagatcctgttccccaatgtcaaatctctaaccgataatgaccttattgtgttaataaattttcaactctatagcttcaacttgtttaagatgtcaaccccagttttcctgacaaggtaactatctcacagccgtgaactgttgagccagtcacctcaacttggccccctgagatggtaactctatcatggttgtcaattcttgac

SEQ ID NO: 205100 - DNA, 1000 bp, Homo Sapiens
agaagtcagtggtttgaaggggtgcccacccttgctccgttgggacatagggacgcaggtgcctgtctcagcccccacatgtgcacccccaggggcagcagcgtcccctccagtctctggtttgcatcatgcacaggagtgggtgggtgggagtttcagtctcccagagagcatactgttgggccatgctgtctctggcctcctcacccatggaggtcctgccccgcccccatctgaggctgggtggccgaggggtctgttctcagactggggcctggcgctggcccggtttcctggaggaggaagcgggggagtgacctgcggaggacttccagcctccccttccgcctgctgtgggctgcatggcgctggggctctgcccagccctggagagtgttggctgctctccttccagctgacatggaaatgccatgcagggcacgcacgtggggcactttctgctgagtcaggtttctctgaccttcctgaaatgtcacttgttctgtaactcacaaaaactggggtgctgggatatggtgccttccttctcccggaagtccctgccgaggggggcggtggtggggcattcccagggggtgtttgtcctttgctgtctttactttcccaccttgttccttgggcctcccctgacctattgaccctgccacagctcgctcaccccaggtccctgggggctgtgcaggattccgggtcctccagggccagtgtgatccttgctgggttctcagagtgaccctggagggaggtcccctgccgaccctcacctcccgttcccaggtcatctgccccagggccaggtgtccatccaccctgactgtgaccatgtgcctgtgacctgcgtgactgacccctgcccttgggtgcccaggcctagcagtgccccatgccactgggtccccaggcatctgccaggaaaggacagctctaaagtggccagggcagcaggggtcctgatgtctgttgaaggcccttggaattc

SEQ ID NO: 205101 - DNA, 1000 bp, Homo Sapiens
agaggaggcacagcctggccctgcccatggcatccccaggcctgtcctcagccccacagcaaccacctgcatggcctgccaccagctactcctcctacaggagagctcgccgtgtcccgagggccatctcaggtcagggtcactgcttcccgccccttccccagtcctctccaaggccctggtcacagagctcagaaccagcaggcagaagctggagctatgcaagcctttattggggtccgcggggtgtggggtgagtggccaagactggcctctgtctagaaccctggagtctcactggagatccaggttgggggccacctggctgaggaaccatgagacaccaaagatgacgccgagggtcttggggatgtccgggtcgtctgcaaaggcctgggcgccttccaggggcaggtgcaccacctcaatgagctcaccctcctccaccaggcccccacctggaccgctacgctgggcatctgtcacctctgtgtagaacatggtctgtctggagccagtcagtcccactccagacctacgggttgagacagggtctgctgagtcacccacgctggccccgctggccccctggcccttctaccaccctccaacccaccctctccactctgctccctccagccctccagtaggcaggactctgggatgccctctcccacccggattcccacctggtgtgcacgcccgtggcccctcccgcagcagggcatcccttccctgatcacgttgtactcgccaggtggggtgggtgttgtcgatgtgattaaggaccctaaccggtgacttgagctcatcagaagggagagcatcctaggcgggcatggcccgatcacgaagccctccagagggtgtttcaacgccagaaagggagaaattcaggccagtcctgctggccctgaaggggaagcaaccgccatgctgggaagggccaacagccagcagggaggtgggacccagtccccagccaccaggagctgaattc

SEQ ID NO: 205102 - DNA, 1000 bp, Homo Sapiens
ttgtgggtggaggataagaatttcattttctttctttcttttcttttttttttttaacactagtgacctgagacagcaacactccgtgttttcaagcattcttatggatgaaagttgttcagttccacttggcaaaggggccattagctaatgtcttagacctgtctacagagactgtggttagcacttgagggcctgtgcctaatgaggctcatcttcacctctgacaacacagggaagtttcctacacagtttgtattaggactgcaaggagaaaactgccccaaacagatctttagcttgaaagccacagggactcccattacaaatgtattgttttgaatagagcattctttttctaatatgtttttcaatataactgccatacacatacactacaaagattctacattgagtgatgactcatcttgtgaatgtggaataatacttatcctctgcccctaccagcagccctgctgtggactgttaccccagagaggtcttgaatgttattattaaaaggcattttaatggtgggctgtcatgaaaaaaaaaaaaaaaaaagagtcatgaaaccacacagtatctaaggtgagcatccggaaacattcagcaattgtctaatccttttactccatcttttgttgactcccccacataactgaattctccacatctcttgcctcagaccttcttcagaggatagtcattgttaggaccccaagatatacaataagagccatcaacacataggtcaatgattgcttagaaagcaaaaaagcatttcaatgcatcttccacaataatacctttagagtctctggtatagcagatgcggcaggtgccccagcagtttttatttcagcaagcaccagaggtgatcctgacataggtgctttgtagggtacatttagaaaatactaatattttacagaaatgggaaataatactaaaacacaaaaatagaagtggaaagagtgaaggatgagggatggaattc

SEQ ID NO: 205103 - DNA, 1000 bp, Homo Sapiens
ggaactcatgcctggtaccttgaaacaaccaagaggcagagaaagaagcaagcgcaaatgcacatggagctcaagaggagcgtgattttaaatctctcttcctgattatcttggctgtttcttcagcttccacttttcttcctctcttcagttcactttcatttccctatgttactcctcaaagaatagggaacctacacgtctctcactgttcatttccacctggattgttttctcttgtcacgtcaaggggtacaactgtatacttagacatttgggtatgcttaagttacttctataaaaaagaatcagtctaaacattctgccctgctgaatggcaaaacaaggaaaaggttttctgttttccaaaaaaataaagatgttcttcctgaataaataaagctacccaaacacaaatttttaagaaacacacttaaattatcagtcccaaagaaaaactagcatagtaattaaaatactttccctaaatgttcatgcctgaatctgggaccttgtcaaagttcattctggggtgcatagttccattacagattatcatgcacgaccctgaactccctgagtagaccgtatatctccacttcaagctcttattcctgggaaaatctttccaaattaaggctgcaggcacttatctacctcagactctcattgccactctatgatatttattcaagaaatgtttgtatactaccacatgctagccttgtgctatacacaagacagacaaggttccagctcccatggggtttagcttctaggtagggaaatgtaacagtagactgcagccctaagacctgtggtgtgcttggctgagtccctcagtgtgtcttgatgagtcctgttacccctaagtaaaacaggcaagaaacaccttgctgtcttagacagcaaagaagaaaagcagatggactgggtgtagtggctcacacctgtaatcccagcactttgggaggctgaggcaggctgatcatttgagatc

SEQ ID NO: 205104 - DNA, 1000 bp, Homo Sapiens
tcagggacaattccctagtgagacagaactgcagactggtggcagaagtttctctgtattatccttgacaacttattattgtaaagatttggaattagctgtactgagtcttcatcatagatgacaggttctctctcattgtcattttcacaaagtcccaagataaagagaccctccaggtagctgaaatgcaggtacccaatttaccactggagccaagattttggtttcagaggggacaaacgaggtaagtagtactcattgggtaccatccatttcaccaccagaaaccaatttcaccaagtttaacagttcttcctgctgcctgggcaggaggcggccttgtctctttccgcagtactctgggagtctaccacaaggcagcagagccttcgagttagagcagctctttggaacaaacatcacctctcttgctaggtgaggcctctcacccaacaggctgggagaggctgtcacagaactcagaactaagagcctacaactcattctgcagctcaagtatgagacaggctcactgtacagcaatttgtactggtgatccctcccctggggatgacccccatgactctggcgccctgaggcagggcacctgtttcagaatcccccgctaatcctccttactcccttcccagaactctaagcatccttgtacagatggcattggtactggcaagactgtggtctgtgagtagtcaggaagccagtcgacagcacctactctgttattcacccaaagcctctgtctccactgcagccacggagttgaaggctggtgggggcagggtttggggagtgattcaagaactgatcatccctctgacctgcgctatggacctgagcagcagtttcaggtgtgaggagcgtggaaaagggaaagcctcttagagcttatgtgtctagcctgggtaagccccaggaccagcatcagaattctgtaatttgaatgagaactgagctgagaactgcagagaaagaattc

SEQ ID NO: 205105 - DNA, 1000 bp, Homo Sapiens
caccctggtgaacccttgtcaccagggcccatccccaggggcacccgcccatagggacacaggcacgtccctgggactacaggcctggcactcaccgtgccctagggcactgggcagtgtgcacagggctgggtggcgtcagggaacccccctccactaactggagcagatgagtgctgggcaggaacagtttccagacccaacaagaggggatgttatctttataaagagtgttgatctttctatcaacactcggatgtcatcgcctgtggcttatcctcggagcaccacaggctcttaaagaaaagaggggaaggggcagaggaggagcagaggaggggcaggggaggagccttcctcctctcaggaactgggggctccgggagtggtggaggtgcttctctggcgaggcctgttcactgtctctggtatagagagcagggactggaaggagggtcacaggcatcaggggagggtgagctgctggtgtgtgtctgcatgcacctgcctgcattcatgtgtatgtgtgtgtaagcagtgtgtgcatgtatgtgtgtatgtgtgtgtaagtggtgtgtgcatgtatgtgtgtacacgtttgggggtggggagcgggaggaagggtggggaggggatgctggggagtcaggaggagctgagtcccatgtccgcgcactgatgaagccctagggcttgtgcacagatgggaagtgggcgctcagagctgctgcacaccggcctgagaccacagagcttctgccagtccaggtcaggagtcttggcctagagtgctccggcccttagtggctgaggccagggtggcctaagagctggctagtgggtccttgggtggacgttgctccctctgcggaccccttctcattccccagatggaggtggggaggggaagggcccatgctgggggggcttgagtccagagagccccctggtatggccccaggggaggcagaggagggggctggccccaggggaggcagag

SEQ ID NO: 205106 - DNA, 1000 bp, Homo Sapiens
gcttacactgttggcctggaaaagctgcagacactcaacactagcctgtgaaagcagccaggagggaggctgtacccttcaaagccacaggggtggagctgcccaagaacatgggaacccacctcttgcatcagtgtgacctggatgtgagacctggagtcacagaagatcatttcggagctttaaaatttgactgccctgctggattttggacttgcatgggcctttgtaaccactttgttttggccaattcctcccatttggaactgctgtatttacccaatacctgtaaccccattgtatctaagaagtaactagcttgcttttgattctacaggctcataggcagaagagatttgccttgtctcagatgagactttggactttcgggttaatgctgaaatgagttaagactttgggggactgctgggaaggcatgattggttttgaaatgtgaggacaggattggttttgaaacgtgaggacatgagattaggaggggccaggggctgaatgatatggtttggctctgtgtccccacccgaatctcatcttgaattgtactcccataattcccatgtgttgtgggaaggatccagtgggagataatttgaatcatgggggtggtttcccccagactgttctcgtggtagtaaataagcttcaggagatctgatggttttatggggggtttctgcttttgcttctctctcattttctcttgccaccaacatgtaagaagtgccttttgcttcccgccatgattctgaggcctccccagccatgtgaactttaaatccaattaaacctctttttcttccagaaaaagtcttccaaacctagtctcaagtttgtctttatcagcagaatggaagtggactaatagaggggcatttaagggaagagcaattccttgaccagggtattctggaaagccacagaacaggcataggaggaacaggcagccgggaggcaagagaagggtgggagagaaggagga

SEQ ID NO: 205107 - DNA, 1000 bp, Homo Sapiens
cttggctaacacagtgaaacctcatctctactaaaaatacaaaaagtagccaggcatggtggcacacacctgtagtcccagctactcgggaggctgaggcagaagaatcacttgaacccggcaggtggaggttgcagtgagccgagattgttctactatactccagcctgggtgactgagcaagattctgtctcaaaaaaataaaaataaaaataaataagaggccaggtggctcatgcctgtaattccagcactttgggaggcaaaggtaggaggattgcttgagcccaggattttgagaccagactggacaacatagtgagacctcatctctacaaaatataaaaaattaattagctgggcatggttgctcatacctgtagtcttagctactcaggaggctgaggctggacaactgcttgagcctgggtggttgaggctacagagttgtgactgtgccactgcactgcagcccgggcaacatagtaaaaccccagctctaccaaaaaaaaaattaaaattaaaaatattagccaagtgtgttggcatgtacctgtagtcctagttaacttgagaggctaaaatgggaagattgcttgggcccaggagtttgaggctgcagtgagccatgatcgcatcactgcactttagcctgggagacagagaaagactctgaccaaaaataaaaataaatttaaaaaatgacctttgacttgggggttaaaaaaataagatctgtattgtcgatatggaaagatcactaagacataatattaagtgataaagatggaaaagaatatatatatctatctctttggtatttttaaaagatacatatgtaatggtacatgcacaaaaaacgtcattataagaagccatttttactagctacttttgtgcagaatgaccaggtgttaaagaagacaaaggtttaacatttttcattttgtatctttctgtattaatataacaaatagcaattgtgatattgtttgaattc

SEQ ID NO: 205108 - DNA, 1000 bp, Homo Sapiens
gcaataaaaaatgataaaggggatatcaccaccgatcccacacgaatacaaactaccatcagagaatactacaaacacctctatgcaaataaactagaaaatctagaagaaatggataaattcctcgacacatacactctcccaagactaaaccaggaagaagttgaatctctgaatagaccaataacaggatctgaaattgtggcaataatcaatagcttaccaaccaaaaagagcccaggaccagatggattcacagccgaattctaccagaggtacaaggaggaactggtaccattccttctgaaactattccaatcaatagaaaaagagggaatcatccctaactcattttatgaggccagcatcatcctgataccaaagccgggcagagacacaacaaaaaaagagaatttagaccaatatccttgatgaacattgatgcaaaaatcctcaataaagtactggcaaaccgaatccagcagcacatcaaaaagcttatccaccatgatcaagtgggcttcatccctgggatgcaaggctggttcaatatacgcaaatcaataaatgtaatccagcatataaacagaaccaaagacaaaaaccacatggttatctcaatagatgtagaaaaggcctttgacaaaattcaacaaccttcatgctaaaaactctcaataaattaggtattgatgggacatatctcaaaataataagagctatctatgacaaacccacaaccaatatcatactgaatgggcaaaaactggaagcattccctttgaaaattggcacaaggcagggatgccctctctcactactcctattcaacatagtgttggaagttctggccagggcaattaggcaagagaaagaaataaagggtattcaattaggaaaagaggaagtcaaattgtccctgtttgcagacgacatgattgtatatctagaaaaccccattgtctcagcccaaaatctccttaagctgataagcaacttc

SEQ ID NO: 205109 - DNA, 1000 bp, Homo Sapiens
ctgcgaactgagaaaacatttctcgaatggtattctggaaatgcccaatgccctgaagcttggtttctaagaaagaacacttttcatcaacctgctgacttagtgtactatgctcttgagctatggtttccacttgtaataaaacatcagaggttccctttgagtctgaggcctctaccacaaggtcctgtgcaagtcttttagccaaatctacctgatgcttcaaggcctgaagtgatttctgctgagtttgcaacatggtcaggtatttgttactgtaagcctgggatcccagcgaatcatggatatctagctgctcctttgcacactgaagctgccttttagattctttggaaacttcttgaaattctttaaacttctgagtcatgttctccagacagaatttcttactgtgaagttgttcagtgaccatgtccaccttctggatcagtgacttattctcatctgtaacaacttctttatctatctcacagacactgagcaagctattggctgtgttgttcagtaattctaccataccaaagtgttggtccatttccttctgcagagactttaacttggcaatagaattctctccttcagcaggatccaagcaaaattttatttcctccaggttgttttggcatttgtctatccatggccagagagtctctacttgctctttatacttaagggctttttccaatgactcttttaacttgttttctctttctttcacctgcttattaaatgtatcccaattggttttaattgtattaagctgtaactgtaaggctgccttctcagacccttgtgtttttaataacagattttcaccttctgcaatggttttttcatacatatgagactgagcggtcaaagttttactaaagtctttatgatctttaattaatgactccaagacatcgagtttggcagatattggatgagatttgttttgctcttctttctttgtatccagccaagcctgaaaatctct

SEQ ID NO: 205110 - DNA, 1000 bp, Homo Sapiens
tcaagattatgaaatggtccagtgagtaaaaaggtttttcttttctttcttatataagcttattcaagtcatccctttttagactagactgaagacatccattttcccagctccccaaaatggcaatgattttattctaaccgcatctaaccttccagaagcactacttgtaacatgttgccccactactttctaacctacaagggctgtcagttcttacttagttctcagaacttagcctcagtttggctctcttaagaaccagttgggaggtctgtgcagtaccttcacacagtaccaagtttgacactttttcttccaaggacaagccatttcttactttaacgagtctaggctcccatgctggccttccagatcagagcttaccttacctgcccagtattactccccaccacttccactgcattctctgcccagtttatgccctctttactgaacagatcgtcattgaactcagttccattcctccatgcatgtctgtgcttccactgatttctgccttcctcattactatctaaattctacccattccttcaaggcccagttcacctcttgcctcacccagaaagcttcccctggagggttctggtcctcacagggccaccaccccctatccttgtaacactcatgactctcaattcagcactacatggtcttctagctctctgctttttcacttttaagttcctgggatatggaaaacatttcgtcttttctgagtatttgaagcaatgcagttaagcagttgaaagcacggatgcagaaatcagacaaatctgggtttgaatactagctccaccattgactatctctgtatcttctttgtgcttgatatagtttggctattttgtcccttccaaatctcacgttgaaacgtaatccccaatgttgaaggtggggcctactgggaggtgttcaggttatgggggcagatctctcatgaatagcttggtgcccacccacagtaatgagtgaattc

SEQ ID NO: 205111 - DNA, 1000 bp, Homo Sapiens
ttgattgctgtgtgggtggcctagatctttctcatctgctttgctgtaccagcaggattgtttatccagggctcagagccccaggtagtcctctagcttggaggggccagaaaaacaaacctggataatcatagccatgcccttaatctgatgttttttctttttagtcatctaggctctaggttcctgggggtgggagtcagaagcagagactcctaatacactcatcttcatactacctttgcagtcaaggctcagtggtaacttttcataagaaagttgtaattacgtgatatctgcttcatttaaaataatatatgatactattatatatcataatatatataatatgcaggcacctatagacttcactactcaactcaataactggaatgtttcaaatactcttgcatctgcctgtgcatatgtatcccaccccccgcctaccatcagagggaagcatttgcttgaattttgccctgacctttcacttgatttttttaaggttttatcacatatgtatgtatccctattcattattttttagttttgcatattaaggtaaaattattctgtaggtagccttctgtaatgttttttccccacttaacataatgttaagattcatctctgcacctctgtggagttgtagttcatttatcttcattgctgtataatccactgtgacaagttagtcaccctcctgtcaacagaatgtctggagcttttctaaagtcttttgtttctttagcattgtgaacaatgcttccataacactcctatgtacacatactagtgttatgcatgagaatttccctaccttggagtgaaattcctaggttacagaatatgagaatgttcaagattataagagagtgccaaattgtttttcagagtggttgaaccaacttatactttctccagccaggcagttgcaatattccagattaccatgttctgtgtcccatgtgatattaagagtacatttagaaatgaattc

SEQ ID NO: 205112 - DNA, 1000 bp, Homo Sapiens
aagaaaactaacacccagggtttgaggtacttggctgggaccaaaagtaagtgatgcatccaaggctagaaggtagattaaatgactttttaatctgggttttccttgctaatttctaaatacactaaaaagagaaaactttttagaaagttttctttctgaaagagaaagccttttagaaagttttctttctgaaagagaaaactttttagaaagttttctttctgcaagagaaagccttttagaaagttttctttctgaaagagaaaactttttagaaagttttctttctgaaagagaaaactttttcaagtgaagtaaaacttctttgaaatattacgtgtttaaactcctaggctgtaatttcatatgcttttatttactgtcttgttctattaaaatgcaacctatagcaccttttaatgttcacacagtgtttgaagtagagaaatgaaacttttatgagtaagtggagaaagtagtgttaactttttttttcattaatgagaaaacaataggcagcaatgggtttaggagttctatggcgaaaaggcatttcctgagattgaatcagtggcaaaaggagagcctgttatgttttgctaaccaaaagaatgtgggaacattttagctaaaatgcaagttaaaactgtgaaacatataaataagcatttggtatgcttttcagtttccacaacagtagtcaagccagtgagccctgtggggagggctcatgggccctggactcaaagagctcagagtatgtctacctggggaactaaaccagtgtgcatgaaatgaccagagagtgatatggggcagatagggtttcatgccagggtgtgtaccatggttgtgtctggaaacaagggctaccgaggcctggatcactcagaggaggcatcagggagaatgtactggacttgggctcaatgtagagatgtagggggtagctctcttttgactcctaaaattacagtgaaaaactgggttctcgtaa

SEQ ID NO: 205113 - DNA, 1000 bp, Homo Sapiens
ttcatccatcccatttgctcatatactatttactgtgcacttgcatgtgctaatttttgccttaggtgttttaagaacaaagacgatgaagacacttggagtgtagtgagggaaatagggaaaaaaatgattaggacaatgtgacaaatgttagaatatacagtctaaggtgggaaaataaggaatgttaaactctggaaatatggctctgtttccctactaataaactcaagaacaattaatattcgtaagaatgtgacctctgatttatgtggaatatagggttagttctcctaatggaaattcccagggttactttttcagttcagttcagttttttccagtttttttcagttcagttttttccatttatactccattctgggaagaattttcctcactcgatgcaggtttagtgacattgaggtattcccttagaagtctcattaggctgttcagtttgaaggttcagggcctgtggccccttcttgaaatgcatatggctcctttatggtttaaatccatagaactttatgagttcttttatttcagcttttattttaaatataggggatacctgtgcaggtttgttacatgggtatttgcacaccgtagaaagttttctgtaaaacttagagcatttttttaatcatcaggatacatatataactcatttttaagctctgataaagaagtctttagagtaaaaactttaaaaatatacttcactggttcttaatgtaatgtgtttctagtttttttatattccatgataatactaatatttgtgtagctttattatggcctttctgggaaattttaatctttgctactctacatgccttcacaattctagaatttctcttgctaggattgtagatgagagaatatatatctctttgatttaaaaacttttcctaaaatgaatagttttctactaaacctctggtgctaaaacaactgactgtttttttggttgctttttatagcacttgaattc

SEQ ID NO: 205114 - DNA, 1000 bp, Homo Sapiens
atatggccataataaatctcttgctttctaccctctctctgcaaaaatgttccctcctccaatcttcccaatatttgtaaatgccaccattatacacccaactgcttaagccaaaaactaaaagtcatacctttaaccgtcacaaacatttagtccatcagtcttacctctacctccaaaaaaaatccaatttcctacgtcttccatctctactgccatcacccaagtgcaaaatgctgatgtatgttgcccagaatcttgtaagatcagtctcctaacccatttccttgctttctctattctttgtatggcattcagaatgctatctggttattttcttaagcctcctacttaaaagtgaaatcgcaaaaataaataacttaaggttcttgattatatatgtgtgtatacatgtatatacatatatgtatatatacacacatatatatgatatatatatacatatacatacatatgatatacgtgtatatatatcatatcatacacatatatgatatacgtgtatatatatcatatcatacacatatatgatatacgtgtatatatatcatatcatacacatatatgatatgtgtgtatatatcctacacatatatatgtgtgtgtgtatatatatcctacacatatatatgtgtgtgtatatatatcctacacatatatgatatgtgtgtgtgtatatatcctacacatatatgatatgtgtgtgtatatatatcctacacatatatgatatgtgtgtgtatatatatcctacacatatatgatatgtgtgtatatatatcctacacatatatgatatgtgtgtgtatatatatatcgtacacatatatgatgtgtgtgtatatatatatcctacacatatatgatgtgtgtgtatatatcatatcctacacatatatgatatgtgtatatatcatagcctacacatatatatgtgtgtatatatcatatcctacacatatatatgtgtgtatatatc

SEQ ID NO: 205115 - DNA, 1000 bp, Homo Sapiens
gtgtgtgggtgggtgtatatgtgtagtaaaagcctattttaacatgaaggttaagggatgggggagactttatatcttgtagttttcacttgagtgaatactaaactatattcttatgcctgtgaacatttttggcttatattttccaaagaaatgttgacgtaaatggaagcttatgttcctagagaatttcaggagtttaaaataagggaaacaaattagaattttagaacatgggaacaagctcaccataatcaataatactcagtagtaatagaggacagtgaaacatatacgtaatcatttatactgaattacatttctgactccttttccctcacccttgaatataagaactttaatgaacaaactattggtaaatacattttgtttgctgagttaatagacttttcaggacattttatatagagccacctgtcatttaaatagcaattttttagacgaatttaaacaattatataatgatttgtgtcactaagtaatactcctgtaattcctgttagaggaacaggcagcctgtgtgaatactgcagaattctttaaaagaaagcggcaccaatggctttcaaataattaaatgggcacagtggctcatgcctttaatctcaacactttgggaggctgaggcaggtggatcacctgaggtcaggagttcgagaccagccaggaccaacgtggcaaaaccccgtctctactaaaaatacaaaaattagccaggcgtggtggcaggcgcctgtaatcccagctacttgggagattgaggcaggagaatcgcttgaaccaacaagagcaaaactccatctccaaaaaaaaaaaaccaacaaaacaaaaaaaataaatcagcctccaccagggctatcattcaagtcttcagagtctgctagtaacatgagtgatcctaatagtagggcactccaaatatccaacagtaatgcaaggacctaacttgaattgtgataattttaccagggaggaattc

SEQ ID NO: 205116 - DNA, 1000 bp, Homo Sapiens
tatttacctaagacaaagtaacttgtacaaaaatgtttatagaagttttagtcataatagcacaaactggagaccccagatactaatcaatatgaaaatggataaacaaattgatatagtcatataatggcatactactaaacaataatatggaaaaggttactgatatgtacatgcatcaattggatgaatttccagaacactctgctaactgagagatgccttatacaaagtatgcatgttgcataattccatttatataatattctagaacaggcaaatctaacgtatacagaaaaaaaattagaacgagagtaactacctagaaagtagcatgggtagcaattgactaaaagcgaggaaagagaactttctggatgattatgttctatatcctcataggggcttgggttacaacagatatatggattctcaaaactcatcaaaagtagagttaagatttgtgcatttcagtgtatgtaaattttagatccaaagaaagtaactatcaaacaaatattaaactccagttaatgatgggcatggtgtagtatttggagggaaacagtcagatgtctgcaatttgcttctaaatgccttaaaaataaggcaaaatgatggatgtatataaggataagtaaatagataatgtgataaaaaacaagtctagtaaaggttaatgatagaatctagatgattagtattctggtgttcatggtagaatttttcgactttgctgtctgtgaaacttcgaataatacatgttaggaggaaaaaactaaaaagatgagcaagtaatcagaaagttttcagggtttggtcgtttagttgtagttgttcagaaaggtaagagttttatttactaatttttaaatatggcactagctactatatttctctaccaatattttctaagccaacctatgattaaatgataaaggaatccagaagagttttcagacattcctgagaattgacttctgcttggacaaaagaattc

SEQ ID NO: 205117 - DNA, 1000 bp, Homo Sapiens
gaaaaaagccccaggaagtgtttgattcagacctcatgagatgtgagaactcttactttagcattttggattcaagactctttattcacatctacatgcagacgtgacctttccttgtatattctgcagggaaatagaggataaatagaagggagtcactttatcacccatgtgtctcccaatcaccagcagtggtcaatggacttctaaggagaagtcctcaaagggctcgtgttcctgcttgaaggctaatgcggagaagcaggtagcttgaccttgattgtatttggtcaatgtcatcttgacaacaagtagtgggaaggagaagagaggttggtagactaatgttttcaaagccatatcagaaacaaaacattgacagaggaagtttaaaacagatctaagtcataagatcgaaagacagccttgacccagaagcttgaccctgaaactctacatctcttcctccaaatttccacccaagactctgcctcattttccatgtcccaccattagttctgcccgctggactcactgcactagcctacagaagccgtgagaaatgtccacggttggagaaggtctcaccaccagtgctgagaagctagaggtgaaagaggaagaggaggttcaagaccactgcagcatggaaagaatgtgtattcctgacatctcagcttgaaactgaatttattcctcatgacagaactgtaagagatggtacatagactcttaagcatttcttttaaaatttttattttaggtttgggggtacatgtgaagatttgttacgtagataaacatctgccataggggtctgttgtacatattattccatcacctgcatattaagctcagtacccaatagttattttttctgttcctctccctccttccaccctccccactcaagcagaccccattgtctgttgtttccttatttgtgttcgtaagttattttttagcgcccacttacaagtgagaacatgcggtatttggt

SEQ ID NO: 205118 - DNA, 1000 bp, Homo Sapiens
gcttttgttatgtattggcttgctaatccttgtgttgagcagtatcagacatcacctttcttgggggcagttagtccactcttccgctttctttgtcagagggctcccttaataggagaagtcaacagggaggacaaaaaggattgaaagttgtatttaatcagggtcagagaggtggtgttcagagtgacgggcccacaggcaggctggccttttatgcttgccgacgcagatggtcccagagcattcagctaagtgaagagaaagctgcccagtgaaagctattgtagggtagcatcgttacagttgagaaaggttgccaggggtaactagagagtatcaccagtatcgtgtgatcactaggctgtgccattgaaaatgttagactgaggattgtattgggtcccttggcatcttgatgttcatatgtaagcagtattagcttacattagtgtttttaatttagttttttctgttttcttccctttgttctttccctgccttttttaatatataaaacatagacttattttaattcacaattttgtaaaaccttctgaaaacataccattatttaataatatatctcttataggctttatggtttggtataaactataccaaatttttgtgaataaattggatttatgaaaatgaggtgtaatatttctcgtttaaacagctctaagttgattttccattgctctgaaactgccctagtatatcccaagatgggtagtttgtttttctttgtgattttaagtaacttattttaaaatatgttagtatttacctgaaaacagtagatagcattgagtgcagggttgtgaccaagaactcccaaatatttatgaaatctatcttcaatttttgcctaaggcaaaagtaaaaatatgcatcccaaatgagccagaaccaaaatagtgtaacaatcattggtctcaatttaatatacttaatatactttgaatatgattttaatatgccagttttggaattc

SEQ ID NO: 205119 - DNA, 1000 bp, Homo Sapiens
acaatcacagggacttttttttttaattgaacacacacccatcaagtaaaatgaacataattttaaagcctttgtgaaatcttttatgccacataaaatcagtctgtgtacaatgctacacaaatgtcaataaccatatatcagagccaaaccagtttcataattcatggggagatgatcattaggggtatctgaatagtttggaacctcagagcaagcaggtaataattttatttaacacgcttgattaggtctatagaagaaacattttttccttctaaaagttcagcaaattctattttgaggaaaacaaaactgaaataaaatcatggcaatgatacttctacttcaggcaaaatcttgttcaattcaactgcagacccactctgcaattatggaagtcacagaacttgacaagtattgtatcaaaaatcattccatgccaaaagatcaagtttaatatttttttcataattcatcttggcctgaggctacaacaagtcctattgttatatactctgcctctagagaatgaggctgctaacagaccttggaatggtgcctggcacaaaggctcaagaaatatttgttgaatgaattgtaattaacacctcctgttgtggggatacataaaagatgttacatgaaaaatgccatctaacatgcagcaacaaatctcttcccattaagcagtaaatctacttaacaatgatatatttttggcaaggcatctgcctctgaatgatcctatagtactgaaaattctttttaaactgaaatatttttcaagatattatattattgaccttatgaaagcttttttaacatatgaaattggggttatttggctatgagtttgtgaggcataaaaatgatatgacagaagaattacagatttgtttttgcatttccatgcctaaatgtaactaatacaatgttagtttcacaaggtaatgtgcaatgttttaaatgcatttacctctccaaaatattagaattc

SEQ ID NO: 205120 - DNA, 1000 bp, Homo Sapiens
ggtcaagagatcaagaccatctggccaacatggtgaaaccccttctctactaaaaatacaaaaattagctggacgtggtggcgcatgcttgtagttccagctcattggtaggctgaggcaggagaatcgtttgaacccggcaggccgaggttgcagtgagcctagattgcgccactgcactgttgcctgggtgacagtgtgagactccgtcccaaggaaaaaaaaaagtgcttgcgaccacttgttggaacatttttataaaagctgctttaaaatccttgtgatgtaattcaaatttatttttcttctcagtattggtagctacttagtactgactgtcttttctcatgtggggtgcagtttatctgtttttttgtaattttggattgtgtcatgcacattcagttttgaggctctgggtcctcacaaaatattaggcggatggatgctgtttttgttttagaagcaattgaccttgtcatattcaagctgcaagttccaatctgtgttttgtgagctgtggttccaacaatcagttgagttttcaaagcctttccagttttcttcagatgtgtcctggtggtcagtgtggaagtcggatgataatctgctagtttcgttctcaaaatctttggttaactaattaggagccgatccacacacatgcagcttggggatgcgctcagttcattaaaaactttatggtgtcactttctcatactccttcctctccacaatgtctccaatattttctggttccctggagctcctcttttctgttttctggccagaatgctgggtctttgattacggtactctgctacagtgtttcatggctgcacccatgtttggagccgacaggtggcaaaatgagaaaagactttaaaaagtttgcatcaccctcttgggatcactactgcaccaactggagaggaagatgccctggcctgagggttttgtttctcctaggcactgtctgctgctgccaccacaggaattc

SEQ ID NO: 205121 - DNA, 1000 bp, Homo Sapiens
aaggtcacccagccctacatgggggtgtggcccagggtgggggcagaaccaagtcattcaggtgacaggacattctcttgggtgtatagcagtgaccctggaaaccctcattccaatagttatctgctccattataaaatagtgtagaagaacatttcagccactgactgcagaaaatactgtttgagaaaaaaaaatatgttctctccttacaacagtttaaagagattcttaggccagagaactcttgatgaagaatagacaatgaagagaatcaaagtgagatctataagaatcattagtaattggaatgtccacattgcataactgcagaatggagggagagcactcatgaagccagacttagcaatatctttacagtgaacagatttattacgaaagcaacgtgttagaaagaagtacacgtattggaaatgcgtgtcatccaaactgatgacattgggcacgggccattccaaaggcaaaattcgtaaaacaatattcccctctctgatataaaacagaaaagccatgaaacagttaccaaaatgcctcaaaagattcatctgttatttctcctcaatactgcagagaaaaatgtctctgtgatttggcaccagtcattagctatttaaaattattggttttaatctagtaagtaaaaccgaaatttgcaatggtttattttaataaaatatttatgatgcttcaggaaaacagctaaatagctctgatctgaaaacgaacaatgagactgaactaaattgatttctccccagtaggacatacagctcaaaacacacacacataaaagagtgacacgtcaaacactaaactgtatttggtagacattgtcttcttttaattgaaatcttatctgaggtgaagattatctcttttccttcagctacgctaatctcttctagcctgaaggcccataacttgtgaattactaaacaatcatatttgtagcagcaaattgatttctgagagattcata

SEQ ID NO: 205122 - DNA, 1000 bp, Homo Sapiens
caatattttacgtgagatgcattattttactaagtcctttccaaaccatacccatcagatcctatctccatgggagtggagaaatttgagcaacagagaggttaggaaattttcctgaggtcacagggttaggcagtagcagagccggaatttaaaccccagtcttctgtctccaaatgacctgcttggctaatgctagattggccttgaaaggttatatttttatttggttgaggagactctttcagttccaggcgaccaaaacaaacaattctttatgccatggctgggctgaaaattcctcagtgaagggcagtggctctgggaatattttacacatctcttctcatcttcaaaggcagctgagccgtggtgtcctgggttctgtggtggcctcatctgcagactcccacaagaatttggggaaatctttgcaggcatgtgggggttggccccttgggaagaacattcagacagtgtggagtcatagctggtacccagggcccagaagatgccccactgctccttcgggatgccccacgggaagtgccgttccattgttgtgggcggaattttgtggaacacaaccccttggagccagctcaggcacgagggttgcatgtgggggggcccgggcagggcatggttattggagtgggacagggatggatctctagatggaaagtgaggccagcggctggtgggaactggatcttggaagccccagagagggagcagctgctctctcttgggctgcgtggcttagctctttgcctatttctgagcctctgccccattttccaatttgagccaggcttcccctgcttgctttgacttctctgctctgtgtgccccctccagcttcagtttgcaggtagcttggttttctagagggcctcttgtggctgtgaccacacacaaccctaaatgccatcaccatcttacctacattatgttttttctttctacattttgtaattttaaactagatgaagaattc

SEQ ID NO: 205123 - DNA, 1000 bp, Homo Sapiens
gaagttcaagacttgcctgggcaacacagtgagaccctcctctctgcaaaaataatttaaaaattaaccaggcatggtggtcaatgcctatagtcccagctactcgggaggctgaggtgggaggatcacctgagcccaggaggtcgaggctgtagtgagccatgatcatgccattgcactccaacttgggtgacagaatgagaacctgtccccaaaaacaaacaaagaatcaaaaagaaagaaagattacattcaaaaatagaaataaaactctaattcaagcaaactaatgaaggagatttgccaccaacacttgcgattgaaagagaatggtaagagatttgttttttttttgtttttggttgtttttttttttgagacagagtctcactctgccgcccaggctggagtgctgcggcacgatctcagctcactgcaagctccgcctcctgggttcacgccattctcctgcctcagcctcccaagtagctgggactacaggcacccgccaccacacctggctaatttttgtattcttagcagagacagggtttcaccctgttagccaggatggtctccatctcctgacctcatgatccacccgcctgggcctcccaaagtgctgggattacgggcgtgagccaccgcacccggccggtaggagtttttattacacgtaagacaggtcttcaaaataccacatgtactttaagaaaaagaaaaatcagaggatctgatgggggaattgaaatcctattgcctgttcccaacatacatttcagcattttctcaactaaatggcaatttctccgtgaacggcggggcgggggggcgggggcaggggggagctggaaaggcgccccctgcaacccccagcccttcctccctgggaggtccaggattgcagtatcacattcacatctgcggtcgcagggccctcactcagagaaagcatgtgttgccttttctctctgaacagaggctgtctctgcatttaatg

SEQ ID NO: 205124 - DNA, 1000 bp, Homo Sapiens
tccttaaaatcccaagtaataatccttctatcttggacgagaaaactgaggccgaacacctataataataaactaccatcaactgagtgccaaggaggggctgtgcactgccttttgctctttacatatattatttgtcatcttcccaataacctaaaagatagtgttaatgtcatttacagataaggaaactgagaatcaaaagctaaaagttaatttcccaccagtaaattaccagtggtaaagaaccaagctctatactaggcccaaaggtcatattcttcctaattaaggcacctacttactgctgaagtgtaaagtatatagaaatcaggagtaaatggtaaatgggcaatactttttgtcaccctctcttattgtactaacttaattaacccatctggtggaacatattcatcttctcatgacagcagaacctcttataccctaactatgtgtttattccacaggctgtggcctccctcccatctatttggcatcaagaggaagtttgtttaaaattcagggatgaaagttttgcatgctttgtaaaaatgattacacctagctctgcagagtcttgcaaagtgcaaaccccacaatttacctggttgttgttggtttttagtaagggtggtggaggttcgtgatgtaggggtgaagaagcagaactgctttcactatcgctgccatcacttaagctaactctgaaaagaaacagacaagttatgcacatcattacaaacagatgattcttgaaatacccatagaaataggcgtggaaagcacagaatccaaacactaacccttgacaagttcattttaactcacagccgctaacacatattggtgcttactttgtaactggaactgtgttaagtgctttacctgccatttctcttttcatgatctcctgtttcacagacgagtaaactgagactcagaaagactgggtcactcatctagggtcacacaggtaaaaatggtggctctggaattc

SEQ ID NO: 205125 - DNA, 1000 bp, Homo Sapiens
ttctttttaaaagcaggaaagtttcttctcctatctgacatctggattataactataaatcaacctaacccaataggtgctagattgtatgtttgattaattggcataaatgttcaaactacaaatcgaaatttaaactattctttgaataagtttatcattttttaaaaaactatttaggtataagatctaatgtaaccaaaagactaactgattggctgactgaaggactaacatcatgaatgttgagagcctaactataaaatttcagctaaaggcaaataggaggaagtgaactctattttctattttttgtgcatagagcttagttcatacagctcagtctttcaagccaatcaactaattcacaagagaataaagttcttacccaagaatacagaactttgttcctgtagcacaccataaccacctaagccttacatttaatgtaacgttttcttttataaagtaatcctaaaatccattattagaaaataaccatatattttcttttgttctacataatcattatttgttatgtggtgcttattttcttagtactacctactgtaactaattttcacagaaagaaaaagtaaaaagtcttacactgtttatttttttcattttgttatttttgtttgtttggtttttgtctaagcatggaagaccagtttatcctagtagtacaaggtaaatgagtttcctaaaatggaatttttcttttttattatctttgcagactggctaagaaaatttacaaataatctgccaagtcacaagttattttattagtgaaagccagcatgtagagcaatgaaaatgcagtataaaaaaaaattaaagtcttagctgatagcaccaagatactaagcaaatatacataaatacaaatcccatgatcttgccctaaggaatctatttgtcttattttctttcagcttctagcacagtgtctgaaaatggtagccactcaataaatatttgtttaacatattct

SEQ ID NO: 205126 - DNA, 1000 bp, Homo Sapiens
aggagcctggagagctttggaaaaagcaggaggctcagcccattcattcctggacagggacagggaggagcacaccagggctcccaaaggtaggggtcagggagaggtgcggagaaggtattaccccgatgttaggccagcagtttcataacaaacaaactcggggctcaagctgtgagttaatcaaaactttgaaaagaaaaccttcccttcaggagcttcagacacaaggaatgaaaacaaccaggctggctgtaaaatgaaagcagcaccgaaatggggatgaaaggaagccagacactcgggggttggacaaaagcaataaggccaaaggaattgtgctgaggggcagtacaggcctgtgggcctctgatcccatgtgtcttgacctcttccaccctacacccctgtcccacacccactctcccactgctgtgggcatgatcacatcaccagtggcctccttgctccagacttgggactcaatctggcttctcttccattctatccctactttgtgaccttccagctcccacctcaacctcctttttccccatgcagtccagagacccctgcagcagccacaggagcacgggcagatcagcagggactgggctgctaccctcccaggccacaacagcaaatgtccacctgggagctgagagtggaggcaggggaggtgattatctgttctgactcactctgggcctgccctgcccagcactgtagccactgccacatgtggctactgagcacttgaaacacagtcagtctaagcagaaatgtgctgcaagtctaatatgaaccagacttggaagacttaatatgaaaagcaaagtgtaaaatatctcattaataattgttatttatgatattttgtagttataatattttgggtacattggtttaaataaaatacattattaaaattaatcttggcctggcatggtggctcacgcctgtaatcccaacactttgggaggctgagggtgggtggatc

SEQ ID NO: 205127 - DNA, 1000 bp, Homo Sapiens
aatggatgtgtgcataaaatggtatttttcccggggaggtgagattttgataatactaaagcctctcccctgactgaattggccacaaggaggaatccatccctgtataatgaggccagggatggtctagcatttctggaatgaagccccttggaactgccatgctgattttatcacacatgagtacagcaaccagttgttgacactgggttctgttgcacagacagaactgggaatgctggccagcggtggattgaaatggaaatgagaaaccttctgtgctccactggctcaaaactacctgctcttgtcctagcatgcaggttgcccctagtattaccccatcccttcactgtccttgtcctacagcctcagtcttatctaaaatacctgaagtttgtgatttagacacacactgagtattctggttctgacccaggctgagtttcctggagtaattcttcacctgtcattagcggctttcagtctcttcccctggtttgcttataattcttgatgatactcatcactgttattatttttttttcattttagtgtgtcactcaagcttcaaatcctgataattgggaactcagcatatggcggactcgaagggatcatacttttttctgtctttctcatcaaatattaagctcaattatctttcccccatcatcagcaattatataggtttgcataaatttacattgccgcagcagtcatattgcccaactgaatttctggcaagtataaatgttattgtcagaggcaatttatagtgcaagtcaaacagacatcctcctccacccaaatctctttcccctcgactcctggaagcataattaagagaaatgtagaaagctgcgtgtgagaaacatggaaatatagctgctgtgttaaaggaagagagaatgaacgaactaaaataattattcctaactacccttccttggagtgttgtgtgtgtgggtgacaaagatggaaattggaaagagaattc

SEQ ID NO: 205128 - DNA, 1000 bp, Homo Sapiens
tccacgcccactccccattatcagatacgttaggaatttctactggaaattgaaggaaacaggcaaattcaccacatcctgagctttccctgctcctctgtcttctttcccaatttctctcacccccgaaccctgttcgcctgaagctgtggccaggacgagcttctgaatcccggccatgctctgcatcttgaccttggtgatggttccatgtgtatttgctttacaattatttttaaaactgaacatatatgacttactcttctatatgtgcgtgtatcttacattaaaaaaaagaagggaagactttctgttcatttctcatgtggtgtggctcagctatctcttatttattttcttctatgtccttggaggcttatcttctatttcaaagcagtttatctacgtattttgctaaacatgggcagtcctcccattaacaggaatgtcttagcataagataagataaaatttcatagtaggatggacaccacatatttttgagaactgctagggtccaatatggccagaacgtagggtgtgaggcgcagggccagatgaagatggcaaggttaagtgggcctgctctggaggaccctgcaggccaggccaaggtacatgcatcttatcttagaggcagaaggagccatggatgtaagcagggatcagaggttcccagaaggtgagtttagagcctgggaaacgaggtaggagggaatgtaatgagttcagtcagaagagtgggcatgagcaggggcggtgtggtggagaggaaagggacaggaggcgtgccttgggatagacaggactccctggctgcttagatatgacatggaagggagaggacagactgagatactgtcacatttctagcttgagcaatgtgtgactgtcatgctgctcttggagatggagcagtaggagggaaacaggccccggtcagtgttcacatgcgggatgcagagcaaacggagcccaaggccaatgacagacagaattc

SEQ ID NO: 205129 - DNA, 1000 bp, Homo Sapiens
taaaaatgtttccattacttttgttaaagctttacttaaaatagctaaataatagaaaaaaaaaacagacaaaaatgtaaaccaaatatagctatgtttttattaggtatttttgttatttcctgaagaaactcagtttggatttcaaaggctttgctgaatcatatatactatttctgaatgcattcttaagggaggacaaagaaagaatttaccctacgcaacaaacaacaaatatcttcagtatttgttctacttctctttgcaagtcccacatcacaggcagctaactctagtatttcttgtctctctctccttgataaaactttagccaactttagtgagttctcctgtttggctttcctttccctttcttttcctaactctactttctcacccgtcccagtttcctggtcaccatgcactgggaccacacagaaagagttcagaaatagtcaaacaaaacaaaatggcccgaagaaaccaaaaaaaaaaaaaaaaaaaaagggaaagcttttggatgcttgtatttgatatttttgactctgtctcattcatataaacagtcaaagtaaattatggtgagctcatttgaagaaatataatccaattataaaggtaattattatgaacactatataaccacacagataaatgtttatggtataatctcaaaggaaagaaaaggacagattttagaacagaatatttacctacaaagattgtaaaataaataaatatatatactgttagggtaaaaaatgttcattaacaggtgaatagacaaattatgctataggcacacactgtaatgctactcagcaatacataaaaatacacacaaacacatacatgcctattgatatggtttgactctgtgtccctacccaaatctcatctcaaattgtaatccccatgtgttgagggcggggtctggtgagaggtgattagatcatgggggcagtttcccccatgctgtttcatgatagtgagtgaattc

SEQ ID NO: 205130 - DNA, 1000 bp, Homo Sapiens
taattgaatttgtatattgtaatctgctcacctagaattgagatgtagcatttttataccaaaccagagtcattggcatcagtccagatggcagaaataaatcttacaaaatatatttgctagcatggtttttgcctgcttatcatgctggctctgttagatgataaatgtaattcagactttgagcttgcttataaatcctgtctgtcatcacttgatgataacagttgccaaacagcctcaggtaaaaaagacctcagaattttcatgagggttaaattatttaattgcctgttctagaaagaagagaaattacagaaaagggatttagtaaagcagtgttgatgagttattatctcaacgagcagagcttctgtgggaagagtgtcagcccgggtacactttttcttctttataaggcaagttggaaatacaaagaaagcacagtgagagataatgaactggagtggggaccagaattctggtcattgaatccagagggccaagcctgccagtcttcactgtgatgcttttctaggcttagtagttaagtcttcatattctggggaaactataacttgtggagataaactaccttttgtgttttgggcctgatacttggatttggacctttctatggagcaattctgtgaaaatgcaggtctcaaagtcccaggctgtgggagtttggggagacaaggagtgtaactgctgtcaatgaaacagcaaggtcagtgctggcaaataggatatgtcaaaaaaaaaatgcctttaagttattggactttatgtgttccaacatatttcctagtggcatgtgccagtgaattttcagttgtgaggattctatatgtgccactttgagcttgtgacttcctgtttttcctcacgtatccccagctctgaggtgtacactgcagtaggtctgggtacctgttgataaacaactagtatggactgttggtccagccaagtcttaccaaagtatcctgaattaact

SEQ ID NO: 205131 - DNA, 1000 bp, Homo Sapiens
gtctcaaagaaaaaagagtaaacataaagttaaattcctatttgcctcttaatctcaactaaaacaagcgtgactatatagctaatatttatgaaaggcacaaaaccccatatgttaaagaagtttctcagacttttccacacctggaagtaaatgcaaattctctagcgaatctaggggtatgatcaaagatgccttctgcaacaataaaagttctctgaatgttactggtttggcataaacacacacattttgtaattttacttcaaaatatacatgacttaatataaaaatgtcccttcctcccaaaatcttcaagaaacccatttaactgcctttgtatggccccaggcacttggagacaaagaagccaggcactaaggcctctcacagaaaaaaacagttgatcacatatttctgtcattttactgtttaaagcgatctcaaaattcaggaagtacaatcccttcatttttttagttaacaaaattgttaattttcaaaaattttcttttaaaatgattaatgattatagtgccagcaattaacattagacagatacatttaaataacatgaggatcaactataaacatgatttttaaacacagctaggctttggtggggaaagtagatgttaaatcaaattaatgagattcagagaaaaaatttaattcacaatgatctaatgatgaatcccaagatcctaggatcctgaaaacaatttttcattgacacttagcttttcacttatcctttctaagactctagtcaataaaacattataaacacatctaaatgtttgagaaaacttgtcttactaaaaaaggaaattaatttctgaatctcagatgagataacctattaaaaacagaattgacacataacataaaaacctgcaagctgaaagaacctagaagcactcattaaacaaattcttactcttacaaatgaataatctatactagtttttcacaagtaatttacagctttccacagatt

SEQ ID NO: 205132 - DNA, 1000 bp, Homo Sapiens
tcatttccaaaagagttttacaattaatcaagtatcacaggctaatttcactcaagaactcagatgcaaaagtccaaaccaagtatcagtcaacctaatccagcaatatataaagcgatattatgaccaagttggatttcaggaatgcaagtgtagttgatcatttcaaactcaatcactgcaatttctcatactgatgtatcaatggagacaaagtatagaggtacttttttaatgttttatgagaaatgctaagctgaatttatgtcaaggaagaactgaggccatatatagtggctcacacctgtaatcccagcactttgggaggccgaggtgggcagatcacttgagctcaggagaccaccctgggcgacatggcaaaaccccttctctacaaaaaatacaaaaaaaaatagctgggcatgtggcacacacctgtaatcccagctacttggggggatgaggcaggattgcctgagcccaggaggttgaggctgcagtgagctctgtccacaccagggcactccagtgtgggcatcaaagtgaaaccctttctcgaaaaaaaaaaatgtggagggctgggcgtggtgggtgactcacgcctgtaatcccagcactttgggaggccaaggcaggtggatcacttgaggtcaggagtttgagaccagcctggccaacatggtgaaaccccccaccccctgccactccaccatctctactattagatgggcgtggtggtgctgcacacctgtaatcccagctgctcacgagcctgagaatcgcctgaacccaggaggcggaggctgcagtgagcctggatcctgccactgcactccagcctgggtgacagagtgagaatccgtctataaaaaaaaaaaaaaaggaaaacaaaaacaaaagtacatcttagagcgatcacatgaaaaagtattcctgctaataaatgaaaaggaatcgattattaaaatatcactaatttgaaaaccatttaagaaaataa

SEQ ID NO: 205133 - DNA, 1000 bp, Homo Sapiens
aatgatttttaaaatgtatggtaaagggactgggcatggtggctcacatctgtaatcccagcactttgggaggcccaggcaggagagttgcttgaggccaggatttcaagaccagcctgggcaacatagtgagaccctctcgctccaagaaaaaaaaaagttaactgaacatggtggcctgcacctgtagtcccacctacttgagaagctgaggtgggaggaccgcttgagcccatgagttcttggttgcagtaaactatgattgtgccactgccctccaacctagtcaatagaatgggactgtgttccttaaaaaaccaaacactatgaacatattcagactgtaaaatataaaaaagaaaaaaaaagaaaacacacacacatacaaaagaaatacaagtaaaaaatgtgatggtaaaggtatgaataacagaaaagaaagaaaagctgaaccaaggtgactaccaggagaagaaccaggaaagctccaggcatctagcagtgggaacaacagagagtctttccaggcttccaaatcttttcatcctttttcctgcttcttcttgtttttaattttactttaagttctgggatacatgtgcagaacgtgtaggtttgttacatagtatacatgtgccgtggtggtttgctgcacctatcaacccgtcatctaggttttaagccccacgtgcattaggaatttgtcctaatgctctccctccccttgccgcccaccccctgacaggccccggtgcgtgatgttccctccctgtgtccatgtgttctcactgttcaactcccacttttgagtgagaacacatggtgtttggttttgtgtttctgtgttagtttgctgagaatgatggcttccagcttcatccatgtccctgcaaagggtatgaattcttttttatgggtacatagtattccctggtgtatatgtgccacattttcttaatccagtctatcattgatgggcatttgcgttggttccaagtct

SEQ ID NO: 205134 - DNA, 1000 bp, Homo Sapiens
gccagggaaaataaagaacagaatgatagtagtatcttgatattaaatttgcatcagaaatgagcaaaatatgtcaatatgaaataatttgaaatcaaattcagattcacatgtatagtgcatagttcaagaaataatgcttactcttgtaaaaaaaaaatatatatatatatatatgtatcagcaggtagagtgtgggagctccaactttgttgtgaaagctgataacagagtatgattctttccagttacaaaatactgtattactttagttatagcaagcagtacataaatgacatcaacaactcaggctgctccctgacataaaagccagttccatctttactgcagatgacaggagactttccaagacctgcagaggccccctccaccccaaccttagtgcatgctcacacacacacacacacacacacacacacacacacatttttggcttttgacccactctgtgtgttccactgaagttatcttttccttaatagattcacacagaattaccccatcctgcaaaatccttatccctatgaatctctaaaatatattaaataatgtgttatatatttgctttttgtaaatctttatttaattaatttatatatactttgtgaagtcttatactgtacatcataaagcgatgtcatctgtagttggttcaatataatgtttatgatcattttgataagaaataactttggacattaggcccttgttaagaaataaaacacccattataaatttgcttctgttggaaaatacatgatttggcatacttcatttttagtaacaatctattctagataaatgataatttggggacatctgtacttaaaaactagctgaactacgttttgggatgagatgcaaagcaacagctgtccctggaactgaaatgtgaatttctagcagaacagaaaatattataataatgaggcaataataaaattaggaaattaaattataagaaaaaaaaaaaaaaaaa

SEQ ID NO: 205135 - DNA, 1000 bp, Homo Sapiens
tcagaggatggcttgggagaggagggagaaagggattccaaaggaaagagcacaatgaaacgtttgggggtgatgtatatattcattatttgattatgtctaatgatttcatgggtgtatacatatgtcaaaactcattgtatatttaaatatgtgcaatttattgtatatcaagagtaactcagtaaagttataaaaactaaaactatgcccattcaaaaagcaaacagatgttcatagtaccattattcacagtagacaaaaactggaaacaatccaaatccatcaaccggtgaatagataaacaaaatttggtatgtccatatcagccatgaaaaggaataaaattctgattcatgccacgggtacatactacaatatggttgaacctcagaaacattatgccaagtgaaagggctctgtattgtatgataccatgatatgaaacttttagaacaggcaaaaccttagatcagatcagtactttgcctgggtgtagggtggcagcatggagattggttttaaacaggcacagcggaacagtttgggtgatggaaatgttcctggtgatagttgtgtataaattgtatgaaaacgtgtgcaattgtgtacttaaaatggataattttcatgacatgcaaattatacctcaagaaagccactaaacgtgggtggccactcaaaatttcaaattctctttaagatgaccattcaggtcaggcatggtggctcactcctgtaatcccagcactttgggaggccaaggcaggcagagcacgaggtcaggagatcgagaccatcttggctgacacggtgaaaccccatctctactaaaagtacaaaacgttagatgggcgtggtggcgggcacggtggtgggcgcctgtagaggcaggagagaatggcgtgaacccgggaggcagagcttgcagtgagccaagatcacgccactgcactgtagcctgggtgacagagcaagactccaaaaaaaaaaaaaaaaa

SEQ ID NO: 205136 - DNA, 1000 bp, Homo Sapiens
cttttacatgagtaataagtgggacaaaagaaatgagagaaatgaatgatctatatttttacatggaataatgtataaaagtacacgtaaggctgggcgcagtggctcacgcctgtaatcccagcgctttgggaggccgaggtgggtagatcatgaggtcaagagatcgacaccatcctggccaacatagtgaaaccccgtctctactaaaaatacacaaattagtcaggcatggtggcatgtgcctgtagtcccagctgctttggaggctgaggcagaattgcttgaacccggaggcagaggttgcagcgagccaagattgcactccagcctggtgacagagtgaggttccgtctcaaaaaaaaaaaatatatatagtgtatgcatgaggccaggtgctgtggcttatgcctgtaatcccagcattttgggaggctgagaggggtggatcacttgaggctaggagtttgagaccagcctgggtaacatggggaaaccctatctctaccaaaaaaaaaaaaaaaaaaaaaaattaggtgcggtggtgcatacctgtaatcccagatacttgagaggctgaggcatgagaatggcttgaacctgggaggctgaggttgcagtgggctgagatcacactgctgcattccagcctgggcaacagagtgagactctgtctcaaaaaaaaaaaaaaaggtacatgcatacatgcatgaaagatctttgaaacaatgaaaagttctataggtgtatgtaagattacagtaattgaagcagtgtgttattggtaaaaatagtagaatatggatgaatagaacacagaagaccaccataagcagatcccagaacacgtaataagagtttatgataaaggcgttttacaaaccattgctaaagggatgaattatttaattaatgatggtaagagaatgaaatatctgagagaggtctcaagttatgtttaccttcaccatcagagatcaaaccatgtcaaaatgaattc

SEQ ID NO: 205137 - DNA, 1000 bp, Homo Sapiens
cccccaaccccacaacaggccccagtgtgtgatgttccccttcctgtgtccaagtgttctcattgttcaattcccagctatgagtgagaacatgcggtgtttggttttttgtccttgcgatagtttgctgagaatgatggtttccagcttcatgcacatttacaccatggaatactatgcagccttttttttttttttaaagagagataggaagctaggcatggtggcacttgcctgtaatcctagctacttgggaggctgaagcacgagaatcacttgaaaccgggaggcagaagttgcagtgaacaaagattatgccgctgcactccagcctgggggacagagtgagactctgtctcaaaaaataataataataaaaataaagacaaacagggtctcactctatcccccaggctgagtgcagtggcacaatcatagctcactgcagccttgaactcctgggctcaagtgatcctcctgcctcagcctcttgagtagttgggactacaggtgggcgccaccatgcccagctagtttttttgtattctattgttgagatgggctctccctgtgttgcccaggctagtctccagctcctcaaacaatcctcccattttggcttcccaaagcgctggggtttcaggtgtgagccactgcaacttgccgctttgttgaatgttctaagttgctgaaaggatgagggagacatctccattatcctttaatctcagttaagtaagtcagcattcctacttaacatacatctcaatcaggggtatatagcagactcaactttttcagaacaaagttgcctgtctcatacttcaagacattctgattgagaaggtagagatggagggctagattggaatatgtatattttggtttttaaagaaccccacaaatatttctcataaactgctatctacttcccacagttatttcagaaattagttctgaaatacttctctcctattgcttagaatatcaatacgaattc

SEQ ID NO: 205138 - DNA, 1000 bp, Homo Sapiens
ttgcctctctgaggccactttgatttggtctgtcctgttcctgggtccataattcctgccgcctgccctcccacacagaagtccgacagggttacaggcgtgagcccctgctcccggctagcactttgggaggctgaggctggtggatcacctgaggtcaggagttcaagaccagcctagtcaacacagtgaaacaccgtctctattaacaatataaaaattagctgggcgtaggggcgcacacctgtaatcccagctacttaggaggctgaggcaggagaattgcttgaacctgggaggcggaggttgcagtgagtcaagatcgcaccactgcactccaacctgggtgacagagcaagactctgtctcaaaaaaaaaaaaaaaaataaaggaagaaagaagagagagagagagaaaagaaaagaaaagagaaaaagaaatccagggtgacgcatgttcggatcagtgtgcccttcacccttttggcaccttgatggccggaccttccactgtgtcccctgcaagcacctgtgcccagcacagagccatacacagagaaccccacctgggtcagattagcagaggctgatcaatttttgacgtcacacctgcagcagggctgagtgctcaggagaaaagggtttgacagcacttgaagtgagtggccaggctgggcagagatcaggaaggccaaggaggaaggctgtgagccacctggccttcagagaactcccagacagtggcccagggaccagtccagcccagatcaccttaggcagtgacccctctcccagaatccaggcaccctagaggcaccttagcagaagaactctctgaggtctgcaggcttgagctgttttgctttctccaagacagtttcgtcctgtaatggtcgccattctcattgtcatcatcccgttacagtatatttgttttatttgagaaacgtatgtaatgattatctctggcactatgctaagtgcttaaaaagtatgaattc

SEQ ID NO: 205139 - DNA, 1000 bp, Homo Sapiens
agcagcccaaaatggccaggacatgattagtaaccgacaacctctccagtttttgtccctgcttccaatttaggaccaaccagagaaagccaaacatgttctaggccatctcacaggagccccacttctttgttgttgttgttgtgtcgcccaggctggagtgcagtggcgcaatctcagctcaccgcaacctccgcctcccaggttcaagggattctcctgcctcagcctcccgagtagctgggattacaagggtgtaccaccaggcctggctaatttttatattttcagtagagacttaccatgttggtcaggctggtctcaaaactcctgacctcgggtgatccactcaccttggcctcccaaagtgctgggactacaggcgtcagccaccgtgccaggccaggagccccacttctaactggccaccccagtcccccaagtcagcagcctccatcagccatccctgagcttccctggattccactgtaaagctctcctgttccctcacctgcctatgagtttctgccaatcacgagagaggagggccgcacccttgctaggggaagctctggataaacagcctctgcctgttctcacctggttgcttatttccacagctcaccatagacaatctggaagagcatcaaaaaccataaaacgaattttctcccaggatcccatccactcagaaaaacacagtcaccacctgggttcctcctttccagtcgtttctcccagcactttcctctctgcacaagggagggaagtttcacactactgacaattttcccaatcacaaatgataccagtttctaactttaggtgttttggtatttctagcatttggcttccttagcctcggctctttacttactagggtgatgtgcaggtacatttttaagaggcttgataaacattattaaactgcatcctaagaaggtggaacgctccaccaactttctcccgcactatttctgcacacttgctggtaaagctt

SEQ ID NO: 205140 - DNA, 1000 bp, Homo Sapiens
tgcatttctcctcctgcctcctgttacaaaatttactggtctaagaagcctaggcttcctgaggagacattctcccctctatctcattaatccagagccagctggaaagcatgtgcttaggagaagagtgagtggggtgggagagacccttaagtctgtaaataagccacaccagttaaggttagctctccacagttcccttcttgccctggcccagagcacggaatggcactgatggcagctgatctaacccttccttcctaggcctggctctgacaggttaatactagaacctatagagtgcattgtggtatgtacagacctcagctaccttatagtataaaattaggaaatctagttcacctctcgaggcctgccaggcctgtaaatgggaagactcttttccctatagttaaatccctgtctcaggcatgccttagaaacgagtctgctagccaaattcaaggacaagtaacctgtatcctgaggatgcctgtgctcgcaaaggtagatctttcctaaccaactgggtgactggactgtccattgccttcgaggagcccatgcagctccccagcatttggccaggtaggctccaaggtatgtgaactacctttatagaagcagctgcttatctactgagaaagcctagttataagcttttgtaatctaccaagatcaaactatctaacggtgcatggattataacctttatctaggctgcagcagttaaaaaaaaagacagctgcatagctgaaaaaaacttgcatggtcgaccataagtgagatcaaggtcaaaccccctgctcacagggttcaagaccttggccacactagaagtcttccacatgtacttttgtcttcccatgattttattccttgtctctgtattgattttatgatccagtatgtcagccagatgttggggtctgaacttacccgtaacatacaggttttgctgaccttgacaaaatctgttttctcatagcatggaggaaac

SEQ ID NO: 205141 - DNA, 1000 bp, Homo Sapiens
ttattttaggtatgtataaggatgagttgggcattataatacttaatgtatataatagtatgttatatataggtacacataaggacatatatatgtattattatgtatgtataaggacaataagaaaaatactatttttttctcttatcagaaatagaaagctttgtaacttcttttgtttccctcttatctttggatgtcagaaaactcagtgctgaatttagtgtctgagtacagttaagcattttatccttagcttttgatctcttttacctttacctgataatatacatgcatatatgtattttaattgtgggttacctcagatactggttggggataagaaagtcatagatgacaagtcaattgcacacagaattccaaaaatgctatttcttaaatagatattactagatatttaaatttattaaagatatacacttgtaaagaaattctaattaaataagaaaggaatatgaaaaaaatctgtcatttaaatgtacctgtattttcaaaacattacatttgtaaaatgttatataaaaagaagacaatcctcaatctaaactctatgtgaagcctgatctctggttagatcctcattagcatcgtgaagcatattttcaaactgatttcagattaaagtatctctcatgaacccagcagatttttttatgtatatagtaattcttgcttacatagaactcaaaccattttatacctgctttattcctaaaaggatttaatgagacttataaacaggtaagataaatgaacaagtaaggagagtaaggtgaaagggaaatagaacaaacaggtctagtgagcttagacacacagtatgtggtagaagtagactggatatttggctctgcctgagagctgccaattcagagaaggatatatgattagatacatagcttgccctgcctgtaaggaataatctcattgttcagaagtggcattgacttttttcagtactgataccaggaaggaattc

SEQ ID NO: 205142 - DNA, 1000 bp, Homo Sapiens
attttgatattttcacaatcttttaaacagttataacaagagttggaatttaaatctgctgcaggtcttcagatttcgagtacagtatgccattacataacacctccacttattcatctcggtttattcttcaataacataacccccaacaaaattttgctggaaaaatgcatacttttcagggaaaatatttggctcaatgaagagattatttgttaaggtttttgcttcccaaataaagtctttagcttaccaagaatcccatttctgatttaatcattcaacctccccttggctggctcagctactcaccgaaatgcatcagaaggtaggcatcctgcctgccacctcaaataatgacaatattattgctcagacatggttggcaggtcctgtcaggagatattgtaaccctcctagagtctgattcctgcgctgacactttcatcaagactgacttctataggaaaacgctcctacatcagaatagttttacttacccacttgcttcactcttgccagtagcaagtctgcaactcatgtatttggcaaagggatttattatagagaaacccagactctgcatcaagtggtcacataccactttgagatatttctattgaaccaaagatacaaaactaggaaactgccagactatctcattaggtggaaactttcctgtaatctgggatagcttcctcaagtcccttttaaaggaccaaaaactactaggtagtttaagctgtaattattaaaaacagaagtgctacatcatctttcgccctgactctccaaatgaacataaagacacaccaaaaggttgaaaacagagctagctgggaaaatcacggcatgtatgaaacatccaataccttgaaaatttgggcacaagtatataaggaattcttatcaaagatacatgcacaatccatgaaacttaaatgggttttagctgaggttttgctcatgttgctctgcatttataaggacagatcagtga

SEQ ID NO: 205143 - DNA, 1000 bp, Homo Sapiens
atgttttctttttcttttctttttttttttttttgagaaggagttctcactctgtcgcccaggctggagtgcaatggcacaatctctgctcactgcaacctcctccttccaggttcaagctatttctcagcctcccaagtggctaggattacaggcgcctaccaccaggcctggctaatttttgtatttttagtagagaaggggtttcgccatgttggtcaggttggtctcaaactcctgacctcaggtgatccactggccttggcctcccaaagtgctgggattacaggcctgcgccaccacacctggtctagcataatgttttcaaagttcatctatgctataacattaccagaatttccttccttttaaaggctgaataatattccattgtatgtatacagcacattttgtttgttcattcacctgttgtttctaccttttggctgctgtgaatcatgctgctgtgaacattggtgtactagtagcttttcgaatccctgctttcagttcatttatgtatatacctaggagtggaattgttggctcatctggtaattctatgtttaactttctgaggaactgagaataagttttatgcctttaatcccctcttagacatttcagaaattgggagaagtgccaagtcttactgtgagcacacagccaggacccagcccacactgtccgatatcgtggtcacacttgttgagatgggtgagtataccttcagtttccagttcttcgatgcaactgggagaggagtccctaggaatcaggcatgtctgctaagtgttcttggtttccctcatggttctcttgaattgctttgagcttgagagagttatcaagagagattcctctgaacacatctaagaggcctcataattccctgttagggaattctgccagagcttcttttgcgtggctgcaaggtcattgagttgagagtttaagccatttgtccatactactactattctttctgtattcaatatcc

SEQ ID NO: 205144 - DNA, 1000 bp, Homo Sapiens
tacaggcgtgagccattgcacctggccaagttctttagagatggtttccttcagtttttttagacatggttttcaaatatatatttgaatatatttaaaataactgggccaggcacagtggctcatgcctgtaatccccagcactttgggaggccaaggcaggaggatcacctgaggtcaggagtgagaccagcctggccaacatggtgaaaccctgtctctactaaacatacaaaaattagctgggcacggtggcgggcgcttataatcccatctgctcagaagctgaggcacaagaattgcttgaacccaaaacacagaggctgcagtgagcctctgcctcccaaagtgctaggattacaggcatgagccatcacgcctggcccaaactagacattttaaataatataatgtggcaactctggaaatcagattctccaccctccccaggtttgttttgatggtgctgttgttttagttcgtttgtttattgactcttctgaactctgttttctttgtcaggtgaggccactgaagtccctgctcagttagtttaatggtcagctgatgatgaacagagatttttcttaaacaactggagccagtaagtctcccagtctttgccaagggcttcgtgtgagtgtcggggcgtgccttcaacactaagccaggcagtcagcaactctgccttggtgttgtctttctgtttttcagaaaggttgaaaaatgtggcctttatttaggagaccatgtgtacaactaaaaatgaagggttttttttttaaccaaggaatgagggaaactagctatctctgccgccttcattttacaggtgaagaaactgaggtttagagaagttcggtaatttacccaaggacatccaagcaataggtagtggtgctaggattaaaatcaggcagcctgaacggctgtagtggctcacacctgtaatccagtacgttgggaggccgagacaggtggatcacgaggtcaggaaatt

SEQ ID NO: 205145 - DNA, 1000 bp, Homo Sapiens
atgagtgtagagtctctttaagacaaattctgatcccttctagtggactacctctgccattagcataatagataactgagtggtgtggtcttagagtcctgaagatatctgtagccttgccacttttctgcagatgccctgccttagttctatgactagaacttccttactcagatagcagaggcactgtttggatatggcaagccaggatgattactctcaattttgttatgtgagggtctttaaccacacacggctaccatatggggtgggagagacagcatctagaaagtgtaggggaagtggctcattttaaaaagaaatttgaggcttgtatatgtttccttagcccacaagttcctttgcaaccaaggtgaagttgcatcttccagaatgtcatctgaactcattcttccataacttcagtgttgactttaatattatttggaatagttgtttctcttaaaggttgtatttgattttcacttcagtgtgacttcattcattaaaaaatattgagggaagcatttattattttttgtttgttcatttgttgagataggttctcactctgttgcccagactggagtgcagtggcatgatcaaagcttactgcagcctccaactcccgggctcaagcaagttttatatatttataatatatatgtatgcatatatttattttaagcagtggggacggattgcagcagcttttgatcaaagccctagccttcctaggctcagtttttttccgtatgctctggagattttgtttagagacagagtctcactctgtcacccaggctggagtgcaggggtgcaatctcatctcactgcaacatctgcctcccaggttcaagcaatcctcccacctcagtctcccaagtagctgggactacaggcacatgtcaccatgcctggctaacttttgtatttttagtagaaacagggtttcaccacgttggccaggctggtctcgaactcctggcctcaagtgatc

SEQ ID NO: 205146 - DNA, 1000 bp, Homo Sapiens
caatgtattcaagtgctgatcatttttcatcgtcacttagtgacagtacagcctggagtcaattgcagcagatttatcttttgtgatattgattgcgtgcatgtgtgctgaagctgtttgcaaatacctggcttcatctatgagggggcactgcaagcgctgggggtgggaggcttggacaaagagacagggcttggtgaggaccctgcctctagctttttgcactacaggagagtctggatgggcactgctgagaaagaactggaccaggagtcccagaaaaggctgatcattaaatgtctggggaggaacctactgtttagtcatcatgcaaagtccctgaggtgttaggagcgaaatggtcgggagtcatttgtgtcctgaggcttataataaacatgcagagctggagttccagccttctttgaaatttgtgtctcctccctaaaagtgtatgggtcaacagctccccagttggggagatgtgatcccagtcaagtcattcaaactccctggtcctcagtctccccatctgtcaacagctccccagtttgggagacaactaagccctagaatgacaccatcttcccttcataacaacagggctacgatttacacccactgcactggccattttccacactaccttatgaagagcaaccctgggagcaggggagggaggatgctgaagtcagggtgggtggtggtgatcggtatccttcattttagaggacacagctgaattttaaggagtcaaagaccttgcccttaaaccacctgcctttcgtgcagtcatttccttccatcttatccccactggtggccacttcctggattattttctttcaaagccagcttcaaatcctacactgtctgcctattagggagtggttctcaccagatctcaagtccccattttaaaaaatgacagtagagtatggttcaagaaaaaaaaataaaaaagaaaagcaatgggttggaaaataaaaaagtagaattc

SEQ ID NO: 205147 - DNA, 1000 bp, Homo Sapiens
agccaatcaggagcactatcacttcaaccgcacattttatctttctaaagttgcagacgtcatcgtctcctacaatggaaaaatcatcgtgaaataatgagacagatgccagagggacaacgctaggcttggatcttgtgtccaatcttgggcaattcagttgaacagatattttgtacttactttgtgcaaggcattatagatataatacttaaacttttggagcctcaagttacccacctgcaaaatggtaatgttgtattaatacctagctggaggtggtataatacagtggctaatagctggcttttggagtcagacctcagttcaaatctagctctaccactcattagcagtgtgatcttaagttctttgccatttccttagctgaaaaatgagaataagaacagtgtcaccccacttagaattctcatgaggattaagggaggtaatgcttagcacaatgtctggcctatagtaagtgctcgaaaatggttaaaaataatgaaagcacctaggccacagcagaacctagtattcaaccacggaggcaaaggcccaatgtactgtggatcagaaaggatgtttttggctgtaagcagtggagggctaactcaaaccaaattaaactgtaagcacacttatgtgctctcatacataatcagttcagagttgagggggacttcatggttgactaaacgtagtgggcctgagtttcctgctcattctcttggcccttgctagtctggtagtaaaatatctgtaggtgttctggttgctccacacccatgaacagcaatgcccagaggaaaagaggactgtttctagaaaagttttcagaaaagggaggaggaactgctcccaagaccacggaaaacctttcctcaggtctcaagaatccatattgggtcacataatcattcctgatggaatcatgggctagaaggatggaattattcataggccagttaggttcatcctagcaggtgggggtgaattc

SEQ ID NO: 205148 - DNA, 1000 bp, Homo Sapiens
tgaatattcaagaaaatgatcaggaaagtgagactctgcccagctcagtctacaaggtcaccattgtttttaaggaacacaggtctgcccccagagcatagaaacacagaagacttatgtcgtccctgaattcttattcttatccccataggataagaatgagaactgtgccgcacactatcctgagttatcctgctgaagccccgttgtttctctaaatggcattagtttttgttctgtttccttttgtcttcacttacattatttgctagctttgggctacagctgatttgaagatggtgatcagtatctgtgggcattagatggtgagtctgaactccattctgctgtgggattcacacacttgatgtcaaatacactgaagcattatatcttaagccagatggtaatacagttctgtgctctggcctctctcagacaaagtcacatttgtaatcaaatgccctgttccaatttagtcagcattttttgcacatggcactatgggaacgtggacatcaacagatctcttggtgccagatttgatcttggcattctgtacctttggtaattaagaaggcttttcttttttattaaccctgcagtcagttcaggtgtttccaaccttacacttaggcactagacacctttgcagactgtttgtgcacttgcggaaaccaccgggttggctgtgttgtgcatgacagtctaagagtagagagagcttcagatttttcaaatgtgcatcaacaatttcagcttcttttttttttttttttttttttttttgagtttcactcttgtctgccaggctggggttcagtggcgtgatctcggctcactggaacctccacctcccgggttcaagtgattctcctgcctcagcctctcaagttctcaagtagttgggattgcaggtgcccgccaccacacccagctaatttttgtatttttagtagagatgaggtttcaccatgttggctaggctggtcttgaattc

SEQ ID NO: 205149 - DNA, 1000 bp, Homo Sapiens
tggattttttttccaaattagtaagtagtcattcatattaccattaattgtgagtgatctttgccttcttgattcattctttactgacccctcctttattgtatgtgaaattctggcgtctgtgagtgggagattggacctgtttctgggctggctattctgttccattgatgtaactgcctacttttacacagctgtattaaaattacttacgttacaatagtattatgcatctcattatcttttttttttttttttttttttttttttttgagatatagtttccctctgttgcccaggctggagtgcagtggtgcgatcttggcttactgcaacctccacctcctgggttcaagagattctcctgcctcagtcgcccgcgtagctgggattacagatatgcgccaccacacctggctaatttttgtatttttttaaatttatttttgagatggagtttcactcttgttgcccaggctgcggtgcaatggtgcaaccttggctcaccgcaacctctgcctcataggttcaagtgattctcctgcctcagcctcccgagtagctggggttgcaggcatgtaccaccacacccggctaacttttgtatttttagtagagacagggtttctcaatgttggtcaggctggtctcgaactcccgacctcaggtgatccacctgcctcggcctcccaaagtgctgggattacaggtgtgagccaccacacccggcctaatttttgtatttttagtagaggcagtgtttcatgttggccaggctggtctcgaactcctgacctcaagtgatccactggcctcagcctcccaaaatgctgagattacaggcgtgagccaccgtgaccagcctcattacctattaaactaagcttttattactcttcattttcagtgcttttagtcttacccacctattctgtcatatgaagtttagaatcattttattatactattaaaacaaataagcatgagatttactgaattc

SEQ ID NO: 205150 - DNA, 1000 bp, Homo Sapiens
ggctggttcaacatacacaaatcaataaatgtaatccagcatataaacagaaccaatgacaaaaaccacatgactatctcaatagatgcagaaaaggcctttgacaaaattaaacagcgcttcatgctaaaaaccctcaataaattaggtattgatgggatgtatctcaaaataataagaactatttatgacaaacccacagccaatatcatactgaaagggcaaaaactggaagcattccctttggaaactggcacaagacagggatgccctctctcaccactcctattgaacatagtgttggaagttctggccagggcaatcaggcaggagaaggaaataaagggtattcaattaggaaaagaggaagtcaaattgtccctgtttgcagatgacatgattttatatttagaaaaccccattgtctcagcccaaaatctccttaagctgataggcaacttcagcaaagtctcaggatacaaaatcaatgtgcaaaaatcacaagcattcttatacaccaataacagacagagagccaaatcatgagtgaactcccattcacaattgcttcaaagagaataaaatacctaggaatccaacttacaagggatatgaaggacctcttcaaggagaactacaaaccactgctcaacgaaataaaagacgatacaaacaaatggaagaatattccatgctcatggataggaagaatcaatatcatgaaaatggccatactgcccaaggtaatttatagattcaatgccatccccatcaagctaccaatgactttcttcacagaattggaaacaactactttaaagttcatatggaaccaaaaaagagcctgcattgccaagacaatcctaaaccaaagaacaaagctggaggcatcaccctacctgacttcaaactatactacaaggctatagtaaccaaaacaacatggtactggtaccaaaacagagatatagaccaatggaacagaacagagccctcagaa

SEQ ID NO: 205151 - DNA, 1000 bp, Homo Sapiens
cacagtcttttagcttttggtcatatgacattgtatttttcctgccacatgactagtctttttggctaaatgtaagacactcgttaaaaatatttagcaatgaattgaggccgactagcatgttatcttgctgcagaaaagatgggagtctatttctggggaatgggcaggggtcctagcacacctagacaccctccataccatccgcaattgaggttatcagtgaggttcagtccctacaaaagtcagggtgtttcctgtccacctctattcctggcgtgtgactcttctgggtcccaaccaaagccagtggacttcagtaggggtcaccgtcactagcagaccctcagtctacttgttttccatctagtcctccacatggtgcaaaagctgctctgcttctttacatctcagttagtcccttctgaaattcagtgatgaaactgagggaaatgagccccaaatgtgaggctgaccttcgtcctgggttccttcttctccatcttggcctcatgtctctttattgccattttagcaatttggtgctttcagtcatgggttttagattctgccccatgtccccattgctctcatgggagatcagaagcttcacatgcactcatgtctactccagagcagaatgcttccttagcttccctccaggctcaggttttgtgtttctagttcccaagttcacagcaggagtagtgatgtcctcactggcttctcatttgcgttaaactgtgaactcctttagggtggggacaggaccctgctcccattgcatcctctgcacctcacaagacactccttgcttcaggccactccagacaccgtgtgctgaagggtgccctgggtggtcagaaacaagtgcatgaactttctctttgaagtgtttttgtccctgtttcctagagttcttggcattttacacgtctttctttctttctttttttttcatattaaacttgtagttttattcaggtttgattttaacaaa

SEQ ID NO: 205152 - DNA, 1000 bp, Homo Sapiens
atctgaagaaatgtagcagaatttttatttctctaggaaatgattttttgtcttatttccccctactattctataatccaaatttgtacatttaagaattctttcattaggcttaataagagttgatcttcaagagacagcatgacacagatgatatttaatgcctgtcatcattctgtctccatatgtccaaatcccaccttctcacaaaaacagctcaactcccactttgtgtgtgaaatctctcccagctcctccagttttaccctcatcaaagcacttagttcaggggcctctgccaatagcctctactttaccaattaggatttgattctatgttcccttgtatcattttctaactgtggtgtttttgtcttctcaattatctttttacctccttgaggactgggatgacttttatacttttctccctgtgttagttaaatttgcctcataaaagccagatgagctcgtatctgactttataaatactagttatagaatattaaagctggaattaaagctctaagagatcatctaacttatctttattttgaagaaaaaactaagtcttagagaaggtaagtgatttgtgcaaagttaatggtatggatttagtgacttaactccattagggaaatacacacacacacacgcagttagcacattggaaaataggggtttgtgtatatccttgctggaatattatgtttgttgaatacccttttacataccaggcattttgctaggagttggaaatagagagaaaatttcatgaaggagaaaaaatacctctatgtggagaaattcaacaagactgtaatattttttagaatgattaagcttatgaatcaagagagtagtcaatttttttttgtattatccatgcattaaacctttgaattcagggattatcattttttaaataaatagttatatcttatattaaagatgttcagatttaaatttcttttttatttatgatgatttaatttcatcg

SEQ ID NO: 205153 - DNA, 1000 bp, Homo Sapiens
tgggattacaggcgtgcaccatcacccccgtctaattttttgtatttttagtagagatggggtcaccgtgttggtcaggctggtcttgaactcctaacctccacccaccttggctttccgaagtgctgggattacaggcgtgagtcaccgcacctggcctacactgctctttttaaaggatatcaatgtctaatccctacccttcaaccccatcccagtagtctatttatttgtttgtttgtttgttttgagacagagtatcgctctgttgcccaggatggagtgcagtggtgcgatcttggctcactgcagcctccgcctcccgggttcaagtgattcccctgtctcagtctccagagtagctgagattacaggcatacaccaccacatccagctaattttttgtatttttagtagagtcgggggtttctccattttggccaggctggtcttgaactcctgacctcaggtgatccacccacctccccctcccaaagtgttgggattacaggggtgagccactgcgcctggccccacccccattccagtagtttttaaaagatgattcttatgtgtagctgaagttgagattcactatggtagggaattacaattgctatgttcttaacaggttgttttttttttttttttttgagacggaattcttgctctgtcgccaggctgtagtgcagtggtacgatctcagctcactgcaacctccacctccctggttcaagctattccccaccctcagcctcccaagtagctgggattacaggcacatgccaccacgcctggctaattatttgtactttagtagagacagggtttcaccatgttggccaagatggtctgatccacctgcctcggcctcccaaagtgctgggattacaggcatgtgccactgtacctggccgttcttaacagtttttttaaaaaagcataaaaatacgttagctaaaacttgctttagattctccttccaaagctttttgaattc

SEQ ID NO: 205154 - DNA, 1000 bp, Homo Sapiens
atcacatactaggtaaatgtttttgccaaatatttgaaatacaaaatgtttaaaactgaaggtgcgatatcagtatccagctgagtggaccattcttactcatgaataacagagggggcaagcagaacattcgtgaatcacttctcctgtactatataaacattagtactttctgctttcaaatttagaagagaacagaggcctgcatctcacctatgaagcaaatgggaaatgtggggaaatgggtgtgaaagagaatgaagtaagctgcaaacaaagttttattcttaagactaggtttaacacataataataataaaagatgtcccacaacagtgggaatagatcaattcccaaccatgaaattgttttaaaaaaactattcaaggccgggcacggtggctcacacctgtaaccacagcactttgggaggctgaggcgggcagatcatgaggtcaggagatcgagaccatcctggccaacatggtgaaactccgtctctactgaacaaaaaatacacaaattagccaggcatggtggcatatgccggtaatctcagctactggggaatctgaggcaggagaatcgcttgaaccggggaggcggaggttgcagtgagccgagatctcgccactgcactccagcctggcgacagagcgaggttccgactaaaaaaaaaaaaaaaacgcaactattcaattccgtcaagttgaggaatagaacaaatgtcgcccatttctggcattccacaatttcaaacccatgtgttttaaatatgggttcagacctctttgcattcaagactcaaacattttgcatagaattaataattctcacattttcctgtgagggagaaggaggcacaactgtgctcatccacattttatagggttggcaagatactggtgtgatgttatccaaagccatagagattgttgccaagactatagttcatatcagaactgcagtgaaaatgcagtcattataattctaagaattc

SEQ ID NO: 205155 - DNA, 1000 bp, Homo Sapiens
aatgctaacaatataaagctgagcatgaagaaacaggatataaaactgtatagagggtgtgattcctatttagcaaaatatgtctgttgtatgtaaaggtaagaaagaaataaaccgaaatgttaatagtggattggcagacagctggttggttaatttattttttctcttttgttcttctatagtctccaaatgtcctatgagaaaaaatgtattatcgaatatgtgggggatgtgactgccaagcccacaggtgctgtgcccttgcttaactcaggaagtgagccagggtcggagcgggggcccacagcccgccctctgctgggttggctcctctgggttttcaggaagttgccatacaaaatgctggccactaacttctcttttgagacaaggcactgaggcaccagatgggccaggaatgtggccggctgaggaagaaaccaatgggcttggcacagagcagcgagggtggccggtgctcacggagcctgagacatactacagactgcgtctccgccaggcctcggggaaacccgtgacatgaaaaggagttgatcccactctcagaggataccattttctgttccatttttgcaccactggcctggaatcttccccatctctagggaaatcacttccaaaaggggaatcgggagccagctaaataggaacacaccatccctcccatctgccttcctttcccatggccagcctgcgatcttggtgcttcttgaagggacccctcagggcctccctactccaggcctacctcctcactgcctctagagaactttctgaagcccccacctattgtggcccattcgcttcagctgtcagccactgtttccgggaaagaagacaagcatttcagactggcacccgggcccatctccacatcattccccacaacaaaccctacactccaggtatcaaacctcctacgacagtggaggtcagaaaagaatcatatagagtcaaaaccatccttgaagaattc

SEQ ID NO: 205156 - DNA, 1000 bp, Homo Sapiens
tatgtcttctttggagaaatgtctgtttaggtcctttgtcccttttttccttgggtcatttgattttcagctatcgggttgtaaatgatcttaataaattttggatattaatcccttatcagatatatagcttgcaaatattttttccacatttgtagattgccttttcattttgttgattgtttcatttgctgtgtagaagatttttagtttaatatagatccatttatttatttttgtttttgtagcttgaaatttactttttcctttccaatttggatgcttattgttattattttatcatcattattatcaattaattaattttcttatcttatatctcttgctagcacttccagtactatgttgaatagaagtggcaagagtgggcatctctgccttgtaccagatcttgatagaaaagtttacagttgttccctattgattataatgttagctgtgagattttcattaatagcttttattatatggagaaacttttcttctgtaccaaaactgttatgtgtttttatcaagaaaagatactgaactttgtgacactttttttctgcagctgttgagctgatcatgcttttatttttcattctgttaatgtgatatatcacagtgactgatttgcatatattaaactggctttgcatgccagggatatatcacacttggtcatcatgtataatttttttgacgtgttgctaaattagttttgctagtgtttcattgagtattgttacattaatgttcattagacataatttttttgctgtgttgctgaattagttttgctagtgttttattgagtatttttacactaatgttcattagacatattgacttccagttttcttttcctgtgggatctttctctagcttaagtagaaaggtaattctagccttgtaagatgtttttggaacatcccattattttgggaaagagtttgagaaggattggcaataattatttgaatatttggcagaattc

SEQ ID NO: 205157 - DNA, 1000 bp, Homo Sapiens
gattgctgatcctgaatggagctttccacagagatggtgataacaagtggaaatatgcagccgaaagtaaagagagtgagagggacactgtggaacgtctacacaatactaagcatttaccggcttttgaccaaacttttgaagagctggttatgctaggcaaattcatcattattattatttctgagatggagtctcactgtgttgcccagtctggagtgcagtgacacaatcttggctcactgcaacctctgcctcctgggttcatgtgattctcatccctcagcctcccgagtagctgggatcacagacatgtgccaccacaccagctaagttttgtatttttagtagagatgggtttcaccatgttggccaggctactctcaaactcccgacctcaggtgatctgcctgcctcagcctcccaaagtgttgggattacaggtgtgagccaccgtgcccagatggcaaatttcagtagctaaccaaaggcctgtttcctgggtctcctgggcacctataatatctggcagtcacagtagaatgttttaagccaatgacaatattccctttcctgaaggcaacaaagtaaccatactgtcctgggtagtgggtacttttaaataacaattctgatagatgaaggaaaacaaaactccttcgaatttaggttattgctagaccaaaaaaaaattctctaatgaaagattttaatattatgctatcaatatccctatctcagaattaaataataatgtgtgacagcctaccttcaggatatttgaaaaaaatcaatgatcttttaaaaatctgagctctgatatttgcaaagcacttttggttcagacaaggaaaagcactgaggaatacacatacagataaatcaatcaacctataaaaagaaagaaagaaattgctcacagaagataaacaaatcactccaaagtagaatttcattaaactctgcttaggtttgatcctcacacaagctacaggaattc

SEQ ID NO: 205158 - DNA, 1000 bp, Homo Sapiens
tggagaactgactttaattaacaaaaatataccggcataactggttttatatagtgtaatgccagaaagaaacatgctgctgacaggatgggaacagaccttttgtgatcaataccttttcaaagagaagactaaaacaaacgtttaattcccctgggattttaaggttttttttggcttttttagtggagtaaacaggggtacagaatgtagtaggcatatgattttcacaaacttcctttacagcatgtatctagttttaaattactttgtatctcccacctcagtgctttccacctaattatgtgcatgtgtgcatatgtgtatgacttgagaggcagtatagtaggatggtttcagggcccatactctggtgctagactgcaaaccactcactttggacaagatggttaatctttaaaatgggaataatgatgggatgttattaatatcaaataagtggttgttgtgaggattaaattagtttattaatttaaagttcttaatgtctagctcaaaaaactgctcaaaggtgttagctgttatcatacatgtttccaaggcagaaaagtatggttaaatgtgagattagataaatacgaaagaagttatattcttaaatctaacagatactaatttaagaggcatgcccaaattaaccattattttgctgcctgtgccaacagtctcttccccagagaaatcctacttttatgaatctttggctaggagctgatataaatctcattcttaaggatctaaaaaattctttatattttgtactcttctatcagaaataaatttttactttcttaaaaaatattttttggtagctgccttatatactttagtcctctattcttttctacagagcaaagaatagaaaactgattattacaggatctacctatccttccatctgttaattcattaataaaaattttcaaactcactaaaatgtacatggcactatgctgggcacaaaatttacaaactagtt

SEQ ID NO: 205159 - DNA, 1000 bp, Homo Sapiens
cagcctaaatatgctcttgcatacctattttacaatattgatatatcacttaaaaaataaatcaggcttggtgtggtggctcatgcctgtaatcccagcactttgggaggccgaggcaggcagatcacttgaggtcaggatttggagaccagcttggccaacatggcgagaccttgtctctattaaaaatacaaaaattaggcaggcatggtggtaagcacctgtaatcccagctactctggaggctgaggcaggagaatcgcttgaacttgggaggcagaggttgcagtgagctgagattgtgcctctgcactccagcctgggtgggagtgagactctgtctcaaaaaaataaattttattttaaatttaaaaagaacaatgaaaaatatggcattttaacagacacaaagctaagagggaacaaaataaaaacaatacttaaatactatatagttattactgagcaccataaacgtgcttgtttctacttagccattacttgcttctatgagggaggtttaaaaacctctttattacacatgcatacacataagcgagcatctcccacttgtagagcaaaatacaaacgcttgagctgggactcataatcctcttcacaatttggttccagtccacccttactgacccacttcctgccatccttctatccatctgtgaacttgttatttgtgatactgaactattatttgccagttgtggagggtaaaggcaacaagcacaatgcctggcacacagctagctttcgtcaagtgttggcttccatcctgcctcaaacatggcctttgtttagattatcccctgtgcatggaatgccccgcacccctctcctagccccaggtaaaattcccttcaaggcctacctcaaatgtcactgtcatcaagaaggagttccacaggcaattagttatcatctctattctcccacagcacctgtttttaccttaactataacacttttattattgtattacaactta

SEQ ID NO: 205160 - DNA, 1000 bp, Homo Sapiens
ttataaaatttagaactcatgggtcctagttcagtgttctttccactactgcaaggttcttttttttttttttttttttttgagacagggagtgcagtggtgccatcaaaattcattgcagcctcggccttctgggctcaagtgatcctcctacctcagcctcccaagtagctgggactacaggcacataacaccactcctggctaattttttaaaattaattttttgtagacacggggtctcactttgttgcccaggctgtacttcaggggttcttagccttttatatgccatgagcctccctaggaattggcagaagcatttggacaccttcttagaaaaatgttttcaaatgtatttctaaaacatcatgggattatacagaaaaccaattatattcaaatgtaattatcaaaatattttaaaatttgtgacactgtcgtacctgtgcctctttattaacatattaaatatcaagaaacagtagcaattctaataaatgtcataatttcaaagtagtgacaagtataaacaataattcaaggtgtttacaacaattgtgacatgcaaataactgtgatttctgttggtaacaaagtcactgatattgctacatataagacattgggagttaccagtaaccagtaatccaaacaggatgtggcattagagttttgaattgagataattatttaattaattaactaatttttttgagacagagtctcactctgttgcccaggctggagtgcagtggcatgatgttgggttactgcagcctcagcctcccaggttcaagggcttctcctgcctcagcctccagagtagctgggattacaggcatgtgccaccatgaccagctaatttttgtattcttactagagacagggtttcacctggtctcgaactcctggcctcaggtgatccccctgccttggcctaccaaagtgctgggattacaggtgtgagccactgcccctggccgagataattatttaat

SEQ ID NO: 205161 - DNA, 1000 bp, Homo Sapiens
aggcaggcaatgtatgttagacagagctatcctttctaatctctaaggtgattcctattcaggatttttcagttctatcatttccacattctttaatcatagaggaatccatgtcaaacaaggcttaaaataccccaggatattataaatacttatactcctttaacttcctcctagaaatatctcaccatcatgttcatcaaacttgtcaatgagagtgcacatccgatagtcccataactggatgaccccattatgtaaactagtcaggatccaaggtcttttggggtgaaagctgagccctgaaaaaaatagaaaatgatacaatgagctaactaagccccatgatgtcaccttctgtcaattctgataagaaaaagaaacatcaaggttaatcctaggttcattcattcgacatgcttgatgattttttactggatgccagacatcgtgaattttatgtttggtactagatttttgtcatattcctttacatattcttgggctttgctctaggatacaattaagttacttggaatcagttgatcctttcaaggcttgcttttaggttttattacagaggggctacagcagccttcattctaggcttaatctggaaccactattaaagcaatagccatctgaggtctctatttgaagccctgtaatattaggaagtctttcctttctggcaagtaggaacacaaactagtcccagttcactagtgtgaactctggggattgctctgccttctcctttccagtggtcctttttcaggttttgaatagttttctcacatgcagatcagtactcaaacaaagacctgagaagacatcctgcagatctctagtgctctctctctgcagccccctcttctccggtattttgcccaacaaaatctagccatctttgcttccccacactctaaatttatgtctcctcagaaagaccaagggattcccctcttcactgaagcctaaaaactctctaggcagtaat

SEQ ID NO: 205162 - DNA, 1000 bp, Homo Sapiens
tcattatcatcgtcatcattatcatcattgtagggaaagaaagagggtgatctctttcctccacatcataagctgtcacccttataatgaaaggttaacaagagaaaagcataataaaattatttaatcctggccaggcgcggtggcccagcactttgggaggccgaggcgggtggatcacctgaggtcagaagttcaagaccagcctggctaacacggtgaaaccccatctctactaaaaatacaaaaaattagccgggcatggtggcacagtgcatgtagttccagctactcaagaggctgaggcaggagaatcacttgaacctgggaggcagaggttgcagtgaaccgagatcacgccactgtactccagcctggtgacagagtgagactttgtctcaataataataataataataataaataaaataaaataatttaattctaattttacatgacacaggagacttcagaatgaagaccaaaagagaaaaggaaagctgttcatttttaatgcttaggttataagaagtgggaacagctggctgggcacggtggctcacgcctgtaatcccagcactttgggaggctgaggcaggcagatcacaaggtaaggagatcgagaccacagagaaaccctgtctcgactaaaaatacaaaaaaaaaaaaaaaaattagccaggtgtggtggcgggtacctgtagacacagctacttgggaggctgaggcaggagaatggcatgaacctgggaggtggagcttgcagtaagctgagatcgtgccattgcactccagcctgggcgacagaacgagaccctccatctcggaaaaaaaaaaaaaaaaaagaagggggaacagctgtgtagaaatgtgattggacaaaacatgtatgaactaatggcaatagactgagtggggaaacccagcaagggctatcgattcaggttcttcttagcctttctgtgcagcattcattccttctgcatacagggcagaattc

SEQ ID NO: 205163 - DNA, 1000 bp, Homo Sapiens
tcaacacgggggttgtagcagcaaattttattacagactggaaattgaattgaacaggtttacatttgaatagatttactacatcatgttctctgacatacttcatgggactgaaatccctctccatccataaagatacatttcagacagtatcattctctccaggcttagaaagcaagtcttgagccaaggagatggccaaacataattgtgcatttagatgcagggtacaatgcaatatttcactgcatttttaaagtataatagaaaaagaatattccacatttactcataaccatcccatcctttcgatttggtggttgtgggaggtggggggaggtggttaaaaaactgatattttgccatcgaagtgggcattaagaagtaaaggaaaataaattattatttgagtatatcagcaacagcagcaattccctagaaaacagatacttgcttgataacagcaactgaagaggtgtgaattatagataagcactgtcccattcactttcaccaacaatgtttaattaaacacagttcacacctcttcattcactcttaccgcccttcaggattgttcctgctagaaatcacaatggaaaaaatatttaaggaaaaatatcttctttaaacctggaaaagcaaatggtatgtaaatcatagcagtaaatcaagttaataaaaaattatatattcctaaaattggagaagtgtctccattaattcagtttttcaaaataaaacctaaatatagatcaataccacatcaatacaagtgttcattgttgtattaattttagaactttttaaaaaatggatttgcttttgaaaaataatgattcctcaactttcaaggacttgaaatcactcttaattccctttgaatgagcataagtttagtttgagtctctacaacaaaactaagtggcaacataaatataattaaggccagaaattgactgtcaatcactgatcattaactttcagaaatatgttttgt

SEQ ID NO: 205164 - DNA, 1000 bp, Homo Sapiens
gaagccctcggtggttcccattttagtcagagtaaaagccaaagccccagcaatagcgtcccagggcttacacgatctgtaccgatcccagcccagcaactccctggcctcctcgctgacttcgctccctctatctctttgctccactggcctccttccagagcctcagacacaccagagagtttcctcctaatgcctttatcctgttgactcagcctacaatgctcttccctcagcaccttggccagctccatcacctgcttcaaacttttgctcaatattcacttatgaggccaaccctgaccgctctacttaacattgccatctgtccccattcccaccatgctcatttctttctttctttctttttgaaacaaggtcttgctttattgcctaggctggagtacactggtgcaatcacagctcacagcaacttcaacctcccaggcttaaacaatcctcccgcctcagccaccctaggaactgagactacagctgcatgccacaacacatggcttttttttttttttttttttttttttgagacggagtctcagtcgcccaggctgaagtgtaagggtgcgatcttggctcactgcaatgtctgccttttgggttcaagtgattctctgcctcccgagtagctgggattacaggcacccaccaccacacctggctaatgtttgtatttttagtacagatggggtttcaccatcttggctaggctggtcttgaacttctgacctcgtgatccaccctcctcggcctcccaaagtgctgggattacaggcatgagccactgcgcctggccttttaaaaaaaatttttttagacatgaggtctcattatgttgcccaggctggtcttaagctcctgggcttaagcgatcctcccacctcagcctcctaaagttctgggattacaggcgtgagcaactgtaacatgaggtcccagcttcatgttcattttttgttgttgctacaacaaagtaccctacatt

SEQ ID NO: 205165 - DNA, 1000 bp, Homo Sapiens
cctagtaatagagaaaccagaaataaattcatgtatttatagccaactaatcttttacaaagttgccaagaacatacattgaagaaaggagtctcttcaataaatagtgctgtgaaaattggatattcatatgcagaagaatgaaactggaccccttttcctcaccatccacaaaaatcaactcagcatggtttgaagatttgaatgtaagatccaaaactataaaactcttagaagaaaacatagggaaaacacttcaagtgttgccattggttgtggcaaagagatggctaagacttcaaaagcataggcaataaaaacaaaaatagacaatgagaccatattaaactaaaaaatttctacatcataaaggaaatagtcaatagattaaagagacaacctgggctgggcacagtggctcacacctgcaaccttaacactgggaggctgagatggacaaatggcctgagcccagttctagaccagcttgggcaacattgcgaaaccctgtctctatagaaaaaaaaaaaaacagctgggtgtggtggtgtgtgcctatagtcccagctacttgggaggctgaggtgggaggatgacttgagccctggaggtcaaggctgcaatgaggtgtgatcaggccactgcgctccagcctggctgacacagcaagaacctgtctcaaaaaaaaataataataaaagagacaacctagtggatgaaaaatataattgcaaaatattcatccaacaaggaagtaatatacggaatttgcatagaactcaaacaacaataaagaaaacaaataatcccattaaaagtaggcaaattacatgatcagacatttataaaatgcatatgaatggccaagaggtatatgaaaaaatgcttaacatcattaatcaaagtttcaatgagatattatcttatcccagttagaataactattattaaaaagactaaaagtaacaggtgctggtgaagatgtagagaaaaggaattc

SEQ ID NO: 205166 - DNA, 1000 bp, Homo Sapiens
tttgaaacggaatcttgctctgtcgcccaggctagagtgcaatggcgtgatctctgctcactgcaacctctgcctcccggattcaagcaattcttgtgcctccacttcccgagtagctgagaatacaggcacatgccaccacacccagttaatttttgtatttttagtagagatgaggtttcaccatgttggtcaggctggtcttgaactccagacctcaagtgatccacctgccttggcctcccaaagtgctgggattacaggcatgagccacaatgcccggccctctgtgtatttttaaaaaatattttcctggccgggcgcagtggctcacacctgtaatcccagcattttgggaggccaaggcgggtggatcaggaggctgtaatcccagctactccggaggctgaggtaggagaatcgcttgaacctgggaggaggacgttgtagtgagccaagaccacaccattgcactccagcctgggcaacagagtgagactccgtctcaaaaaaaaaaaagtctcaaaaaaacccacaaaacttccctgtacttgtcatttattcagaaaacattttttgagagccaggcactgtgatattggttgttgagttgagtcagaagacgcagattggccagttgcagtggctcatgcctgtaatcccagcactttgggaagccagggtgcaagaattacttgagccaaggagttcaagaccagcctgggaaacatcaaaagcccatccctgcatggtggcgggcgcctgtagtccagctactcaggaggctgaggcaggagcatggcgtgaacccaggaggcggagcttgcggtgagccgagatcgcgccactgcactccagcctggatgacagagagagactccgtctcaaaaaaaaaaaaaagcccatctctacaaaaaattagctgggcctggtggtgcgtgcctgtggtcccagttacttgagaggctgaggtgagagaatcacctgagaaagagaattc

SEQ ID NO: 205167 - DNA, 1000 bp, Homo Sapiens
acaataaatgagaatacactaaattattaattaaaaaactgtgtgtcagattggattctttttttttttttttgagacaagagtctcgctttgttgcccaggctggagagcagtggcatgatcttggctcactgcaatcttcacctcctgagttcaagagattgtcctgcctcagccttcagagtagctgggattacaggcatgcgccaccatgcttggccagtttttgtatttttagtaaagataggatttcaccatgttggccaggctgatctgaaactcctggccttaagcaatccacccagctaggccccctaaagtgctgggattacagttgtgagctaccgagcatggccaggttggatttttaaaacctagttaatttaggccaggtgtggtggctcacacctgtaatcccagcactttgggaggccgaggcgggtggatcacgaggtcaggagatcgagaccatcctggctaatatggtgaaaccccatctctacaaaaaaaaaaaaaaaattaaccaggcgtggtggcgggcgcctgtagtccaagctactcgggaggctgaggcaggagaatggtgtaaacccgggaggcagagcttgcagtgagccaagattgagattgcaccactgccctccagcctgggcgacagagcgagacacgatctcaaaaacgaaaaaaaaaaaacaaaaaaaaaaaactagttaatgtagggtctgatgttagaagtgctttggaacttagacttcactctttctacacctcaatttactctgtgaaagagaactaagaatatctgctttgaaaacctcagaaaattgtagtgagcacaaatataataatttgaatgaagatgttggggaaaccataaagtcctacgcatatgtctgttcttattgttactctttgttcatttgaatctccctggaaaagcaacagccacgcttattaaaaggtgttatacgtattcatattactttttttaaatgaattc

SEQ ID NO: 205168 - DNA, 1000 bp, Homo Sapiens
cttgtatttctaacctgttccctatttgcaggggaaaattatctaaatggataggtccccctcaacctcccattctttccagtcaagcataactctaccctacttcttttatcatatttatgaaacgtaggtagctaattttcaaattaaagtatgcagaactaggactacagagtggaaattataagaagatagatttcaactgaatagaaaaaaagtgcttcctaatcactggagctgtttaaaaagtagagtggggctggctgtgaggaagtgagttcctagtcggtggaggggttcaagcagaggctgggcaaccatggggcaggtggaattcgtgcagcatcatcactaggggctcttttaaccatggtagcatataattctgtgaaaactttttactggacatcagaaatccacctgaaattttaagctttttgcttatttttaacttatccatttatggacattttcaatactaatcttgtttttcaagatgcagggcagctcccaactgcttttcaccatctagttactagagtaaattccattagtacgaacttctggatgttcatcatctacttaaggtggagaaaaacactgttcttattttatggataggacagccacaaagtggtcaagtataaaagtccatctcttttggattcccacaacacttgtcagctgcccaaccaccaccatccgccccttcccatatttattgaacaattactatatgtttggtactgaatgcaatacaaacatgactcggatattgactctatttttaagaagttaacagtttaagaggaaaaataagaaaagcacataaatataacaggagtcagcattttttttttttttttctctgtaaagggacagagtatctaggttaggccttgtacaccacatatggtctctgctgcacattcttcttcggttcctcaccccctccaaccattaaaaaaatgtaaatactattcttagtttgagggactta

SEQ ID NO: 205169 - DNA, 1000 bp, Homo Sapiens
ggagtgcagtggcgcaatctcagctcactgcaagctccgcctcccgtgttcacaccattctcctgcctcagcctcccgagtagctgggactacaggcgcccgccaccacacccagctaatttttgtatttttagtagagacggggtttcactgtgttagccaggatggtctcgatctcctgacctcatgatccgcccgcctcggcctcccaaagtgctgggattgcaggcgtgagccaccacacccggccttttttttctttttttgagacagggtcttgctctgttgcccaggctggaatgtagtggcaaaatcacggcttactgtagcctcaacctcctgggctgaggccatcctcctgcctcaacctcctgagtagctgggaccacaggcacacgccatcatgtccagctaattttttttattatttgtagagacagaatctttccgtattgccccggctggtctcgaactcctgagctcaagctatcctcccaccttggcctcccaaaattctgggattacaggcatgagccaccaaacaaaacccaaatccttttaaggaaggacttaaaaggtattctgctgtctgtccttctcaagttccaaaagaggacagccttcaaatcaacccagagaaaattctccctggtactatatgagtgggagaagattctgctgcctcctttggcaaggtgtcataactcagacagctgggaagtccctcctgatgtctaccctagccccaccctttctggggctgagctggttctgataagtagtgcctctgccgatgtcgttggcccttccctgctggagctaagccactgagggttgggctgcatttctcctcccaggccctaggtcctgcacactcatggcagacacaaatattccactgctgtttattctatgttcccacccagcctgggcaggggccgtgcacctccccagcatggggtgggggtgatgacttcacagctaaacattctctttgcct

SEQ ID NO: 205170 - DNA, 1000 bp, Homo Sapiens
taaaaatacaaaaaaatagccggacatggtggcaggtacctgtaatcccagctaagcaggaggctaaggcaggagaatcacttgtaccctggaggtggaggttgcagtgagctgagattgcaccactgcactctagcctgggcgacagagtgagactccatcttaaaaaaaaaaaaaaaaaagttgagaagctaggaggaaagcaaatggtgatatagccccacacacaggtggagagaaggaaggataagggagtctgtgtgtgaaagcttcttcatctttggtctctgggactctaggacatctgcccagaacaaggagttgggtagaatttagaacttgacaggaatagtcaagatttggagtagccactccagagaaatgagtcatgacagccagaaggctcgttggagcctcctcctggattgggagattactaggaaatgtgtattttaaatttccaacagtggtagctgtgcctagcagcccaggagaaagaggaagagcaaatggatgattggcttcacctaaaccaagagaaaggggtagtgaagggaggggtcgtgcaataaaactgctggtgagagttcaacaggtcagtcagccctcctttctccattcagaagtcttctattatcctttaaaaatacaaacctgatcatgtcacttctcagctaggtcctgttttacctaagacatagctagccaagaacccctggaggactctgtgattgggcctaaacaggaatgtggtgtctctgtctcatgagggcatgtgttattcaaggtccttcagaagattcactgggaagactgcattcacagctgaacattattaatcccactttgagatgaccagtctcactgtggcctctctctccccagatgggaacatggtatacccccaaaaatgaacatcggggtatcagaacaaatatcgccttttggccaaattctgaggagatttgcaaaataggaaattgctttttatagtgaattc

SEQ ID NO: 205171 - DNA, 1000 bp, Homo Sapiens
attcaaaatatgtttagtattaaatgtttaatctcaattcttaatttatttgatcaattaaaccaagaatttagcatcagagcatctttgaatgctactcataacagatcactgaaaattcaaactaatctattttgctgttttcctgggctcagcctataagactttgagttgctctactttctttttcttttgtattgaatgcccaggaccaaaacaaacaaacaaactactctaaaccttaaaaatatttctttctaaacatgccatgttgaaacagacaatccaaacctggtatatttttttaggtataacattaataataataataatagcagctatcatgtcctggaccacaggccaagaagagtcctatattgatgcatgatctttattgatcttcaccacaaccccgttaggttaggcactgtttttatccttttttgaaggatacgtaactgagacttaaagaaattcagtggtagtagagccactattcaaattcaggcatgtctggctctagcacacaatcttaattactatgatacactttcttaacttacatgtatgattcatgtaatgatccttctcaccactctactccggagaatttaatcaatgcataaggaagagtttaatactctcacccatattcaaatcattctaaggattagaatagttttggttccttaagctaaaggaatgttaaactgatgttaaatgctgatctctttactctcatgagatgaatataaagggactcaacctagcaactctgtgccattctctagttgtagctgtgcttgaaaatatcataattaaatttcaaagccagaatatttttgaaagatgaacctttcaaaaggctcagttttatcagtaaattataaacttgtagagatcaagaaggttgggattttacctagaatttatgaacataaatttttcctttaatgtgcctaccaatgacacttcttttcaatcttcgcattctgtgtat

SEQ ID NO: 205172 - DNA, 1000 bp, Homo Sapiens
tatgaccagcaggaatagagagaacttgtcaacacctatgtccagctggactgatcctccaggacagtaactaccttctgcagcaaaaccacactgaataagaaagatacctaataggcatgtgtcctatctgtcacaaaacaaaaccaattgacagttatttcacataattctaaagaaaaaaaattaccaaatgtttacagtcacaaaaaggtaacaaacataatatccattaatataaaatttaatgagtaaataatactggtattaatcatgttgcctttttctttagagaatgtaaaaatattgactacctccatctctttcaaccttattttaccccgaaaagcaatacattattcaaatgaaacttcaactcagggagtttttaagaaccataaacctcaagatcatcctaattggtgctggccttcaaatctagcattcacccaaatgacactatcactgaacaaaatacttctcaaactatgagttgtacaactgtttccagatcactcaccaagcacacaagaaaaaatgaacatttttatttttatgtcaagaaaaacagcctccatggccaagcctctccagcttcttcctgcaaagcccagtgtaactgacccctgctcctccagctggaacaaacagagaaaactggagtgtgaaccagaagacagcaaaaaacagcctgcaggccagtctgcacccagcttttacatcttttctaagggttgtaaagataaaacaaagaatatgtgacaaaaattgttaagaggcacacaaagcctaaaatatctggccttttacacacaaaatttactaacctcagtctagactaatgccagttcccagagaaagccctgagaaggcaaactactactgagtatcaatttccagaagcagactgacaaaaatctaattttttctaacttttgaagtctccctttctaactgccggagctctactcaagctgaccaaagttctagagctgaattc

SEQ ID NO: 205173 - DNA, 1000 bp, Homo Sapiens
gattcccagtagtatatgattttgtgagagagatgcaggtatctcaaactcctcttcagaaaaatgggaaacctacttcccataatatggctgtaaagggttaggaaagaagagataatattttttgagtcaaagaagaccaaagtagaagaaaaactaatctctgtttttaattttcttttctttttcttttcttttctttttttttttttttttttttttttgagatagattctcactctactgcccaggctggagtgcagtggtgcgatcttggctcgctgcaacctctgcctcctgggttcaagtgattctcctgtctcagcctcctgagtagctgggattacaggtgcccaccaccatgcctggctaatttttgtatttttagtagagacagggttttaccatgttagccaggctgatatcgaactcctgacctcaggtgatccgcccacctcggcctcccaaagtgttgggattacaggcgtgagtcaccactcccggccttattttcttaattattaccactttttaaaggagtacaaggcattagagtcagattacccatgttcgaatgtcagctctactatttacagctcttccttaacctctatattcctctgtttcttcctctgtcctataggaataatgagaatactgaggcctcagagatattgtgaggatgaagttagatcatgtaggcaaagcttttgaaacagttcctgtcatgtagttagttcttcttcttcttcttcttcttttttttttttttttttttgagacggagtcttactctgtcacccgggctagtgtgcaatggcatgatctcagctcactgcaacctctgcctcccaggttcaagccattctcctgcctcagcctcccaagtatctgggattacaggtgcctgccaccatgcccggctaatttttgtatttttagtagagacaaggtttcaccatattggccaggctggtctcgaacttctgacctcgtgatc

SEQ ID NO: 205174 - DNA, 1000 bp, Homo Sapiens
agcatgtggcagtaagcctcacgccaataagtcgtgtaaggttcaaggccccgtgtgtgcttgtggaaggagggcggggtgcggagcgggtgagggacccgagggtgtataacggggggtagggtgtcgaggaagttctaagacatgctcatagggattatgtccgcagagaggcccggtgtgtgttcatgggggacagggtggcacaggtaccagaacgtgtgttggtggggtcagggctctgaggcctggtgcgtggcgatgaggccctggatggtgttaatactgcgtgtctgtccgtggggcctgcagtgtgtgagaatgcagtgtgtgcttgtggagggcaggtagctgaaggactcgagtgtggtgtgtgcgccagtgggggtcatggctgtagagggtgtatgcctgtggcctcgaaggtctaggtagtttgggacccagtatatgctaatgagggcagagtggaggaaggacctgagggtatctaacggaggaaggactgtggaatacctgagcctggcctaaaggagatgagaattgcgtgtctgtctgggcccaggaaggagtggtggggaagtgtcttagcactgtcagaggcttagtggacgaagggtaaaggtgatgtgaggtgtgagtgtgtccatggacacagggaatgtgagtctcgagggcacactaggaaggagcagggtaatagaagtactggtggttgctaatgtgggtttagagacatagaggcacttcaatgtgtgccatttcgagagtcagctgtgtgaagtctggaatatgctaataagcatcagaaccttgtgaagattgtgcccttgtgtccgcggaggaccagagtatgttgaggttccagggggtgctactcgggggtagggctgcggaggggatctagtgtgtaataagggggatcagggctttcatgaagggatctaagtgtgaaccaacaaggattatatctgtggagatatctctgagcagagagcaa

SEQ ID NO: 205175 - DNA, 1000 bp, Homo Sapiens
catccagtgatgatgaggcaactagccaatggaccaggattacatgctgactgtagcagagcaaaaatatacaaagactcctcaatgagtttttgtaggaattcaattaaagaatgggaagctttttttctatgtttttttttttcccatatgagagaggaaaaaaagtccttattgttttagaaattttaagtaatattattttatacttgtgggaaaataattccaggcctgttttgctggaagaaagatgctttactggagccaaaatggtagaaattcatggttcctctaataatacctgacaaacatagaacctctgtaatgaagagaaggggcaaggccaggtaatagcaatacagatatatttctaaggaacaaaataactagacaatctgttaagggttctatcaggggacctgccccgataatcacataggttttctattttccaaagcgtcgactggcttgagaaataaaaggacagagtacaaaagagataaattttaaagctgggcatccgggggaaacatcatacattggtaggatccgtgatgccccacaagccacaaaaaccagcaagtttttattagggagtttcaaaaggggagggagtatacgaataggtgtgggtgacagacatcaagtacttaacagggtaatagaatatcacaaggcaagtggaggcagggcgagatcacaggaccacaggaccgaggcgaaattaaaattgctaatgaagtttcgggcaccattgtcattgataacatcttatcaggagacagggttttgagatcaaccggtctgaccaaaatttattaggcgggaatttcctcttcctaataagcgtgggagtgctatgggagactggagtttatttcacctctgcagtctcaaccataagagacaggtacgctccggagaggggggcagttcagagacctacccctaggtgcacattctctttctcagggacgttccatgctgagaaaaagaattc

SEQ ID NO: 205176 - DNA, 1000 bp, Homo Sapiens
tcgcaagggtcaaagactctaaatggaggatctgatgctcaagatggtaatcagccacaacataacggggagagcaatgaagacagcaaagacaaccatgaagccagcacgaagaaaaagtgaggaataggttttaatgggtcttgtgtgttttttattattcaggtttttaatcacagttctgttccaaggttatcttactataataagcagttatcttttgatcacccaattcctgaattcagtaagcaagttacaattcaaaaaggaagaagagtaaaaaccttttattgacagtgactttgccactgaattcaagggaatggaactagctgggaacccagttaaaaagaaaatatttgctcctggactacttttactgagatactgttagtaatgacttgcattcacactttcttgaattgtgaaaggataattgtaaaaagttagatggagaatcacagttttgttgttgttgttttttctttgagacagagtttcactcttgttgctcaggctggagtgcaatggcacgatcgtgctcactgcaacctccacttcctgggttcaagcgattctcctgcctcagcctcccaagtagctgggattacaggcacctgccaccacgcccatctaattttttgtatttttagtagagatgaggtttcaccatgttggccagcccggcctcgaactcctgacctcaggtgatccacccaccttggcttcccagtgttgggattacagctgtgagccaacatgcccggccatcacaggctattttttaatacccaccctaaaataggctatggagccatagttgaagtcttgctttgttccactgtgtatctgaaggagttagatagaagcatcccttctaattctgaaattgagggaaatcttgttgtctatgtgtgtatcaacctctctttttattaagattttgaaatatgttggtatcacagatataaaacattctcatgttctttaaagagaattc

SEQ ID NO: 205177 - DNA, 1000 bp, Homo Sapiens
aaattacccagcctcaggtagttctttatatcaggtaaaatgaattaatatagaggagaaagaaagatggaactgataaactatccaatgaatctgtctttgtagaagagagtaggaagagatattttataggagcatatagatgaagaaacgctgattcatacaaagaaaactgagcaaacccaattattaacttcaagaaaaacagccatcctcaaaaaagaacgttattacagttcactacttgactgagcagtaaacaataccttcttaactatatataaccaatactgtctaatcaaaacttataaatcatcatttaccataacaagaaatgattaaataatatctaaaagtcataaactgagaaagagccatggaagcttgttatttggaaatacatattaaaggaaaagtttagaaagttgaaaattgttgcctctggtgatcatgacttaacaaagaggaagggtggtttaagggactagcattcttatcagaagattttaatactaataaaatatttttaagacatagtattcacatgtctatttaaatttacttctaccccaacatgaattctataatctatgtaataaaaacactgttatataaaactatattataatctatgtaattcctctaaactgaaaacaagtagtcaactatagctttcaaatataagaaaaacaagtatttcagtcactattttataagagaaggactacgtgggccttctaatcatggctttcctctgatcattgacctagaagtggtgtctgtaaggtcccaaaataggaatgagatggaaagtagcaacggtgttcactactgttatagaaattacagaaaataagcctgccaaccaaaaaaagcccaggaccagatgaattcacagctgaattccaccagatatacaaagaaaagctgctaccattcccattcaaactattccaaaaaattgagaagggactattccctaactcattctataaagcca

SEQ ID NO: 205178 - DNA, 1000 bp, Homo Sapiens
gcacggagtttaatgtggttaggaagcaaaatacaatctaagactcagacttgcttttaatgaatccaggagacctgacaatgatacattataaaaaacaaaaataaaaatctgacaataccccccaacttgtcagtggcttcccatagcccatgattgggttgagtgagtctcagtgcataggaagcagtgcagtggtctttgtggcctgacctccgcccacaccttcagcttcagctgctaccgctctctgagtactgaagtttttatagttccctgagggcgcacactgtgacactcctgcattctctgctagtgtttagtttcctttgctgggagtacctttccctctctgcaagactcaatttacgcaccacctcccccaggaagcattacagatcccccaaggctctactaggtcccagacatggcattagtctgggtgctttgtttaccatgctgaacaaaaacagaaaaagtccctggtctagtggagcttatattttatctaagagagggactaaacaagaaatatagaaatgtcacctcttttgcatagtagaaggtgccaggtctaggaaatacaaagatagttaagcagaataatgagaatgggaaatgtaggggatgagaaaggtggaatgctacattcaataaggtaggtgggtgggcctcaccttctagacagccttaaaaaggatgagggaatctgtgatatggctaaatctagggaaagagctttccaggcagagcaaacagacagccaaagagattactctattgtgagagtctccatgttaaacaaataaaattccatccataaaggaagttgataggttggttttccaaagtatcctttctatagaccaatatgtacatatttccatttcaatttttgaaatctaaaaagaagttccaagacaaatctctcctttgccctcttccctccccacacccctgcacaatgcacattttgtggactattaatagtctagaattc

SEQ ID NO: 205179 - DNA, 1000 bp, Homo Sapiens
aatctcctgacctcctgatccgcccgctttggcctcccgaagtgctgggacaggcatgagccaccacgcccggccccttttagccttttcttttcagtggtttggcctaatgggagcaagtttgcagacgggggcatgagcagggtgatgcccaggaagggggtgatgttggggggcaggtacactgtgaccagcaagttggctcggccaggcacctggccatcgcacggtcagcagcatgcccaggaccagttggggaccgctggggacaagacagggaagtgtgctctgctggggacagatccacaaaggggaagctgggcagcaggcaacaggtgggacacagcagggctgggagaggctccgtcgggaggagccaccagaccgaggtggtgtggggaccgggacagaagggcaaggccagcctgcaccagacgagtagcagtaccagggccagaggggccgggtggagacgtgcaaggaggagaggaccgtaggacagcccgcgtcgtggtctcgtggctggtatcacggtctgcactatgggccccatgttttggcttgtgtggcagcccttgccatggcctatgtggccgtctgtgtggcggccacaggtcgtggcctttgtatggtagcctgtgtggcagcctcacatcatggcctgtgtggcagcctgtatggcggccctcatcgtgccctgcgtggtggcctgtgtggcggccctcgccgtggcctgtgtggcagtctggtgtcctgtgtggtggcccgtcgtggcctgtgtggtggcctatgctcacaatgcaggaaaagcctctggccacgtggagccggtgagtgacaaggtccacctgctgccttgagtcctccatgtgctggacacaagcagtgggcgacaggaccaggggtgctggaggcctagggacccactgcagtcctccgagccacagatgatggcccagaccccaggactgcagccaaggaggtgcccacaaggaggatc

SEQ ID NO: 205180 - DNA, 1000 bp, Homo Sapiens
ccagaggggataatcttgccaacagcttgattttacattccagatttctagtctccaggcctgagggggaataaatttgttttgttttgttttttatttgtttgtttgttttttaggcggagtctcacgcttgcctaggctggagtacaatggtgtgatcttggctgactgcaacctctacctccttgttcaagctattctcttgcctcagcctcccaagtagctgggactacagatgcgcaccaccacgcccgacttatttttgtatttttagtagagacagggtttcgccatgttggccaggctgatctcaaactcctgaactccagtgatccacccgccttggcctcccaaagtgctgggattacaggcgtgagccactgtgccccgcctaatttctgttgttttaaacactcaagtttgtggcacttataacagccctagaaaacccattcataatctttgataactttttcactacgtggtatgaaaacgtgtttcaggctcatcttgaatagtttgtgacccaggcctgcagtgtttcttggctgattttaatagacagagtaggggaaaaatatatatatatatgtcaagatgaaatacttcatgagttcatagtgatgtttccaattcgaatcagggctggtatttctgattcaaattctgaaaatcctgtttctcaaggacctaaggataatagaatattctacagtttctcatctgctttatcctgcattataaatacaatagtctcagaatgaccatattaatactaccacaagtcattatgattattgaaaacagcttaaaaaattttgctgatcctatacacattctctggttatactaaatttgcattgtcagagcatataactattacatatactataccctctgtcttttaaccttcagttaatctaattctaccagtgattatatatttaatgctcaccagtcatctctatgctgattgttctcaagtcatttgggttgtcta

SEQ ID NO: 205181 - DNA, 1000 bp, Homo Sapiens
atatcgatgtcatttctggaagtcctggaaggcaccaggggccactggagatgggtttgagacactgggatacttcccaggcaacagagtagaagaaaagggggcaggtcactgccatctctgccctgggatggcttccaggtttgtggaaaatggctcagggcagaagcatgtgtagggtgtgtatgcatcgtctctcatctgtatgttgctgctatttttagtagtatcaatgacatgctatgttccctctgaacctcagtttcttccctatgagctccaggaagtcaaagaccacatccgtcttgttatcactgaatccccaggacttagcacattgctgggcacaagaaagcattcaataaatattttctggattgattaatttctggtttccaggtggaaacaatgacatcctgtgaaaattctttccaagaacttgaagtggcacccgaatgcctggggatttcatcagtgtggtggccgtgatgctgatcaaggctccccagagcagttggggccggagctctcagaatgatgaaagccacagaagaggaagctgaaggagcaggacacggccactttggagtccacaaaatattagtctgtgtcagtagctccactgaagtgtgacaaaacaaattgaatttatctgcagcaagagggatttaggtcagaccttctagacactgtggggaggtgaggcagggtatagacgtccctccctgagcaaacagaaagcttcaattctcatcacactacccctaactacttactggcagtggagctccagctaattccttcacctctctgggcctcagtttccccatctgtagctgggggtggggggcagcggtagactccacggtctctacggttccttctagctcttaaagtctggaattctgtctggaggctgggccgagctggcataacttcagaaggctgtagacggccataaaagtggtgggatccctggggatggagaatcctgcaggga

SEQ ID NO: 205182 - DNA, 1000 bp, Homo Sapiens
aatttcatgactacattgcataccacaatacagtaaaaccagaaattgaaaaaatgtgtaaacaaaaatcgtccaactacttggtttgaaaacactcttcaaaataatccacggatcaaacaggaaacgaaaactgcaatttacagaactcttgggcaataatgataatgaaaataccacatatcaacatcaagagaagacatccacatctgtaatcagaagtgtaaaatcaactttagcctaaagctgcagacttacttattttaagttcggtctaaaggcttctcagtacatcgtgaactgtaacctacctggatgtataaacagactgtagcctacttttgtgccaatcaagtttgggccaatcacaggctgccaaccattcaaactgtgttcaaataagctaaatgcctgagctgtaaccaatccagctgtttctgtgcctcacttctgtttcctgtaagtcacttttcttttcctgttcgtaaatattgctccaccacacagcagcgccatagtcactctgatcctattctagtttgggaagctgcctgattcacaagtcattatttgcccagttaagctctgctaatgttaatttctctaaagtttatcttttaacagaagtgacttcaaagggtttgaggaaaatggtaatgaacatttgttgagcaattactgtctgccagacactgtgctaagcacttttacaagtggtttctcaatgattccccataactaacctgaattgctttaattatcaaataagaaagaatgagaatatatgaagtaagcatataactcaagatgtcaaaaagagggatgttaaattaagctttagaaacagaataaagtaataaagttaagagatgaaactcatgagaaacctgtgaaggaacagaattgatcaatcagccccagcaggtgtacatagcagaagctgtcatgcttctcccatatgctcagagccacatcacttcagtgtcttccaaaagaattc

SEQ ID NO: 205183 - DNA, 1000 bp, Homo Sapiens
gacttaattttatagttttttcatctatcttttatacaacattttggcccttcctttcagtctgtataccgtattttcctcttttctgtctatatcttctggttagtaaatcacatattgagactgactgttttagcatttaaaagtttagcaattttgttaaacaaaaagacagaaaatttactgctgaatggcaagggaccattctggtggcctttgttttgttttaatagggtggttgagagaaaaaaagatgcagttcagctctgaaccattctgtaatagaccattattaagagagatgggaagagggagccctttacttccatttcagagatgtttgcacttggaagtatatgaattcttatgttttcttcggagctgtttgaactttattatataatgtacacattggcatccaattattcaccttcagatatttgtgtgttgcccaaatattctagcacaaatgctagaagtgcctagcatttctcaaactgacacctatgggttccctggatctttgagaacttatttttggttatccatgagtacagtaataatgtttagattttctatttcattatataaaataattgatataagatattctagattatctagatgccccttttgcactggtttacatttacattggaacaaagtaaaggtcaattgatatcacaaaaactaatgcagagtttagtcttagtttaaattgagaaaatagttgggagaattgaacaagcataagactctggtacaaagatgtaaaatacaaaagaatatgcatcatgccacatttaccttttaggtgaatgtattgagtaattaggtagataccatctttgtataaattacaacacttctttcttttgttttgcaaagttatgaaaatattttcattaatgatattttaaaatttggtattcagttttgttgtagaaagatgtggaccgtcatataaaatgaacgattggtcgtcaaaagcgagcttgct

SEQ ID NO: 205184 - DNA, 1000 bp, Homo Sapiens
ccaggctacagtgcagtgtcgcccaggctacagtgcagtggcgcaatcttggctcactgccagctccacctcctgggctcacaccattctcctgtctcagcctcctgagtagctgggtctacaggcgcctgccaccacacccggctaattttttgtatttttagtagacatggggtttcaccgtgttagccaggatggtctcaatctcctgaactcatgatctgcccacctcggcctcccaaagtgctgggattacaggcatgagccactgcacccggcctatcctccctccttttaaactgtggttgactggctgaggatgacaagccctaattgcttccctttaacaaccttgtacttcaaacagaagtctagctgcaaccctattattgtattgagagggtctaatttttcatagggtaggaattaaggagaccttggcaatagttgtaagaccctggtattctctgtgcatctattccattaactgtttttttttttttaaaaaaacaaaacaaaggtgaagagaaaggggaacagaagaaaaggtagccttcaaaacctttttttacctctgaaatgtttagtaatttattatttaagcaaaatactggaatcaagaggactggcctgatggcataaaagccctatactgtggtgcatgacttcacttaatgactggtttttctacctggctgtttctttcctctctggcttctaaatgtatctaaatgagctcatatttcccagcctaaataagctaaaaaggatcaattatttgcagtctgtgagactcgagagcaatagaaatgcaagatttttttccagtgtgcaattaggattggttagttgaggctccagctgcttttgacttatcaaaaaggcagtataggccacatgtgggaccccacgtctgtaatcccagaactttgggaggacaacatgggaggactgtttgaggttaggagttggagaccagcctgggcaacacaaaaagatc

SEQ ID NO: 205185 - DNA, 1000 bp, Homo Sapiens
tgcccttgctccaggaaaaactcctttctcctatctcctggcttccagtccagtgtcccaggggctctggccgacaggctagcatgagccatcatgcctcttggtatgtctcactggagtaatttctcacctatcatgttttgccatctcagctttgtcccagtgcctcttgagcttctccgaaggtaacctaagcttcctgtttgtctgcctattgcaacagcacctattgccacttccttggcagcctgttgacttggaaatagaaccctacatttggtttctgctcctgacactttctgagcttcctctctggtcttctctgctcccattccttcctctgccttttgctttacagatccccttttaaagtcccttccatctgggtattacactactcctccatttttctccctcttcacatctgggtcattagaatccattgtaccagtgtaggcccattaaggacagatgcttccactctgcagtaagaattgtgtctcagtttatatttttctctgtagacatatgtcagcttctcttgtcatagtgtgtgtacatgcaggttgaacaagtagaggacctcacggttccaatttgaagtccaaaatactatcaccatcagctgtaaatttggggaaactgagggacaaagaggttaaatcacttggatgagtcatccaactggtgagactatgaactgggattcaagctcagagagtcaggatgacgaagtgtgtgctcctaaacacttaccttaatatgagggtaagcaggcagggtgaaatattgaggacactaacaaatctagtcaccctttacctgggtccttctttttctttctttctttctttctttttttttttgtaagttgatttaataggttgtaagtttatctacgaattccaaaaagtaggtgtgttctttaataagcagtgtatttgagtatcttgttttcctatagtgaggagaataaaatatgtaaaagcaggaagacaga

SEQ ID NO: 205186 - DNA, 1000 bp, Homo Sapiens
atacccattctatgaatgaaaaaactgagactcagaaatactaaatacagccaggcacagtggctcatgcctgtaatcccaacactttgggtggctgaggtgggcggatcacttgaggtcaggagttcgagaccagccaggtcaacatagtgaaaccctgtctccactaaaaacacaaaaaatcagctgggcacagtggcgtgtgcctgtagtcccagctatttgggaggctgtgacaggagaattgcttgaacctgggaggcggaggttgcggtaagccgagatcccgccactgcactccagcctgggtgacagagagacactccatttcaaaaaaaatagtattatttagtatactacataatttcttatttagtataaacctgtccaagaaacacaacaaataggaaagtcatgattaaaatctacgtctaattctggccaggcacagtggctcacgcctataatcccagcactatggtaggccaaggcgggtggatcacctgaagtcaggagttcgagaccagcctggccaacatggtgaaaccccgtctctactaaaaaatacaaaaattttctggacgtggtagcacgtgcctgtagtcccacctacttaagaggctgaggcaggagaatcgcttgaacatgggaggcggaggttgcagtgagctgagatcgtgccactgcactccagcctaggtgacagagtgagactccatctcaaaaacaaataatttaaaaaaaaatctacatctaattctaatgaccaggacactccccttctaccacaccaaggatggtaagtggctttcaattccaatgccaactacattttaccgatggtgatgacgtggaacattctgttacataagtaaagacttttaatcaattattgtctgccataagaataacatataaaaacactagcacatatataaaccaagtatttaccagattattctcataatcagactaaaaataccagaggcaatttgaattc

SEQ ID NO: 205187 - DNA, 1000 bp, Homo Sapiens
acgttattttaaagatactacttttactatttttatattgttaaagcatgatataataacaacaaagattataaacacttattgagtacttaatatacttatgttaagtgtatgtaatcctcataccaattggagcaaaaacatttgcttcatttgcttgcatcaattggtcatatatatatatatatatatatatctatctcaattggttatatagataacataagtatagataacataggtaacattcagaatagtcacttcactactttaagagctaattaggtattcatacagatacagaacctactgacacagaaggacaacttgtcttctgtgtataacataagttagcactaacacttaacatcagttaagatactgttattatccccactttacaggtgagaaacagacagaggatactgaaggccattgttaaaagtggcacagaggaaacttaaaccccacagtttgatttcagagcctatgatcttaaccactaacctatacacactagtagtcatctataggtacaatatacaaattaggatcaggagacaaatgcacatatttatacaacacagttaatattaaaatctcggtggtttttacttttttaacgtttaaaaacctgagtaacttttcagattttcatgtccctttttcagtagtaagtatatagaaaatttccaatgctgaaaacaagtataaatgcatggcctaacatacctgaaaatgtttctctatcctaaaatgaaaatacgttagtttccctccaacccccaccccaacccctgccctgctttggaaatgcagattaaatcttaagcctcgttttcatgaagctcatgtggataaatttatctcgtgaataagttcagcagcaaatcacaatatgatcttatacaatgaacatttagaatagtcacgtcactactttaagagctaatcaggtattcatagcaaaagtccctgagaaaatttaatttacctaaaa

SEQ ID NO: 205188 - DNA, 1000 bp, Homo Sapiens
agtgggatttaactcttcttaaatggacattcagtcatgtttgcatttttagctctgctttcacctccactttagaaacattgatattatcatttccggaacctgtggagtatctgtgcatatgtgtgcatgtgtacatataagtgtgtgtgtgtactggcaaaaggggggcctctgttatataaatcagatctcttctaattttaggattcagcttcccagtatcctagaatgcagataatacagtaactggtgatataaccttgactttataagtgacagcaacactcagagagactagagcaacaagagggaaaaacacaagtgcctgaatgactttgtagacaaccaattatatgagaaaaataaacttctttctcatttaaactactgcatttggtctatttgttatagatctttgccacccacctaacaaatacaaagaataactatgtttccagtctaaaaggaatcatattttttagcttatactaaatgtctttctcaagaataattgcttcctctgtcacgtgcgtgcgtgtgtgtgtgttgcttcctctgtcacgtgcgtgcgtgtgtgtgtgtgtgtgtgtgtgtgagagagagagagagagagagagacagacagacagaaagataggtagggagagaaaagacccaataaaagcctataacaccctagaacgaattattccccaaattcaacaatttacccaaacagaggacaaaagaaaaaataaattttaggggaagaccaaatgacacaagaaaactgggtattctttcccctaccatatgaactcctaatacaagaacctaacccaaactaccttttgaatatatatattcaaagtgtgtgtgtgtgtgtttgtgtgtgtcattcagaaattttatatctaagatccagaatgtgttttttgtttgcttgtttttggttaagctcaatggtgtggtggaatgtgttcttcaggttctgaagattcctcactcaacactgagg

SEQ ID NO: 205189 - DNA, 1000 bp, Homo Sapiens
gtagctgggattacaggcatgcgccaccatgcccagctattttttgtatttttagtagaaatggggtttcaccatgttggccaggatggtctcaaactcctgacctcaagggatcacccactttggcctcctatagtgttgggattacaggcaggagccaccatgctctgcagggacctttacttttcactatttctggttcaggttataaaattgcttagctttatctgaatcttaggtcttcctgtgtattctcaggttcattgttacctgttgcatccttttaatcatcttctggttccacttttttttttttgagacagagttttgccctgtcacccaggctggagtgcagtggggctatcttggcccattgcaacctccacctcccaagttcaagcgattctcctgcctcagcctcccaagtagctgggactacaggtgcgtgtcaccacgcctggctaattttttgtatttttagtagagacagggtttcaccatgtttgctaggatggtctcgatctcctgacctcgtgatccgcccacctcagcctcccaaagtgctgggtttacaggcatgagccactgcgcctggcctccacttagtttttaccagtctgtgttctctaatctatacagtcatctaaaaatagaacataggttttgaaataatacaagttaaaaatttaaatgaaacaggccaggcatggtggctcccgcctgtaatcccagcactttgggaggccgaggcaggcagattgtttgaggtcaggagttcgagaccagcctgaccaacatggtgaaaccccgtctctaaaaatacaaaaattagctgggtgtggtggtacgcgcctgtaatcccagccaagatcgtgccacttcgctcaagctggcgcaacagagtgagactcagtctcaaaagtaaatacataaataaatgaatattgcagtgtgctttatgactaatgaaattgacagacattgccattttatggaattc

SEQ ID NO: 205190 - DNA, 1000 bp, Homo Sapiens
tctcacttagataagtatacctaatatctcacttagataagtatacctaatatctcacttagataagtatacctaatatctcacttagataagtatacctaatatctcacttagataagtatacctaatatctcacttagataagtatacctaatatctcacttagataagtatacctaatatctcacttagataagtatacctaatatctcacttagataagtatacctaatatctcacttagataagatacctaatatctcacttagataagtatacctaatatctcacttagataagtatacctaatatctcatttagataagtatatctaatatcacttagataagtatacctaatatctcatttagataagtatatctaatatctcatttagataagtatacctaatatctcattttgtttgtttaattggattaactttacccaaaaatggatcaactattttaacattacttagattcttagaagtgctattttccctccagacgtctccattgcctaaatgccattttattcagtaaagatgttacggcacattatccttttgtcttctgtttcttggtcatttaatcaggttgactaaatgttccctgagctctccacctgttggagttattaacctctgtatgccctctaatcccaaatggatccaccaactacctcaaccagccatgagccaaagtggagactgggtgtggctccagcatctggagagctcccccaaagtacgcatagttgaaagagggggaagaaggacgcagagaaaattcaaaatgaagataccagagatttcccccgttgtctcaaagacttatgaacgaagggagataattgagcaaaaagttccattaataaggggcaagtggttatctgtagatatatacctgacatctagtaagcatctgagaaatatttcattactatacttatttagttattctcaagttaggtagtcacaaactagaggctattagta

SEQ ID NO: 205191 - DNA, 1000 bp, Homo Sapiens
ggccgaatgtttttattttaaatagagacggggtctcactatgttgatccggctggtctcaaactcctggcctcaagtaatcctcctgccttggcctcccaaagtgctgggattacaggcgtgagccaccatgcctggcctcattaatatttttggagtgatagaagaaatggctttcaatgctggaaagatgccttgcatcaccctcacggtcaggaaacacacacgtcacactggatcatcttacaagctcactttccttatacttcctcataaaatgagaggtgaatttatactcggaacaaacctcattgcttctcctaggagatggcaaaggggtatctactccatctaggatgaatgcactggcatcctgaagctcacttcggttaggttctctcataccttaggcaaccacataacccatcattgggtcctctcacaccagaaaatcatgtctcttcatcttcagtcaggaagtcattatcccggagttgtgtgtaccccctgtcctcacacttcaagcgggtacccttttataaatggggcaattttgataatacagacagatctcatctccacccacgataaatcttctcatattcccagaagtttacacttcatagtctctgggcctcactttcctcgtctgtgaaatgggagtaatagtacttacttcataagactgcaaaaagcgaatgagttaacacatgtaaagtgcttagttaacccccaatacttggctgttgtgttttaagtccttctcacattgaatagctcatctatagttagtggggaccctcgcaccccaagttttcctgttcctacagaaatttcctcagatatggggaacttcctcttactctagttgtttacattggaagtcatcagtacctgtggcctccaacacagggcttccctttaccctgacggctgctcatagtgaccaccccttcccaacacacacagagaagaggccagtcccacatcccgagaattc

SEQ ID NO: 205192 - DNA, 1000 bp, Homo Sapiens
ggcccgggacggggtcagggtcgggtcgcaccggccgcttcctcaccttcggggactgcgctccgggggtggctgggtcgctgtcgcacggccgcggggacagcgcagccccgggcccggccgccgccgccatcagcccgagcgccccgcgccgccgccgccgccgtcgcctccgccttgtcccggccgccgccgccgctgccgccgccgccgccgccgccgccgcgcgggccccccgccgccccggccccgccccctccgcccgcccgcccgggggccggcccctgccgccgcgcgccccgcggcccgccagcgccgccgccaccgccatggccgtcgccagcgcgccgcccgcgcgggagggcgccaaaggctgggagggcgcggggctgcgggccggaatggaggaggcccagcggcggcggcgcttctcacgtcagcccaacccgcccggccgcggccaccgcctcagcaccgttgccccccacagctccgccgctggcctcagcgccgccgcgactcccttcagccccgccactcgctcgcctcagccccgccgctcgctcgcctcagccccgcggccgcctcagccccgccgctcgcctcagccccgccgctcgcctcagccccgccgctcccctcagccccgcggccgcctcagccccgccgccgcctggctccccacggcccggcgttgtactcggccgcggctccccccagcccccggcgcgccccacctcccgcccgccctccggcccgccccggcccggcacgtcgccacttggcgcgctcgcagccgccccctccccgcggcccccggcccggcccctccgcgcgtcaccctcgttccctccctctctccgcgcccccgccgcgcccctccccgcccctcccgggggtccccgccccgccccctctctgccgggggtcgccctgcccggagcagtcgcgcggagactgcgcggcctccgcctctacgcgctcgcggtcgccgctcctc

SEQ ID NO: 205193 - DNA, 1000 bp, Homo Sapiens
ccatagataaggccacaacatgagtcttaacaaatttgagaagactgaaatcatatcaagtatcctttctggccacaatggcatgaaacaagaaatcaacaacaggaggaatttttgaaaattcacaactatgtggaaattaaacaacatgctcctgaacaaccaatgggtcaaagaagaaatcataagggaaattgaaaaattactttgggacaaatgaaaatggaaatacaatataccaaaacttacaggatacaagagcagttctaagagagttttcatcaaaaaagatgaaagatcacaaatagactacctagcatccattacacctcaaggactggaaaaacaatcaactaagctagttacaaagttagtaggaagacggaaatgataaagatcagaagaagtaaacagaagatagaaaaaataaagagaccaaccaaactaagaattttttttaaaggtaaataaaatttacaaacctttagctagactgattaagaaaaaaaatgcaaagactcaaataaaatcagaaatgtaatcagaaatgaattgaagaggtaacgactgttaccacagaaatacaaaggattatttaaaaactactatgaacaattatatgccaacaaattggataacctaaaaactggataaattcctagacacatgcaacttgcaagacagaatcagaaactctgaacagagcaaaaacaagtaaggagattaaatcagtgataaatctaccatcagagaaaagcctaggacctgacaacttcactgctgaatttgatgaaacatttaaagaggaaataccagttcttctcgatctctttcaaaaaactgaagtagaggaaatactcccaaacacatttcacaaggccagcattaccgtgaacccattgcctgaggagagcactacaaagaaaaaaaaattacaaaccaatatccctgatgaacatgtatgcaaatatactcaacaaaatactagcgaattgaattc

SEQ ID NO: 205194 - DNA, 1000 bp, Homo Sapiens
atataaaggtatcttttctatataaaggtatcttttgggtcacatattcctaatgtttattttctcatgattgatagggtaagccaaagtcaaaagtacctgtggggaaggagaaagctagccagtgagcggggagtgaagtaggacccatggggaaatgtgagactttccaaaggctgtggagggaaaggtggctctcagtgccagtcactgtgaacagcagtagaggcatgccagtgttcactggggtctctgcttcagctgctgccatcctgccaggtgatccaacataggatcataagcaacatgggtcatcttttgtttgtttgtttgagacagggccttgctctgtcacccaggctggggtgcagtggtgtgatctcggcccactgcaacctctgcctctcgggttcaagtgatcctcccacctcagcctcccaagtagctgggactacaggcatgcaccaccatgcccagctaatttttgtatttttaggaaagtcatggtctccctatgatgcccaggctagtctcgaactcctgggctcaagtgatctgctcacctcagcctcccaaagtgctgggattataggcgtgagccaccctgcctggcctgggtcatcatttctgactagcaatgactataaacaatttttaagaaattattgttgtagacgatatataactgtgaagtattatatagaaaacgcttacattagggaaaacgtgaagaggataaaacaaagaggccccaaaatatggtggcttatagaagtttacttctctctttcacagtccacagatgggtggtccaagattctctagaggatttgctgtcttcagtgtgtgccttccctctctaggtctaagatggctcttctttgtcctgccgtcatgttagcatcccaggctgcagaagcagaaaagacaatggaaagacatggcatgcatttcttctactggcctgacccaaaagtagcagatctcttctagtcatatt

SEQ ID NO: 205195 - DNA, 1000 bp, Homo Sapiens
caaaggtccggagtacgaatgatcccgtcactcaggtactaagcatagtaccgaatagttagtttttcaacccttcctccctcaatctctcccacctctagtaatccccactctctactgttgccatctttatgtccatgagtacccaatgtttagcttccacttatgagaacatgtggtatctggttttctgttcctgcattaattcacttagaataatggcctccagctgcatccatgttgtcgcaaagaatatgatttcattctttattatggctgtgctaaaaactttttaactctgtgagacactcatgcctctgagaattttgcaggtttttttggtcctcaggctttgaagaaacatcatttgccaaccaaatgaaacatacactaagccctctattttggactatatttaaaatatcatggcattcattactagttttaattaaaatgagattttaaagtctatagatatacaaaaacacaagctcatattcaaataattttccttctacatattttagtaattgtggactggactagcttgtgagttccatgaggacagggtgcatttgtgacgcaatatatgttgtgtacccctgaattgtagcaagtacctcataaaaagcaagctctcaattttttatataaatgaatacatgaatgcattaaagtcaagtcagatcctttatgtgtttatttccaggcacataaggatttggtttttaaacatactgtaataccttgagaaattcacttaaactctatttgcctcacagctcatcttttaaaataagaaagctagattagatgttatcttacggtactttctagattttacaactctatggttttctcactttatggtattacaacataggcatccaagtcaggacagatctccatttgattctcagcttttcactcagactaggtgagccatttaatttctgtgtctccatttccttatatatgaggataagctgcttcttctgag

SEQ ID NO: 205196 - DNA, 1000 bp, Homo Sapiens
ggggctctgaggactacaggctggccaggatcccagcaccaactctgggcggtctctgcctggaacagccccccttccctgatcggtgtggggcaggagggacttgaacccagacatcccgacctgagagggataaggagcttctctcccactgtcccctccccttcatctagcccattcctagctgggccctccttccaggtcctaccctaggctcctgaaggcagcatcctgaccctccctgtgtaccacaacccccattaagtgtccaggctctctctgtcccgccagccaggcagggcaggctagggtgcttgctcccagcctgcagtggggagctgtcagcctgttgcccagagccccagtgtggcaggccacccctacttgctctgaaggttcaggggctgggggtgtgggcaggcagggctggaatgttgccacagaggagtcaggattagggatggtgggaccatcgtaatcactcacagaagcaaccgtcacgcattcactcaacaaacatttactgaacacccacttgcgtcctgccaacttttaagcaccaagtgaccaaacagccccttccctttcagaaggtgctggaatatcccacaatcacaggacacccggaatgggctggagaggagggtatgcagcagaagggactgcgagggaacttagcgaaggtgggcaggaatggccaccctgactaaggagtggactttcagcagagacagggatgaagagaaaccagtgaagggttctttggggaagaacattccagagcctgagagcttgctgagtgccaggccctgtcgttaatgttcacgaagaccccgggatgcactctgactcccattttgcagatgaggattactgaggttcaaagaggttaaaggtttggtcgtgctcaaggttgggaggggccggggcagggctgtgatccaggcagggcaggaagggagcagtcacatctgagttcacccttaacttacttgaattc

SEQ ID NO: 205197 - DNA, 1000 bp, Homo Sapiens
aatttacattttaaacaagctcccaggtgatcttatgctcaaattactgtctttagggacatttaactctccttgcttttagcccctccccattatggcatttcagtgtgagtcttttaataccatgtaacagctttaatctgctatggcttctaagttatctgctttcccttcatctcccgggttatttctatgttctgtcattttaggtctcctttgtttcttaattactaaactgactaataatccaagggctctaaatataatatttaaatctattggtctcttttttgctgatctatttgtttttgtttctgttagaggtttagagtttttttctctcaaagacattataatggcagaaacattttcattatacttagattatcacattttttttctgattttaatcgtttcaattagctggaaaaagagctgcttgacacagttttgaccttcctctgaatattttgatatttgtattgtctgcttttcataacacacccatgtgtttttcacataatcaggtgaatattacaatatttaagcatttcagtggcaccaatgcatatttgaaccctgaactagccaatcaagactcacaaggaggctgggagtactggctcatgcctgtgatcctagcactttgggaggccaagaggtggatggattgcctgagctcaggagttcaagaccagcctgggcaacacggtgaaaccccgtctgtactgaaatacaaaaaattagcctggtgtgttggcatgcacctatagtcccagctactcgggaggctgaggcaggagaattgcttgaactggggaggcggaggttgcagtgagccaagatcgcgccactgcactccagcctaggtgacagagtgagactctgtcccaaaaaaaaaaaaaaaaaaagactcacaaggagtggatttcaggaaaccaaaatgatatgtccttagcacctgaaaaaatatgcagaaactcagttacatatggaattc

SEQ ID NO: 205198 - DNA, 1000 bp, Homo Sapiens
attttctgatatctatttctatatatctatatatatatatctatatctatctatatatatagatatagatagatatagatatagatatagatagatatagatatatatctatctatatctatatctatctatatctatatagatagatctatatctatatatatctatatatagatatagatctgtggatatctatatatatctatctatagatatatagatatagatatcagaaatatataaacatatatttatatatatttatgatatatatatttatgtatacacactcattagtctaaattcattcatgttgaccttactgtacttcttaattttaatttccagttatattaatttataaaagagtcttgttaaattattgtaaaatttgattgcaaatgtagaaatagatggaaataaaaaaattcctggaactaagaaaatttataaaatcttttaaaatgagaatttccttaaaaagtagagtaaaaggtcatttctacatttaaaaaatttagtttcctttaataaaaaagaccaggatgtacaatcattgggacacattgtgggctagaagaaacttaattatatgtaatcaaagaatacttttcttaatttgagaaatatgaaattgtcatgcaaagtatactcaccagaataaataaataaatattaatttaaagttaatgcttaaggggtagaatgtgtacaaagaaaaaattcttaaagtattattgcataaaaatatctataagtagatgaataagtgaattatatttttatataattcagatcaaagtccaatatctatccatgataaaaattctcagtattatagaaatagaagtgaacttcctcaacttaacaaagcatttctacaaaattccacagctaacatcatactcaatggtgacaaacttgaagctttcccaagaagatgagataaagggaaggatgttccctctcaccactgcttttcaatattatgctggaattc

SEQ ID NO: 205199 - DNA, 1000 bp, Homo Sapiens
ggcctggccttgcagggagaggctcttctgcagaagctgcagcagctgctgggcaggaacatttccctggctgtggccaccagcagcccgacactggccaggacatccaccgacctgcaggttctggctgcccgaggtgggtacctgcaccatgctgggcaccactgccctagcgtcgggcatgggctgtctggctggcaccacaggacaaggaaaagaagtgagggtgggaaaggtgccctggacttccctaggacaccccaggagggcaggacccagggctctgaggtcctttgagtcagcttcacctgggcacagggctggttccacggatccaaaagtgccattttccacagggcagagcacaggtggcctcggagccctgctgagcccagcagctgacctgtgggtggaggctcaggctgggacctctggctgggcagtgagaggccatgggcagtcaccacaaaggcaggctctggagctgagctgcccagagggatcctgggccagtctatccctctgtgtcctcacctataaaatggggatgaggatagcagcagcttagtaggactgttgtgaggacatctgagtcaaccccactgtcaagagcttggggtcaggctcaccatgaagctagcacttagcaagacctagttcatcccattgcctgaactctccaccaggtgcccatgtacgacaggtgcccatggggcggctcaccaggggtgttttgcactccaaattctgggttgtggatggacggcacatatacatgggcagtgccaacatggactggcggtctctgacgcaggtgagtgccagggccctaacacaggaggcctgcctgaagcgtttccccgcctgcactcctggggacttggcctgacatctcagtgcatctggagaaagtcgtgtagtcctgtttacaattcactatggtagaaacaaccggagactggtctaataaatgatagaattctacacagccactgaattc

SEQ ID NO: 205200 - DNA, 1000 bp, Homo Sapiens
atgtgtcaggctcatcctcatcgcggcttttcttgcagtgtcaagaacactgctgcagcacctggcttcacacccactcaccatgacctccagaggaagagagcacctctgctccagtgttcccagggagtctgcagtccactctgattcgactggcttacattacaggcctgccacccttatccagtcactgtaatcagagaatgtgatgtgcttaatggccaccaaggagatggaatcacagtccccagaactgctggcatgtccatacagaaatcagagcattggactgggggtgtggggtggggagtagaggctgggtcatcactggtgccttcttctacactgacgtctctctgagtctgtgaagaccatgaaatgaagaaggcgttctgagagtttgccagtcaccttcctccatccatctagggctctgagcccaggtgtgggaatgacaggaaggccctgcctggccttctcctgggtctcatcacattcttcttttcttgtctccagacagagattactgcagtttatgtgacaagcagccaatcgggaggctgcttttccggcagttttgtgaaaccaggcctgggctggagtgttacattcagttcctggactccgtggtaagttcctgctcctgagggatggtcctgtggtcctctgtgatcagtgattgttttggctcaaaggaaaaaatagatctcatgggttagaagactgaggaataaactcactgcttacaaaactcccactacagactttgattaggaatgcaaaattgtctgaggatctaaacacatgggtgaccttgggtgaccttgggtgggccccctcccctctggaccttagttgctattgctataaagtggagccctatcagctctttgattctggaagcctgggttattatgggaggcagtgcctggggaagttaggcctagctcttggatctcaaggccccttcctccagctgagaacccattttatagaattc

SEQ ID NO: 205201 - DNA, 1000 bp, Homo Sapiens
cagtcaatttgaagaatattggatttttattctcgtgtttcttagcttttgacctactgtcttattttttgttttgttcagttcttcatgtaaagatgacttttcgaaatgaacacatcctttggttaacttccacaacttatttttaattataaaatatttaggaataaattaaataggaaaatgtggaaaattcatatgaagaaagttgaaaacattcctgggagatttacaagatgacttgaataaatggaaaggtaaacattgtttttaaataggaaagttcactatcataaatctgttaattctccttaaagcaatttatacatttaacttgctcccttcaaaaatatcaataggattcagtttctagagctgcatagcttttaaaaaattctgcttccttccccctccctcccatcttctcctctccttcgcctccccacatgcttgtacaaagcgaaagttttcttcattggaaaaactgcaccactcttggggacaacctggggacagcaagcagaggagagtgagggagagatgctgtactgggaaaaaaaaaaaaaaaaagaggactaagagaaagtctacattttaatattaaggacctcccaccctatcccaaaccctcttccacgactcagtcaggaaaactctggcaaacaggcacatacctttcaccaacaggatactgtatgatgcttctttaaatacctgaaagcctcaaagactgacatttttttgtgtcctccaatgaactagctctatccttgcccaacagtgaagccattcctcaacccccacccctacctgggatcatcctatccatttttggtgtcttgctgtgaacagtcaaggatcatcagatacttgaggaaagcctccaacatgatctctcatgatctctccaaaacaaacacaaaaggaaacaggagaaaatagagacaatgtagggagcaaaagaaaaaaatgcacattttatatgttatatataatgtac

SEQ ID NO: 205202 - DNA, 1000 bp, Homo Sapiens
gctacacaagggtatacactcaaaaaacactacagataaagcaaaatggaattctaaaaacttgtccaagtagcccacaggaaggcaggaaacaaaaacaaaaaacaaatggaacaagtaaaaaagtaacccaaaaccgatactttacccaggttttgaaatcaagaggaggtgctattgagaaactcagcaggcaatataatctccatggttaagaatatggctcaaaagtcagacttctactcaagcctagacattactacctcctagctgtgtgatcttagcacgttacttaagctttatgggcttcaatttcctcatctataacacaggaataaaaacggtatcgacctgcagaaggctgttgaaagaatttaatacatacagaattcttggcttggcacataataagtactcaatgcctgatacataataagtgctcaatgcctggtacataataagtgctcaaaaaattatttatatcagagacaaaataaatatactgccagactcaggactctaggaacagaggaaggcaggggtaagctaaggttataaatatagagggattaagttaaagcctgcacacaaaaggactctgtgtgtctcttctactgggtctagaatacctgtagtcaggcaatcagtgagtccttctagagaatgtcaactctaaagaggcctaaaggtgttaaaatgcaaaggtgcacaataaaaaagccaatagctggatgatgatgatgataggagggtaaaagggtggatgatgggagggtaaagggtaagttaaaattcaaatacactgtaacaggaaacccaatttctgaaattaacaaaccaagaaaaagcaatacacattatatcagaaatatgaagctaaacagcagaagaaatagcccccaaaaatagaagtctactgggaatggcacaagactgagagtgaggagaaaaaaggaacaggtttcgttgctattcttgtaggcctgttagcacaatttga

SEQ ID NO: 205203 - DNA, 1000 bp, Homo Sapiens
gcctcccattattattgtgtgggagtctaagtctctttgtaggtctctaaggacctgttttatgaatctgggtgctcctgtattgggtgcatatatatttaggatagttagctcttcttgttgaattgatccctttaccattatatattggcctagtttgtctcttttgatctttgttggttaaagtctgttttatcagagactaggattgcaacccctgcatttttttgctttccatttacttggtagatcttcctccatccctttattttgagcctatgtgtgtctgcacgtgagataagtcacctcaattcagcacactgatgggtcttgactctatcctattttccagtctgtgccttttaattggagcatttggcccatttacatttaaggttaatattctgtgaatttgatcctgtcattatgatgttagctggttattttgcttgttagttggctcagtttcttcctagcaatgatggtctttacaatttgacacttttttacagtggctcataccagttgttcctttccatgtttagcacctcctgcaggagctcttgtaaggcaggcctggtggtgacaaaattcttcagcattagctcgtctgtaaaggattttatttctccttcgtttatgaagcttaatttggctggatatgaaattctgggttgaaaactcttttctttaagaatgttgaatattggctcccattctcttctggcttgtagagtttctgctgagagatccgctgttagtctgatgggcttccctttgggggtaacccaacctttctctctggctgccctaaatatttattccttcatttcaactttggtgaatctgacaattatgtgtcatggggttgctcttctcgaggagtatctttgtggcattttctgtatttcctgaatgtgaatgttggcctctcttgctaggttggggaagttctcctggataatattctgaagagtgttttccaacttggttccattct

SEQ ID NO: 205204 - DNA, 1000 bp, Homo Sapiens
agctttaaaacaccctccaatatagagagaactctgaaaccagaagcagaagctgaggaatggtgaatagagcattttccctcacacgatgggtatcagggtggtttcttgtcctttcaatgcctctgcagaacttgaccctagtttttcaaattggactcaagaatgatcttagtgttggtggttttgtggttttctttgagactttgttattgacagaacagcttctggaaatctgaaaagaaaaaaaaaaaggtagtttatatattagtttggaatatgaaatgtattttgtcatggtctccagagtccgaatattgatctctgtggagctctcctaccctctgctactgctgataactcatagtactggagagatagcagagcctgaagaccaaaaaactcaactgccgatacacggctgcagtgtggtcagttactgatctaccatttatgaagcaggcctacagatgtgtgtgttcttctgggtaatttaaattgacaattaattaacagggctggtgctaggtaaacattataggttagaatccctagtgtggattaatttgctctcttccatgatcgcagactccctgcttagctccagtctgctggtctcccaacatctgctaatgattacatgggcagcattaaggtctcttattaccttgtttgaaaaactggaaactcatctgttattgttggtggttagatacctcacctaagtaaaatattaattaatgatattaggctgggcgcggtagctcatgcctgtaatccctgcactttgggaggcagaggcaagtggatcacttgaagtcaggagttcgagactggcctggccaacatggtgaaaccccgtctctactaaaaatacaaaacttagccaggtgtgatggtgtgtacctgtaatcccagctactccagaggctgaggcaggagatcacttgaacctgggagagggaggttgcagtgagctgagaacacatcattgtactcc

SEQ ID NO: 205205 - DNA, 1000 bp, Homo Sapiens
actacttcctcatactgccaggataacaatattggcttttaaatgggcacttaataaacattcgtaattgctactgacaataattagggcttttaggcacgatccccttgcttttaaacagttgatgctcaggcaaccagaattcctgagctcaaacgtaaaatatggtatgccttggatctctacaagactctgctttcttgactgttctttctttaaataccaaattcattcaggataaattcacatcaaagcaaaggccaactcgtgtaataacaacggttcaggagaacccacaaattcctcgctgtctccgagcactggaccatctgaatccaacggaaacaccaggtttacaacctgcccaccatgaatcctacacctcaacctcactttcagtattaacattcttcaaaattctcagaggatcattcagcctcatttaggtttttttttctttcttaccaaatgtgtaccagggttcctatgacacccattcagctctaagtctcctggaaaacctgcccttctggtggttgatgatataaagtctactggcagctgcttcccccagcccactctgctccttcatcctgcagggtgggggccggagtggggagggtttcacccagcctggccgatctcacacttttcctcctgtacccttcctgggaaggtttcccagcccaccttcatggaggtgtcaaccactggggtggactcggaggagagtagaaccaacaaccggtaccagcatttactgaacctgaactttcagaaatattttgaacagtttagaagggaatatttggagcagcacccaccgccatcccacacctgccccaccaggctcccttgaccccctcagaagccagcacataaatcccactcaactcccaatatcaacaggccatttgtgaaacaaagtttgaggagatattattccttctcttttgagtaacataaaaaattataaaagaatcaaaacctcaatgaattc

SEQ ID NO: 205206 - DNA, 1000 bp, Homo Sapiens
aagagtttcttatcaatctctttttatgaaactgggtctcactctgtcaacccagggctagaatgcaggggcctgattatggctcactgtggtctcaaactcctgacctcaagcaatcttcccacctcaacttcctgaatagctggaactacaggtgcataccatcatgtcatgctaatgtttttattgttatctttgtagagacaaggcctcattatacctcccaggctggtctcaagctcctgggctcaagcaaatcttccacttctgcctcccaaaatgttgagataagcagtttgcaccaccacacccagccctaatcaatttctttaaatcaatctcaatgttgcccaggcatggtggctcacacctgtaatctcagccctttgcaaggccaaggtgggtggattgcttgagttcaggagttggagaccagcctgggcaacataatgagaacacatctctacacaaaaaataccaaaaggagtcaggcatgatggtgtgtgcctgtagtcccagctgcttgggaagctgatgtgggaggatcacttgagcctgagaggtggatacagcagtgagccaagatcatgcaactacactgcagcatggacaacagagcaagaccctgcctccccaaaaatttcaatttaaaatgtgagaacaaagagagatacaaacaaaaaacaaacctaattagtcaatgaaatatgagcttaagccaagaaagaaaatgaaaaacatgaagtacaataaagtacatggggaaatagatctataacagagccttcggtctttcataactctgataatactaattaatatttatgctgcaattacttttttgtaagtacttctgtgatagtgtttcttactataagacattcaattagctaaatatggtcatctgccattacctgaaagaacattattataacagagagagaaaactggaactttccatcaactttccacccagaaaaagaattgatcaccagaattc

SEQ ID NO: 205207 - DNA, 1000 bp, Homo Sapiens
caactctccttaatgttctatgaggttcagtatgttccagagtgagaagtctgagcatagacaggatgatgatgattccgtttgcaaatcctttttgttgcttgtctgactgcaaaccaaaatttatatgatacatcttggaagttattaaatattgcctagtgaaggcagctggattttcagccattatgtaaatctagatgccagaaataattcatgaacgtactaaatttccattattgttttacttgttttgtgttgctataatagaataccacagactgggtaatttgtaaagaaaagaaatttatttctcactttctggaggctggaaagtctgagatccaggggccagcatatggcgagggctttcttgctgcggaaggtagagggcaagagagcatgtgtgagagagctagagagggccaaacctgcttttataacaaccgctcccatgataacaaacccacttctgcgataatgtcattaatccatccaggagggcagagcctgatcacctctgtattgtcacagtggcaatcagatttcaacatgagttttggagggggtattcaaactgcagcaatatgtttagaaactcagtaaatattttcgagcagcattttttcaacaagaactaatatttattgaacatttatttactctgtgcaggatattgctctaattgctttacatatcttggataccctttgtaacagccctatgatataagaactgtttttttccccacgttttggtgaggccacggggggtactggggaggttagtaacttgccttacttcccaactggggagaagggaactctgctctggaccactcccctctaatggcctctcaagacactactccataaattagtcacagacccaaccttcaaagaattcacaggctgatggagctataaaagctggacataatttaattaaaacataagataccaaataatatcagaactttggcacacatccctttctgctg

SEQ ID NO: 205208 - DNA, 1000 bp, Homo Sapiens
atggaacaaaggcaaaagatacgggaaaatgtagaagtgggcattatagaagaatccaaatgtgtctaatgtcttcttcatactaattccttctagcctttatttaaaaaatagcttctgaattgcaaggatatttttaagccacatgaatcagtatgccccttcagctggacttttcaaggagcctgtgaatgctgaaatgattaacattatgtgaagctaaattgcactgaaccgtggaaccatgtggtgtggcaatagtgggtggggagacatattagtctagaggtccctgctgagcaaaagacaaagacctccttctccattgtcccgcactgatggtgggcttgggatgtattttcagaaataattatttgcagggaacttataaaaacaaatgaatcaccctcatcactgtgcttgttccgttttgggatgtttgtctactagactttctaaattgggagatttagaaattcagtaagaaagatatttaaaaaaattttttgaggtcctcagtgtcttctgcaagtacactttcaatttttattacagacagactctcttgatgctgttgtttaccattgcatttttatttaacttgaatattttaatttagcatgagtcattcccatggattagcaactttgtatgctagcatatctagttgtatcttctgtgtgttttcaatggtgtgtctgctactccaaagatcttcctgaattttacatattagaagtggcatagcctcatgacactttatatcaagcaggaagttctggaagatgatgctaacaaatacctcaaatctggaaattgtaggctttagaaaaataaagtcatcttgttagtgaatctctatattagactttctaataccttataaacaggttttcagaaattaattatatttatagcctcgagaaactagggaaaaagctggatctcaaagacattattacaaagcagtagtaaattataaacaatatattttgaattc

SEQ ID NO: 205209 - DNA, 1000 bp, Homo Sapiens
cttcatcattaaatatttgcccctttctatgtcctgaatggtattgccttaattaaagacttgtttaatcgaactgatatggacaagcagtacactatttttatagatgatcttgttggaagccagatttaaggagattgcctggagactaaaaatacattattttcatggggatttcatttttaatctagtgtgaaaatagtgttgatatgagcaaactttattcagtgttgtaattcctcaaataaaatatgcatgaaattgaaaagcacaaaagtcttcaatgtttatctctgtcatctatatctatgtctacctgtagatatatagcacatatctatatgtgaatatatagagaacaatgctagaatgataaaatagcaacagggattatatctgggagatgggaaatgtgagaacaccagatagccagaggtaaacaatactacgcctttgatccctcaacatggaatgaaatgtggtgagcattttccattgtcattaggtagtcttcgatggcatggttttctgttattatttattctgttatgttgttatgttattatgttgatatgtgatattctgtcatataggtattttgtttatcttggtgcttaagaaagccaaagtagataattcatatttgactttggatcctgtgttttctaagtttttacctcacacaaaatgatgacacaacaccttgatgtggcctgaattttggaagctgcatgttcttcctgcttggctctctcccattctgcctctactttctcttccctctctgctttctccagttgtaaataggactatcttagtggttatgcactgccaacttttgtagcattgggttcagtttatagcatgtgtaaatggtcaatgaatgtttcttcctctaaatacttttcctacaagaagaggtagttagattttcatccaacacaaactccaatctggcttttgtcattactgaagatactgattttgcaaggcagaattc

SEQ ID NO: 205210 - DNA, 1000 bp, Homo Sapiens
acctcaaagagggtttgcttgtgtgggttcttttttttttttttttttttttttttttttttttttgagacagagtttcgctcttggtacctaggctggagtgcaatggcgcgatctcggctcatcgcaacctctgcctcccaggttcaagcaattctcctgcctcatactcctgagtagctgggattacaagcatgagtcaccacgcctgggtaattttgtatttttagtagagacagggtttcaccatgttggtcagactggtcttgaactccgaacctcgggtgatccgcccgcctcagcctcccaaagtgctgggattacaggggtgagccaccgtgcccagccattgtgtgggttatttctattgatgtttaccatattagatattaagactgagattattttaaaatatttattaatgcattttaaaataataaaaacctattatatattagcataaataacatttttaaggaaaaatagttatttttttaaaacaaaaatatttaccaagagggacaacattggtttacccttattacaaatctctttaatttgggacttatatagaaggcagctggattttctagctacttttgcattagggcaattgtgatagcacatgtcatgtagcctctgaaaaactctacgttcatgagagaaagtgtataaagcaaataatttcttagtattatgaaaacagttttgaccttgcagacctccttatggacctcctgaaagggtctcttggagagagagaatcattgtgcggattcttcccacataaccctcactcccaggtcccagcctttgccctctcccctgcctctgcatctgcaggactggcagcctcatcctgtgggcaggctatgagttagatggaccttgtcaagtccttccacttcactcacaagctggtgtgaccttgggctttgagtaattccctgaatgtctcttggcctctgttttctcatttgaacttagagatgaagaattc

SEQ ID NO: 205211 - DNA, 1000 bp, Homo Sapiens
atggattcacgccctcccccatgttctggccaggagacttcgcattcagttggaattgttacaaagttcagctggagctttccttgttcctttgatcttttcccagttcctctggcagccctccccaaggaccccagtgagagaagtcagaaatggcttttctacggacccagagagccctcaggttttcccactggttcctctacccttgtattttgcttggctctctaaatcgactcatcttcaggtaaggtcaaatcctttcctcattatgtagaccttcaggtttcccagcgagagtgtgtgttcaggggcagataattccccttttccactgtcacatctcggcactcacagtatctgggctgtctcctgggtgctgcaggaggaatctgtttccttcagagggcctgtggagtctctcagccttcctggtatattcctccaatagttcaggagcaaaaatttacaatgtgattctccacaagctgctctgtctgtctgagctggagctgcaagctggtcttgcctcctgtctgccatcttcccacctatcacctacattttatggttaattttcttccgcttccttcatggttagagtgccttcttctctctactgtttttagattacttattttagatcccactttctttcctattatatgcactaatgctacaatttttaaaaaaaactcattgctgaatctcacctattttaataagctgtatttttattcagttccaaaatatttttcttttgctttgttacttctattatgtatgtatgtatgtatgtatgtatttatttattatactttaagttctggaatacatgtgcagaacgtgcaggtttgttacatagatatacacgtgccatgttggtttgctgcacccatcaacccatcatccaaattagatatttttttaatgttatccctcccctggccctccacccatgaacaggccctggtgtatgatgttcccctccccatgtcca

SEQ ID NO: 205212 - DNA, 1000 bp, Homo Sapiens
ttctcttaaatctttatctccttctttatttctctctcatttttaaatttaaaagtaaaataaaaattacagaaaagctacaagcactatgccagtttttttcctgaactatgagagtaactactgacatgatgttccatcattcctgaatgttatgttgctacaaacaagaacattctttcacataattattctgtaacataaaatcaagagattagcaatgatttgttactaccatttaattctcagaccccgttaaaattttgctatttgttgtatattttatagtaaaaagatccagtttactgcgtttacattataatgcatcaaacagcttctcagtctttccttcattttccatatggatgccctcttaacctgaggcaggtgttggcttcttttctggttaccttccatcatggatgccctcttaacccttcctcagttctagcacaatacacttagctaggctgttgagctgatgccttccctatatccttctggagccccgggtttctttacctcctgctgggcagccctcttattcagatgctaccttctctctagaactcttgacaccccaccctggcttactcctttaggcaatgtgctccctgtcctgctggtgttgtgccttcccttgcctggttgcttccctttgtgcatatttctcatcttcctcaggttacaacaaactgagccaggcaaccctctgtgaggatgcccttctctggctgcccaggctccaacatgtcaagccacacaccaaatgaatgagtttcaacccccactctaggtccagctgcctccgatggtttgccctctcctccaggcggaagccttctcacccttttcaggctctgaatctctacacagagaagcctttagtgtacctaaccttccttaccttgcacatactcagaaactttatgtcaaagcacaacccacttgcctcttccttgttgtttcaggtagacgccttatcacttttttggaattc

SEQ ID NO: 205213 - DNA, 1000 bp, Homo Sapiens
gatggtggggatgatggccacacaggttttggatcttcctaaatccccacctaaaaacagagatactaagtagcaacaccaaaatcctggccatggacaggaaggaaagagccttccaagcatctaggcaggtgggagggaggccactggcgtgcgtgcgcgcgtgcgcgcgcgcacacacacacacacacacacacacacagacacacacacacacacacacacacgctgattttcatcagtctgcagcccaagccggctcagttttgatttccctcctggtagttttcttgctctggggccctgtgctggaggggaaccctggctggtcagtttcaaaagttcatagttcagagccgaccacagatccgttacacgctcctcccagtagcagctgctggtctcaggcctgcagcgcttcccatctgttggtgtttggagttctcctgtgctgggtctgtagctgcccaagacttccctctactccctcacagatagtgagggcgctcagggcttagttggtggtttatcctgacctgcttgtatttggggttcatggggataccccatcagctagtttgtgataaatgttgttcatggccaggttttttggtgttgctacttagtatctctgtttttaggtggggatttaggaagatccaaaacctgtgtggccatcatccccaccatcttgccagaattctctggcctccgactgttgcttcttcaagctcctcttctatcagctctctggctgggtgctgggaatctgctgattccattgtgtccaatggcttcttagaaattatcatcagcgtataagaatacaatacttctgcgaaggggctcagaggtacaaagtaacttaagctcttagaacataaaaaagagaataatgaaaaagatttacaaacagatataaagaggtgtttttccccagtgagttgtgatcctgggcctggcaagataggctgtttatccacattttgcattcttcacc

SEQ ID NO: 205214 - DNA, 1000 bp, Homo Sapiens
cgtattggccaggctggtcttgaactcctggcctcaagtgatctgctcaccttggcctcccacagtgttgggattacaggcgtgagccaccgcacatgaccacaagaagtaatttggaagacgcaccatgaacactgacatactgtacaactagtcacactttttttttttaatgtggatgttttaaaaataaattttgcagaaaacacctgcagaatgatatgaggagaccctgaaaacagtcagtggggttctccacttttgttcaggttgccttgtggagctactcagaagcacacaggccggatttctgggtgtctgattctgccctttccgggtttctaattctgttgtctttgattgttgcatctttattcttaaaagcgcctgaggagatttgtaagcatcatcttaaagggtcttttagctcaggagggaatcaatgtcccctgtctctgattattactcctgatgtgaaattgtggccatgctgtcatgggggcggtgccaggtccacaccttcaggctctgtatgaatggcgccccctggagtcgtgtgacacagccagtgccggttaaggctagtccctccttcccctgggaaaacacgtggcccctctggctggtccccaggtgccaggcccttgctgtgcattcacaggggagtgcgtggccttgggcacctgcactagttcaggcttctatcgacattaatctaacgccagaggcccctgtgatctgtgtttccagggagctgtgtttaattgtggcaatcctagggttatgagacaaaagtactgggccccagctctgaagtcatgttggttaacacacaaaaccttttaccctgtaacattagcaactgggaccttggactccagcaacttgggggaaagggaggaattcagtgatacacaagtgatgcaccaccaacttccgcctcctgaaggcccctgatcccctccctcctcctctcttttcctctccacctcctttttcc

SEQ ID NO: 205215 - DNA, 1000 bp, Homo Sapiens
acgcctgtaatcccagcactttgggaggccaaggcaggcggatcacgaggtcaggagatcgagaccatcctagctaacacggtgaaaccccgtctctaataaaatacaaaaaaaaattagccgggcatggtggcaggcgcctgtagtcccagccgcctgtagtcccagctacttgctactcgggaggctgaggcaggagaatggcgtgaacctgggaggcggagcttgcagtgagccgagatggcgccactgcactccagcctgggcgacagagcgaaactctgtctcaaaaaaaaaaaaaaaaaaaaaaaaaagaaagaaaagaaaacacaagaagggttaaaaaaagaatgatctagacctggaagaagaggataaacaaaagcatagatgaaaaatatgtgcaaggaatggtatagacattaagaaaacaaatttcaccagagaattaaattgtgaagaaagaaaaaaaataagttcataagttactttcagaagcttgtaccatgtggagtgttatagaacaggacaggacaattggactttatccaattgacactggggagtttctagggggttgaagtaagaggccatgatgtaagggatgtttaaaatagattaaaaggtcaaacaaagttaaatgaaaagagcaaattctagtatttgatactacaatagaacaattatagtttataatttaatgtatgtttcaaaatagctagaaaataaatattgcaacgttctcaaccgaaaaaaaagataaatgcttgaggtgatagatgccccaattaccctgaattgatcattgcacattgtatacagatatcaaaataccacatatatccaaaaagatgtacaactataatataatatatcaatgaaaaaaatataaaaataagtgatccccacccctggaaaaaagttcaaggggggaggttattcagggtagaaaaacaattgttagaaataattcaattgtccaataaaaatcgttggatac

SEQ ID NO: 205216 - DNA, 1000 bp, Homo Sapiens
cggtggctcacacctgtaatcccagcagtttgggaggctgaggcgggtggatcacctgaggtcaagagttcaagaccagctggtcaacatggcaaaaccccgtctctactaaaaatacaaaaattagctgggcatggtagtgcgcacctgtaatcccagctacttgggagattgaggcaggagaatcacttgagcccaggaggcagaggcggcagtgagccaagatcacaccaccacactccagcctgggctacagagtgagactctgtctcaaaaaagaaaagaaaagaaaagaaaaggtcatccaacaatcttggcaatagaagtgattacctttgactcataaactcattcacaagtgcatacacacaaatacaaactcactcccatttttaacacacaaaagaagtaattatgtgttcaaatatccccacagtatttgaggctatcttgtagaataccacattccttgtggtaccacacattcgtgtggtatctttcttgataatcaattgcaaatgaaggagtaagagaaaaaaaaataaatgaagtctacacaatggcaatgagccagtgccaacaatcagctcatgtacaatcaaaaggattccatctggggcaggaaaagagactaggtaacccatgagatctttttcagtactggaatcctatgtgcctattccaaggagaagcctgaactgttgtttctttctcatacagatattttgagaaaactccagccttgtcattcttcttgtaaaacctgcaatggatctgcaactctgtgcacttcatgtcccaaaggttagtgtgttgcgtgacagaagatggcagcagtcaagccaagtcattgaaactcatgtgtagtggcatcttggtgtaaggaggtctgtaaggccttgatctattcccatcacatgttcctattacagtggctactcgggagacacacagggacccaaacattgaccaataataaaaactggctttcaaaggacaa

SEQ ID NO: 205217 - DNA, 1000 bp, Homo Sapiens
agtgagttaaggaagctaaagaaaggagaaagcttcccacaggatcatgaaagatgcatgagaagagggatcaggaaatgtgaggactaaggaaagctatggccatggctagcagaagatcactggaaaacctgaacgaagtttgtgtaatgtgtgggaaacgaaagcctgaaatcattaaagagggccttgataacaaggaaataaaggcagcagacagaaatcattcattatggagttaattgaaccattaaaaactagcaaatagtggtggttggagggagagacagggtcgggcattttttggtgtggaggtggttaaaatagtgaactattttgcccctactaaaatacaaagaaaagggatccaggaagagaaatagaaaagattagaggagaaatggaagaggcatacaagcaagactcagcagaggcagaaacccagaagggttatttctatctaagagtgtaaggaaggacatacagtcagagattttctcagtaaatgagtagatagttagctgagacaagatgaactagggagtttctcctagaaaaggtggtcgccgtgttctgattaaaggaaaaaataataccataagttgtaagtagcagcagagagctgagggtataaggaaggaactattgtggactgaggagggaagatagcatctacaagtagtagctaattcaagctgtcattaagtagtttaagtttatagtgggccaaagtaacactttccatgggtactgcatttaatccagaagaaaaaaaaaaagcaaaggggaacaagtggtgctctctttgttttttaataagatttcatttttataaaagtaacatatggtaacacaccatatcacagaatagcttagaaaagaaagtaataacttggatatgatcctactccacaaagctgaccagtgtttctctcttgacagttttagtacctttgttctgtaggttaccttgtaattatgagaggaaaataatgcttaa

SEQ ID NO: 205218 - DNA, 1000 bp, Homo Sapiens
aatcagagcagtaatatttggtgggagaagattcagtcataatatattcagtcttaaagatttattctagattgagtaaatagatgtaacaatttgttataaacctctggtagtttattttccttaaaatgtcagtgttgtagcattggataattggaattaagtaacataccacatctctagtgtctaatcacctaaatagagaaaaagttttgacaatcattacaaatatttttgtctccagtgtgctattttgttaggttattagttatttagattatatattttcagtattaacagtaggctgtcttttataggatgatagcagtgacgatggattcctcgctgatgacaactgcagttcagaaataggacagtggcatttaaagcctactatctgtaaacagtaagcattaactgtgtatcttgaaaactacataatttttaagtatgctcataaaacataacaggacagttttttttttaaataaatacttaagcaaaactcataaatgctgtcagagtcagtgaggaaacttgaggcatgctatctagggattaaaatgggaagaatgggtaatcatttcagtcctccatttgccagtttccccagcctctgcatgcacatgtccacacacaaatgttttgttttgtttaaattttttatgtgtatattttttgagacagagtcttgctctgtcgcccaggctggagtgcagtggcacgatcccagctcaccacaacctccacctcccaggttcaagcgattctcatgcctcagcctcaggaatagctgggactacaggtgcgtgccaccatgcctggctaagttttgaatttttagtagagatggggttttgccatgttggcaagactgatctcaaactcctggcctcaagtgatccgcccctctgagccttccaaattgctgggattacaggcgtgacccatcgcgcccggccacaagttttgatagtgaaccactattcctttttaccta

SEQ ID NO: 205219 - DNA, 1000 bp, Homo Sapiens
caacaccttgaggggagcctcttcaagcttctcctagatccacttagcctccacctcctcctatgtgattcataaaccttccctgaagcctcggattatgattatttgcaggaaccaaaatgtcagcagtggttaccttcatataagatgattataagacttttaaaaaatactttttggccgggtgcgctggcccacgcctgtaatcccagcactttgtgaggccgaggtgggcggaccacgaggtcaggagatcgagaccatcctagctaacatggtgaaaccccgtctccactaaaaattaaaaaaaaaaaattagctgggcatggtggcaggcgtctgtagtcccagctactcaggaagctgaggcaggagaatggcgtgaacccgggaggtggagcttgcagtgagccaagatcgcatcactacactccagcctgggtgacagagcgagactccatctcaaaaaaaaaaaaaaaaaaaaaaaccttttcaaatttctgtacttttcacatttttaaaagtgagcatgtattacttctttaattaaaaacaaaattttaagaggaaataaaaaaggactctcttatattatgaagacatctttttgtggagatgggcctaacattccccaaagaccccatcaggtagaaatgattacttcctcttttggtctcctgcacgttcaccatgacacctattacacttggctgaatttgtctctctccctgagggcaaggaccggcctattcatctttgggatgccaatacccagcacagaacacacagcgaagaaggtgtcagtgaatgctgataaatgaacgagccagtgaatggtcagtcctgaagcagatcttgaatctgactctaccctgacactgacaacctaactcaaccctaactgcaacctgaacctactactgaccctgctcttaaagttgatcttaccaccaaccttctcatttatggtgagaagccattccctcaaaggatggaattc

SEQ ID NO: 205220 - DNA, 1000 bp, Homo Sapiens
agtacctcttcaaagagaactacaaaccactgctcaaggaaatacgagaggacacaaacaaatgcaaaaacattccatgctcatggataggaagaatcaatatcgtgaaaatggccatactgcccaaagtaatttatagattcagtcctatccccatcaagctaccattgactttcttaacagaattagaaaaaaaaatactttaaatttcatatggaaacaaaaaagagcctatatagccagacaatcctaagctaaaagaacacagttggaggcatcaaactgcctggcttcaaactatactacaaggctacagtaaccaaaacagcaaggtactggtaccaaaacagatatatagaccaatggaacagaacagaagcctcagaaataacaccacacatctacaaccatctgatctttgacaaacctgacaaaaacaagcaatgaagaaaggattccctatttaataaatggtgttgggaaaactggctagccatatgcagaaaactgaaactggaccccctccttacaccttatacaaaaatcaaataaagatggattaaacacttaaacgtaagacccaaaaccataaaaaccctagaataaaacctaggcaataccatttaggacacaggcatgggcaaagacttcacgactaaaacaccaaaagcaatggcaacaaagccaaaattgacaaatgggatctagttaaactaaagagcttctgcacagcaaaagaaactatcatcagagtgaacaggcaacctacagcatgggagaaaatttctgcaatctatccatctgagaaagggctaatatccagaatctacaaggaagttaaacaaatttacaagaaaaaaacaaacaaccccatcaaaaagtgggcgaaggatacaaacagatccttctcaaaagaagacatttatgcagccaacaaacatatgaaaaaaagctcatcatcacgggtcattagagaaatgcaaatcaaaaccacaatgag

SEQ ID NO: 205221 - DNA, 1000 bp, Homo Sapiens
gcccagggcggtgccgcgcttgcacgcggagcatgggggccgggcccgagacatggaactggggccccgcttcaggggcccagggcaagaagtgggagcggcacccacttcgaggacctgcccagtggcatgaccactgcgcccaacccgccgatggcgccaagttcctgcgcctcaggaagaggctccgtatggggccgcctgaggccgtatccccaggacctgccccacattaaggtgaccgctaagccagacaatcctgatggtgaggccccgtgcctgccatctgctcctggagacgccccccaaccccaggcatggccgtcagccggcgaggcggtactgaggcagggggcgcgtcctggtcattggagagtttcagcccagtgggtgaaccagacacactgttcaagggggcagcggttagtaagcaggacgagggggagccccaggccgcagggagaactcgtgacaacgtcacccctgccccagtcgtaggcccgggcccagtgaggacatgaagcccccgcctcaggctgcaaggaggcgccaccagggctgcaagctccacggagctggtgggacctggagacaggcgagaaccccgccccttccaatttggagcaagagcttctagggtgcagctgcagccgctgcagggtggctgcagacccaggcatctctgcgctcttgggggcccaggaggatccgcttgcccccagcaggctgggaagttcctgctgctgctgcctggcctctccctgctgttggtgtccactttgatcttggagctaagttggggccgagtccaggcggtgttgcagtctggataggtgtgcacacgattgcggcagtgttaacacaccagccccctgccacctcgacctcctctagactttgggctctgacaaacatgaaagggaggcttaggggtggctgaggacagcccagcactggcctgcaggcgccccttggcatgaaggcatggacagtggctgga

SEQ ID NO: 205222 - DNA, 1000 bp, Homo Sapiens
gggagtcacttccttcttctcactctgcctgtctgtccaccatctagggaccatcttcctgtggatcttctggcctagcttcaatgctgcactcacagcgctgggggctgggcagcatcggacggccctcaacacatactactccctggctgccagcacccttggcacctttgccttgtcagcccttgtaggggaagatgggaggcttgacatggtatggggaagaggacttcagagaggcagagggggtggcctgggcaggggaggagaggtctgagaccctcaagaaagattctcccggggaacagataagggcacaggcataggggctccatctgtgctggtggctatgggatcagaatgggaggcgatatggtagcaggacaatgagaggttagatggcagagggacttccagaagcagtaggtgtcactgtggtgtgtagggttgggttgctgtgggtgtgacaatctgaaagggcctccaacaccttgctcttcccttaggtccacatccaaaatgcagcgctggctggaggggttgtggtggggacctcaagtgaaatgatgctgacaccctttggggctctggcagctggcttcttggctgggactgtctccacgctggggtacaagttcttcacggtatagatgcctcttggagcctgggcagaacatggagtctttggtacctttcctcccgcctctccaacaggatgaggtggtggggagtgggcacaggagactcatgatctgtcttgccctccagcccatccttgaatcaaaattcaaagtccaagacacatgtggagtccacaacctccatgggatgccgggggtcctgggggccctcctgggggtccttgtggctggacttgccacccatgaagcttacggagatgggtgagtttcctcccaacccgtactgcagtcgtcatccatctggaatgacctctgtcattctctttcactgtgtgtgaccaagaaaaaagaatgaattc

SEQ ID NO: 205223 - DNA, 1000 bp, Homo Sapiens
acttcagcacccatctatcagaaatggacagagccagcaggtaaaaattcatccagtacattgttgaactcgagatcaccaccaatcaactggatattagggacatctaaccactacttttcccaacaagagcagaatagttattcttctcaagctcacatggaacattcaccaatatagacctcttattaggatacaaagcataccttaataaatgtaaaagaattgcagttttacaatgcctgctctgataccacgatggaatgaaaataggaatcaacagcagaaaaataactgaaaaatcccaaaatacttagaaaattaaacaacacacgtttaaataatgtgtgggtcaaagaagaaattgcaagagaagttgtaaaatattttgaactaaatgaaactgaaaacacaactagtcaaaatgtgatgtatagagaaagcacttcttagaaggaaaattatattattgaatgtataaatttgaaaaaaagatctaaaattaaccacctaatcatccagcttcaaaaattagaaaaagaagagtgaattaaatagaaagtcagcaaagaaaagaaataaaaaaaaaacagaacataaatcagtgaaactgaaaataagaaatcaatagagaaaatcaatgaaaccaaaagatagttatttgagaagatcattgtaattgataaggctctagccagggtaattataaaaaaaagagaacactaactattgtatgaaaagtcaaagataaaatatcactacataacccatgcgcattaaaaggataataattttaaaaatactgtgaaaaaatatattcccacaaattcgataacctagatgagacagacaaatcccttaaaagatacaatccaccaaactcttacaagaacaaataaacaatctgaataagcctatatctattaaagaaattgaatcaataatttataaccttcctaaactgaagtcaccaggcccacctgagttcactggtgaattc

SEQ ID NO: 205224 - DNA, 1000 bp, Homo Sapiens
aataaatggagaacaatttttctgatctcctccccttattccctggcttttcctattgagctgtttatctgcttttctttttttctatgctaatcctccccttatttttgcaatgtttattcataggtattgtggtgattcaattttaatttgtaatacaaaaaaattttgtgtttcaatgaaaatcaatgcattgtttcctttttttttttttttttttgagacagcgtctctgtcacccaggcttgagtgcagtggtgccatctcggctcactgcaacctctgcctcccgggatcaagcaattcttgtgcttcagcctcccaagtagctgggattacaggtgcccaccaccacacctggctaatttttgtatttttagtagagacggggtttcactatgttggccaggctagtctcgaacctgacctcaggtgatacacctgcctcagcctcccaaagtgcaaattacagacatgagccactgcacccagtcacatccttctagattatcagattctagacctgttcattgtcttaattctatcttctgaagtttttggaagcaataatagttttaaataagatatgatcaatcaatcatgtatttactattgactatgaatttactatgacataatactctattctagaaccttaaaaaggtttaaagtcaaagtcattactcccaaatccaggattccacctgcagatttctttttgctccaccttgtccctaaaatttcctctccagctgtcttcatggggtccttgggctgcagggcagggccttgaggttgctcataaacttctactttcataacctgcttatatgtctgtactgtctgttccttggttccaagatagcctgaaatgactgtcctcaagtaggatacatatctgatccactattattgtgcatactcttttgtttcatattcacttacttttgtaaaagttctcagtgactttagagactgattcttgacttagggaagtaca

SEQ ID NO: 205225 - DNA, 1000 bp, Homo Sapiens
tcgtattatggagagaaatctgtttcactcactctacttattcgaatgttaatatcatccagaaacacccccatagacactcccaggtgatgcttaaccaaatatctgggcaccccattgtccacttaaactgaggcatgcaattaaccattgcaagtccactccttatcaacttggcacctatattcatttccttaaactatacctgatctccaaatgaagatgataataaggtcataattatgtctaacgtgatataattatactgcatataatcagaaatacattaaccctttccacagaggaatcaaagtccttaaatgatattgtcttctcaatatttcataacttaaatactatgatataaaattaaccatacttaaatatgatataaatccaaatattttttgttatttaataataaaataaaggaagaatgaaaacaaaaatatacacacagatacatatacaaaaacatgtttataacaaaataatgaataaatattcatgacaattacagtcttcatttctgtaactggacacgtagccatagctagtaaatataacttccttctttcactactcattctgtattcctattgccttcagcaagcacctcagttggtcatagttctttacctggtggaaagacacaagctttcattcctaaaggatttgagctattagttttactaccaggatttgattgttgcagttttccattgaccttaatcatatggcatcgtaatagtaagagaagactttagggatgaccttcagtgttccagacatactcttccttaccttcattgtgaagtagcagtccaatttccacttggtagtcaggtggtcaccaagcatggtaacttctttctttgcctattgattcagaggcatgaggagtccaaagtggtcaggctgcaatcttaacttccagttcaatggaaaacattcttatgttttttggtagaagcattactcccttctaacctaagaattc

SEQ ID NO: 205226 - DNA, 1000 bp, Homo Sapiens
tttttttttctgtatatgacaagacacacatcagatcataagctacaagaaaacaaacaaaaaagatatgaaaaagatataaagacctccccctcaccacgtttggattcatcatatctattatgattgtaccattaatcacaaagggtaaggcgatatttctgttaggaggaggcagtgtgccctataaaacgttgacaatctcactgtcatatacccaagaaagaaccctgaacctggaagggcaaaaaagccttaaacatgtgagatgggaactgctatgcactctgtccttgttttctttcatctggactttcagatggtttgttactctgacacaaagatggagtccggtacacaggcaggaaaatctctctagaaaatgccacccgattatgaatgaattatctcttataattctaattatacagttgcacatttctctgcattttctctttacagcagtttttaaaatgtgttttgaccttgtttttgctattatttgggatattaagtaaagacatattttacgagccaaaactaacagtacagcaacattcaaatccttgaagccagcattattaaagcatcagaaattaacaaaacctccactcttaggaaacaagattcagaactactaggattaggtgaatctccccaacaaaactatctgtgcattgcttaatctgggggtttaacatttaacttttttaaaaaagaggcaaagatttataactccctagtgcctacaatggtgtccaattctcagtaaataataagtatctattgaaagaatgccatagaacagatgagactgagataatgagagaatgtaagagaaatacacgcaagagatcaaagcactgaccttacagaagacaaaaattagacataaaagtaaaaagaaaatgcaaacaaggataagagaaaaccattaaaagcataggaaatccagtgaaagagaatactacagaggtcataaaaggatagttaagaattc

SEQ ID NO: 205227 - DNA, 1000 bp, Homo Sapiens
ctttgtctccatgaataactttctaacattctacattggccaatcagaatcccttcacccttgtcaattccacttgggtaactttttttttttttttactctgtttctttgccaccaaactgcgtgttcccataggaaagacacagcataacgcatcagttgctccttgctactaaacagttggtgggaaaactaaaatctgcagggaagaagagtaagataattttttaactcttcaagggcacatttcctgttaaccagctctgtcccctgggacaagtgtgttaaatgaatattgacttggggaagaatctgggatcaaataggattctgagcctgtgaagatgcttctctctcctcatccccatgctggtgggtgatttttttaaggtcttcatcttctaattcccctatttcaactgtttgaatctttctgggagactgattcttcattgaggctgcacttgagaacatgacataaaaccataattttaaaagcactctaagacttgatacaatgaaatcaacttaaatgtaattatttctttccaggatattctttttttttttttttttttgcctttttaaatcattgcagttcttttctgctaatctctaacatccctattccatgaccccccaccaataaatcctagttttgcttcctccttggcctgacttttgcttgttacccggaagcataaaagcatctcaagtttaaaagacgtgtggtcagaagcaaagaaaagacccaccaaagatgatgtcaattaagtctagcagaagcatttctttccatgaaagcacacagcccctagcatctggggggagaagctaacatggttgagtccctactgtatggcaagcatcttcaattaatcgagacaacaacttgcaatgcagtggttatacttggtaagtgaggaagctgatgtttggaaaggtgaagcaacttttagcccggtgacaagcaaagactcaacccttgccagtagaattc

SEQ ID NO: 205228 - DNA, 1000 bp, Homo Sapiens
ttgttccctttattatacctgattatcatttctgaattatactcaagttgtcatctttaatttagcaaagagaagatgctctatgaggaggagacacctaagtcccaagaaatggaggaagaaaataaagaatctagtagctccagctcagaggaggaggaaggtgaagatgaagcttctgagtcagaaactgagaaggaggcaggtaatgcaaagatgttcatagtgaagatcctctatctccatagtgtaagaagattactccttgtcagagagctagccaggcctcacaggactccaaaaagagcttgaagtttagttttcaaggataagatatcaaattgccagtgaccacctgatataaaaactgtgagctatgttagactatatctaccaattcctgtgtagccatatgataaggtgcacaaagaattcttaggtgaatgctgggtacggtgccttagcactttgggaggccaagtgcggtggcttgctttaagttcaagacagcttgggcaacatagcaagaccctgtctctacaaaaaaatttaaaaagaaaaggtaataattcttatgtgaggaatccaactctccttactccaggttggtaaatggcatagagaccaaattccaaaatgtcggtatgctgagaggcagagaagatgagatcttgcagaagctcttagggtcaaaccaactggtgaatacttgcatttaattctcaggtttgtctgatttcctaaacagaatcctaaaatctttttttttccctctcgtgtgagttggggagtaaggaaggaacaaaatcatatttacctttatggctattattgataatatatacctcatatagggcttcttttttttttttgagacagagtctcgctctgttgcccaggctggagtgcagtggtgtgatctcagcttactgcaacctccgcctcccaggctcaagtgattctcatgcctcagcctctcagtagctgggactacaggtgt

SEQ ID NO: 205229 - DNA, 1000 bp, Homo Sapiens
tgaggctgtcattaccccaaaagtcagctttgtgtcaatcaacaaacactgtggtctgtcttttctctcagcaaagtctgaaggagtgggacactccaactgtgtgtcacaggaatgagctgtcatctggcaatttacagaccagcttcaaggattccatttaccaccagtttattcacttgtatttctaatatttatattttcttaagatgatcccctctcccatgtgtgctaattttctaaataacagccacatcgacaaaatgccccctttgatgagtcatgggctgagctgggttctagtgatgctggctacaaccttgagagttaaagaaaagctatttatattttctttttattattttattttattttattttattttgagacagagtctcactctgtcgcccaagctggagtgcggtggcgtgatctcagctcactgcaacctccgcctcccggattcaagcaattctcctgcctcagcctcctgagtagctgggattacaggtgcccgccaccacgtccagctaatttttgtatttttagtagagacggggtttcaccatgttggtcaggctggtctcgaaccccttacctcgtgatccacccaccttggtctcccaaagtgctgggattacaggcgtgggccactgcgcctggccctatattttcttaagatggtcccttctcccacgtgcgctaattttccaaataacagccacatcaacagaatgcccccttcgatgagtcatgggccgagctgggttctagtgatgccggctacagcctcgacagttaaggaaaagccactttcgcaaagaatggaccctgcttccgtaaccttgggttaaatgttgtctgcgagcaccttactgagtttcttcattttttgctttatttgggtgcagctaaaccagctaaacagccttaataagttactccctgggatacaataagctccctgcatctgtgaggtgaaaggcagcccagtgaattc

SEQ ID NO: 205230 - DNA, 1000 bp, Homo Sapiens
aatatcaggttccagagttaatttatcatactcttcttctaggtcctcctcaaatccttcctgtctcttgtcctttccatttcagctagtggcatcacctcatttccattattattattattattattatttcgagacagagtttcactcttgttgcccaggctggagtgcaatggcacaatctcggctcattgaaacctcagcctcctgggttcaagcgattctcctgcctcagcctcccgagtagctgggattacaagcatgtaccaccatgcccggctaatttttgtatttttagtagagacagggtttcaccatgttggccaggctggtctcgaactcctgacctcacgtgatccgcctgtcttggcctcccaaaatgctgggattacaggcatgagccaccgtgcccggccttaaacgggtgatctttgagagaacaattcagtagagttgctagtggtatcagtgaatcttggagaattcaggaaagaattgcaggagaggaatttggttccaaatccacttttttttttttttttttttgagatggagtctcgctctgtcgcccaggctggagtgctgtggctagatctcagctcactgcaagctccgcctcctgggttcaggccattctcctgcctcagcctcccaagtagctgggactacaggcgcccaccaccacacccagctaattttttgtatttttagtagagacggggtttcaccatgttagcgaggatggcaaatccacttctttgatgaaacctgcaatttacctaaaactttctctattatcccatttcataaaataaaacttctctctttaacatctatcagtgttatttcttctttctgggtattatatttgctataaattctgtttttgctgtatttataaactggccaattttgccatttcttttttgaaaaaattttattattattattttttataaagatggggtctcactgtgttgcccaggctggtcttgaattc

SEQ ID NO: 205231 - DNA, 1000 bp, Homo Sapiens
gatccgagctagcgaccctctccgtcgcgcgcccggagtgctggcctcacctgtgggtcgcttttgggttctggcctcaggccctgaaactttcagagccagaggggagcagctttctctgcagcttgctcccccagcgcagtccttatgggaggagctggcaggggcctccgctgcctacgtcctacctcttttcctggataaacacagctctgtctgcgcggccatcagcccggtcttctgacttcctccagctgaagccaggtttctagcaacaatccattcctgtgcccaggcctcctctgctgaagctgggctgcttaggggtgggggagggctacagagaagagggagacggccatcagtggacagtggccacttctttggtgctcggttccaaccccagccctcacaggtgaagtccatcttctgtaaaaccctcctggttgaaatcctgccttggcccccagtgccctgttctggagccattccaatagctccaaggcagagtgacttgcagtgatcagttgtctgcattattctggctaatagttctctgaattattgtggctaaaggaaaagtggccagactcaggatttctggacttagaaacactgaagataaagctggatccaacagtcaggatcaagctggcctatgtcctccatccctgacagatcttaggaagcacaggccaccacagacaagatgagaccatcagttgcagtctagacacacctaccatccttcagtctctgaaaggaagcaaggctagttcctcccctaggaccactcttctccttcatgcttcagctctggaggccctcactgacaccctcccatctaaattaggggcacctgctgtacactttcatagtacctcatacttttcctttatagcattgattacagtttttccccctctatttatgtggttatttgtttaatgtccacctctcttactagactaagaatcttaaaaacagtgcttggtgcaaa

SEQ ID NO: 205232 - DNA, 1000 bp, Homo Sapiens
ttcaaaatccttggctgctaactctatattgttgctatttttttgcttatcaataacaatatctcacatatatacatatatatagtattattttgaatgtgggtgcacattgtacaactgtatatactatatatatagttgtgtatatatatatacatatatatggtaatattttgaatgtgggtgcattttgtacaactgtgtcttggcatattgggtaatgtagagtagccagatgatccctttcacaagagagttttcccattttcttctgttaagcagataagagactgatcacttcgatctaatttgtatacgagcttggctggtgtttgtttacaccttaaaaatatatatttccatctctcccctgtttcttggacttggatttctttatcaaaccttataagtctttgtcttttgactctgacgtactgaaagagattcgtttaagacttctgaagctttcaagctcagttatttagcctccctcctcagacagaatccaaattggccaacattttagggggttgaacagctttgtatttgtcaggcccctccctctagtaggattttgtatgtttgatagtgaataactgcagatttctctttgccttttaaaagattcttgcagaggtcagtaggctcctgcataactccatacctcaatttgggcctgcttaccacaaccatttgtacagttgtgtagcctttatctcctaagtggccaaatagccttatgtaatagccccttaaaacatcggtagtttctgtcccccagcagaccctctgtttgagacaagcattattcttaggtcatatccagcactggccagtgcccccattgatgaaaatggctggcaagagtccattagcctcagaagggttattacctccttggaattcagctttcctagttcttgttatgcatttccagtcttcttttctagatccttcttctgtatctgaactctaaatatgggcttggtctaaatcagga

SEQ ID NO: 205233 - DNA, 1000 bp, Homo Sapiens
aaaatttctttcacttcatagacttacaaaaagaataaatgaataatcattctgaagctcaattcatcatttttctctctgaataggcttcccttcctgactttcataacaacctaccatattggaagcttataatgacttgtccttctttttcaccccatctccaatcagttcctgcgtcctttgaatttatcccttactgttctgcatatggctgtctcctacattccattcctacctaagttcaagactttattttgtcccatttggttgactataatagctttataactagtttctatgacatgtttctctcacctgtattaaaaagtcagttcttactaggctaattttcctaaattgtaaatgtgataattatcgtagaaaaaatttcaagatctcacttcatctaacaaattaaatataaatatctctatatatgctcaaaaaccttcatagttcctaggaaaacttacttttgatttttccataccacattatagtcaaatataatattaaatatatatttaactaaataatatgtgtaaataattactctaaaaatatctagctgcaaaaattgggaatttgaatatgtttcaattgtaattattccaacgtaatttttggcatttaatttgtgatggctgttccttcccagcaatcatcatgtatactcaggaatgtttccatatagagaaaatctaacttacaaattgttttccaagtaataacacttttatgatactaaatgtgatcatcaatgaagatgaaataatgcttttctttatagacatgtatttatgcattagtttttctttgcagttttcttttttgtatttcagagtgaatactttctccaccccaccctccagtattcaaactttttgagtttgagtgggcccctgaggagctaatatgcaagaggctccacagtgtctgaagggcctaggctaagagatcctccctttgccatctggatccactgcctatggaattc

SEQ ID NO: 205234 - DNA, 1000 bp, Homo Sapiens
attgcttgaacccaggaggtggaggttgcagtgagctggctgagatcgtgccactgcattccaacctggacaacagagtgagactctgtctcaaaaaaaaagaaaaatcacactgatcatttaatttacatgtctgatcaatagtgaggttgaacatctagtcattgtattttctctcttgtgaattttctgcttctgtcctttgttcattatttcattattgggttatcggtatatttctttatagacttgtatgaattcttgagatattaagggtattgatcataaccaagtttttcttttttgtctttttttttagatggagtctcgttttgttgcccaggctggagtgcagtggcacgatcttggctcactgcaatctctgcctcccaggttcaagcgattctcctgtcttagcctcctgagtagctggggttataggcgcctgccactacgctcagctaatttttgtatttttagtagagacgaggtttcaccatgttggccaggctggtcttgcattcttaacctcaggtgatctgcccacctcggcctcccaaagtgctgggattacaggtgtgagtcaccaccgcacctggccataactaatatttttttcttttgtatgtatgtgaaatattttaaatctaatgtaagataattattccatcaaaactccaatcaaaacctcatatcccctaatctgtataggcaagaaataggaaacattaccttaagtgatgcaagaggatgttctggtcccaagaggctccagtgaaaagcagccaggtcctcatctgggaggatgtggttacctataaagtacatttgtcattcattgactgtacaaatgttttcttagaacctccaggccatgaaaggggtcctgggagagaaaatgatcaaataattcacataggtctgtattcttaatgtaatacttacagtagttctgtgttgatcacttaatatgtttcatgtgcattatatgtatcatctt

SEQ ID NO: 205235 - DNA, 1000 bp, Homo Sapiens
gttattttggaaaaaaatttcaaagagaattctgtttccttgacggttaatagtttggctgaggatctgcacagtggggcctatttgaagacattagaaaatatctgttggtttaaaaagttccaccccacagtaaaaaacagtgcaattttgaatcaaaatgttgttggagacatgttataagtaaatataatataatcacatataacaataagtgaaatggtttgattacaaggaaaattaggatatctatttttaaatctaaattataattcttcaaccatacaaaccagtaactatattatactctgtggcacttcacttgatacatttattacttttttaaaaatagaaaactttagctatttatttagctacttgtaggctaatgctgacctatgtcataaatagtttaaaaaaattttaatatatctctttaaatcccatttctaggctgggagtggtggctcatgcccataattccaacactttgggaggctgaggcaggcagatcactttaggtcaggagttcaagaaaagcctggccaacttgtgtctactaaaaatgcaaaaattagccgggcgtggtggcgggcgcctgcagtcccagctacttgggaggcagaggcacgagaatcactggaacccaggaggcagaggttgcagtgagccgagattgcaccactgcactccatcctgggtgacagagtgagactgtctcaaaaaataaataaataaataaatcccatttctagaacaacaaagtatggtggaaattcagaatgagaagactttgattcagtttttttcattcttcttgtttcaatctatgtggttgagcaaagcagttaacttctctgaattttatgtttcctctctggaaatgagagaattggtctagaattccagatgttggcattcaccatctgactcaaataataataatttaaaaacacccatacagggtttaacccagaataagtgcgatttcttttagcac

SEQ ID NO: 205236 - DNA, 1000 bp, Homo Sapiens
attattaatgaagattcctttcacactttttaaaactcaattgagaaggtagtgaaaactgtaaatactccccctataaaactgcaagtaaacacaaacttgtacatagaatttcaaagaactcaaaaataccctgatgcacatatatgatattgacaggagttccagataagtagaacttcagggtacccaagggtatccaagagacagtaaaggtagtataactagaaaaatttccagtgtcatctctgtcagatcaaaatgaaatgcaaacactgggttaaaaacattagtaataataatgaatggaagcacctggaggtagacttgtaaattcagaggcttaacttaaattatatgaaccaaaagaaaaacataagtctctaaagatcttcaagatctacctcaaatggcacttctatcattaaacctctttttcctactgctcccacacgcagagcactctgaccccccttctctgtctcttatatttctgacatgtatcacagacatttagttatgtggcttactcctctagacaaacttaagaaactattccagaggaaactaatgatctcacttcggtattccctttgcagtgctcagagtgagtaattcgtgcggccacttaaaatatcagcagatattttcaaggaacaaagatcgttggaactcattgcttttaagtactgtatactgacaggaatcccttgaaatcgtggaagtattctttcaaagaacatgaataatttataattaatattactgtgctgcccgggtgaggcgcgggggaatggattattaggatatgctggttgtggcagtaaaaatatagaggcggcggccgggcgcggtggctcacgcctgtgatcccagcactttgggaggccgagacgggcggatcacttgaggtagggagttcgagaccaacctagcccacatggtgaaacaccgtctctactaaaaacacaaaaattagccggccgcggtggcgggcacc

SEQ ID NO: 205237 - DNA, 1000 bp, Homo Sapiens
atctgccaccatgccctgctaatttttgtatttttagtagaagatgaggtttcaccatgttggccaggctgatgtaaaactcctgacctcaagtgattcacctgcctcggcctccccaagtgctgggattacaggcgtgagccactgcgcctggcctgataatattcttctatattttagagaccatggagttaattctaaaaatggaaaatacttaggcctgaataccagcccataggtttactatttttccctaaggtaatgtcttctccttaagcagcattagagctttgctaacatgccatctaaaaatgtaccccccaagctgggctcagtggctcacgcctgtaatcccagcactttgggaggccgaggcaggcagatcacctgaggttgggagtttgaaaccagcctgaccaacatggagaaaccccgtctctactaaaaatacaaaattagctgggcatggtggcgcatgcctgtaattccagctactcgggaggctgaggcaggagaattgtttgaacccgggaggcagaggttgtggtgagctgagatcgcgccattgcactccagcctgggcaacaagagcaaaactccgtctcaaacaaacaaacaaacaaacaaacaaaaaaatgtatccccccaagaacaggaagaagtgtcatggaggtcttttattttcaacaatatagaaacatttttggatgaactttgtctctcaggttttggagaattaaaatgcctcccttatcccatccctgccacactctaggacattgattcatgttcccaaagaataatggttagcttactgtatgccagctactattcttagctccttacatgaactaatccttttaatcctcacaactacactatgaagcggatgctactattgtccactttatgggggaagaaactgaggcacagagaggttagcttgcctcgggactctgtctctgctgagattggaagcagaagactagttccagaattc

SEQ ID NO: 205238 - DNA, 1000 bp, Homo Sapiens
tccagctagatataaaagttctccaagtcctcaccagattagctagacacagagcactgattggtgcatttacaaacttttagctagacacagggtgctgattggtgcgtttagaaaccttgagcttgacacagagtgctgattggtgtatatgcaatcctccagttagacataaaagttctccaagtccccacccgactcaggagcccagctggctttgcctagtggatccccgatcacggccgagggcggagctccccaccagtgccatgccgtccgccagcactcctcagcccttgggcggtcgatgggaccgggcaccgcgaagcagggtgcgacgtctgtcgcggaggctccggccgcgtggaagcccacctggggcgtggggggcggcttgggcatggcgggctgcaggtcccaagctctgccccgcggggaggcggttgaggcccagtgagaattcaagcacgacgtgggcgggtgggccagcagtgcaaggggacccagcacaccctccgaagctgctggcctgggtgctaagcccctcactgcctggggctggcggcgccagccggcggctcccagtgcggggtccgccaagcccgcgagcgccgcgcggagccatggttcccgcccgcgccactcgtcccacacctccccgcaagcagagggagccggctcctgcttctgccggcccagagaggggttcccactgtgcagcggcaggctgaagggttcttcaagagtggccacagcggatgccgaggccgaggaggtgctgagagcgagcgagggctgctagcacgttgtcacctctcactatgagcaagccctctgaatataggataaagtctagggttgaaggggcattcagaaagtggaggaggacctgctcttgagctggggtaatttggggagctctttcaacaccagatctttcaaaacttacctgtcccctgtcccacaccttaagggcagctggtgtcttgatgctgaattc

SEQ ID NO: 205239 - DNA, 1000 bp, Homo Sapiens
ttatgagttaggagtgagcagtttttcactttcacaatttagaatgaatttaaatcaggatattaagtaaataggtgaagtaacgacatatgtggaataaaaatttgggaattgactacataatcactttttaaaaagtttctctgttaggaacacacacacacacacacacatacacagacacacacacacacacacacacacacacacacagagcatgagcaagactgagagtgcttttacagtagtttatttttatgactttttctcctgtattaaattagtacgtctccaggtaggctccatgtcttttcacctttttgtccctggcatctaacatagtacctggcactgtgtgagcacagaaagtttgctgaataaaggaatgaatgaatggataaggaaataaacctccattccacatttagatgagtatttttgttagttatagggataacatttgatattatgaaacaacagctagtatagtagaatgatgtcttatagtacatcaccattaggttgatccatgattcgtttgcaaaataatttacccatttttttttctaacacataaaatgacagtgaatgcattatttgtctctttttttactagaagacaagttgtaagatttaagaaatgattcgcattttttgattagcgtgatcgtatgctcttctttgatggtatttgttgaaaattctttggggatttgccatacctaatgagtggctttataaactgcagaggcagataaataggaaaagttagtaaagtgaattaagtttgtaaatcaagacaggcttttgtcaatatccagcctgtaatattgctaggagtcagatagaccaccctttcctttaatttttaatttaattaaccatccctttgatttcaaatcactaagacatcactgagagtcaaagactaaccttgagaaggacttatcttctttagtcatcaaaaagatacgaaattccattaattaggtgtgaattc

SEQ ID NO: 205240 - DNA, 1000 bp, Homo Sapiens
cgtacttcggaggacatgcggctgtccctgccagcagccagcagccagcgtcagcagaagtgccacttgcctgggcagacaggtgggctaacgtttggggcagaatgtcttcttcccagccatcattggctcctgcaccagtgaacaccagctgcccacaaagctctgctccccaacgatcctcattctgccattcttcctgggggctttcaatgggtggtgctcacctcaacacacacctttactttcagaggctgaataatcagcatatatgggcatgtggcaggtgtagacttcatgtgcacccctggtctcgtgtcccagtcctgactcagccaccatctgtgtggccttgggcaccatttcctcattggcaaagcgagatgggactacaacagctgttctgaagcgtttctgaggaacaccggccctacagggggttcaagattgtgccatgcattaaaaacagaagctagggtcaagaagtttgggaaatgctggtgaaaaatgttaaaaagcatcaattctgcattccatcctcattaccagcctccatctcatttctcagagtcccaggatagatgattagaccaacgatatcctcgcctaataggtgtacttctgtgtgcttctgttttgatagtttttgaagaaattttaaacactcagttacataggcatacacacaagaaactgaaattgcaagcagctttcccacatggaagaggcttctctaatgcagcacagtattaatacttctcagagccattaatgtttacatgagcatccaagcagcaacatagagcaatgcccagataatctgacaactccttttcatagtcaagggaatgtcggatcctgataccaaagccaggcagagacacaacaaaaaaagagaattttaggccaatatccctgatgaacatcgatgcaaaaatcctcaataaaatactggcaaaccgaatccagcagcacatcaaaaagcttatccaccatgatc

SEQ ID NO: 205241 - DNA, 1000 bp, Homo Sapiens
gtcacatatcagtgacattcttttgtgtctcagactaaggactctatagtcattcttcatttcttccctttcttcaccttcacactcacatgaccaccacattctgtcagttttaccacagatttatctcctggatctaagcttcctctctgtccttggcatggcttgttttattctggccctggctaccttgtatctggattatttccagaatcttcttaattagtctttttctaccatcaagatatcttcataccagtccttctacattgctgcaagattcatattcctatgaacaaatattataacattttcttgccttaaagctcctggtagctctcctttgtctataataaattccaaatttcttaccttggcatgcaagcctcctgaaaatcaggcatgaaacttcacttttttagccttctctactaccacttgtcttttatgggattgttcctttgaatgttaacaacaatccttgatcatttcttatctaattaatgtctttgcacatactattttctctgccatttttcttctccaccagacaagctctcttacaaatcctataagatctgcctggaaatgtcatctcctttatgatgctttctgtgacattctctgcagtttaagcaattccttctagtgaagttacttgcattgaagtagggccatcccatagctcctgtcacattgtgttacaatcgtttgttcatttgcctgtcggttacccatccctatcacctggcccccatctctatgccaatagatatggttaatagagattttgcaagcaataatctctagtggtttgggacctttagggaaggcatagatggtcctcctcttggagccacaatgtacattagcctattaaaggctctgactctgagaagctctgtagaacccaggaccctgtctgtaaccagggtttcccaaatatttctaatcagggaactcttcttttgaagaacatctattattaatcaaggaattc

SEQ ID NO: 205242 - DNA, 1000 bp, Homo Sapiens
tacaatttgctataattgacatcagcatcagggtaaaccctgcagccctcaaaccggttactgctgaattgtgcattccccatgggatcccacactgcttccagtgccacagccagatccacactaaacccttaacacatggaaatggaatgccagggagggagctgctaagcagcactattaatgccaacactctcttctttactcagctatcaatataaattgaagtcggtaaaactgtgagatgctttcaattaaacagatgtatgctgacatttgtttcccctcccccaaggaaatatctaacctctctgtgggaactaccacaattcattctagcctcagcccacctcattctagcctgagcctacttctcaccctaatcttcctcatctggttgtaacctcagcccaactctcattccagcctctgctgtgaccagttctttgtaggtacagctcctcagcaccttgaccccagccctctctgatgtctgccaggacctctaggtgctcacacaggagaaatctggaagtacaggggcccttgccaaatgggagatggaatcatggaaaagtcttcacccctccagggaaaagcagacagctcctaaatccatttcttagggctccttgcttccctcccctgccttcctctccctgctcctgacttctgctccctggcatcatttctcacataagctacctgcagcagcccctctcacgctgtgtctcagggaaaccccagccaagacaaatcatttcacgcagtaaaatttaatgaccatagttttagaatcaacaaacaggacacggcatcttacaaaagatgtttctgtgccatttctcctccagggaggcagacaggtgggaagacctagacagaacattgaattgtacagaattccagagcatctcattagtttgtgtaattagtcagagaatttgaagtaaggctattcccaaaatcggggctggatggctgctgtacttcttcatga

SEQ ID NO: 205243 - DNA, 1000 bp, Homo Sapiens
aaatgaaatatctcatattttctgaaacgagtgtttggccttgtgaattttacaataactatttatcattcactagacatgtaggggattaataaaattaaaaattaatttgcaaacacctacaacagctctcaaattctcagtttaatcatgacatttaaaaattctgccaaggtactaacctacaaggtctttataatgatcatgtttgaagttgaacagtggaaataagcacatttgttgttttaacgtaagtatccagaaatgccccatttacaaatagcttgaatgagggaaaaccaggtgtgccttagtccagattctatataatccccaaacccaatttaaaaggaactattttgaaagaaaatttatgttaacatttttactgcatatatacacacataaacatgcataccatataagaaattcacagggacattccttcatgcaaaaatcattgccaaacactgttctgttcattgagtgatacatcagtgaacaaacagtcaaaactcttggcctttgtggaactttactaggagaaaaaagaccaaaagaaataaaataaatatgcaagttacacagtatcatgtattagaatttgactagtgctgtggagaacagagcacagtaagggtcaggagactgaaatctcaggtaagcaagggcctgaaggaagtgagagattgtgtcccagagatatccagagttcctatcagtacaaaggttctgggacagatggtgtcttctgtgtttgagaaaaagcaagagagccaggatggctgagaatagtaggagaaagagtcagagaaggaagacagcatgcagaacagattgtatagggcctcagaaatcagtataagaactttgatttttattctggaaaaaaaaaatgaggatccactgaagagttctgagcagagacatgatgtaatctgatttttgttcaaaaggatcacttaacctaatgagagtatactgtgcacaggcaagggta

SEQ ID NO: 205244 - DNA, 1000 bp, Homo Sapiens
catcagctcggcatccacacaccctatttttaatctttaacttccaaataaagatattagcaacattatgcttttacattatatgattcaatgattcttcatacaaccaaacctaaaagaagaaacccagagttccactttatccatctgtgaataaatgtttatcttctgattcacaatcttatcttgctatcctataacttaaaactggaccatacgagtaaccatgattcatatactgatactattagagggtattggaatgggagagaaaaaaaagaaaaatatcagtttatgtatacaaatgtccatatctaagcaataaagaaaatatctctaatgactagagtacttgtttctggaactggtcacatggctgtaattggtatgtgtaattcccttctcccaccactcatttcctatcacactggtccccagcaagcacctcagccagttttttttgttttttttttgtttgttttttgttttttgagacagagccttgctctgtcacccaggctggagtgcagtggcgtgatctcggctcactgcaacctctgcctcctgggttcaagtgattctccttcctcagcttctggagtagctgggattacaggtgcccaccaccatgcctggataattttttttgtatttttagtagagacggggtttcatcatgttggccaggctggtttggaacccctgatctcaagtgatccgcccaccttggcctcccaaagtgctaggattacaggtgtgagccacagtgcccagcccagtcagttttttaatttgttttttggtctagtatgatgacctaaatctttattcttgaagtttctgtgcgacattgttctgcttgttctggttgctatagttttctctaacttttactacagagcatgggagtgccagattaccaggaggatctcctggagcccaggtactccttgcctccattgtgcagtagccaaccaatttacccttgataatcaagatc

SEQ ID NO: 205245 - DNA, 1000 bp, Homo Sapiens
atattggcttaaaattgttacagtatatagaacaaaatatatctaccatctggactcagcctgtgagccaccaatttccagcctctactctagatcagtcttcctagaatttctctcaggctgggcgcggtggctcacgcctgtaatcccagcactttgggaggccgaggcgggtggatcatttgaggtcaggagttcaagaccagtttggccaacatggtgagaacctgtctctactaaaaatacaaaaaacaggcacggtggtatgcccctataatcccagctacctgggaggctgaggcaggagaatcgcttgaacccaggaggtggaggttgcagtgagctgagatggcaccactgcactccagcctgggcaacagagtgagattctgtctcaaaaaaaaaaaaaaaaaaagaatttatctcagatcttgattcccctgctcaaaacatttaagagttatccatgactatccatggttctctaactgagaaagctgacattcacatacctcttcaatctacctgacccaaacttacctctccagccttatagtctctattgaaatgttctgttacggcagacaggcctatccaacactctctaaaaaagtcatttcccacccacaatattccagccaacttgccccatccatgccctacccatagcttaaaaccaaaccaaatatcacttcctcaggtaagacttccctgacagcccatcatcctctaaagtcctgcaacaaacaacagtcaagatattcatttagccattcaacacatatcagttcaatggctcttttactgccatcttgaacttttctttgaacctggtatgtttatcttttcagacatttatattgttcactaactatgatgaaatatgctatctacaaaactgaattcagttcacttcaaaccataattacagaataccctgaagtcatcacctactaaattctgtgctaaagattatacaaagaagaaatacaaggccggg

SEQ ID NO: 205246 - DNA, 1000 bp, Homo Sapiens
tcaactgaatattgggcaagcatagtttttaattaatattttcccttaatctaacgtttcagtgaacttcacacatgacattatccagaaatgtagtttcaaagtatatagcaattttgtgaggattgaaataaattaaaaatcactggatcaagggaaatacattgcattgtggctaggagcatcaagaaattctgaatgatatctcacgagagcaggatttatttcaatctacaaggagactatgaatgatactatgacctctgagacaggcaacataatttgatacattgaggaaagaaacccacaataaacagaaaatatgccagcactaaactttagaagatatgttcaagccattgtcagccgaagactatgagagaagttaactgaatgcatccgctctctccctgctccacagtaccagcaaggctgtgcagctgatccagacagagggccagtgagagcccctctgcacatctgtgtctattgctaaggctgccatgggcattggtttgtcttgcaagagtacctgttgtttccattatatgcaaatgacatacacttatgattatattgaaggaaaagatatttcttcatccttacgtatctctcatagaaggtggctaatgggggaaaaagggagcaaaatatccaattaatgaataaatgttgatttgatggcattgtaattataataactgcctatgtttacctaacacaatttagcctacaaataccataaaatggcatagatttattttatcgaacatcgttcaataatagggatggtttaaaatatttgtataattctacattgaaaaaggagtagaattgggaagtaccttccctagaagttttgtatttctatgctcttacagtttttctgttttgacaatagaattcactacaagtacctatagattgcatttgtaagacaaaagtttgtggcaaagttgtggacaagagagtgtcatactacttgtcgtgtacttggatg

SEQ ID NO: 205247 - DNA, 1000 bp, Homo Sapiens
attgcagtttaataaatttttattttacaataaatattttttgagaattttatatcactcattcattcaaaaactgtgaattgagcacctgtgtgcctgcacatggctaggtgctggggacataacagcaaacaagagaaccatggcctcttaattcatggaccttccagactttgggggtacacagataagtgaacagacaagcataaaataaatgtggtaagttctctactaagacaagaacacctttcccaaaccaggttcaggaaaaacttctttaaaaatgttattttctagctgaactttgaggatgatatcaaggtatcccagtgaagagagaaggaaagtgtgtttctggagtgagaaattcacaagtgcactggctaagtggatgggatgcctccgtggaactgaaagcttggatacagcaaaaaactagagctcaaatgagtgaataacaagagtttggagaggtgggcgaggagtcaatcttatagggccctgtggccatataaaagagttgtgtttcattcttgcaatagaaataggtgacacctaaaaggttttaggtaaaatgacaaaattagatttatattttagaaatatcactctgctctggctgcaatgcaaagaaaagattgaagagctcaggtggctgttggagcaacacaggtgatcggtgacagtggcctgaacagggtggttgtatgaggatgcagagaccaggaggcatctgagagatagtgctgaggaagaatgggcatgtcatggtaattgattggacaggaaagtctgaaggatgatgctttggtttctagttagagctgttgggttaagagtggtacagttcactgagatggggagaataaaggtagaatgggcttaggaataaaaaacaatgaatttatttaaggcatgctagtacgaaagaaatgcctgcttgacttcaaatgcgggatatcaaataggcaactgaagatataggcctgattaggaattc

SEQ ID NO: 205248 - DNA, 1000 bp, Homo Sapiens
agccatactggacagggtagttacagaacactaccttcactgcagaaagttgtactggacagcactgatgtccatcacaagtaaaacagcaagttgagaataagagaggaaaaataaggacacttgcttgaaaggaaaacagaagcaggaataaaagattttttaaaaaagcaatcaaattgaagattttgaactttggtggtcaacaaggaacaaataagttccttaaaaggagtaaaagggctgggcacagtggctcacgcctgtaatcacagcactttgggaggctgaggcgggcagatcaccttacatcaggagttcgagaccagcctggctaacatggtaaaaccccgtttctactaaaaatacaaaaaattagccaggcttggtggcacgagcctgtaatcccagctacttgggaggctgaggcaggagaatcacttgaacccaggaggcgaaggttgcagtgaactgagatcacgccattgcattccagcatgggcatcaagagtgaaactctgtctcaaaataaaagagtaaaagaggacaaacatttgatcttaaaaagattttaatgtgtattatggagtaaatgtggaatgactagagagagtaaaccactgggtcatagggtatatatacacatacatacatacagctttagtaactattgtcaaatagttttcaaagtgcttgaactaatttatacccccatcagcaacttacgagagttccagctgtttgacattcttggtaacacttggtatcacacactagcaatttgaggatccaagcaaaactaaccacatttcattctaaagtttcatctagtctactaaaatttttaatttccaaaatctttggccacaaataactataataaaatattaaatgtattactcttgattgaatgctttctaggaaataaacaaggtggagataaaagcatcctacatgttataaaaacaattatttcccacattctgtaatataagaattc

SEQ ID NO: 205249 - DNA, 1000 bp, Homo Sapiens
ctctctattcacaaaacaattaccttttcttgagaatttcattaattatagatcattaatgaatacatttgttcataaagattatctttggtgatgtaaaaaaattcaagtcaataattaaaataatcaagaagctacattttaaattttacttggaccaaaccaaaaataaatttcaaatcatcatagcttttctactttgaggattcaattagataaggtgattatgaggacagtcaaaaaggccagtaaattacttacttgcattaaaataacttacattgaaatattctgctttgaacaacaatcaaaggttagagaccactatgcatatttgaaaacataaatgaccagcagagaacatagaacaactaattttaaatacttgatttctgaaacagaaaatacaacagataccctctaggttaagtaaatgtttaaaaccacatactgtgctaatttaccatacctttccttcaatgagctgcaaatgtggggctttagttgggcttctcacttccctcctgccgtccccatcttgtaccacggcaatgctgacaagtccaggtccataggctgaaatctccccagcagcgccaggaaaatccttcataagactttggtccatgacaccaatcggagctagtaaagagtgacaattttggattattttaggacatatgaatcataaactttatggaaaatttcccccttacaggagataaacaggcagcatataaatagtgaacaggaacagagacattgcttgagctctgaaaatacccaccatataaaataaactaatttttaaacgtttaccaaattctgaaagtattctgaattttaatgcactgagctacaccagggtctcaaaccacaggtattggaaggataaactcagatcatggaactggccagtaggaggagctctaagaccagctgaaacaccagagttaaggcaaacagaattacaaggtaagcagtattttaactctttggt

SEQ ID NO: 205250 - DNA, 1000 bp, Homo Sapiens
tttagacgaattgctggagactgggtatagactagtttgagagtgagaaacttctgggggacacattgataggggtgtcctataattttatagcctttacttctaggaatcaaaatttcatgatgaagaactgatacaaaatccatgattatctctggcaaggggaggagaagtgtaatcattgttatatacactcccagcgcctacttcataacgaacacctactctcaaggggaaaacattttgccagaccctgttctagctggaggaaaaaaattcatcacactccagctccttctagcttttctgtctcacgtaagtgagagatacagtctagggtcagggtttcaagaaaatatattagaagcactgcagccggaaacacctataccaccagagaaacacttataaacatcacagggtttggttggccctgataaacagacccactaaaagacttatatttgattataagattagactacttctattccccacatcttaccaccaggccaccagggatccagtatagtaacagcggataacagctgagagaactgcgtgagagactctctctgagaaggagtgcttaggaaagcccaaagtcaggatagaagacaaaagcaaggagaacagaggaactggaaacctatggcaactacagccacattacagcacctatttacagcaaacatgaaaaacaaacagccaactcttaacaagaataacataaatcctcacactaaaagacctgtttatctcagttcttaatagtcaacaccacatatccagcgttccacaaaaaaaaatacaagacatgtcaaaaggcaacaaaaaatacaagctaaagaaacaaacacaaaaaaatcacacccagactcagatatagcacagatactggaattctcaaacagaaaatgtaaaataactatgattaatatgttaagaaatagagtagaaaaagtagacaacctataagaacagatgggtaaaataagca

SEQ ID NO: 205251 - DNA, 1000 bp, Homo Sapiens
ctttgttccattgctagtgaggagctgcattcctttggaagagaagaggcactctgatttttagaattttaagcttttctgctctgttttctccccatctttgtggttttatctacctttggtctttgatgatggtgacatagagatagggttttggtgtggatgtcctttctgtttgttagttttccttctaacagtcagttccctcagctgcagttctgttggagtttgctggaggtccactcccatctctgttttcctgggtatcaccagtggaggctgcagaacagcaaatattgcagaacgtcaaatgttgctgcctgatccttcctctggaagcttcatctcagatgtgcacctggctgtatgaagtgtccatcggccactcctgggaggtgcctcccagttaggctactcagggatcagggacccacttgaggaggcagtctgtccattctcagatctgaaactccacaccgggaggaccactactctctttaaagctgtcagccagggacatttaagtctgcagaagtttctgctgccttttgttcagttatgccctgctcccagaggtggattctacagaggcaggcaggcctccttgagctgcggtgggcttcacccagtttgagcttcctagctgctttgtttacctactcaaacctcagcaatggtggacgcccctcccctagcctcgctcctgccttgcagttcgatcccagactgctgtgctagcagtgagtgaggctccctgggcgtgggactctctgagccatgcgtgggatataatctcctggtgtgccacttgctaagacctttggaaaagcacagtaatagggtggcagtgtcccaattttccaggtatcgtctgtcatggctttccttggctaggaaagggaattccctgaccccttgcacttcccaggtgaggcgatgccccatcctactttggctcacactccatgggctgcactcactgtctgacaagccccagtga

SEQ ID NO: 205252 - DNA, 1000 bp, Homo Sapiens
ttttatgaattacatgactaagaaactatatgtatgctgaaaagacttaagtgacaaattatgtttttaataacattaagagcttgccaaaaaaaagagctggctgtttaaaatacctggtatgattaaataaatctcatttcacctatcgtttccttaacatgaggtagaccagtatttttgttcacaaaggactgacaaacagcagctaactgagaaagctgtcagattctgacttagaaaaatctagcatccttcagcatacatagtatatttagttgttcagtattaatatgtttaaagttacagtcaccatccaaataaactaaagcaggctgggcacagtgactcatacctgtaatcccagcactttgggaggccgaggtgggcggatcacttggggtcaggagctcaagaccagcctggccaacatggcgaaaccctgtctctactaaaaatacaaaaattagccaggtggtgcacacctgtaatcccaggtactcgggaggctgaggcaggagaatcgcttgaacctgggaggtgaaggctgcagtgagccaagatcatgccactgcactccagcctgggtgaaagagctagactccatctcaaaaaataaaataaaataaagcagccgggcgcggtggctcacgcctgtaatcccagcactttgggaggccgaggcccagcagatcacgacatcaggcgatcgagaccatcctggctaacacggtgaaaccccgtctccactaaaaataaaaaaaaaattaaaaaaattagccaggcatggtggcgggctcctgtagtcctaactactcgggaggctgaggcagaagaatggcatgaacccgggaggcagagcttgcagtgggccgagatcacgccactgcactccagcctgggcgacacagcgtgactccatctcaaaaataaaataaaataaagcaactatgcagatatcaccagcttttaaattttcttcaagaaaccctctgaattc

SEQ ID NO: 205253 - DNA, 1000 bp, Homo Sapiens
ttcaaatgtttcaatgtttttaaaaatgaagtcttaagtcttgattctggcagatagttctagaattagcactagtccaatttcagaggtgtttattgcaaccattaagaaaccattctattttcatttaagtcaaaaatactttaaaagttaacttaaaactttgacagtttgcttgaatgttgttctcacatgtaccaggaaggatctcaaggtgttaatatcccaaaagagtattcacaggttgtcaataagaatccctactgtgctggatcattagttctcaacattatatgtattaccatccacctctaaagtctcctctgcatagcacagagtttacttttttccaatgaaagaaacttcaaaattaaagagatatcattactcttaagcaatcatgatatccagacaccaccatcttaagtggtaagtaagatcccacttaccaccacaggttaacatgaagggatctttcccagagactaaagagctggggcaatttattggcaaacttttgagaaccatatacttcaagactatactcattaaataattgcttccctgatcttcagaatgcaaccttcccaacatactcttactgagctctttgcacatttaattgttacatcaaattcctttgtctgataatagctcagtcttcctgagctcaaacgaatacatctaccttctttatttttaaactaaaatctttttataatcattttttaaatgcaaaaaatggcaaggaatggagaagacctcaaaggtcttctctcaagcttctaacagctcatttcaaatatttgctgagcacctactctgagccagaaacagtgctagtacataaggacacagcctctgttctttttaaagtaattaatcagaaaagacattcccataagtaaaaagattccagtatgtgtcatgtgtaatgattgacctatgtgtcaggaaataatgagttatcctgagggaaacatgctaaaatgtcaccagt

SEQ ID NO: 205254 - DNA, 1000 bp, Homo Sapiens
aggcacttggggaagctcactgccctgaagggaaagacatgagcctggctggcttctcaccggctaattgtagagcctgggggccctgagtgaaaataagcagtagccagggagtggttaaagcaggccttgggtgagcgtcagtgctgtgctgacttcaggtctgacctagtgcagtctcagtagtggtggccacaggggttcttgtgtcagcccatctgcaactccagtcagcttagtacacagagatagattctatttgtttgttagaaagtaaggaaagagaaaaatagtctcggactggtaatccacagaattcttctggatcttttacaagaccatcaaggcaatacctttatgagtctacaagaaccacagtgttagtgggcttggggtgcccgctaatgcgggtgtgacttagaacacaattataggtgggaattgaacaatgagaacacatggacacaggaaggggaacatcacacactggggactgttgtggggcggggggaggggggagggatagcattaggagatacacctaatgctaaatgacgagttaatgggtgcagcacaccaacatggcacatgtatacatatgtaacaaacctgcacgttgtgcacatgtaccctaaaacttaaagtataataataaaaaaaatttaaaagaaaaagaaaaaaataagaacacaatactgaagtccttttgaatacctacaaagctttgaaaagaaggatgatcacaaagaagcacagaccgaaaagactataataaatatgtaacttttcaatgctcaggcacagatgaacatcgagaaatatcaggaccatccaggaaaatatactaaggcacaactgaccaatcctagagaaatagaaatatgtggcctttcagacagagaattcaaaataactgtcttgaggaaattccaagaaattcaagataacacaaagaagaaattcagaattctatcaaatgaatttaacaaatacattgaaa

SEQ ID NO: 205255 - DNA, 1000 bp, Homo Sapiens
cacacataaatatgcttttactgttagccacagtgggcccccccaacaggagttcattctcaatggtggaatacgtgtgctgagactatgttgatatcaaaattttacctaccagttttatcatccattgatatttcttagctcaattattactttggtggttgccaaatggtgatttcctaattcctacattccttctatttattagttggaatcctactgcaagggaaagaaaccttttcttctccccatgtatttatttatattagtatggacttgtaggttactagtttatgcaatgggatataatctgttactgtcattatttattttgaagctaaattgtcccagatttcaccaatgaaaacctcattaaacctaactcactcccatgtccttttgacttgatcccatcattctttgctcactttctcactttctggcacaagatgttccaggatcactttccctgtgactgtcttgagatcagccatttctctagaaagccctggttccttttaatggagtgtgatatttaaatacctatatctgggtacctggtgtgctcacggctattggagtgttgcagatactcctaggccctctcagtggacagagctgaggaatatatgtatgtatctacatatagattcatccctcagtatctgtggggccttggttccaggacccctccccagataccaaaatccatggatgctcaagattcttatataaaatggcatagtgtctgcatataacctacacacatcctcctgtataccctagattacttataatacctaatatggtgtgatatgatttggttctgtgtccccatcaaatttaatgtcgaattgtaatccccagcgttggaggtggggcctcgtgagaggtgaacgtgatcataggggtggtccttcgtgaatggcttagcacaatcccctcagtgctgttctcatgataggtactaagtgagttactatgagatctgtttgtttaa

SEQ ID NO: 205256 - DNA, 1000 bp, Homo Sapiens
ggacagtattaatctgacaattcaaaggtttgatttttcttttttttggtaatagaaatagatccaggatttgctagatcctaaactcagtcataattcagtttacctttataggtttgggctttgaaaactaggtccagtctgttgtgttttcttattttatttcaaaccagttctcttttcacgtggtgccacatttttcatttttgaaatatccaccctgaaacatgattcaagttgatttccatatgtaatttttctgatttctctctttagtacttttccttctctctttttaaaaaatcattcccacattgtccctttagtattttagtccttttccttttttcttttttaatcattcacacaatggctatgggtacaaaactgtaagaaatttatttttatttttatttgttttaaattcatggataccattgccataaatatgtccaatatgaattatgctgcgaatgtggcaggcatatactggatagaagcttagagtagaatagcaatgacttgattttctgtgattctgaatatcactaaagtgtgctaccagggttagccaagagagaataagatgtaattgcttgcctaaagtgataatatctttccaggacatctcctgaataccaatgaaggcagatgatttcagggagagaggcattcttcacttgagagatgggaaagatcaaataatggtagtaattaaaatgagaccaaaatgtagcatttgtagaccaagtgtgtgctaatcattgtttgaagaagttcatcagataaaatattacttactctgaaatattctgtaagaatatttatttaaaaggcagtaagtcctcatgtatgtttcatagaaattgcatagaaatgatatggacttctaatataaaaaattagagtgtgattcagaaaagaaagatacttttaaatggtttttaatcaaaattgtcttaatcaaaattttaaagttgtgaataaatacattcaaaaa

SEQ ID NO: 205257 - DNA, 1000 bp, Homo Sapiens
acactagatagataaaactgaaataatgagagctaagtgccattaagctgtcactctgaaaggtcagtgctcagtaagggccaaaatcaaaaccaaaaccaaaattcaagcaagacccaggaaactgactggaattttactttatttgtatgcagtatcttttgtaagtaatgaaaaagatgcatgattttgagcaataattacaggtaatatactattcaacagataagactcaacagactgtttacaaacactttttagaacaacgaatcaggtctggaaaaatggtcaatgtatattttctgatctgtttcctaacactaactaattttcatcactacccaatgaaaacactctggggaataagaaaaagatcggacatgagctgacttctatttctttgctagaaaatcaaaaatctgtattcaaagagaacaggacaaagaagaaaatactgcccaaaatgttaaatatacactaaatgttgttcatcactcttttttaagacgtgggaagccgtagggtctggggaattaagcaacagagaaaatgtcaagagcaatggaattgaaccccaggcagatcttaatagcttagctagtttctccacctataaaaatcaggacactcttactgctgtttctgttaggtaattaacagtcataaagcatgctgaaagtagaaactgctaaataaataatgactgcaaaagaattttaaccataacgcactaagtaataaggataaaacatgggcttttaacttgaccatttttgttttcaaattaataatgcaaacaagagtccaatcttgttaagatggctcagcatagtgttagatagcaagttaaatttagtcattacaaaatacagaaggaatcttgcttctccaagagcagttcacccaactctaggtggagctgtgaaaataaagccatgttctattcctgtaagctacagaaatgttgccacgttgcctgtgtctacactttcgtgaattc

SEQ ID NO: 205258 - DNA, 1000 bp, Homo Sapiens
ttataaatgaaaaattttagagatactttatggctctatgtctgcactactcagtatgagagacactagccacatgaaactatttacatttacattatttaaaactaaaataaataaattcttgttgtactacttacatttcatatgtttaacagccttgtgtggccaatggctgtcttatcagaaagggcagatatagaacttttacatcactacagaaagtttattggatagcacagtgctagaggatcttatctttcactggagagaatttacttttacttatggtactagcagcagtaggaatccatggtcaccttaatccagtcgggtttgagatgattctgaattggatgtcagcccttatgagggctagtatactattatttaccttttagtcttagggtgtagccttttgagatcacaatctgaagcctggaggattaccggggctgcgttcttggcaggccctcatcaccagtgtttatcccttcaggctgtgagtctcaaaagctgtgtccagtgtctcagacttgtctttggaattaacagatgcctctaggaggaaagcaggcctaaatgtgggctcacctctctagccttcccatctcttcgttattttcagaccttgtaattcttcactgtcttgttgggtctctaatgtattcacacttaaaaaaaaatattttgaccccatgtatattttttaatagttcttaatgagaaggtttttaaaaacagtccatcatagctgaaagtagaattcctctgtgagtgatatttaataaatatttctaacagttctgcctaacaactaacatttttagtatactttcatcgatgtgctcctatttgattctaactacaattttgtgatccgtatactttgtattcttatttaaaagatgagaaaactgtaggttcaaagagattaaataaaggtatctgttatagggatagctgagattcaaacccaagttctcagaccccaaatcttgtg

SEQ ID NO: 205259 - DNA, 1000 bp, Homo Sapiens
tccaccttggggcctgcaaactatgtgggccggagcagaagggccccagcagccataacacctgccttctcaggtgtgggtccgggcaatgagtgcctcttccccctagacaagatccggatgattccaaagcagttttaccaaataacttagaggaaaacaaacccaggggagcccaagggaaccccgtggccctcaagtgtgcagattcacgatggctggaccccagattccacaagcacaagtatgcacagactggcaatggcctggcatgagggcctcaggccctgccctggccttaagccagaaggaaatggtctcgcttttgaaaaccaaacccacaagggctagacaaggtagtgaggtccaagccagagcaaaggccaaggaggagaaaaaaacaaagagccagccaggcccccttccctccccacccctactgctcccacagtccatatctctcacgccgggccctctgctggaatgcccttcctctctttgtttctcaggcgaactccaatgcatcctccaaaatcaacttaaataccacctcctccacctactcaggaataaggaggatcaaaccactgattgataggtgtggatctgaaagaagccagacacacaagactacaaactatacgattccatttatatgaacccttaggggtgaaagtctaatccatagtgacagaaagatcagtagtcacttgggaccaagggcaggctgggggtgactgggaagggggcacaagagacacttctggggtgatggttccctgggcatacatatctcattactgactgtaccctgaaaatgggtatattttgttgtgtgtatttatgcctaaataaggatgactagaaagaaactctctttgtcccgactccttgctgttcacagtgacctcaaccccagtctggttctgggctcacaaggttattgtctgtacctccgttggaatggaagcaccttgaaggcaagggctgtgatgaattc

SEQ ID NO: 205260 - DNA, 1000 bp, Homo Sapiens
tgctagaacattctgtgctctaaaggcatcgctgccctcagcaaggatcgtctggcgggggaggggtcgggggagggcagcagcatacacctggagggtcctctccagggcacatgagggaacaaccctcatggtttcctatggttctggacctgacttgcgaggaggggcatggttttcaaactggtttgtagcagcagagcccttttctccaacaaaatcacccagaatcacttcctcccggaggggctgggctcatcctcctgaagccctccaggcccaagagtcctgggaagcctttgaaaatccagggaggggctcgcatgagcccaggagagcagagccaggacttgagaggaatgagagcagctccccttcccctcctccctccccggccctgcccacgtgggtgcagcagagtcagggccctggcccttggggctgggcatctcatccctctgagctccggtgcccaggggctgcccctgcctgatctgctgctcggggtgactccccctgccgcacaccccactttgcacccaggacctcctactgactagggttggctcccctttacgaaggaaggccttcgtaaagcttggcactgcttcaagaaatgtgtgtgtccaatggaaggagcaggcctcacccctgggacaaaatatgcgtgcagccctgggcacattcactcccagctgcccagcctgcaactagagctcagccactgcaggtgacagcaacgggacccgcctttgagcctgaggccaggactgacgccacagcctgcagctcctccccaagcccagccccagcccttgcccttcaatcctgagaccctgagatgcatgggtggggctttcatccggtgaggagcggaggcccagggaggtgggttccccagctgccagtacccactggtcaggctgggctggaccaggtcctgaatccccgcccttccacccatgggctccccaggaaggctaaactgagggaagaattc

SEQ ID NO: 205261 - DNA, 1000 bp, Homo Sapiens
tcttcctctgcaatcagatttgaactggaacttacaccatcatctctcctggatctgcagtgtgttgacggcagatctgggacttgtcaacctctataatcccatgagccaattccttatattaagtcatatatattgcatatatagtaattcatatatatgagatatatattttttctattggttctggttctgtttctctggagaactcagagtaatacactaagcaatggtgggagtccgtgggagccctgaaatgtcttgcgaattgaacaagagtgcacttgcaaattctttacgcatttgaagcctagactagggcaatgaggactgagtaagactgcagaagggtctagctggcctcctccccacccctctcctctctcctcctctgtcctctgcttccctcccttcctttctccttccctcctctcccctcacttcccctcgcttcccttcccttgtcctcccctccccattgccgttcctccctttcttctccctttctctccccttgccttccatgcctactgtaggctctcattattcttagattctttcttttcccctgaaacacctgctaccaggtaagggtcagatgaacgtatttcacactaagatataaataactaattagagtgttgctacccatacctcaaccctagagcttggtgattttttttttttccaaaaagggaacaatcccttagctaaagagccgctgctccaggggaggaaacgtaggcttgggcccagagataggtggcagcaggggtttctggccacgaagccttcaggccttcccaggtcccagcgtgtgtggatcttaaaacaccccctgccaagggctttgattccaattttggtttcagctaattggtttcagctgaggtgggagaggccacgcctcaggatctgcctaggccaggactgggaatgggtctcccaggtgactccgcgggcccataggcaggcagatcctgggaagacgccctttact

SEQ ID NO: 205262 - DNA, 1000 bp, Homo Sapiens
ctgttcctctgttattcaagtccttaaaatctcactattgagaccttacccccatgagcttttctttcagagagaagcacccttggagggcgtgcctcttactgacagcccctccaggagcacttactggagaagctgtgagtcctttgctcacctgcagctgtgctgaagtctcgcctgttgggggcctacaagtcggggtggagtcgagggcaggtgctgtcttgcctgatgggcccttaccattctgctaccattggacatccagaatcctctgtctccctccttaggcccggggctcctctctctggccagccaaggatggaagtggctggtattaggtgggctggaggggtgggatcccctttagggactctgcactgcattgaagtagcaccgggagtcacgagcccgtggagtgacagacccagagagacttacagatcttcattcttcatggggcagatctggaaattgaggccctagagggacgtgacttctgttaggttatacagtgatttggtttgtctgtgtccccacccaaatctcatcttgaattgtagctcccataattcccatgtgtcttgggagggacttggtaggaggtaatcaagtcatggcaggggtgggtctttcctgtgctcttctcatgatagtgactaagtctcaggagatctaatggttttgaaaaggggagttcccctgcacacacactcctttgcttgccaccatgcgagatgtgactttgcttctcctttgccttccgccatgatcatgaggcctccccagccatgtggaactgtgagtccattaaacctcttttctttataaattactcagtcttgggtatgtctttattagcagtgtgagaacagactaatacacacagcaagtcacagaggatacgagattgagcctagagccttgggcttcctttgctgtcactgggtgtgtggttccctcatcggaaacccttggagtcagttctgttacagaattc

SEQ ID NO: 205263 - DNA, 1000 bp, Homo Sapiens
ctacttaccatcacaaaattggtccttaacacaaggcctggcatatagtgttgaacaaaagtcacttgaatgaagaattagctcaacaatttataaaacaattagtactagacctaagaaatgagatatacagcaacacaataatagtgggggacttcaacactccactgacagcactagacaggtcatcaagacagaaagtcaataaagaaacaatgtatttaaactataccccggaacaaatggacttaacagatatttacagaacattctacccaacaaccacagaatttacattctattcatcagcacatggaactttctccaagatagaccatatgataggccacaaaaacaagcctcaataaatttaagaaaattgaaattatatcaagcactctctcagaccacagtggaataaaactggaaatcaactccaaaaggaaccttcaaagccatgcaaatacatggaaattaaacaacctgctcctgaataatcattgcgtcaaaaattaagatagaaatttaaaacttcaagagaacaacaatagtgacacaatctatcaaaacctgtgggatgcagcaaaggtggtgctagacagaagttcatagcccaaaatgcctacatcaaaaagtatgaaagagcataagacaagctaaggtcacacctcaaggaactagagaaacaagaacaagccaaacccaaacccagcagaagaagggaaataaccatgatcagagcagaactaaacgaaattgaaacaaacaaacaaaaagataaatgaaacaaaaagctgtttctttgaaaagataaataaaatggatagaccattagcaagattaaccaagaaaagaagagagaaaatccaaataacctcactaagaaacgaaacaggagatgttacaactgacaccactgaaatacaaaaagatcattcaagactactatgaacacctttacacacataaactagaaaacatagaggagatggatgaattc

SEQ ID NO: 205264 - DNA, 1000 bp, Homo Sapiens
ctttctttctttccttcttgagacagagtctcactctgtcacccaggctgggatgcagtggcatgatctcagcttactgcaatctccacctctggggttcaagcacaattctcctgcctcagcctcccaagtagctgggattacaggcgcccaccaccatgcccagctaaattttgtatttttagtagagatgaggttttgccatgttggccaggctggtctcaaactactgacctcagtgatccgcccacctcggccttccaaagtgctgggattacaggtgtgagccaccgcgcctggccctgtgacactttagatagagacattccatagtggtaggaattatttcctctaatagtgcttagtttattgggatattgactaatcaaactgaaaatctcgattcaacataatacacataacactcatagaatggtacctggcacataagcgttggctattttatatatatatgtgtgtatatatatgtatatatcaaatgtatatcaaatatatatacaaatatatatatcaaatatatatacaaatgtatatatatttgatatacatttaatataaacatatatgtatatatatatatgtttggggtttcttttgatacagacaggatcttattctgttattctgtcacccaggctggagtgcagtggcacaatcagagctcactgcagcttcaacttctgggctcaagtgatcctcccacatcagcctcctgagtagctaggactaaaggtgcatgccaccacgctcaattaatttttcaaatttggggggatggtctcactgctcagtctggtcttcaactcccagcctcaagcagtcctcctgccgtggcctcccaaagtgctgggattatgggcgtgagccaccatacccagccagctattattcttgatttatcagaggaaaaaagccatctaacatttttgtctatcaaacttcaatattttgactacttcacatattattctgtgaattc

SEQ ID NO: 205265 - DNA, 1000 bp, Homo Sapiens
tccgcctccctggttcaagcgattctgctgcctcagcctccacagtagatgggactacaggcacgtgccaccacacccgcctaattttttttttttttttgtatttttagtaaagacagggtttcaccatgttggtcacactgctctcaatctcctgacctcgtgatccacctgccttggcctcccaaagtgctgggattacaggcgtgagccactgcacctggcctgttattgtctttgaagactccacaggagatggcacttctgaaatcctgccacagctcttgacttctctttttgcttatattcttcctttcccacccacaatgagatgaacactgtgggtgtgcctttgatccctaggcctccccgacccagtgacagagctcagtctgggaagcatgtggcaaggggaaagaaatagatccaaggtgatcttctttgtcatactactgcacaagtcccaatatagcctctccgcagactgcaggaaggctggtggaaacacaggatcctgagagttagactgagaatgagaaacgtcctgatgtctagaaggcatgaggtcacagggcaggaagaaaggtgggagactcaggaaccctgggttcacattctgcctgtgtgactcatgaattatagtgtcactcactttagaccagtctggcatttccatgagcctatttcttgatcttaaaacaaaaggtatttgaattagtcaacctataagatttcctttttcagataaaatgctacctcgaagcttagttccttcagttcctggagtctgtgattccaatagcagctgaggttttttgctccaacctggagaggctgattaggtcaggagcttttttctttttctgttttttttttttttttttttttttttcaggccagtagttctaaacagaccactccagctgggctgttttcctctcaccctcatgcagcatttgctttgggacaggccactcctgataaccagccaagtgaattc

SEQ ID NO: 205266 - DNA, 1000 bp, Homo Sapiens
gcagctgaggtcgaggggaggctcctgcagtcaagggccgtgtgtccagcagggcaggtgccccgaatggagaccagggcttgtggaaaggggccgcttcccagggcttcagccagtgcgtgccctctgccctgtgccgattctcatcctcagggaagctctgaggcttctctgcccaggtgcccacccccgagctccccaggtgcacccaaggctgccaggaggcgggaggtctgtctggcagcagccacacaggccagcagagtgagctgacacattgctggctgcgtcctccacccgtgtagctgtgggctgggacccctaacctggcagatgtgctggtctggccggcagaccaccccgccaggaggaccaggtaaaggccaggtcgtgctcccagacatcaaatcagctggcttttcctttcttttggtcccaaacgccaggcgaacctgggagacctgccttccctgccggcgctggttggccaggtcctgctcatggctgacttcaacaaggacaaccgggtgtccctggcggaagccaagtccgtgtgggccctgctgcagcgtaacgagttcctgctgctgctgtccctgcaggagaaggagcacgcctccagactgctgggctactgtggggacctctacctcaccgagggcgtgccgcatggcgcctggcacgcggccgcccttccacccctgttgcgcccactgctgccgcctgccctgcagggtgctctccagcagtggctggggcctgcgtggccttggcgggccaagatcgccatcggcctgctggagttcgtggaggagctcttccacggctcttacgggactttctacatgtgtgagaccacactggccaacgtgggctacacagccacctacgacttcaagatggccgacctgcagcaggtggcacccgaggccaccgtgcgccgcttcctgcagggccgccgctgcgagcacagcaccgactgcacctacgggcgcgactg

SEQ ID NO: 205267 - DNA, 1000 bp, Homo Sapiens
agggatggagacacctcatctgccattctgtaggcatttcccccagtttgtcacatatttaaccttgccgtattatttccccatgtggaactttccagttctctctgtggttggatctgtgcattgttttcctcatgtggctgtgggcactctggccaggtaaagagaggacccccagatggaaacgccagcccctgctctgttttagtacagtgcggttctgtttttagtattcagatggttgatccatctggagtgtgttttggtgggtggagcgacgtagagattctgcctgtttatgtttttctgcttcctatttattgggtcacctagctgcttagaatgccgtctttattgatgttaaaattctgctcatgggcttccgattacatactgagcacgtcctgtgttgggtttatcctggtggctttccagccctagagccatcagcgttgccatttccattttgcagatgagtaaattgagggtctgagatcttgagaagcttggccagggcaacggagcaagggcaccaaggtgctgatgtctagacctgagctgagcaacacaagccctggccctagtgggcgggactcctgtagctccacacctatctgctcggccctgttggtcttccgagaagagcaaatttgtaaaatgaagtggtacagagacacattgttactatagaaattcagccatctgatgatgtgctctctttttattcaattgtagaacttaacatcctttaagtttctggggaaaaatgaagatggcaaaggaagatgtccctttgacccagcacacagctacacatccgtcatggttggtgagtcctgcccctccagttccttcaccgtgaagattacagtggcatgttaattaccaaacaggatatttggatcttctctgaagtgctgtcttccttggctttgtttaaataggagctatccttacaaaaggcacatgtgactgcatagaccctttaacttttgaattc

SEQ ID NO: 205268 - DNA, 1000 bp, Homo Sapiens
tcacacgtgcacactcgcccaagcaacaacaaactacagccacagggttgaacaggaaaagcaactaaccttacacaggagcatgtgcacacagagcactaagaccatcatggcaacaagatgtttcccaaacaggcttgctagagcgaaagcagctgggcgcggggcgccgcgtatgccacgtgagttacgtcctgacccacggtgccctcgggagcgtgctcagtcgaagggggcacgaggctcaccttccggatgcgaagcccacacacccgtgactgcacactgctctgcatgtgggctccttctcaacacgaaactctcaggcacagtgtccagagctaagccctcagccacgcatgtcggctcggcggctcatttacaggagacccgatgtgggatatggcacagcgcgctcccaggacaccggatcctgcctgacgtgtctgcaaaacggccctcagtagcctttggttcccagtatctcctgagctctcgaataaagagaagggaggtccccaggaaatccccgttcatcacccttgtccactggatgcgagcagtgtgggggcgcccccgtccctcctgacgcgagcagtgtgggggcgcccccgtccctcctgacgcgagcagtgtgggggcgcccccgtccctcctgacgtgagcagtgtgggggcgcccctgtcccagagtggccggcctggcctgagcccaagaagggatgtgggccagtgtgagcccagcttcagggaccgctgcccaccgtgccagagcacgtatgtctcctctgtgagcatagggtgtcccacacgggctgtccttagcctgcagctgagccatgccctgctgaccacagatgacgtgtgacaaggtggccactaaacctgtgttgttaagaagccctgggctttgggcttggttttctgctgcagctttatggaatgcagctgactgacagagcagcctcacagaatgttctcagcagcataataaaatacgc

SEQ ID NO: 205269 - DNA, 1000 bp, Homo Sapiens
acgctagctcatttacttttattatttttattttttgtagagacagggtcttcctatgttgcctaggctggtcttgaactcctgggctcatgtgatcctctcaccttggtctcccaaagtgctgtgattacaggtgtggccaccatgcccggtgggtttggattccatctgcttgaggacgaccatgggcaagctgctttctctgaagcatagtttcttcacgtataaagcaggggcaagaatactgactatatagtcactacattgaatgacttagtatagtatatgaaaagctcttggcacagaatatgcatttagtcaatcattgtttatcagagtttctccactgcttctcagtggagggctaacaaggggtctctatccccgaaaagagagtgtggctttcatatattctgcagtgtaaacagcagtaaaatagtaaaagctgtcatactttggagcaccttggagtgcctctgaggacccagggtgtcctgccaggaagaagtgctccctcctccatgttgcaaagcacgctccccagcaggtatgtctaaactagaacgtgtgccataggatgcttcttggctttccaggagtggatcagggttacgctctgcctcagccccaggcggagcaccaccgtggcctctgcccaccagcctgagcacacccagatgagccctataagtcacctaggagtctgcatgtggtcagcctagactacagtcatctccttccaacccaggactctccccaaacaccagtctagggcaccccagcttcttaatccgttcaggccatagctgactctgaattgcacagctaattcttttttattttttttgaggcagggtcttgctctggcacccaggctggagtgcagtggtacgatctcggctaggcagcctctgctttccaggctcaagccatcctcttgcttcagcctcccaagtagctgggactacaggtgtgtaccaccaggcctagctgttttttg

SEQ ID NO: 205270 - DNA, 1000 bp, Homo Sapiens
ctcttcttttccatttccctctatctctgtttccttttttgccacactgttcatgatatatacttatttgatgttttgatgtcaaaaatagtgatagcttaacactaatgtggctatataattaattatgtaatcagaaatactttcctagtgaaaaaagagtcattgtggtaataaagttaatggcccctaagatagaagaaacacctgccaagtggagcaagaagatggtcagatccacagaggcttcttcatgtgctagatttcctgctaaagggggataaactgttcagctggttccagtgccagcttctactattgaggatgcaagtggaagcagaaaagatgggggaagaagtcagaaactcatattatttattcgggggaatgccatgttgggtgcaccaattatcagagggactaatcagttgctgaatcccccaattatgactggtattaccagaaagaagatcataatgaatgtgtgggcggtaacagtaacattgtagatctgatcatcccctagcagagttcctggttggcctaattctgcttgaattagaaggcttaaggcggtgcctagtatccctgcccatgtgctgaatagcaggtatagcgttcctatgtctttgtggttagttgaaaacaatcaacaattaatgaacataagtggggaaaaaaaggtaaaatggctgggtaagcattagactgtaaatctaaagacagaggccaaggccgctttttagcagccctgaggggatttctcatgttgaattgcaaattcaaaggagaagcttcagtcctgctggggcttcccccaccttttcccccaacggtggagaagtagattgaagccagttgattagggtgtttagctgttaacgaaattttcgtgggtttgaattccaccaatctagcaagggcttagcttaattaaggtggttgatttgcattcaattgatgcagaatagagtcttgcagtcctcaggtctgttacaga

SEQ ID NO: 205271 - DNA, 1000 bp, Homo Sapiens
agaacttaaagtacacacaatttaaaaaaattgagcattctgatttttcttaatttactctgtgtgatctggactctatgatcttctcagctttttcacatggatgacattcataccaaattgttccaatattgtggcatcccttccattctctggggtttgcttgatagttgtttttcctctggtcatttaagtaaacatttatacccaacttagggaagaatctacatctgatagagctagaagggattttggagaataaatactccaatcttcttattttacagaggagaagactgaaaaccagaaatgctgagtgatacctcagaggtcacataactagttagtagcagagttggggccatataccagtgttgttgattctgcagaaccaactgctttctgtattattccaactcatccttctttgtgtggattggatggaactgactgttcagctcatcatatgtgcctcctcctccattttggagagatcaagaaaaagactaatccttctataatctgactgtgattatcaaatttccctgtctgctaggagacagttgtttctggtaaagacatttaaaataacactgttaatttttttaaattaacaatttcagttaaaatgcctcttccaatataattttattctaatgatcttctctcaggcgcgtctctttggctccagtaaagacaatacaaaccatggccagaacagctaaaatgaaaactctcccatttctcagagtgagagaaaacatcatgggaccacaggggctgaaaaacccattcttttactcacgtgttggaggcgcccattgctactgccacaatgcctgcaaggcctcccactacaccaggtaagccgtggaggttatggaccccacatgtatcatggatcctcagtttagtagtaaaaagtggctaaaattataaaaggaagaaggtttattatttagttaaacatatagaactctagaactgaaacagagctata

SEQ ID NO: 205272 - DNA, 1000 bp, Homo Sapiens
ctttgttccattgctggtgaggagctgtgttcctttagaggaggagaagcactctgatttttagagtttccggtttttctgctctgttttttccccatctttgtggttttatctacctttggtctttgatgatggtgacttacagatgggtttttggtgtggatgtcctttctgtttgttagttttccttctaacagtcaggaccctcagctgcaggtctgttggagtttgctggaggtctactccagaccttgtttgcctgggtatcagcagcggtggctggagaacagcagatattggttaactgcaaatgttgctgcctgatcgttcctctggaagttttgtctcagaggagtacctggccgtgtgaggtgtcagtccgcccctactggggagtgcctcccagttaggctacttgggggtcagggacccacttgaggaggcagtctgcccgttctcagatctcaagctgcatgctgggagaaccactactctcttcaaagctgtcagacagggacatttaagtctgcagaggctattgctgtcttttgtttgtctgtgccctgcccccagaggtggagcctacagaggcaggcaggcctccttgatctgtggtaggctccacccagttcgagcttcctgacctctttgtttacctactcaagcctgggcaatggcgggcacccctcccgcagcctcactgccgccttgcagcttgatctcagactgctgtgctagcaatgagtgaggctctgtaggcataggaacctccgagccaggtgaggaatataatctcctggtgtgccgtttgttaagcccattggaaaagtgcagtattggggtgagagtgacccaattttccaggtgccatgtgtcacccctttctttgactaggaaagggaattccctgaccccttgcgcttcctgggtgaggtgatgcctcgccctgcttcggctcatgcacggtgcgctgcacccactgtcctgcacccactgtcca

SEQ ID NO: 205273 - DNA, 1000 bp, Homo Sapiens
gttttcctatttgttctcttttgaatttcccacctttaactgtcaaaccatggattttcattgttccttttccttcttgcctacaccctccagttccagattgagtccgtatcttttggcagcaagtagcaaatcatctaatttttgctgtcagagctatactggtaaaatgtaagttctctccagttgattggggtgggcattgggagcagtcccaggcaagaaggccatagacctttgccattcttactgaaagctctagctttttttttgttgttttctttaagaataattgtccgcctttggtcagtatctagtgttcttgaatggttggttttgtccaatttaacatgttttttatagagaagatttgccaccctctttacatcactattggtttggagttccttcttgtcattttttatggaagataatttattgcttcttaggtaatacaggaatgtgtgttcctctgcttggcccattcactctaccagtatggacttttagaaggactttgttatggaaataattttttcaatagtactgctggacaggactgcctgatccagtttccttatttgacaaatgaaggaatttagcactggagaggttgtataacagacaagttagtggcagaattgaggatgttaacaactattggaaccttagtctcttggattatagtatcttttttctgtactcttcaaattttatttttaagctattgaaatacccttgtcctttttttccccaagtcaggtctcatatggaaaccagttcatgaaagagataaaaattgaccttgtccttgttgaggcagatgcttggtctccttttcctctctgaggctgctctggctctggggaccaaggaagacatttgtgatgtatggctaggagttggtctttttgggttcatagctgtaaaatgaggtgcatgagggaaggaaggagaatagatattttaaaatttccttttcgtctctgaagttattcaa

SEQ ID NO: 205274 - DNA, 1000 bp, Homo Sapiens
tgggacagtgtttagagtagtggctctgggatgcagccctgaaagatggggtgagggaggagccaggagcagtttcgcctcatctttccagccccttctctctctttaagagtctccgtaatgaaggtgcatggggagaaggactctctctttttctgtcttcttggtccctctaattttctggtccattttattctacttctttctcccatttcctccctctttcaaacagtcttgctgatcttgttcccagacaggcacttgatgggaataaaagctggagactgtgcttagtgggcagaatgagaagtggcaaaggggacactgagcggtggccctcatgggaaggaagaaggagtagaagaaagttctgtattggattggaagaaaaagctctttctgaagcaacttgactgggctcagttttatactatgcgtgctgaggagcaagggcagatgcctctattctctttatatgtttgccaccctatgcctggaggattgtgccctgtttttgcaagtgtgtttcaattaagtgaattatatgataattaaaaataaatgcccaataagctaagaaaataggttctcaagtctcctcctccccctccccctccccttcccctccccctctcctcctccttctcctcctgctcctcttcctcctccttcttcttcttcttcagacagggtcttgctctgtcacctggggagtgtagtggtacaatctcacctcactgcaaactcctagactcaagcaatcctcccacctctgcctcccgagtagctgggagcacaggtgtgcaccaccacatctggctaatttttgtattttttctagagatgggggtctcaccatgttgtccaggtttgtctccaactcctgggctcaagtaatctgcctgccttggcctccaaaagtgctggaattactggcatgagccactgtgcctgaccccatttttttttttttttttgagatggactctcactctgtcat

SEQ ID NO: 205275 - DNA, 1000 bp, Homo Sapiens
atattttacctatataattgtgaaataaatacctccagctgtccaaaagattggtacctctctttagtgtgatccttttcagtgtgcactcttttactgtgattgttgtttatgcctccatttccagtctttaatggcattcagccacagaaagattaagttcatttaaagttacagtagtaaagtatggccaaagttataaagttgattagaactgttttctgttatggtcgtagctcatcaaacatttaagagtgacttatctatattttttacaataaatgttatatatatatattccaacttggatgtgtatatacacatctttatatggtattttgaataacattttataaaccaatatttctaattttttaggttttttcgtgaaggtgggaatgtttagctcgggagagttgatttataagaaaaagacacgcttactgaaggcctccaatggaagagtcaagtggggagagactatgatttttccacttatacagagtgaaaaagaaattgtttttctcattaagctttacagtcgaagctctgtaagaagaaaacactttgtgggccaggttagtaggagtttttatccttccttatatttttctatgcatttaaacagtcagttaacaaagggaatacaggataatattaaagtcaaatagagtacagttcttcagcatcataaatcaaaattcaattgctacaaaaatcgaaacttgtcagactttttgctttaatacaaatagttggaatttctgagcaatcaggtttatctttaaatatgtttttttctgagcttttttacttcaaaaacgatgagaattatcaatttttcagtactactgacttgttccttgtggaaggagggaacattaagtatttaaatcaatttcttaagtcttcgagtatcaaatttattttgtttaatctttgatttaatgtttaacatgggcactttttatattctcttacctgagttagttttgaattc

SEQ ID NO: 205276 - DNA, 1000 bp, Homo Sapiens
agcaacgcctctctaaattatttgcccttttgtgggtgtggcaactctgtcaggcagagttgccacacccgcaaaatgccctaatgccatttcctaccatgtggctgtagcgggttcactaggtggccagtgcttgaagcaacttctgaaatatttctgatatattcaagaaggaatctggtcaattgtcagactataggccaggagtcagcgcactcaaatgcctacagatggctgggtgtggtggctcatgccagcaatctcagcactttgggaagcctaggtggaagggtctcctgtgcctaggagtttaagatcagccctggcaacacagcaagaccacatctctacaaaaaataaaaaacaaaaaaattagctgggccgtggtggcaggtgcctgtagtcccagctacttaggaggctgaggcaggaggtttgcttgagcccaggggcttgaggctgcagtgagccacggtcatgccactacactctagcctaggtgacaaagtgagatcatgtcaaaacaacaacagcaacaaaaatttcaaatgcctacagatgccattgtgtccttgcctagagggatgtgttgcttagtgacctggctggttccaagcttgagacctctgcactgaccactgttgctgccagggatgtcctgtccccgagataagcccacgttaggattctgggtgttgttaggatctcagctcaaatgtcacttctccaaaggctctgaccagctaatgactctctccaccatcactctgcttaattgtttctccgccatctgaaataaactagctcattctcggtctccttcttctagaacaacagctttgtaattatagggcccttccccagcttgtttcgccattgttttatcgcaagagcctacaacagagtcatgtctggcacaaagaagatgttcaataaatatttgctgaccgaacgaactgtttgatttttttttccctaagtgaagccaggaatagaattc

SEQ ID NO: 205277 - DNA, 1000 bp, Homo Sapiens
agcctagtgtcactgagctcttattatgtgtcaatgttctagacccgaagggtatcgcagagaacaaaattgtttcatgtagttctgtgctagttgagtgagcaagagtgctaataaaacactgagcaagaattctgactatgtgggttttggttttggctctaccaattacctgtgggcatacaaccttggtagaggcagttaacctcccaaagtctgtctttttctgtaaagccaggttaatagcctcctctgcctgtgtcaaagggtagttatgagggccaggtgtaaaaatattttattcctacagctatatatatttataagggattatgatgcagtgcttgtggtaattataataccattggcacaattctacagcatagtgatgtgaacataagcttggatgtcagacagagccaagtctcaatcagtgttctaccatttactagcagagtgaacttgagccagttatgctctataaacttcaattcctcacatttaaaatgggtttgataataataattaattctatggacttgttagaagtattaagtaatgtttataaaaggcttagcactattcctggcacatgataagacctcatttttgttgtgattgtacttatattatcacagccctctagtagaactcccagcctccagcatcttccatttttaatagttacatacaaaacaggattttttttccttttaaaaactaaattgataaaaattgtatatatttatcatatacaacatgatgggtttttttgtttggttttggtttggggggggcagttattttttgaaacaggatctcgctctgttgccaggctggagtgcagtggcatgatctcagctcactgcatcctcgacctcccaggctcaaataatattcctgcctcagcctcctgagcagctaggactataggcacgcaccaccatacctggctactataagatttttttgcagagacagaatctcactatgttgccca

SEQ ID NO: 205278 - DNA, 1000 bp, Homo Sapiens
atagtcttcaaacagaaaacaagaattaaaatggccaaattgttaattttgtcctttatacttaaaagttatccttatttccattttttctttcaatgcaaaagaatttcaattttatattgagtatattcccattaatgctgatgtaataagttatttttatgttttgcaatcatttaagctctgctatttttctaagatagttctcaagcatctgcagtcatcatttatatcatttatatgtcacctctaaaggaagccacaatttgtaagtgtgagtaataaatttaagattgtgatagttgcataccagttcctaaaggtaaacttctgtaggtatttatatgtcagagaagctaaaaatctgtgtgaaatcaggggagatccctccagtaatggaaatcactctttgcagcaggaacagccagaatgactaggaagatctgccttaagactacctatagaccgaggcaaactttgtcagatatccccgttaaatttctatgccaagaaatttcactcagtatgaaatcttcacctgtccatttttctctttatgctaaagagttcaagcatgtctaactctgtgctgatatgcccaggaatatcatttctccttctttatccaagagagaaaaagaaatcatgcaggctctctggactttgtaatccctggcaaataccatctgagatgaaacccacagcagcataatgttggtttgttgtttcagatgtatttgatagggtgcaagatctttgctgtggtcagtcagattgccacttctatccaactctaaaatcctattagtaaaagggcagctatgcctgtctgtatgtctccctcagagatttctaagggagacgtagccccttccagaatgcatataaagataatataattaactataaactccttgtatgaaataaatatgcatttaatctggacttcaaagtagaaggtttggctctcttgttcttagtgtttttaaaacattttgca

SEQ ID NO: 205279 - DNA, 1000 bp, Homo Sapiens
tcaaagacagattgaaagtaagtagagactgtgtgaacaggtgaaaaggtggtgttggtgtttaatactgagaaatgtatggcatgaactagctggttaaaagtattctaaaaagagttgacagattttgtaaaaacagggatcaatgaagagtcctaggttaactgtacagtggtgttaagtaacctgtgacagaatggtaggctccatggggaaaaatgagataggtaaaggctaggatgggggctatattaattagggcccaggcgggaaacagctggcacaaagaatttaatcagagactttactgcaaagactacaaaggattgagtgatgcactgaaagaccagcaacacctaaatccaaagggacaagggaaggagaccagattgccccatccaaaagaaaaggctttaaaagagaccagctcccacagtgagtcagggaggaaagggattggagttgtggaaataaatactgtgaactctttcctctcactttccaatctcttgtcagtgtctcacacaggccaaatctaattcaaggtcagaaggctaatggaacctttactgagtaaaggtcctcacagttgggactattttgcaaagagtagggtcataaaagagacaggaaatgaaggaaaggatgtgcttagatttgcttttttactgacgttattggtaacagagactgatttaagtagggcatgattttatgcacgggagccgcttcattgttgaaatcttctgagtaagtgatgaataaggagcagtgttagaaaggacaattgaagggataactatatttaaacgctgaattgtgatacattcgtggtgtaaaggcaatacagtatgatgattaattggaaatgcatgttgaaaaacaaaaagcagctagataaagaggaccattagctttaaacttgcaaacctggattgtcagaagtccaattaggaatgttctgtgaacacaggagataatccatcttagttttgaattc

SEQ ID NO: 205280 - DNA, 1000 bp, Homo Sapiens
ggcttgaacagaactagaggagactgcgaagaattggcccagatacatgacaataagctggtgagggtaatgaccccaaaaccaagggagaacagagtcgtgtgaaagaggaagtaatcaacagcatcgggtgctgctgctgaacgttcaaataatgtaaggactgaaagaaaaatgttgattttggcagctaggatattactggtaaccatcgtgagggcagtttcagtttggtgccagaggcagaaggcagatttcaataagttgaagtggaactggcaggtgaggaaaccagttcttcagtgagaagagattccttttcaaaaagcttggctatagagacacagtgagatctaggctagtgaggactgtgtggcaaaggaagggtcttttattttaatgtggaagaacatagaatgtattttttggggtgatacaaactggtagacagaaaattattgatttcacaagattcctaaagaatttggaagagatgggatccaaatttcaggtagagatacgtatttcaaataaaagactataaaattgaagcaaagttgttaaatatgactcctaatataataaatatcataaatttgtaggtgataacagaggaaatacctgcctgatgctctcaatgtcatcagttaaactgaaggcacaacagaaaggatttgtcagtaagttaagcaagaataggagaaatgggtctgtagaaaagaagcacagcacagtggtggggaggggaggtatgagcagtgagagggtagatagaacgagaatcttctatttttgatgttggtagagttgatcctgtcaatcagaatggatgacacacaagtattaaatcttggaagctctctctgggctagatttcaacctttgcttatagcttggggagaaccagagtagccccaagagaagggcttggttatctgtgccatgggaacgaggaagccttaagatagcaaatgacaatttgtcaaattgcatggaattc

SEQ ID NO: 205281 - DNA, 1000 bp, Homo Sapiens
aagaagaaatcccatcacccctcacatggtacatgtaacaaacgtagacaaaaatgccagtcccattaaccatggagtaaaactcatagctgcataccaaaatcctgacaaattctagttattgtggctttggttaagtttggataaaaacactaaaggaacccttggactcagaattcaagggcaaaatttatgcatcatttatttttgtactgcagagtctagcaaagtacctggcacattgtaagagcttagtaaatatctgttttatgagatgagctgaatataaagctggaaaattatatagacttttaaagaaggagcattcatgatcttgaaaattgtttcttaggtagctaaaatttttatttttatttatttttaaattttttgtagctaaaatttttagaattggtcttcttgttctcaaggccatttgggagaaatgagcagctttgtttcaaagttcatctgtttattctccagcgaaaattataatccttggtctgtggcatcacaattggttgctgtgggaatgattatagatcaaaaacaaaacgattatatcccttttcaagagcaaatgagtaccaagagcagatgaagacttaaggaaacaaagatgttcttttcatgcaaatatttttacaatacaactgtggagagataaatactgaagctggtagtctttatgaaatttataggcagatttttagctttggggaaagacagctccctttgccctcagagttagctttgagacatgaatactacagatcatttttctttttttttttttttaaaaaaagaaaatataaagacactgagagcgtaggaaaagtgagttctgtgatcagtattcccctgttgttttatttcaggcagaagaatgtcttcctcatctgtgtacaggatcactgtcagggagcttgatgtcctgcactgtcctggcaatatgttgcccaagggaggtccaccaaggaaagccaaaggtgaattc

SEQ ID NO: 205282 - DNA, 1000 bp, Homo Sapiens
aagggatacttgttttagttggattatttaaatattctagaagcagaaatttgcctgttaggtttgatttttaaataattttattattataaaaggaaaaaggttcatcacccaaagaaaggggaatgcacaatttgtggttaactaggtttgcatgtgaataaattttaaactattccttccctgaaaattgtcttttattgcttcttgaagtattcattttcctggtatattgttatgtgttaagaaaaaacagattttaataacagttataaaagttacatttgtataagcacagataaaagaattcataatatatacacagctgttcaatgggagatatctctgattatgaataatttttattttctaaatttttaacagtgactatatattttttaacagtgacttttgtaatcagaaacattttattttaagctatttttcgtaggtagttgaagagttgttttcaccaaggtagggctgagtctttgcattgctgtctgtcatttctgataccttgattgttctgtagggggatttgacgaaccttgtgcatggcagccactgttccaaatacagattagcaaggatcccaggaaccaacgcgtttgttggcattgtcaacgaaacctgcgactctcttgccttctgtgcctgcagcatggtggaccgactctgtctcaactgtcaccggtaaaaatgcaatgggtcatattctgtgttcaccacactgtttaatatttcaactgatgtcaggcattttgaagtgcaaaataaacagaaagtgctggtgtgtgtcctgaagaaaagtcacagttacaaagccacttagagctgtgccgtttgcagcatccttgtccaaagaacaatggattaaggccatttatgtatttaacctttggctgtaacttcttttttactattcttttaaactagctcagagcttcattattttgcttccccagcacatgtacaacttacagtttgccattgacct

SEQ ID NO: 205283 - DNA, 1000 bp, Homo Sapiens
cagggtcttcctctgtcattcaggctggaatgctgtggcatggtcatagctcactgtaatcaaactcctaggctcaagtgatcctctcacctcagccttcttagtagctaggactataggtgtgcaccaccacactcagctaatttattttttgtttttaattttttgtagagatggggtcttgttatggtgcccaggctggtctcgagctcctggccttaagcattcctcctgccttggcctcccagagtggcaggattacaggcatgagccactgtgcctggccttaacataattttgaaataaaaaacatataatccctgagaaaaccaaataaatctaagtgtgtattgagctggttagcataacccacagagaggaacagacaggaactcagccaactggctttaaaacacagggatttgattgtatatccctatcggcgtgtatcataaaggtacccaaagtgcagaaaacactgtaggctgtttttaaattatcattactggtgttggtattctgagattcttacgtgtattgtgagatagaataaacaacgaattatatttataggaggaaggaaacattgacatttgaacaataaaattaggaaaaattcttgcattcttgaatttgagttggacatacaatatgaactcaaagcattttagtattttttagaaacatggtctacctctgtccacagagaagggccagaaactatggccggcccagtaacaatgagcattccttgtgccagactgtgattgccaaataccatttcctacaaaaaataaccagggctctttgaaacaatggctgctttcagatttggagcaggagatatacaagatgtgcctggttcatctttttacaacagcaagcagggaaactctggaggactcccagggtcatgttgtagaaggactcaggaaccaacgtgaagaggttcctactggtcaagtttgaacatcatattggataatacagcactggattg

SEQ ID NO: 205284 - DNA, 1000 bp, Homo Sapiens
gctttctctatgaaaagtaaaatcttcaaaaaatgatgttccaaaattacattatctcagaccactttagaaacatgattttcttctctttttttgagacagagtctcactctgtcacccaggctggagtgcagtggcatgatctcagctcactgcaacctccacctcccgagttcaagagattctcctgcctcagcctcccgagccgctgggattacaggtgtgcaccactacgcctggctaatttttgtatatttgtagagacagggtttcaccatattggctaggctggtctcgaactcctgacctcaagtaatcgcctgcctgggcctcccaaagtgttgggattacagctgtgagccaccgcccagccagaaacatctgattttctattatttccctgtgctttcagaaagacagcatgcgacttgctcttgccaaactccaactgaagtcattgtctatcatgttacataatgtctcctataacagaatccatgaaataactaactccttaatttcagtgctggaaaaagttatttctctgaagatatttttatgtttttactctgccctctcccacaacaataaacaacaaacactaaatcccaggaggagttcctcttttaattactgcgcttctcaaaacaaaatgttcaactagattattcatttcaggtacttcataacatttctctgttcatgtcaactatttgctctaatatgtgaaagtatttattatctcatttgaaactatgttgaatgttgaaaatctacttcaaattctttcctggaaggaagtagaaaaaaaaatctaaagaaaaatagatacggtatttaggaaaattgcttccaagtctaaggatggcccaaagaaatagcctagggacatctctgacctatcagcttcttcctaagaaacctgatgcactgtgctgctagacgttacaaatgaacaaagtgagttgagctttctcttttttggagctgccatgaattc

SEQ ID NO: 205285 - DNA, 1000 bp, Homo Sapiens
ctaaatttttttttgtatttttagtagggacggggtttcaccgtgttagccaggatggtctcaatctcctgacctcaggatccacccacctcagcctcccaaagtgctgggattacaggcgtgagccaccgcgcccggctactacattttcaattttttaaggaagtctctcccattgtgtagaactgacttctcttttaactttgcaaagccacatgcaaatggacacacaaatatggaagaaaagagatttagtcataataaggaaatttaaatatgacttcattttcaaaatcaaaaattcaagaaaacagagcattcaaccaacctggacctactctagattccaacaaagctatcaaataacattattagtttttaaaaaattcgttattggccaggcacagtgactcatgcctgtaatcccagtactttgggaggctgaggcggacagatcacctgaggtcaggagctcaagaccagcctggccaacgtggcaaaaccctgaaaactactaaaaatacaaaaatcagccaagtgtggtggagggtgcctgtggtcccggctacttcagaggctgaggcaggagaatcgcttgaacccaggagtcagaggttgcagtgaggcgagatcacgtcactgcactccagcctgggcgacacagcgagactctgtctcaaaaaaagaaaaggaaaaaaaggcatttaacacaaaattagctgggtgtggtggcgtgtgcctgtagtcccagctattcaggaggctgaggtgggagaatcatcacttgagcccaggaagaatttcagtgagccaagactacactactgcactccagcctgggtgacagagcaagaccctgttcccaaaccaaagcatttagctctgtgtgtatagccttggaataaatgttaattcaacgtaacatcacatttaagataaaaggttcataagtgcacatacacataaaacacataaagacaaacatattgccaaagaattc

SEQ ID NO: 205286 - DNA, 1000 bp, Homo Sapiens
attcagttttatcatttagattctagtttctaaagcagagatgtatactgaaatattatggaaagattttttaactaaaataaaagatgaaattataaaggattttcacatgtatgacagaatcttagaaggctagaacaatggactgaaactaacaagataatataataagtacagtaataagtataaaaataatataatatgtataataaggactaatgaaaagttctgtactcaactcctccctacccccacatcaaaaagcccaggtgaggaagccaaggtttaaattattgcttctgaaaaagcacaagggttttagttgactataatggcaaaactagtcaacactatgttgcaaccaaaaaagtaatgtaatctcagggtaaattgtatattttctagaaggttatagtcccactattctctgtgctgatcagtcacttacataacacggtggtgttttctttgagggggagggagcattggagaatattgacaaatggctgtgataagtaaagatgaccagaagtttttagtttctataagcaatgtttaaaggaactgaaggtatgaaagctcagttgagggtagagggcttaacagctgttatataacttacaacctgttgacatgtagaagacaacagatttattttgtatagctttgggggctcttactataatcgatagactttaaaagatagaaacatgtatgtgttctatgagctgattcctgcactttgtagggagttgtattagatgaccttgatccctttaagttacaacaatcaaccttctgaaatgtatccagctgattgttaatcctttcgtcatcttcaggctcactatacaaaattcatttggctggaagagaacaaaaatcacaccaagttagcttgatctgtattccttcacacaaaatatagacatttctgcatttttcaggtaactgtgttgctttgtcttcatctgtttgatttttctctatattttcgtct

SEQ ID NO: 205287 - DNA, 1000 bp, Homo Sapiens
tcacgcaatcgtcccatctcagcctcccaagtagctaggattgcaagcatttgccaccatgaccagctaattttttatatatttttttgttgttgagatggagtttcactctgtcacccaggctggagtgcagtagcatgatctcagctcactgcaacctccacctcctgagttcaagcaattatcctgcctcagcctcccgagtagctgggattacaggcatgcccagctaatttttgtatttttagtagagatgggctttcaccatgttggccaggctggtctcgaactcctgacctcaagtgatccacccaccttgacctcccaaagtgctaggattacaggcatgagccaccatccttggacaatttttttttccttcgtagagaaatgttaacagcttactattgacaaaataatctatcactttactctctacccaaatggaaattgcctcaaggttacttctgttttaatcccatatatgaagaaaaatagagaggggagacctcctttcaggcatgtaggtgaactactaatgcctcaggaaagtccatttcaatctgttatttttcaaaacgtctatcattgaaggtatagctatgttagtttctatatcctgattcactctcttgtattctttgtcattattttgagctccaacaaaaggctaaatagaagtgatatgatatcctccatgtgtttatgccaaaatattggcagagaggttcctttgactggtacctgtcttaggagcgatgagggagtactctagcttataacacatctttctgtttatcagctccttgatccatccatcaatccatcttattttcttggtggatttcaaaataaattgcagacttacctctgaacatatcagcatgcatagcatcaacagaattcaatgcaacaaagaatttgagcagggagtgacatgatcaaattcagatgtgggaaagaacccaatgccagtagggaagatgacaggcatgagaaa

SEQ ID NO: 205288 - DNA, 1000 bp, Homo Sapiens
cccctggatcctctgtcttcactgacacagacaagtggtcagtcctatgaaaacatttactgtgaaatccagagagggcaggactgtgagggtgctatgcccttcacaaagtgtggtaggtactcagtacatctcttactagtaaaatcttgctgggataacccttggtatctgcagttgagtttgggcatctattatgaaagcagttcatatgcccccatcttatttcttgtacatacaagggtgtttgcataccattatttttcaaaagatttcatgatcttcttagcatgtttacaaatctgggaaatgcatttttgctgttcccacattcaatggctcatcattccaaagaggttggagaaaactttgggtgcttaggcctagtttgaaagttagagatgcctactactgagccagaatgaaccttcacaacgcaggacaaagcaggaccttactgaattgtagaaatggaagaaccctagagactctgagataatggatggaggaccactagttgacatcctttcaagatctacctttgtaatttatgaagcagtaagaaagggcattatttttgcttctgtgatcagagtttagctcatacccctatagtccctgtaatgctcctgtaatgcttgaagggtcataaaaggaagacagggaaaatggggctggagatagcagggtagagataaggcagagcaaaaatatgcttgagctcttggaattcaagcatataattccgaaaatatttaataaaaaatcaagttcaccttcattgtttctattattgttgttattttatagtcagtacttgtttaggttcagcccacgtgctagttgccttgcatgccgttccttcttaatctgactcccgccctccttttaccactacttgtggtgtaaatctgttaacggtaaaccttctcagtcttagtctgagaaagtctttattttgccctccttcttagaattatattagacgggtatagaattc

SEQ ID NO: 205289 - DNA, 1000 bp, Homo Sapiens
aatgatttacatctgtgacttaagcaagatatatcactgtctttaataaaaagtattagagatgttgccagccaatgagtagagagcaattatatagattgattttctgtttgaaaagtatttcttggagattatttgctttttgaagtgagggttaatgtcctccaatatgattcctgataacaaatacatgttttacttataatttcttaatattcatctgagaatatagaagtcaacatggtagaattattgacttgaggggaggaattgtgtccctttaatgtaaaatcttatataatagtaaatataacaattaaagcataattatgctcaatcctctggtacagaaagaaaatataaagaaatctacatttttatagtgcagcaggagctacaataaaatggaagtagtatgaaaaatactgaataagataatcatcacactaaatagcacataaaaatattgaggactttaagatcatctcattagaacccaaagataatttgtgataggaccaaaaatggttgtgtgcttgggtagaaacaaacgaccaaacaaaaacactgaaacacttactgagaaagtaaaaaaatggctattatggagaaaaagtacttttttcaaaaaccagaacaaccattctagtagagagaacaggtatacttgctgagtagggcgggtataccttgctaagcaggtataatttagaaacttccaaataattctaagattattttgcattattctcagaatacagtaaacattttttaaaactaaaggaaaaatgatcacaatgaaaaggaatggtattcagtgaaaaggtcagaaagagaaagtaaacaatttatttcgatctttactaacaaagaccatgggaaaattctcattctcaagctgtcttgcaatccaagagtaaatccagaagtaaatatgctgtgtattctagataaaattgaaaaattatatgtacttaaatcaccaagttggttggaattc

SEQ ID NO: 205290 - DNA, 1000 bp, Homo Sapiens
tttcacaacctggtgactggaaagaaccaccacaaatcttcatttcctccagaaactgctacatctacagccgatttcaggcagtaaagggagagggatagaggagattgggtggaaaatggagaggatcaagaaggagctgagaccatttcaaagaaaaaaaatgctttatagagttttaagtatgacttagatgggtccaggcaaataaactaaaaagaagtgaaggcaacatgtatcgtctggcagaactaaatcttggagtggggtgagggatgaaagactacatattgggtacagtgtacactgctcgggtgatgggtgcgctaaagtcgcagaaatcactaaagaactcatccatgtaaccaaacaccacctgtaccccaaaaacgaaataaaaaaacaaaaccttggggcccattccccctaggaatggactactgtagtagtggcttcttggatgcttctctgtgacatagctatacccaattctttgaaaaagaatctagagcaaggtctggcttggggatggggtacagggagagacaggtctcggagaggttttgaacaaaacacttttaaaaaggaatgaggacaggcgctttgggaggctgggttgggcggatcaccttaggtcaggagttcgagaccagcctggtcaacatggtgaaaccccgtttctacaaaaaatacaaaagtagccgggcgtggaggcgcatgactgtaatcccagctactcgggaggctgagacaggagagaacctgggaggcgaaggttgcagtgagccgacatggtgccactgcactccagcctgggaaacatgagagaaaactctgtctcaaaaaaaaaaaaaaaaaaaaaaaaaaaaagataccaaagggatatttctttataacccccaatttgttccttctcaggactcaactagcttcccttcccttgctttcttaaaaatcctttgtcttgctggttgcagagcctgcttagaaaaaagaattc

SEQ ID NO: 205291 - DNA, 1000 bp, Homo Sapiens
aaaaagcagagattattgacaatgaaagtaaacttcacagtgtgggagctggttggagcataggggctcaagggtgccattacagaattttctggggtttaaatcctctttagaggtttcccattggttacttggtgtacaccctttgtaaatgaagtagtggcccccaatgagaggctgaagttaagttacaaaagttataccctatgcaaacctctggttgtggaaagcaaccaatcaaaggctaaagtgaagttacaaagttatacttctgtgcaaacaaagacttagccaggaatcagtctgaatagttgcctggtaagttgcagaaagcaaccaatcaaaggctaaagtgaagttacaaagttacactcttatgcaaacatctgattggttgcagaaagcaaccaacagagattctttctttctttcttttctttttttttttttatgagacagagtcttgctctgttgcccaggctggagtgcaatggtgccatctcggctcactgcaagctccgtgccctgggttcatgccattctcctgccgcagcctacagagtagctgggactacaggcgcctgccaccacgcctggctatttttcttgtatttttagtagagacgggttttcacagtgttcgccaggatggtctcgatctcctgacctcgtgatccgcccaccttggcctcccaaagtgctgggattacaggcatgagccactatgcccggcaacagagattctttcaattttccatctgccacatagaaaaagagtggggtttgcaaagggagtagcctccagcccttctgttacttaggtgtggaaatttggggttttccttttgatttagctctgggaagtcagtgtgaattggccttaggttccctgcctccagattctattttcctgcctcagcattgcttctatgagtctactcttattatttttgttcctttggatgtaataccattttcccccagctgcatttaagaattc

SEQ ID NO: 205292 - DNA, 1000 bp, Homo Sapiens
tccaggtgagagactggaatactgtcttctgaggaatgtgaccatctcaccaggactgacctaaagacacagaggctgggagttccccaatgaatggctcactcttagtgacgttcaaagttcacaagcccgaggcacatgctcagccttcctccaagtttaatcataaacaaacagccaaggtaaacatatgtctgaggaaagcctctaatgcagacatggagatagaaaaaagcaactcagagaaaacattacacagagagaaaactttaaaaattaatgtcttcagaaagataaaagaataccttttatttgtgaatcaagaataaaatgtttcttttttaaagtaacatttcagagaaaaaaggagctctcgaatattaaaaagataataacagaaatgaaaacacagctgggaaagggccctacggaacttctaggttgatagaaatgttctatattttgtttagggtggtaactgcacaagcctatatgattgtcaaaacagccaaaggaacacttagcattgataagctttgctgtaggtaaataatatcttaattttcaaaagctaaaaaggttggaagataatgtttaggaaaaggccaggcgcagtggctcatgactataatcccagcattttgggaggctgaggcagggggatctcttgaggtctggagttcaagatcaccctgaccaacatagtgaaaccctgtctctgctaaaaatacaaaaattagccaggtgtggtggcatgcatctgtagtcccagctactgaggaggctgaggtgggagaatcgcttgaaccgggaggcagaggttgcagtgagccgagattctgccgctgaactccatccagcctgggtgacagagtgagaccctttctcaaaaaaaaaaaaaaaagtttaggaaataggttagaaaagaacagtttgaaaataggagaaaagagataagaaaattaaagggggcaatccagacagtcacatgtctgaattc

SEQ ID NO: 205293 - DNA, 1000 bp, Homo Sapiens
ccagttttaggctatgcgtgtgatataataataacagacagagaggtacagaaatacccaagctggcccaggctcagagcttgtggtatacagaagagaattattgcatcctttatttgctggcttcggtacattcttaggagatagagggagggaaaaaaaatcaaaaccagaagggtctggtgctgatggaccagatcaattggttcaaactttgattcaactgttaaggtattcagggctggaactaggatgagaggagcaaggcactcacctgaggtgcgaagtttaaagcgtgccaaaatctcggtaatcaagataaatcatattttaatgcaatattttagaaaaatagtaatgcaaaaaaaatccgcaatgaacaaaatatcaaaactttaaataaagacaggatctgaccctgcattttcatgattcagggagtgtcttacttgcttcgtcctagtccaggcccaacttgttcatccccagatgatgtgccaaaagccacatctttaggtgtctcctctggtgctctctagtgctatgttctgctgaccttgttggcaacagctctctgtctgttatgaacggttggacatcaggtggcacctttaagataccacaaggtaaaagcaactctctgagccaaggccagctcttccaacctccttccaaacagtcttacgtctcaagggcaagtttctgtgatgtatagggcatcagggagagggtagaatggggtagaaaggggagataatgggagagggaaaaaagaacaggtgacctcatgagttggcactaatgtaactagagtgcaatttttcaagagtctatcttttttaagaaaaccttgagccccaactcttatttggaggcacctgctcactcacctccaaaaccaaatccacctcacctctattcttcttttcacattgtgtacgggtagttctggaaatcaaagtggccatgctgcttcctccatgcagcctgtagtgaattc

SEQ ID NO: 205294 - DNA, 1000 bp, Homo Sapiens
tctcaaaagaagacatccaaatagtcaataaatatattttcaaatgctcaacattacttatcacaagctatctgcaaggaaaaatcccaatgaactatcatttcatcccagttaagatagttattataaaaaagacaaaaatagcaaaggctgatgaggatgcagagaaaagggaactcttatatactgttcattagaatataaactagtacaaccactatggagaacagaatggaggttcctcaaaaaactacaagtagaactaccacatgatccagcaatcccactactgggcatttatccaaaagaaaagaaatcagtatatcagagtgacatctgcatccctatgtttatcgtagtactattcacaatagccaagatatggaatcaaccaaggtgtgcagcaatagataaatggataaagaaaatgtggtggccaggcatggtggctcatgcctataatccgagaactttgggaggccaaggtgggagggtcacttgaggtcaggagttcgagaccagcctggccaaaatgttgaaaccctgtctctgctaaaaatacaaaaattagccaggtgtggtggcgggcacttgtaatcccagctactcgggaggctgaggcaggagaattgcttaaacccaggaggtggaggttacagtgaactgagattgtgccgttgcactcagcctgggagacagagactctgactcaaaaaaaaaaaaaaaaggaaatttggcatagatacagaatggaatattattcaaccacaaaagtaatgaaattctgtcattcacaacaacatggatggaaatggaggacattatgttaagtgaaataaaccaggcacagaaagacaaaaattgtatgttctcactcatatacggaagttaaagtaaagttgatctcatagaagtaaaaagtagaattaaggatactagagactgggaagtttaaggggaaaggaggataaggacagatttgttaaaggatacaaaataa

SEQ ID NO: 205295 - DNA, 1000 bp, Homo Sapiens
ccaaaactcttcaactggcattttatcatacacttgctctagttatttataataaatagttgacattcatcatgaatttactatgccaggggaggtaagtactttccaacatgtgcatctcattctcgcaatagcctcctgaaataggtgctgttattatcctcaagtcctcatgcgaagtaacgaggcagagacattaaatgactttcccagtctgtgcatctaatacgtgcccagctagggttcaacgtcagcattctggctccggaacgcctctcagccagcaagctgccatgcacccaccagcagcccccatggcctctgccagaaaccgtgccagggatttgattccttcacctgtgcctttcttccctccccaactttaatagagcccacatgtctcacggagcataactatacagctcctaaagaaaccatgcatacattacgtattatcttggttagcttttgccaaaatcaggtgtttgaacctgataatgaagccacaacaggaacctgttatgttgtatggtctgtgggaaaaacaccagaaaatgacaccgtttcttagttttacacacacacatttgcaaattcaattctaaaacatgcagactctattagtgttgattcttaaatatgactactgaaataaaaatgtcaacatttgcttttcttcttttaagaaatggagaaaactcacgggaggactaagaaatctgggagaggcaggaaaccacacctcttcaactccccgcctgggcagagagaaagggctctgcacgggacggaaagcgcagctgccctgaccagcctggcctcagggcccagaatcctccgcatcctccagctatcagggctcacatgggcctagtcgtccttcacactgggctccatccactttgcttaagtaaatctttcacagatatctcctcagccacttattatttttataagagaaaaaaaaaaaggccacagtgcattcctaaccaaaagtagt

SEQ ID NO: 205296 - DNA, 1000 bp, Homo Sapiens
tgttgcttcacatggaaaaagggactcggcacgtgtgattaagttaagaatcttgagatggggagattgtcctggtggggcctaaatataatcacaagtgttcttctaagagggaggtagagagagatttgatacagatggaagaggaggaggtgaagtgaccacggtggcagattgggaccatgcagccataagacaatggatggtggtagccactcaaaaccaggagaggcaaaggacaggttcacccctatagcctgtggagggaatgtggctggtgtcgacaccttgatttcaacccagtcatacttatttttggacttctgacctccagaactctgagcaaataagttcagttgttttaagccaccagatggtaggggggtagtttgttacagcagccacaggaaactaatacactctcttgtgttattctttgatgttcctaaaactcttgtaatctccttgggttgtatgctcctccttccttttaatctatatacatattatttacgtttccataaaacacattccacatattttcttataatatctgagcttaccagactgacatccgtacttcacactggtcttttgaaatgttgtcacttagaggtcagaaaacataaaatattgtttggacagatatataacgattttcgaatgtcttcctttttgggttttcaaatattgatgatacaagaatgcttaccagctactggttattatttgtttggtaaattaaaaagttttttgtgctagaagttctgcagatgccagtagatccagtgagctaatagcccaggggagatgcctttctgggaggggagagacccagggagagcctcccctccccccagcatcctgggtagctctgaggaatctcacctaaatctgctgtcttttacaaaaactggacaatctaatgtctcttttgaataacccaattggaactgggtagttaccctcagtgtgtcccagagtaacagcaatggaattc

SEQ ID NO: 205297 - DNA, 1000 bp, Homo Sapiens
accaaggtaatagataaccaaaatttttacttatcagaataagtccacttgagtattactctaagaatatattaatgtgaaatacagagtccacatgagaggaaattatatactggtgtacatcttcatatgtttctgtgtatgaatatatgtaagtatatacctatatagacatatatatgtaagtatatacatatatagacatatatatgtatgtatttattaacagaaaagcaggtgtaggagtaacagacatctttacaacctaagtgacaggttgccaatggaacttaaaaatgccaaagagcaacatcaagaaataaatgggcaacatatccacaaggataaaagatatttatccataatatgtataaactcctactaaaaaaagaggaaaatttgcaaaatacaatgagtaattaataaagcaaatatagacaataaaacgtaaagatgttcaacttcactagtaaccaagaaattgcagataaaaaaaagccatttcatttttcacatgttagctggcaaaaaataaaatataattgataatatcaactactggcaagagtatgaagtaaaggcacactacagttaatgcctatatatcagcaggacttactattcagcaaaacagcagcatatacatattaaaactacgatgtgccactctacttctaagaatattttacagaataacttgtacgcagattaaagatatatttctatacacaagggtgttcagtgaaaaatgatttgtaaaatcaaaaaatgaaagtaacttcaatgtttaaaaataggcatggctaaatatagtagaaccataacatgcagcctttaaatggataaagtagaactataggtactaacataaacagatcgctaaaacactgataaatgaaagatcacactgaacagtatgatgatcatatctgtggttaaaaacaaaaacaaaattttacctatgagtttctatatatgtatactaacagatagaaggtaa

SEQ ID NO: 205298 - DNA, 1000 bp, Homo Sapiens
caggtctggggaccacactgaaaaccacgacctcagttcatgccattgtcatttgctgttgggattattgcccagtcttcctggctgtgcttctgtatctaatccttacccttcttcacattctccaccctgtcctcagatctggaaaaaagaattttttctggctgttgatcacccacagaataaatgtcagaattcctgctgtgatctgcagtgccctccattacctgactcttacctgattctctagtctcacctgctactttgctgatcccatctcggatcactgaacacctctggcacactgaactcctgcagttccttggtgccgtatcattttatgttctgccttttgtatctgctcttcattatttgcaatgccatgaatccctttctttcctggctaactcctctaggcccttccagactactgagggaaacctccctggggaagcattacctctccatctgaatgtagagagaggtgcttcacttatctaccatctacctcatggtggttatcacatgattgtacctgcctcttagtccacctcacccacaagactctgacagcttcctaacagcaagaaccaaatccatcatctctatagccataaccctgagcaacattgcctgatacagaggggagatcaaaggatgttgaatgaaaagggctatccagaaaggctacttggaggggtagatattttagccagaggtgaagagtggttagtatttagacacacaaggagtagcagaagaacattctgaaagagggaacttaaactggagcttggacttggtcaggctttagtgtgaggaaggaacaaggagggctctcatttggctggccacagcatgtgtggtcctgagagccagttgagggaaatagcacaggtggaattcacatggctcaacacaccattgaattatgggagtccgggaaagagctggatcaaaggtgggaatatgccgagcaccagtaacctgaaccagactg

SEQ ID NO: 205299 - DNA, 1000 bp, Homo Sapiens
gactaccaacactttagctcaggcaatgaggagaggcctgggaatggaatgacaaagtcactctgcccctgactaggtcagcactaggagggaggccaaactcaggctactggaaactgacagagcattcaggggatagaagattgacactacatcaggctctggttattgctttggggcatttacttgacactgtcattaactccccttttttctttgtgactaatggcccaggttgacctcaacaggtaccacatactaagaacatttcctaaattataaagacatgctttttctccccacatcagggagctttggggttcagtgactatatctaattggcatctactagaatctctcactgacgtgccctccatttccatattactgtcctgatcagcactgtggctgttcccatgttgcttatggtctatggacgagcctgcaaagcatagcaacaaccatagagatgtcaatggaagtcattattttcagttggaaaaaaatttagaattgaaaagtgtcaccattacgtaggtaaccttcctagtttaaaaagagataaaatcctgaggtccaaagaaattagtgaaacaagaccaaaacctacgaagggatccatggatacgagtaaagtactctagaagcacccaagggaaaaatataagaactgaggcacgtttaaaaataaaacactgcctatagcaggaaagaggaagggaaactgaggggccaaataatgaaactgggcagaaagaggtcccaagtgctaatcaaggatgctggacctgcaacaccttttaagcagactagctgcccccaggcagtgcccttccactccttccccgggctgcagatcacacacaagtggcagctctcctcttacttgccaatatatgatgctgcagctagtgtcatactgcttgcttccttatctagaccctctatatgagcaaaaaatactcagcaaaatgggaattaatgacgattacatgaattc

SEQ ID NO: 205300 - DNA, 1000 bp, Homo Sapiens
gacgtgaaatttcaactcttttttagaaacaaaggcctataatagtattttgggtgtttccaaagttgtcatttaagttaaatacttttcactatggagggtagattacttgttttagtcttagtaattagtgctgttgctgtatttatttatttttaatcttaaaggagcattctttcttgatggatacttaaaaattatgattttgtagtgattttcatttttttaaacattatacatcaaatattgactgtttattaaatatagaagtattatctaatattttattacatgtattgcacgattatgtgagaacttttgtgattaaaaatgaaaactcctagctgcaaaaacataaattcttattaggaatgatacaatacaatttatttaaaaattgcattcagtttttaaaccagcagttaattatagcagctataaaaataaagataccaccaggcttttaatagctttcaaatccttttaaaaaacacataatcttatttgtcatatgagttctaatcatattcctctcttctgacagatggtttatattcttataaatgttattcttataacactataaagatctaattgaggcagttccttttttatattcatttgactgttttccttgcatcatttaaaatttttgctttgtttttttctatatctctttttgtaacagtgctctattcaaatataatagttattttaataaacaagccaaattcacatgtttcttgtcttccctaatacttgtaagattctcccattcttgataccttgctttgttcttattctttctgttctatgaataaagcagagtaatagttaccacctaatgtgataacatgtcatataatgattcctttcaatattcgtgaaacactcaaagagaattatgctttttccctattattttagataaagacatttttcatgttttaaaaaatttccattatgttgcggagtggtatctaactgtaaaaaaggcttt

SEQ ID NO: 205301 - DNA, 1000 bp, Homo Sapiens
tccaggtcctgcaaagtttacctttaaaaaagcatgattgtacatgagcaaaaatacatggcctaaatatgtgtcaggcttgcttactggaagaagggatataatttccagaaaaatacagtaacatgtctatagaaaaatcatatgtaggatgtaaagctcttacaaattaactgttaagtaaacagaatttctgccttagaacttcattaactatgttaaatgaaggtaagtttagcctccctttcctcatcctctttattctctagtgtgtcctctaaaaaggcatctttgagaaaggaagctacaaatttttgtccttaaaagtcaactcaaacacatttaaagaaactaagattgtattaattatttaatagttatgtatattcactaggcaaagaatctggcactgaaaaaaatgatccacttttcttctgggttcccatatacaggaatcaaaataatttacaaagatttgtacaatgaggaacagtggactcaaaaattcaaactttgtgatattaaaaagtaacttcatgtttattagatgtaaatagttttacattgtatatgtcattttctaaaaaaaaaaaaaacaaaaattgacaattggatcctatatttaagtgttatctgaacatgtcacagaacaatgttctaaggctcacagcaggattaggcttacatttaaatcactgacattatttggtaattattcatcttggataaaatctaatctgaccattcatgtcataaaaccagagtccacaaagttggaaggtatccaagaactcactagtgcaatctcctcatttcataaaagaacaaagtagggccaatcgaagttaaataatttgccccaaatgcccaaagatctcaggattagggtacagcagactgcaagctatactactttatcaatgaagctaactaaatcccatttgaccagaaataaatattttccaaaggcttaatcaattttgttctttcatcagagttt

SEQ ID NO: 205302 - DNA, 1000 bp, Homo Sapiens
tatgcagcattaaaaaaaagaacaagctactacatgcaacaacttggatgaatatcaaaaacatgttgaacaaaagaagccagacacaaaggagtacctactatgtgattccatgtactcatatatgaaacttgacaagacaaatttaatctatagcaacaataactagacagattgttttctgaagccagggttgggaggagattgggatgggtcacaaggcatctttctaggacagtgaagttttctatattttgtttatggaggtagttacaaatatgtatgagtgtgttaaaactcatcaaaataaacaattagcatttttctatatacaaattatgtttcagcacaaatgatttttttaaaaacctagctgttctgtttactatttgaaggaaggtattaatgtagataccctgtctgtaccacagtttcctcaaaggtaaattggggataatattattaccttacctagaatggttgtggaattaagttaatggttgcaaagctgtttcttaattttattttttgtctttttgaaaagttttattgcaaatgaacaaattcatcatgaaatctttgcccatgcctatgtcctgaatggtattgcctaggacatcttccagggtttttatagtttggggttttacattgttgtatatatttatattgttgtatatatttatagggtacaaagtgatgtaatgatttatgaacataaggaataattaagctaattaacatatccatcatctcaaatacttatcatttttatgataaagacatttgaaatttattctcttggtgattttgaaatgcacagtacactattattaaatatattcaccatgctgtgcaatgcatctcaaaaaaaaaaaccaacaacaacacacaaatcttactcctcccatctgaggctttgcaccctttgaccatcattccatttcccccacccatagcctttagtaaacaccattctactctcttcttttatgaattc

SEQ ID NO: 205303 - DNA, 1000 bp, Homo Sapiens
tcagtgtgggggcagagtgggggcagtgtggggggcagtgtggggggcagtgtggggggcagtgtgggggcagtgtgggggcagtgtggggggcagtgtgtgggtcagtgtgcgggcagtgtgtgggggtcagtgtggggggcagtgtgggggcagtgtggggggcagtgtggggggcagtgtgggggcagtgtgtgggtcagtgtgggggcagtgtgtgggtcagtgtggggggcagtgtggggggcagtgtgggggtcagtgtgggggcagtgtgggggcagtgtgtgggtcagtgtgggggcagtgtgggggcagtgtgggggcagtgtgtgggtcagtgtgcgggcagtgtgtggggggcagtgtggggggcagtgtgggggcagtgtgggggcagtgtgtgggtcagtgtgggggcagtgtggggggcagtgtggggggcagtgtgggggtcagtgtgggggcagtgtgggggtcagtgtgggggcagtgtgtggggggcagtgtgggggcagtgtgtgggggcagtgtgtgggtcagtgtgcgggcagtgtgtggggggggacagtggggagcagccagggacataacgggggacagcgtggggggatagtgttagggacagtgggggcagccagaggaatagcagggggatagtgtgggggacagtggggagcacccagggggatagcgtggggggatagcatggggggacagtgggggtggccagaggaatagcggggggatagtgtgggggagatggtgtgggggggatagtgtcggggagatcgtctggggggatagcgtgggggagatggtgtgggggggatatcgtgggggagatggtgtgggggggatagcatgggggagatggtgtgggggggatagcgtgggggagatcgtctggggggatagtgtcggggagatggtgtgggggggatagcgtggggagatggtatggggggatagtgtggggatagttggggggagctggggc

SEQ ID NO: 205304 - DNA, 1000 bp, Homo Sapiens
taaaacagtgtctatacttctatgaaaaagtatgtcagatgaagaaaggacagtttctttcctgtctgagacatagtggcaggggttggcaggtaaaaccttgttaatgttgacctgggataagaaagtgaaaatggctgaagtagcagaaatgtaagtcagaaggtcaaacaaccaaatgagcttgggtaagatattgcagtctcagtaaaaggtgtctaagtgtcagatatctggatggagatggtgactaagaaatgctgaactgtaagcaagaaaaatatgaaggcagagtcaggtctgtcctgggtcttgaattaaaaggcaggggagctagcaatggtgctcagatatcctccccaattctataaggtggtgcttccttttcctgaactctttctgaagccctcctccaggcctgactttgcccatcctaaaggcctaacttactttcagataccacactgagtttcctccttggagatgttccaggagagagaaatactacactgctagagctcatggtttttcccataatagagagatggttgcgttcattcattgcttttcatgctctctaggcataaaaagggaaacttgtttttcattgttacattgatgattttctttttttttattattactattattattatttttatttattttttttaattatactttaagttttagggtacatgtgcacattgtgcaggttagttacatatgtatacatgtgccatgctggtgcgctgcacccactaactcgtcatctagcattaggtatatctcccaatgctatccctcccccctccccgctccccaccacagtccccagagtgagatattccccttcctgtgtccatgtgttctcattgttcaattcccacctatgagtgagaatatgcggtgtttggttttttgttcttgcgatagtttactgagaatgatggtttccaatttcatccatgtccctacaaaggacatgaactcatcattt

SEQ ID NO: 205305 - DNA, 1000 bp, Homo Sapiens
gatcacctgaggtcaggagtttgagaccagcctggccaacacagtgaaatcccgtctctactaaaaatacaaaaattagccgggcgtggtggcacacgcctgtaatcccagccactggggaggctgaagcagaagaattgctagagcccgggagacaaaggttgcagtgagccgagatcgcaccactgtactccagcctggccaacagagagagactctgtctcaaaaaataaataaatagtatggcttctatctgtgttgtatctcccctacagaactatgcactctttgagcaaagagatcatgtattaataatccacatcctccataaaccctgacataaagtaggatctcaataattgttaaatgaatgaatatatgaatgaaaaaaatgagtgtgtatatgacgattcccaggcagaactgcccattttcctctgcaagaagatgcattttgtcctattattgaagacattcctcctgacccttaagagattccaaaggctaataaccttcagagtcaagaggatcatttttccttgtctaatctaaatttctctagatgcaactttggtgcattttcttctaatctacctccctggccacagggactaaaatccatttctttgcaagaagacagttattaattcacccttttagccttttcttcaacaaatttaatcccaggccctttattgttccctccctggggtcctatcatccagcactttccccattccactgctccttgggccttctgccaagctctcaaaggcctccttcagctgtggaggcaggaatgggacatattattctccacggaaccatgtacaaacacacagatgcctacacacgcaggacaaacacctctctgcacccattatccccaatccttggtaaacacatactcataggcagcctccacacacagtcacagattatctcctcccacctgcaccgcaccccaccccctggcccccagccctagccctgagaattc

SEQ ID NO: 205306 - DNA, 1000 bp, Homo Sapiens
cagaatgagactctgtcttgaaaaaaaatttttttaaagtgcctattgttcagtacagcagtccacttctagttattattccacagaaatactttatcctatggaaatattctattccttgaaaatattccatgtgagcccaaaggtatttaagtaaagttcatatacaatgtccatcattgtttgtaatgaagaaaaatagaagccaggcacagtggctcacacttgtaatcccagcactctgggaggcccaggcaggtggatcacctgaggtcaggggttcaagaccagcctggccaatatggcgaaactccgtctctattaaaaatacaaaaattagccgggcgtgttggtgggcgcctgtaatcccagctactcaggaggctgactggagaatcacttgaactggggaggcggaggttgcagtgagccgagaacgtgccactgcactccagcctgggtgacagagagagactccatctcaaaaaaaaaaaaaagtaggaaactgcccatatgtccactgatagaggcatggttaaacattatttggtatgtggtattatgttatttttagagacaggtcttgctctgttgcccaggctggagtgcagtggtgtgatcactgcagcctcgcacttctgggctcaaacgatcctcccacctcagcctcccaagtagctgggattacaagtgtgagacaatgtgcctggcagcacatggtattaaatactgtacctcagtcaacaaggatgatgaatggtcattaaaaatcttcaatacttactaagttcaaaatgcaagtagaagaataataggcataacacaattccatttatataaaaataatgcacactgcaaaagaatgaagttggacccttacctaacaccatatacaaaaaataactcaaagtagatcaaatacctaaatgtaagacccaacaccaccaccactctcagaagcaaacgtgataaacatgacattggatttaacagtgaattc

SEQ ID NO: 205307 - DNA, 1000 bp, Homo Sapiens
ttcatgtgacctcccactaaaataactggacttcttagatataattgctgggacttctcaaagcttaggcctggaacttgcacagtatcgattctgctgattttatcagttaaagtctcagacttatgccacacacagaaagaagggcctacccaatggtgtaaatactgaaagcagtcgttttcttggagccctcactgtaacagatcataagagcaatttatattccatcttcagaacttatactgtattcctgggggctaagagcatagaagaggcaagaatttttttttttaacttctgggaaaatatttgaaagcaaggcaatagatgagtagtagattgggggtgaggaatgaatatagtcaactataaaatagcatatctgaacagcattagtataaaaatgtagtccttcatatacctttttaatgtaacttgtttattggtaaaattaagaaggaggtgtatatagaggcttagttattatgcaacacataatcttcaagaagctgaacaagggaaatgatacaccaggtttattacaggaaagtgtatacgctacacttcatccaccattagggtgagtgtcaggctaaccagcagaatcagtggaaagacaagaacaagcaatcttttaacctttcatccagaacctctcacagtccactagcctgggagggtgtcagctctatacacttcatctagtcagtcgtctctcactaggaaaggcagagaatactctcattccgtataccctttgtatttaatagctttacttcctcaagtcaatgaagccattctgaaacttgatactctatggatcttccttaaattggacctatatataatatatatccttatttccttctataaagccatccaaaaaaaaaaaccagggaattctattttttttttcttttttccaccatcaatacatttatttgcaggagatggggtcaaatcttactatgaactggacaggactagagacgctgat

SEQ ID NO: 205308 - DNA, 1000 bp, Homo Sapiens
ttattttgattttgccatttctcttctctctgttagttacaaactttccagtttttgccccagtggttcctgtcagtctcacatgcagacttgacttaccaaggtcaagactgaatgagatgatgatgggggagccaagccctggcaggggggtgagggagggagcagctgagtgaactggggtccagtaagccaggggtttgtggggggctcctggaggctgagaggaaagtgtgccgtgagaagcgctgagccgaggtaggcactgggggcactgggggccagctccatgcaggaggagccacggaggctgctgggtatgtcagggagaagcagaaaaggattcagagacagtggggtggcctcaagacgagtcatgtgggctgtggttcatggtgagaccatgagggaagtggctgatctggtgggaacaggcttgtgggagggggtgaggtcagggagtggggggtggtcgtccagacacaggcagagctggagtgagggctgggctgttcagggcaggagtgatgccaggacgttcataggtggggctctgaggaagaggaagagcgtggtctggaagaggcaggagctggtgttgtggggctcgagagcagatgctggtggagggccaggcattcggctgggaggccctctcctctcctgggaggcctagtgaagggtgtggcatgattctgttctgttgcggatggacctgaatggggatgagtgtgcagagccacgtgggggaatggaccagacaggaacaagggctgtatgagtgctaccccgatggccccaggagctgggcaaggccatgaatgtgggtgcgctgagcccgtgagggtggggtgcgctgagcccgtgagggtgggccgtgctgagcccctgagggtggggtgtgctgagcccgtgagggtgggccgtgctgagcccattctccatgtccactgctggctgtggaggcttcttgaagacattcctcctgtgcctggaattc

SEQ ID NO: 205309 - DNA, 1000 bp, Homo Sapiens
tgtgtgtgtatatatatatatgcatatatttaaatatttaaaaaacaatgtataaatatatatatatagcataaataatttatgttacatataaatttattatatatgaaatttatagcactaaccttatagctatttttagcttcctttccaatgacaatgacagttcttgatgacaggcaattggcgcatactctgcttagcatagagactagtttgtaatggttctgcaagcagaacaaccatctctgagctggattctacgttccagagaagtttctaaaagatacatatattcataattcctctaatctctgtaactattctatgtaataaaaatttatatcatgacaattttatatatgaagttacgtgagacaaatctatgcagtagagattactactatgccaattatatagtaaaaataagtgatttacttgagatgccacagctaggaagttatagatttaggttattataattaagagtctgacaacatttggatgcttgaccagtgacagtgttcaatccccagctgtctttcattccttcttgtgtcgcatctggacaaccaataagaaaacccaggtactctctctcttgtcaatggaaggatattcaaagcacaattctcttcctgcctgttgaaaccctcacccaggcccacaccctgagtccagtataaaccaaagccactggcctcttcagctcaaggcattagacaggcttggatgcctacttttcttacctaagaaaacctcatgatttcagttacaaaatgccatattcttttgatgtgtgtgcggctgtgacataaacagtcttgacatcatacccagttagggtgcagagatgatcccatttatcatggggagaccacatggctgttttgcactcaggttatctgaatatccagcattcaagttcttaaatatcatgttgtgcttcctgtcagatatgttaaataactatttgttacatgaactaatttttgaattc

SEQ ID NO: 205310 - DNA, 1000 bp, Homo Sapiens
gtaaataaagtggcaaacaacttgactgaaactgtgttctagtgttttggaatgtagacattaaaagtgatgtatttggatatttagctgaggagatttctaactttatctcattaatatttactaaactttatctcaataatatagtgtttctaattaaagcatatttaattatagataatatttgtaagccttagaaggaaacacagtaacgatatgtgacttgtttgtgccatatctcaagtctttaccatggtgcctgtcttccaataacagtgaataaataattgtcaagtgactattttaaaatatcatgaacagtgactttaatttctttaaacaatattgaattacttgccctgtgctttacttgactagcagaaatacaaaaacaaaaaagtattacttggactgctgctgcttctggccatgatggaacaacagggaccagacttacttacaccttttttttttttttttttgagacagagtcttgttctgtcaccaggctggggtgcagtggcgtgatctcagctcactgcaacctccgcctcctgggttcaagtgattctcctgcctcagcctcctgagtagctgggattacaggcacgcaccacaacacctggctaatttttgtatttttagtagagacagggtttcaccgtgttggtcaggctgatctcgaactcctgacctcgtgatccgcctgccttggcctcccaaagtgctgggattacaggtgtgagcaactgcgcctggcctacttaccctcttaaagcaagtaaaatatcaggcaaaacatgaaataactatttttaagacagtgggcctcaggcattgaattgtgttgattcatgagagactggaaacaaatgaatgctacagttctaccagtttactgcctagagagtttccagactgcagagcatggagcccagtggtcttcttgagttgaggaaatggagttaggaatctaaagaagccaagacagctagaattc

SEQ ID NO: 205311 - DNA, 1000 bp, Homo Sapiens
tgccttcctcggcccctcaaagtgctgagattacaggcgtgagccatcgtgcccagccaatggtttttttaaacatgtgtcattttccttttcagcaccataggtatatatattttaaagtatttgcaaatgcctgggtaaacattcttcttttttcataggaagatattcatagagttaaagtaatttttaaaatttcaatgtaaaacatgattttaaagacattgatgggaaattgctgtgagaaatcatctgtccctgtactagtgactacagtttcactgtactgtcagctctgtgagggcaacaaagtgtcaggtttttaatttccactaaggtgttcaatcaataaatggatcgatctatatcaaaggacattgttgagtccacttgaatttttttttcaatattttactataaaaattgtaaacatacagtaaagttgagagaattttgcagggaacacccgtatactcaccatctagattctatcattaactttttttttttttttttagacggagtcttgctctgttgcccaggctggagtgcaatggcgcaatcttggctcactgcaacctccgcctcccgggttcaagcaattctcctgcctcagcctcctgagtagctgggactacaggcgcccgccaccacgcccagctaatttttttgtatttttagtagagacggggtttcaccatgttagccaggatggtctcaatctcctgaccttgtgattcacccgcctcgacctcccaaaatggtgggattacaggtgtgagccaccacacccagcctcattaacattttattatactcgctttatcacatatttttctataggtttattaatatatccttttattgtttttgagatggagtctcgctctgtcacctaggctggagtgcggtggtgtgatcttggctcactgcaacgtcttcctcccagattcaaaggattctcctgcctcagcttcctgagtagctgggattacaggtg

SEQ ID NO: 205312 - DNA, 1000 bp, Homo Sapiens
tcacctcatctttaaggacaatcacactgaaagtgaagggctcaaataaaaagtatttcataaaaacagaaactaaaagcaagcaggagtagctatacttagacaaaatagacttcaagtcaaaagctgtacaaagagacaagagagacattacataataataaagggatcaattcagcaagagaatataataattgtaaatgtatatgtgccccaaactggagcactcagatatatagagtaaatattattagatctaaaaggagagatagactccaatacaataacagttgagaacttcaacaccccactctcaacattggattgatcatctagacagaaaatgaagaaagaaatattagatataaactgcaccatagatcaaatggacctaatagatattttactaaacatagaacattttactcaacagctggtaaatacaaatctttttcatcagcacgtggaacattcttcaggactgactatgtattagaacacaaaacaaatctcaacaaatttttaaaaattgaaaacatatctactatcttctcagaccacaatggaataaaactagaaatcaataacaagataaacattcaaaactatacaaatacatggaaattaaataacaggctcctgagtgaccaatggatagagaaatttaaatattccttgaagtaaataaaaataaaaacacaatataccaaaactagaggacatggcaaaagcagtattaaggggcaagtttatagcaataaatggctacatcaaaaaactacaaagatctcaaataaacgacctaaagatacatctcaaagaactagaaaagaaagaagaaactaaaccccaaattagtagaagaaaagaaatcagagaaggaaatatcagagcagaaattaataaaattgagactaagaaaaaaagtacaaaaatcactgaaacaaaaagttgcgtttttttttggagaagataaccaaaagcaacaaactattagcta

SEQ ID NO: 205313 - DNA, 1000 bp, Homo Sapiens
taatttattccctcgctgaactgtaagcctcataaggtcagaaatactgtattcttgacccttatcccaattcctggcacagtgcctttttgaataaaagaaagaatgaatgatattttctgacttcactcactgagggagtttaagatgaaatagacttaggcagcaacatgaagaatatagattgaataccgaaaaaaactaaaactgagagttattgagtattgggggactatcttactaagcagcagcatagatacaaataggtctagtgatggcaaaatgctgttataatgctcagtgcacaaaatacatatacaggaaagaatggggtaaggaggaattagtcttcctggtagcctgctgctttatgagaggagggattgttggttgtgactcactgaggcacagagctgtaggaagctaacaaaaggcattttcacaaagcacccaagctgggtggacgtagaggagttactgctggagcactgtgctttttctctgtacaagtactctccagggagtgaggatttctgtttagcattgaaatattttaatcagaggaaacattttgaagtgacaccacttcatgccaattctcagtttgatctctcctttgaaggaaggctccttcaggctgcttgtcgattattcctacccaaagaagagtctatatctcaaatagttcacctactcccacccctgatttccatttcattgaataatttaaatacgttctcctctcccagcctggcctccgcctctttgccccaagagtgtcctgctgagctgatttatatcctttctgaagcagtaaaatttctatttatacacttaattgaggaaacatgcctccagtgaaaaccaccgagaatcagtctgatggtcatggcagggatttgatgttctggggcatcagagagaacccaaagactctgtggtggtggtaattcaatgtattggccatgttgattagtttgattttgaagatagagaattc

SEQ ID NO: 205314 - DNA, 1000 bp, Homo Sapiens
ggatgatgatccacttccacttaatgagtagcaaatatattttctcttccttatgactttcttagtattttattttctatagcttactttattataagaatacagtatacaatacatgtaacatacacaatatgtgttaatcagctgttcatgttattggtaaggcttccagtcaacagtaggctattagtagtgaagttgggagagtcagaagttacacatagattttcaactgcactgggggtgggtcagctcccctaatgctcatgttgttcatgggtcaactgtattataagcattttaaattttattaccatctccttactatttgatgccattttttttgtctccttactttaaatgtttatagcagataggggattgtcattacatgatgtaccatctctttaagtctgtggaataactttatgtatttttttgtttttaataaaatgatcttgattttgtaaccagaaaaaaagctatttctgttttgaaaagtattgattgtgtactttgaatttatttacagatgatttttaaatgttttcttgttatttggttttataaagaaagctgtctaaattactttagacatatgttaatataaaattttaggggaaatttgacttgttctgatgttttttaaataattttcctttctgtttcaaaataggtagaaaatccattagaggaagccgttaagttccttatacctcttaagaaccttgttgctgataacattgacactcatctgttagcatttgaaatatattttagaaaaggtaataaatagtttgagttcagtttttaatctttaattatatttgtgaccatattcagtgtaatctttgtcagatctatttttgtttcttagattttcattttagccttctacaaaggctcttttccttggctactcgaaacttaggtgggtaataaattagaatagtactatcaaatccagtgtaagaatagtttgaacaaccatacaaattgt

SEQ ID NO: 205315 - DNA, 1000 bp, Homo Sapiens
cacagggcttttcttgtgctcctgcaatccaccaagtgcatgtctccatcgggaggtgtactgcagatatactgtggaaatcaaagaattctttttcctgccctaaccccctcctctctcagcatctccttccggaataaaaagtagcacctccaccctgctgccgaaacagcaccttaggagtcatccttgatgcctccacctcctccctcttgacatgaaatcaaacacaagtcctgctccttccactgtctaaatatcgttcacatctgagtacttttctccatgcacatggccagcaccctagttcaggcctcctgactcctccccctgcatcgtcttgcccttccaatccactctccagtcttcgagcagagcaatcttacagaaactcccctagcaatccttgggtggcagcccattgccccagaataagtcagactcctgagagcttgagtgacaagactctgtgtgatctcagacttctacagctctgccttcaggcttctcaggtcaggctggctcctcctcacccccagacttccctacgccctgtgaatctcaggtctctgcctgttcctcacagaaaaggcagtgaccacaggcactgtccccacttgttttaactgacccaaatcaagttctgtgaaactcttcttgtctaggtcaccaatgacctcctctctgtcaaacctagtatcaattccaccctctgccctcacccgccttcactcactttcttcgcttggcttccagagcatcacactcttctggcttttctcctctttctgagcgctctgctctgttttctttgtcagttccccctcatttctgcaaactctaaatgctggagacctgggcttcatttccttcccacctacactgacttccgagtgagatttctcccctcctaaaggttttagagtccatctaagtgctggtgactctcaatatttgtctgcagcccatccctttgtcccagtccccagactctgaattc

SEQ ID NO: 205316 - DNA, 1000 bp, Homo Sapiens
atctgcctgatattaaagatccttcttatcataaaattatctgcaaggaaatgaaacattgagttcagtactgatgagtcttgaaaaaaagaaacagaataaaaattcacacactatcttttccatttcacttagtgtcctgaagccaaacaggagtattccctagaattacttgtaaaaacattagaacagggtgcaaacctggattctactgcttgctagttgtgtgactttaggcagatcattcacctctgactataaactcacttaagaagggccacagtaagagctagtcctctttagtaaaagaatttaatgaaatatatgtgtgaatcagaataggctgggctatggattaaagctgtaagttttatttccctctcatgctccagatctgtcttggctgggcagctgaggtttcagcttcatattaccttctcttcatgacacagcctcacataccatccacatctacaatgctgccactctgccaagaaggaaatgagaacatggtgtgttgtatgttgacttttaaagcttccacatagaagtaacacatgtcacttctgctcatatttcattgatcatatttcaggaggaaggagaattatattcctaccatgtgctccaggatatatccagaaacatttatctgtatcaatgtttatattaatatttcattttggcacactcaacggtagtgaatggataataatagctcactgtactgagggcttactctgttcagggcactttggtaagggctttgcttccatgatttgatttaatttaattctcatattggcccataaggcaagtgacttgatctgccagacattatttgtccttctaatattcatttctctgtttgtttgcttttttttatgactaacagaactgagatttcatttgagatgaccgtgtttaaacctcacattgttcttaaagctgtagagaaggaggtgaaaaacttctggccaaactatggtatgtggaattc

SEQ ID NO: 205317 - DNA, 1000 bp, Homo Sapiens
aaaaaatactgctggctaggtttagccctgaataacaagaaggaacaatgtcaaaatttgtataggcctttagtatttccatttaattttgaaatgaaggtttattcatttaaattttgggttgttttattttactctgttatgtacttaatcaaatattgatagaccaaatgacttcagtaatgttggctctgtatctatttcattttttagcatcacatatagataaccttttgctgatacagcttaagaattgtaccaaataaaaagccaatgctatatctacaaatgagaacttagaaaaaaaaatctagcaccaataagatatcaaattttgacttttaaaattactttttcaatacataaacatatgtccacatgcatactttctagatggattgtcatttcacagaagccttttctcatattgaaatggaatgcagattgggtagttaaatttgatagtgagaaataaaaataaaaaattctaagcccccaactgactgaacggacatctctcttggccaaggggaatcgagagaaatcttggaagctgaatttacagtcatgacaggatggatgttcagacatgcctcattataaccccctcccttgctaaccaccattaggctttctactctgagggctaaacagaaactagccctttcaaaagactccacactgataatgttgatcactagcttatctttcctggtacagaacaaagacaagatgaaatcaattgttcttttacccttgcctgagatgtctgcttcctctattccctttttcttcacatgttcaccttatcttatgtaaaatgtagatttattaggcactaactaaaaaccttacaagtatgtaatcattaatttcactgctacctgcccgccccttttcttaaaggaaaatatgtaaatactaaacttcctgagaacctctttggaaaacacaatcacagaatgcatctgtgacttgcattttaaccaggtgaaccctc

SEQ ID NO: 205318 - DNA, 1000 bp, Homo Sapiens
caggagatcgagaccatcctggctaacatggtgaaaccccgtctctactaaaaatacaaaaaaataaaaaataaaaaatttgcctggcgtggtggcaggcacctgtaatcccagctattcgggaggctaaggcaggagaatggcgtgaacccgggaggcggagcttgcagtgagccaagatcgcgccactgcactccagcctgggcgacagagctagactccatctcaaaaaaaaaaaaaaaaaaaaaaaaaaaaaaaaaaaaaaaaaaaaaaaaaaaaaaagccatgcaagtcaggcctggatttgagtctcagctctgcccacttatgagctgtgtgactatgggcaactgacgtggccccaataaagcggagataatagtagtgctgtattcaccagggtaattagcattagccgactcagcaaaccaccacaaaacctctgtggctgaacacaataaaggtatgtttgtctcagagtctaatgagggtctggtagccctcctctattttgagctataccatcagaacatgtggccaccagagtgaccacagcaggggaagagagagatgaagacacatcaactccaaaccaactcccccatatttgggagacataacttctactcacagctccttgtctataactagtcacttggcccaaactaaccaagagggaggctgggaaataagaatgagcacacagatctttcacagggagtcagctacaaggacccatctccaaagggtgctttgagtatttggtgggcaactgcccacaaccgggctcctagggttgtgctagacagcgactcattacccccacaccctgccatcaagtgtcccatgcttgtactctggtcctggtccagacttcagacactcttctgcatctatcagctcttctagattaaacacacagccaggtgtggtggctcacgcctgtaatcccagcactttgggaggccgaggcaggcagatcacatgaggctaggaattc

SEQ ID NO: 205319 - DNA, 1000 bp, Homo Sapiens
agcccgtcatggcaggaggctttcctggagcattcctcagggtgctcgctgcccagtgcagccgagcgggaatctgaaggtctctgggaccacctcccgtgcccacacacgagtgcccacaggatttggagtaaatttctccccgagcacaagccctgctcagagaacctcttagcaccggcggccaagcactggccccactcccgtcccagcccaacagcagctatagacagagacagattacagcccctcccccacccagagggagctccttaaatgaggtacctgggaaaggaaaagggggcccaaagcccaggggggctgcccagagggcaggggccaggtgtcagagggcaggactgcagccctgaggggggctggcagaggtgtcctgtgctcccgacgagggagatgtggggggggtcgtcatccctccacccagatgcagctggaggggacctaccacatgccaggtgctgtgcctggcctggggacacaggtgactatggctgacacatgcctggctgggaaggagatggcacgaacaagtgtgtccaggaggaagagtgccacccacgaggaagccagttccctgaggacagaacccagtggggggcgatcctccctggaaaacgttctgtccacagtgaaggcaggatgagcaggacgtggccaggtgacgaggaggagggtgcacctgagccaacacccggagccggggaagtgcagggcacgtgcaggagcctgggagggatcaaacctgcctggaactgtgctgaacacagctgcgacatcaggggcaagtatcctgcagaaggccgggagtgccagagtgaggagcccatgcctgcttcatgggcagagggagccacggaaggtttctgagcaagggagtggcatgagctgagctcacccggacaaggggagagagggaggcatggctggctgggggccctcgaaacagccaggagcgaaggagctccccaggcaggtagctgag

SEQ ID NO: 205320 - DNA, 1000 bp, Homo Sapiens
agtacagcctgttggctaggagtatggagtcggtctacctgggttccaaagccaggttcactgttttctattgtgtgatttgacttgggcaagttcctcaacatctttctaagcctgttttccttaactataaaatagggtgccatcttcttagagatttcagaggattaaatgggataatgtttgatatataataaacaatacatattatttgggtccttatctcctctaaaatcacttagcctggaagataggaagagtatcttgattggtttcaccttaaattcacagccattaacccccaatgtgccctttgtgctatctggtaatcctgctacatctttagggtctagttgtgttgcctaggctggtcttggacccctgggcttaggtgatcctcctgcctcatcctatatctcaccagctcactcgctctcttactttcttagataatcctttcagtcattctcctctttcctcaaacatttaatacttccgtgccttcttcactctcagctgacaactgtctttcgtgtttcattgagacaatggaaacaatcagaagaaaacttttatacatttctacgtctgccacctttcctgcatctattccttcattcctatattgtagataaactgtctgtattcttatcgaagggcaacccctccacttatgcaccagatctatttcctcttgcctattcaagatatcactctggtaattatcccctctcctgtatcatcagtttttttcttccttactaaatcatttccatcagcatttaaaatcccccatcttaccaagccctcccataaccccacattcatctccaactaatgtccaattcctccaccgccctttaaagaaaggctctttgatagagctctctgtactgaaaaatatacaggcagatccagcttattttaccatgaaacttgtctcaagtcttagtatttcctattatctccatcactaccaccctagtccaggccccatcat

SEQ ID NO: 205321 - DNA, 1000 bp, Homo Sapiens
aagcctgtaatcccagctacttgggaggctgaggcataagaatcgcctgaacccgggaggcagaggttgcagtgagctgagatcgcgccactgccctccagcctgggcgacagaatgagactccatctcaaaaaaaaaaaaaaaaaaagaagccagtgtggactcagcaagggcatcaatggggagagcagaggagaagttaagagggaatggagtggggggtgtagatcatgagggcctcaggccgcttaaggacttgagcttctgtttgtttgtttgtttgtttgtttatttagagatgacagggtctcactctgttgcctaggctggagtacagtggtgtgatcactgctcactgtagcatcaacatccgggggtaagcgttcctcacactttagtcccccaaatagctaaggactacaggtgtgtgccaccacacctggctaattttttattttttctagacatggttcttactttgttgcccaggctggtgtccaacttctgccctcaagcaatcctcctgcctcaacctcccaaagggatgggattaaaggcacccagccttgggtttctattctaagtgagatgggaagggcacaaatgtgataagatccaaatgcactttttttttttttttttttgagatggagtttcactcttgttgcccaggctggagtgcaatggcgtgatctcggctcaccacaacccccacctcctgagttcaagttattctcctgcctcagcctcccgagtagctgggattacaggcgtgcgccaccatgccagctaattttgtatttttagtagagacggggtttctccatgttggtcaggctggtctcgaacccccaacctcagataatccgcctgcctcggcctcccaaagtgctgggataacaggcatgagccaccgcgtatggcccaactgcgcttttagaagagacttctgtccacggagtggaggaggaccaagagcagcaggtgaatggtgagaagt

SEQ ID NO: 205322 - DNA, 1000 bp, Homo Sapiens
cccaaagacaagtgtatttgtatgttcatcatagctctattcatcacagcaaagattcatcaatgcccatcattgcccatcaacggtggactcaataaagatgtgatacagagacaccgtggaatactgtacagccataaaaagaacaaatcatgtcctttgcagcaacatggatggagctggaagccatcatcctaagtgaattaatgaagtaagagaaaaccaaataccacatgttctcacttataagtgggagttaaacactgggtactcataaagatggttacaacagacacagggaactactggggtgggggaaggaagaaagggttgaagaactaactgctgagtactatgctcacacttctgagtgacggggtcaatcataccccaaattttagcatcacaccatatatctacgtaagaaacccgtacatgtactccctgaatcgaaaagttgaaattatatttaaaaagaaagtaaatatctgtaatatcaatagccaaagacagccaatattacttgtatgatacataataattgaaatcaaattaatttttattctgcttttgaacttgaaattccagaaaaatttccaatgtcacctgaaatctcaaaatattaaactctaatgtcttctctgaaaataatgttccatctcctaatacctcaaagcttttactggatcatatacctattgttacatatgaaggcttctatacataaggtgaacctcataaaactgccaataataaaacaatttttacttcaaaaacagcaatttcatatggttcaacttaaaaatcaaataatgaaggcatggtgttgtcctgacagatatacagacagaatgcaaaacaaaatgatataacctatccgtaagaaagtctgacaaggtatcaggcaagaaatattaaaaagaaaaaagtttggaagactgaaaactgttgagagagcacatattaaatttgaggtgtttccattttaagatgagaattc

SEQ ID NO: 205323 - DNA, 1000 bp, Homo Sapiens
atgtttttttttctttttaactatccagcttaagatacactctgctttgtgggcttgtgtatagatgttctttcgtcagttttgaaaaaaacaaattctgacattttctatctatatgtatatttttctccctctttgtccacctattattctgaaaatccaaatacacaaagtttattctgttagctattattccacataacactattttattttattttctgtatttagtctatgatcattttgaataatttctattagattattttcaagttaccaatcctttcttccactacatccagcttgctctatttcagacttccttgtgttcaatactttttaaggctttgtaggggaaaaaaaatctatctatctatctatctatctatctatctatctatcatttatctatctgtctagctatgtatctatcttctatctatcaatcatctatctacttatctatccattagttagtgcacataaaacatgcagaatatctattagaaatatattttctcttggcactttccagtcaaaatttcaacacaggctacaattgttttgattctttctacaaaaggttagttttgcctactataatcaattctgtaagtgaagctataaattacactcatttatgtgaggctacattcacaaaacatgtttgtgacactcatctttttgtttttattgatcattttattttgtaatactttattttatgaatataccacaggtttgggagcatttgtttgttttgtttttaatatatttccctattgatggatatgtagttgtttctgatttgaggctgtcatgaataaacctcctatgaacaaatcagatatatatgtctttctgtagataatattttcacttctcttgagtaagtacataagattgtattttctggattattaaataggtatgtatttggtgatatggtttggctgtgttcccacccaaatctcaatttgaattgtatttcccagaattc

SEQ ID NO: 205324 - DNA, 1000 bp, Homo Sapiens
aattagctgggcctggtcacacctgtagtcccagctactcaggaggctgaggcaggagaatcgcttgaacccaggaggcagaggttgcagtgagccgagatcgtgccactgtactccagcctggtgacagagcaagactcagtctcaaaatgataataaaaataataacaacaataatagtaactcccctaataaacgcagtaaaaccacgaagtgcaatttttttacctatcatattggtgattaaagtgaatgataatgcctagtgtttggaaaggctatgaggaaaaagacattctcaaactactggtggtaatgtcgattgatagaaatggggtggtttggagagaggcttatttatttatcatcataaataaaaacatttaaaaacgtgcatcccctttggcccaaaaaatccacatctaggaaattattttatgggaataattaacacaccatcaagatgtttgtgtaaggatgttttatgacagcattgtttctaatagtggaataattggagacagcttaaatgtcctagtgagagactgttaagtcatgttacagccatgtgtggaataccatgtagctattaaaattatgctatagacgttatgtttattgacatggaaagatgttcattataatcattagtgaagagggcagatttcctggagagtatgtagagtatcccaattttgtaaattaaaaaaaatgtttaagcatctaaagttcacaaaaaattttggaaggtaatataccaaaagattatctctggatgatggagttattgatttttttaaatttttttctggtgtatattctaatttttttaaccagtgaacgtgcattacttgtgtgatttttttttcaagtaaaattaagaataaacaaacaaacaaaaaaataaagagcactctggcagaagtgtgaagaagtaattggaggagagcaagactggcggcatgacgacttatttcagtagtgcaggccagagataaca

SEQ ID NO: 205325 - DNA, 1000 bp, Homo Sapiens
tttataaatatcatatgatagttaactttatgtaatttgttatatcttggtaatggacttttcttaaaaatggacagtatccctaagaataccccgtacatttccattgcaaaaaaaaaaaaaaaaaaaaggtattccatcatgtgagtataccacaattaactgatataaactatgaaggtaaaaatttgcgttgctgccccttaatgttgttgccttaatttctttttctcaggtcctaagtcgtctgcccctgagaataagtggatggggaggtgacaaatctcccgtgagaaaaatgtaccaagtgcatggtgttccaacacataatcacaaattctgaatgaaaacttgccacccaaatataaaatatttaccaaaacatcgaaattaatatcacaattatgtaagcatcgttcctacgatgtttggtgaaatctatgagaatttgaaatcaagctatcactatcaataaactgatattagtactcgcaaggagatctgctataaatagagaaaataaaattttggttatccttctggttataaaatacttacctgtttaatgcagtgttacttcccttagcactattgttttgtctgcttatggtggcaggcaacgtacagaaagaaaacatcacagtttatgtgcatagtttaataaatgattgtccagtgcacctgcacaggaacgctcccctaggtcccagagaagaacaccgccagcattccccagagcctcctggggtgtccctgcctgagctcagccccactcctactgcaaggggaaaccaacatcctgacttttctgattgtcctttccttgctcttctctgtggttttatatcctaagtatgcattcttcaacaaggtaggttagtgttgcctgtcatttgaagttataggaatggaatcattaagcatgtccgtgttgtcccttgcttctttccctcgatgttatctttgtaagattcgcgcctattattccatggaggagtac

SEQ ID NO: 205326 - DNA, 1000 bp, Homo Sapiens
agtgcagtggcgcgatcttggctcacttcaacctctgcctcccagattcaagcaatgctcctgcttccgcctcccacttagctgggattacaggcatgtgccaccatgctggctaattttgtatttttagtagaaacagggtttcatcgtgttggtcaggctggtctcgaactcctgtcctcaagtgatccacccgccctggcctcccaaagtgctgggattacaggcgcaagccaccgcgcccagccttattttctttttttttttctttttttgcttttctttttttgagacagagtcttgttctgtggccaagctggagtgctggagtgcggtggcatgacctcagctcactgcaacctccacctcccaggtccaagggattctcctgcctcagcctccggagtagctgggactacaggcccatgacaccacgcccagctaatttttgtatttttagtagagacggggtttcaccatgttggccaggatggtctccatctcctgaccttgtgatcctcccgccttggcgtcccaaagtgctgagattacaggcgtgagccaccacgcctggcccattttctttttttttttttttttttttttgagatagggtctcgtcctgtcacccctgctgcagtgtagtggcgcaatctaggctcacagcagccttgacctcccagactcagatgatcctcccacctcagcctccctagtagctgggactacaggtgcatgccaccatccctggctaattttttatatttttagtagagatgggtttttgtcatgttgcccaggctggtctcaaattcctgggctcaagcaatccactcaccttggcctcccacagtgctgggatcataggcatgagtcacggtgcccagcctggaatctcatattagatttgtttgtttgtttgtttttgtttttttttgtttgtttgttttttgagacagagtctcactctgtcgccaggctggagtgcaatggaatgatc

SEQ ID NO: 205327 - DNA, 1000 bp, Homo Sapiens
gcttatgatttttcaaatttaagatagtatgaaagtgatacccatgcaatagaaaatgtactttgaattttgatcttttcccaggctagtgctgttttagaatactctctcaccatgatgctgagcatggacagtgaaccacagctcccaatcacacagtcaccagggtaaaaaacagatatgccaaagtggactctgttgccagatattttactaaactgtaggctaatgtaagtgatctgagcacatttaaggtaggctaagctatggcattttgcaggttaggtagactaaatgcatttccacgtttagaatgccaaggaaatgaacaaaagtatcatcacttaagtttagattaagtgatgtaatattactgaatgtcactttactttgtaaagcagtatgtccaaactctagttaaatggatatatcttttatttggctttctttaattctggcacaactttttttaaaggcatttaacagagaggttcagggacagttttaggagagaacatataattacatgccattcaaactgtttacaaacatgaatgttacagagctagcaaaactgtacttacattctcagtgaagcttgatatgctggttttcatcaggtagttccattattaaaagttattttttacagcgaagaaatgaagtttccaaaagaagcttgtgttttgaatttgtaatgactacctgcccatcatattgttttctgataataaattactgaaactacttctcccttttaaaatgactactgaagtacagttgttttagattaaatataccagtgtaggtttggtttgagggagattttctggtaattctgcattttttacaagtgcctgtgaattatatgtaaagaagacttttatagtaataatgatacggctcatttttcatatttgcatgcttattttagcaccatgaattggattccttaacattcagatgaaatctcactttgtttttgataatcatagaattc

SEQ ID NO: 205328 - DNA, 1000 bp, Homo Sapiens
acaatgaacaataaatttaataaaataaaacattgtcttgttttttatctacttattgtatatatcatttatatttcatatgagaaatcatgcctagttttttgggtacttactcttatgaaataacatgatagttttgccatgttagtgtcagtctctcttgatcaattgagacttgactctaacactaaggagctcgattaaaaaaagtaaaaaccatttactgattataccaactagttttatcagaaaacaagtgaggagatctaaaataattctagaagtaaatctaaaggaatgataatttatgatacattaaagatttcaaattatttagtagattaaactaacgtctttcattgcggtaagcctcttttaattgtctagttctgaacaggttaatttttttaaaatctttttttaatttttagatagataaatcagtttggataggtaagttagactggagagacatcctgaaaactaagttttaacaaatggaatcagttaaaagtaatcactgttcattttaaaaataatttcataaagaatctttaatcttgaaagagtaaggcaaatttgttttttttcccccccattttttttttttttttataccagggccacagccatctctgggagttagttttggaacgccattcggctcaggtattggcactggcttgcaatcaagtggcttaggttcttcaaaccttggaggtacactttaacttttctaatatttcattgaactattatatatttgaattgatactagcctgtaaaaaaaaatttctaagagaatctcctgctattttggaagttaaggttccatctggcaaaaatgattctcaaacataattattgctttctaatattagatttagaacttaaagaatcattccatcttctgtgaacagcaaatataaagtattaaaattaagtggtaggcatgttcatgttttcaaagcaatatgctgacacatgaacttgagaattc

SEQ ID NO: 205329 - DNA, 1000 bp, Homo Sapiens
ttgtattgcggcctatctgtctctttagctctaataatatttggtttatatatctcgatgctccagtgttgggtgcatacatatttaaaattgttatattgtcttgctggattgactcctttatcattatatagtgatcttctttgtctcttcttattgtttttgtctcaaaatcgattttgtctgatataaagatagctactccttattatttttgtctcgaaatcgattttgtctgatataaagatagctactcctacggttttttggtttccattgacatggaataccttttaccatccttttattttcagtttacatgtatctttataggtaaagtatgtttctcataagcaacagatcaatggattttgctgctatgggataagacttttggggctgttgtgatggggtaaacctattttgcatatgagaaggacaggaattttgtgggaccagagggcagacttatgggttgaattgtgtccccacgaaattcatacaatgaagtcctaaccctcaggacttctgaatatgaccttatttggaaatagggtcatagcagatgtaactgataaagatgagttaatactttcatagagagctaagtcttgtggaagagacagacttttaaacctgtaatttcaatatgatatggtgaatgccatgatagaagtttattcacagtactgtaatagcatatacaaggggcagttagccttggcaagagatcaagggaagcttcttgtaggaaattatgctggagctaaatcctgaaggatgagtaagagttaaccaggcaaatgaaaggggacataggattgttccaggcagaaagaaaagcgtgaaggtttaaagcaccatgggactaataaaaaactatgaaatgaaattggaaaggcaggccagattgtttcccataatttttgaacaaagaaaatgtaaaaactaggccattgcacttatttcatttttacttatttatttttaatttttgtaa

SEQ ID NO: 205330 - DNA, 1000 bp, Homo Sapiens
ggccgccttcagtgcatccaccacgctgcgcccgacctggccccaaccaggctttccctgagagctcctcagggccccccaccgtggagcatcccagcttctgggtggatcttcaccccatgtgcccaggggctgccccgggttcctgcactgctgtgaacgcagctcctctgtccacggcctccctccgccgagcaggagcagctccctgtgcaggtctggagagatgccccggccgcagctggcctgggagatgggtgtgttcccagggaagcgcgcctggacagtgggagggtgggtctggccgcaacgcaaggaggtcggtgctagttgtgggagggccggggacagcagcatgagggaaacatcagggggcatgggtctggtgtggggctggggctgggccctggacgccccctccccagggctgcaaacggtggtcttctgagagggtgggctgcaaggacgggggtgggtcaagggagagcaaggagagcaagggcctgaggaggctggttccctgcccagcgctgggcgggcagagggtgagaccagccaagctgcacaggccccaggtgggcagggtgaagccaggggccagggcaggtgcggtggggccaggaggcagggtctctgcagtggccgccttctgtgctgaccgagtggctggctgcccatgggccatctcagtgccccctccccaacaaccttctggcccctctctggctgaggggccctccggaggcagctgtaaaatgtccccgaccatcctccctggtcaatgcggggtgggggcgtcaggcaggcaggacacctggtcagcagagctgattgcatgcttcctgcctcttgtcatgggagcccgtcctgcgggcaggattgcctggagtgggtagtgccaggcagaggccaggaggttggctggccgggcttcactgcagagctctgcggcagggagacagggaccctccttcccagccccagcctggcaggggaattc

SEQ ID NO: 205331 - DNA, 1000 bp, Homo Sapiens
ttacctggttattactgttaagtttgaacacaattttatatatttatttaacatttattgtttttcttttgttcatttttgggtgaggctcatttctgtcttctaaaactggcaggaattctacatttatatcggttactaatcatttgtcatttctatgtattgcaattatattcttcaggtttgtggcttttctttttctgttctttttttaagttgctctttcataaatggaatgtgtatatatatatatatacacacacacacacatttcttttttttgagtagctttaggtttctttatataacatcattctccaaaaaagtcacttcaccggggattgtgtgtgggtgtaagttggcaagtttcatgaagataacccttttgcttgtcatgcttgattctgtagtttaagtctctcatgttactgccttatcattcatattttcagcattgggattctaaatatttaatgactttcaagcatttaccctctctttcctagtgttctgtcagatttagtcccaccctcggtgacagtttcccttggctgggaagtcgtactctaggatgtgcttctttgactaggaaatgtagctcagagcttgcctgggagccccagtgatgcccttttcactgaattggatttatgtcctcctatgttttttagttttccctaatcctgcttctcatccacaccaggcctctggtatttccattactgtaataaaaataaaggctttggcaacttctctcaagctgtggtatctgtctacatttctgatgtttttgcaactgttgtgttaggtgttgtgtactgtctgtggcatgatttctagatataagaaacatctggaaagccgagattctgtcctgtatgttcatttcaatgtctaaggtcttgtatgcttgccagatatataaagcactttccatttaactttccagtttccccccatcaatgtggacttaattttccattttaaactgttatccttt

SEQ ID NO: 205332 - DNA, 1000 bp, Homo Sapiens
aattttgaaccttttatttatcttgctttccccggtgtctttcctctttgtattatatttttccttctttgatttgggaattatacattctattatccttaagcttttaatatacatggctaacaaaactgttcagaattttggttccatcttatttttaaaccatcctatattaagattatccacaacttcacaattataatcttattaatataattgaaagcaacatcattaatactacttcatacttttgttctcttgtcctttaaataaacacagactctttacagcttacatcaatcataaatgatggctaattcagttgtagtgattcagtcatcagaaagatagggcagtaacattcactgcaagaaccacaccaaacctttgatgacagctgtctcaagcacatctaatgagtttttctcagcatttccagctgtgctaaatagctgtagcagtttatacttaatctgaagcaggcagtcccaaggtacattgctgttataacgccaattaagtcagtcctcttcattataattctcttcatcacaatctggagttgctccatagccactaaaatttgctaaactgaaaacaacgttgcattttcaaatgctcaaagtcacaagcctcaaaatcatttgtaagtcactgttgccccaaaatgtacagactaaaaatataccttcttccacttaaatttaaacaacacacacttaatgacagccccacacccagactatttcaaggcaatttaaaagatgaattttgtaaatcattgggaggggaagacataaatcctgttgatgtggagggcatgtgactgtgaacagaataaagttactttcctaaaagccagatttaaaaaaagaaaagtagaaaagcaggcaagccaagagcccattaggccttcgtggaacagtttgaattccggttcaacaatactgtttttttttttttttctctaagtgataatgatatcccagctagaataatt

SEQ ID NO: 205333 - DNA, 1000 bp, Homo Sapiens
cagtgctggcaccatgaagattgatggattgattatgatggtggatcaccagcccacaagctcagttttatggtttctagaaagtctattcaagactacaaggcccttccactgatacactcacaaatctgagcctcttgggccagtacattgaatgagatagtatcgttttagtaaggattcttttctctatcaagggaatcttttcaatagtgaattgtgttcttgtacttaaaatatttcatctctaaaggttccattgatgtctgactctgcagaaatgacttggtggtatagacaggaccctgatatagggatctctattgatgacacttgacctgctgctgtttagttatatgttccataaaggcagcccgtaggtcccatctctttactcaggcactgaagtgttccctgcatctggcgcctcttgtccctacatccttacctcctctgctgtcttttacacatccctcactataagtcaagctagaaacctgtgctctccaaatcctgccagaactaattcagaagaaaaacattttatcgcataaaagtttgtatataacaattaagcatgcattgaaatctatatttgcatttaattttctgatagcttgaaaactaatgtaaaacatttttaaatctttttagcaaataaagtttgccccagccccctccagacagtgtgcctttcctggtgttacctgtctctcctttctttgccgtagattacccatacttggtatcagttaccagtgtgtctgcataagaaaaaatttaaataaaaagtgtgtgcaaacattgcaaaacagttttcatagaaaataaaatatttttagagacaagttaatgcttcccaggattaacagcaggtaaaattctaggagacccctgtctctttcccccaagcagagaaggtcactgctaaatatcactggcaggaagctcctgggctacagcacactttgcaaactgcaaaatcacaacagcagaattc

SEQ ID NO: 205334 - DNA, 1000 bp, Homo Sapiens
cattaacacaaggatagtatataagacaagggagtagtttgataagttctacacctctgttggcttctaggaagcaaaacgtttacaaagaagatagaccagcattcacaagagaactgatcggataataagagttttatggagttcatatgtgccacaagctgtttattctgtgtgcttttatatagattacatcatgtaatccttgcaacagcaccatggggtaggtggtgttattactcccattttacagataaggaaatcaaggcacagaaatgcattttgccaacatcatgtcagaaattaatattgtattacaataatcttaatatccaattactaaatgctcattatatgccaaaacttttacatatttaatatttacagcatccttgttactattcttttttttacaagaggaaaaacttgaggatcagaaaattatttaccaagaatcacgctagtaagtggtaggaccttaaataagtcagatttcgccaaagagttgcccatattatcttcttatacttctccgattacctattaaaccaattccagttccacctacaccactccaccaaaactgctcctgtcaaggtctccagcaactccatgctgaatccactagtcagccctcagtcatcccatctgacttatcagtagcatttgatacacttgacaatcctcctccctgacactttctgtcctcccagcacatctcattctctagggtttcctcgtactcattggtcaaagccttagcatcttttgtgcctcctcctctttttcctggcctcttaatgctgcagggcaccaggcctcattctcttgggaattcccccagtctcctggctttaactaccatctacatctataggaaatcctgttggctatgcttccaaaatgtgtctggaatctgccggcttctcaccaaccctacctccaccaccaggtcagagttactgtactgagcctggaccacttcgcagccttgtctggc

SEQ ID NO: 205335 - DNA, 1000 bp, Homo Sapiens
gtcctgttaagtgctactcaaagtgcggtacatggaccagcagcttctgaatcagctgggagctttagaaaaatgtctctttaatttgtgcatgagtcacctggagtcttgtaaagatgagtcttgttaaaatgcagcttctgatcctgtgggtctgagagtctgtatttctcataatttcctaggtgatgctgctggccccaggtcacatgttgggtctcagtgctctagagaaagaaagatggcagggtgggctggctgctaatgttagctcatagtctttgccatccttagaactttgagatgcagggtgttccctcttccaaagggctcaatgtcctgtgagtgacgaggggagatgtggtgacccctgcacccgactctcatcttggcaccagtctaagcagcacttcaccctccctcctcaggagctggagtatcagaggcgccaggtacgggagcccagtgacaagtttgtccctgtcatgagcgacttcatcacggtgtccagcttcagcttctccgagctggaggaccagctaaatgaggccagggacaaggtaagggtgccccaacccccactgcttgccaacccagccttatctaaacaagctccttcacccattcctaccacagacagcccaggagggacaaacccagagttacagagctttgagagaaaaccgtttcttcgctcttaacaagacaagcaatgataaccacataccgcaaagatcatggtccatttatcagatatcaggcaccatgttaagtgttttaatgatttgtcaccacctaccttatgggtttgttgaaaggttatttcccacttgacagatatgaacgctaaaatcagagatgctaagtaacttgcccaagattgcccagctgtaagttatagaactgggttagaatctgacaccacagctcagcagtggacatgattaccatgcctctatctgcttctcacactaacgtgtccatagacctcatgtatggg

SEQ ID NO: 205336 - DNA, 1000 bp, Homo Sapiens
actttttgaaaatggagtatttccaagcattttttgaagacaagagtccattatggtgataactttcaagtccttatattaacaaacacgagtataagttttcagtcagttcacgtgaagtgcactaataaggaagcatggccatttctcatctctctccaaaaatgtcactcatccaaaaccacagaaaaagaggagaacactaaatggtgcccgtccattacacttaacctgcctcttcccctgaaatgcagaccatttctgggaaagctgcctgttcagatttttttttaacttaaagctaggaggttaaactgcatgaagtgtatagatcagaatgatatctgctgtgtctgaacgctcttctttgtgtagattgaaatgatcttatttcctctctgctggttctgggcatgagggtgagtctgaggcaaggagagaagatgagctccggcttctccccatctgcacagctcaggctgagggcttgggcagaccacagctccagacactctgtggtgccagggtggggacctgccaatctctgcccaaacaggacctcttcgctgccatgtccctcctggccctgagcttccaccaagacaggttccagttgctgaggaaggagtccagggttacaggctgtgagtccattgccgaggaccctgagtttttctggaactagaaccagctcagcttgacttagccatggcagttcacagaacaatagaacaacttcctagcctgggcaaaatcgtcctgagagcatccattagcatttcccagccggtctgcagtctggaacacctcacatggatacccgggtttctgggtcaggcacctgtaaccccagtgctttgggaggctgacgcgggaggatcccctgagcccaggagttcaaggtttcagtgagccatgattgcgccactgcactccagcctgggtgacagagcaagaccatgtctcaaagaaaaaaaaaagaaaagaaaagaaacctggg

SEQ ID NO: 205337 - DNA, 1000 bp, Homo Sapiens
aagactccattaccgatgtatttaaatggttttcccagcttggtgagttggcttaaagtttgttctactacatttgtggtccactggttcactttgctgtgttgataagcgttaccaccaattgcgctttctatagcctagaaaacaaagcacaaagcgcgtcccggttaaccaaatgcacccacaccacctttcaatcaggaactgacggcaccccaagaagtgatttatgaaaagtttatttttaatcatgagggtgcctttgcaaatatacttttaatagcattatatttcatttaaataagtttgaaatttgcttcaaaaattcatagtctgtcaaattatttacacattttgacctaataatcacatttcatgttcactactattaatacattttttttcctgttgaggctagaaagtattttgcctattcatttcttaaaagtatattacttttatctactactacctaacatacactaatactatatattagatgaattgtatttgtacaactgacaatatacaaagctatccaaataatcatatattaaaaaatacttttatccagcattgtctgagaacatgttaccacattaagtgcatttttcagataactaaaagccctttatattccaaaacttattttaggtttatgatgagatttttttatttttacttttctgaggcagggtgtcatgttgcccaggctggagagcagtgatggaatcttggctcactgcagccttgacctcctgggctcaagcaatcctcccacctcagcttccctcctgggctcaagcaatcctcccacctcagcttgtccagtagctgggactgcaggcatgtgccaccacgcctggctagttttttgtagagatggggtcttgctctgttgcccaggctgctctcaaatgcctgggctcaagtgatcctcctgcctcagcctcctaaagtgctgggattacaggcataagccacagcacccagcccaact

SEQ ID NO: 205338 - DNA, 1000 bp, Homo Sapiens
gaaatagaaaaggttccacccagcatactttgaagagctattattattcattcatctttagtgcacaagagaaaaagagcaaagtggggcaggtaaggggagataagagatctgtttaggtttactgccttaagtaaaacgtaagtctattgcacagtatttctatcaggttagccttaacaggcctttcatacattgccttcacatagcactaaagctggttaggaacaaaactgttctccaggatttcatgcacctgaatcattgcctttcctaccaccctcgtacttagtctctttcagaaatcttactctttgtctcatcatttttccccactttgagttagatgtggattcacatcctgactctacctatccatgtgacctgagtgaaccccagtgtcatcagctggaacatgggaacaatacaatacctaccttctaaagttaatgtgaggatgaaatgagataatgcatgaacaagaagtgcattacaaggggctccttaaatggttctttcatttcctctctggctctacctacttctcttcctttctagcatcggttaggtcatccttctgtagagaccgtgggcaaagagacaaaggcatcaggcctcctggatgcctcctccatcccagcctggctccctatttgtctaagagaaggaaaccaagccaaggcacaaaggcacagaagcaagcattggctgggcacctgaagttggtcatatagaggagaaaagattttcagcttccccttaaggcctaccctaatgtagcgttaacctaagcctttaaatgtacctcccatcatccccaccatgtaccttgacaattttctgacccaggaacagatatctaccccattccactctacctctctctctggccccacactgtgcttttgctattgtgatttcctctgcatagagctctgtttactcacttctcctttgaaagtgcacaacttggtgaaacacacctttcctgagaagcctg

SEQ ID NO: 205339 - DNA, 1000 bp, Homo Sapiens
gttctcccgggagactccatggcggcctcctcttaaagggtagtgagccttacatgggattcagtggcttcactggcccaacagcccccaggccagccccagccggcatgaaggcagaaaggccgggctgcccacattcagcctccagctcctcggaggaggcagaggatgctactctgtagcaggacggcctcagggaggacgggttcctcactcaaggtcacacagcctgggctgggcgttctcccaggagacctgagcccagggttctggctgccaagtgctccagtgaggacccaggcccagcaagcagacactggggatgtggtggggccccaggagccctgggtcagggtcccaaatgccctcccctactcagactagctcccaggctgatcccctgtgtggacaggggtgagtgccggtcccggagttcatgtccccaaatgacaagcaaccaatacttccagacagatgccttcacgcctgcccactgcgctctgctgagaccctatacaagggtgtgtgcttccaaaacccaaaccgtaaacagcaaacgcaggaaggccacagctgagggagctagggctcccagcaaatgggcagctgcaggtgacacagtaaggagccccagccagccaggaggcatattttacaaatgatctcatctcaccaagagccagggctggtgagagcaaggatttgcttaaaaaaaaaaccaacaacaacaacaaacaaaaaaacagaggtcaccaggatccctgccccgcaacagaggcggaggcaggcgtggagcagcagcccctggcctgggtaacctcgctccccggcccccacagccaaggcccaaacaaccttccagtcacatctcctctgtgactctggacaggctgaaagggaaacgagatccacctggggattagggggcgcctcagggaggccggtgtgggggccacacacagctctgaactggggcccagtggggagacaagagtagaga

SEQ ID NO: 205340 - DNA, 1000 bp, Homo Sapiens
tttaaaaatctaaaaatatttgctaaatatatggaagtggtaggttttcatttaatcaacaaattattcaagaaactacaaatcttgactgttgttttacatgaatatggtacagtaggctaatatattaaaccattattattaacaaatatggctcctaagtgacattaagaagagataaaagaagggatgagcaaacctgtgtactaaaatacttttaaatatatgataataaagtcaaactaatttagcttactttttgctttttgatattgcaatagacttttaatttctctgacatttgaattcacgcacaaagtcatcatgtctctccatccccatgctgtgatgtctcgactataccatgaggagtttgatttctccaaaatttttaaaattatttatttatttaatttttgcaacagaatctcgctctgccacccagcctggagtgcagtggcatgatctcggctcactgtggcctctgcttcccgggttcaagagattctcctgcctctgcctcccgagtggctgggattacaggcgcccaccaccaagcccaggtaatttgtgtatttttagtagagatggggtttcgccatgttagccaggctggtctcaagctcctgacctcaggtgatcccccgcctcccaaagtgctcccaaagtgctaggattacaggcctcccaaagtgctgggattacaggcatgagccactatgcccggcttccaaatcttatataacagtctttcataaaaaatctgaagaataaattgtagtatttatactgtgattattctaattgctctgtaatttcaaatgcagaaaaactggtcagttaatgcagtagcatgtctaatactatgtggttaactaattgctctcccaaccaatatgtaattatattatgagaaataaatctatatatttatgggagtgacagaaacctaaatggacatttcactattttatttgcacagttagaatttgtggaattc

SEQ ID NO: 205341 - DNA, 1000 bp, Homo Sapiens
ccctcctaagaccaaaccaggaagaagttgaatctctgaatagaccaataacaggctctgaaattgaggcaataattaatagactaccaaccaaaaaaagtccaggaccagatagattcacagccgaattctaccagaggtacaaggaggagctggtaccattccttctgaaactattccaatgattagaaaaagagggaatcctccctaactcattttatgaggccagcatcatcctaataccaaagcatagcagagacacaacgaaaaaagagaattttagaccaatatccctgatgaacatcgatgtgaaaaacctcaataaaatactggcaaaccgaatccagtagcacatcaaaaagtttatccaccacaatcaagtcggcttcatccctgggatgcaaggctggttcaacatacgcaaatcaataaacgtaatccatcacataaacagaaccaacaacaaaaaccacatgattatctcaatagatgcaaaaaaggccttcaacaaaattgaacatcccttcatcctaaaaactatcaataaactaggtattgatggaaaacactgcattttctcactcataggtgggaaatgaatgagaacacttggacacagggcggggaacatcacacaccggagcctgtcagggggtgtggggctgggggagggatagtattaggagaaatatctaatgtaaataatgagttgatgggtgtaacaaaccaacatggcacatgtatacctaggtaacaaacctgtacgttgtacacatgtaccctagaacttaaaatacaatttaaaaaaaacaaaaaaggttagagtgatgcaggggccatgagccgaggaatgtaggcagcctctaaagcttcaataggcaatgaaatacattctcccctggagcctctagaaggacaccgcctgccagtgtcacctatgttggcttcaggtctcctgtaagaaccataagacagtaagtttttgttgttttaagccact

SEQ ID NO: 205342 - DNA, 1000 bp, Homo Sapiens
tcactcatttgttttggaaacactcaatatcctctttctagttgcttgaaactatacaatataatattgttagctagactcatcctacagcggcataaaacactagaacatatttctgatacctaggtgtaattttgtagcctttaacaaatctctccctattccccctttccccactcttccagacctggaacatcctccatattactttttacttctttgatataagcttttttagctgccacatattgttactggcagcaaatccatatgggtctgcagcaacctcaattgttgcttccttggacgaaagattttaagaggcaggaggcaaaaggacagcaggagtgacagtttatttaaaagctttagagcaggaatgacaggaagaaaagcacactcggaagagggccaggcaggtgacgaaaggcaagtggggtggctggcaaaatggccgaataggaacagctccattctgcagctcccagcgagatcaacacagaaggcagatgatttcttcatttccaactgaggtacccggcttatctcactgtgactagttagacagtgggtgcacctcatggagggttagcagaagcaggctgggacatcgcctcacctgggaagtgcaaggggtcagagaactccctcccctagccaagggaatccatgagggtctgtgccgtgaggaatggtgcactctggcacagatactatgcatttcccatggtcttcacaacccacagaccaggagattcccttgggtgcctatgccaccagggccctgggtttcaagcacaaaactggatagccatttgggtagacactgagctagctgcaggagctttttttccataccccagtggtgcctgggatgccagtgagacagaactgttcactcccctggaaaggggactgaagccagggagccgaggggtccagctcagtggatcccacccccatggagccaagcaccctaagatctactggcttggaattc

SEQ ID NO: 205343 - DNA, 1000 bp, Homo Sapiens
gatatgtggcgttatttctgagggctctgttctgttccattgatctatatctctgttttggtaccagtaccatgctgttttggttactgtagccttgtagtatagtttgaagtcaggtagcgtgatgcctccagctttgttcttttggcttaggattgacttggcgatgcgggctcttttttggttccatatgaactttaaagtagttttttccaattctgtgaagaaagtcattggtagcttgatggggatggcattgaatctataaattaccttgggtttttaatagctgaaagactgcattgccattacctggttcttagatgtcatggaatctatgtgattcaggccacgtgctgaattataacccaaacatagtggtacttaaaagcccctgtagctctcatgcttctcctaatagaagcttttggctgaaacaagaaacgtttttgaaagaagcatattgtcattatccttttgtgaaattttaatagccagatttgtattcttattcatatgtaacaaaaaccttgctagcacagtggtgataacagaggtacctgcaagtaaaactgagggttttttttttgaagtaaaagaaagaaaaagcagctttgaagcaggtacttacacaaatactaccttgatttaccacatatctgtaatggatggcctgggagtagtgactgcagcctgaaaagtaatttagggcatggggtattaactgatgaccttatccataaaatattttagttatcctgtggaagttctgattttagttgacaaaacagaagcttctatagacctgtatattgttgagactacatatattattctaagaaggcttttgaatagatttgctgagtgtagttgatgaagatggcccttttaaatattagggaattcatactagatttactgtttcagttttttcattacagattttgagaggcttctcctggtagtaaaatgtcagatgaaactgttactgtagaattcc

SEQ ID NO: 205344 - DNA, 1000 bp, Homo Sapiens
tgttgacagaagatggggaccgtgagccaaggccttctaggatctgggaaggacaaataaacgaattctctcacagagcctccagaaagggatgcagcctgctgatgccttgttttagcccagtgagatccacatgaagcttctaacctacaggattgtaagatacatttatgctactttaagccgctaggtttgtggtaatctactacaacagcaattgaaaactaaaacagttaggttttcagttacttgtaaccaaaagcatcctgtttacatcataactccacttattaacatagctaacagtctttttcaaatgtattattattattattttggagacaaggtcttgctctattgcccaggctggagtacagctgaagtgtgatcatagctcactgcagcctcaaacttcagggctcaggcaatcctcctgcctcagcctcctgagtagctgggattgcaggcacaaaccaccatacttggctgtagctaacagttattaagcaggtcttctctttcagtatgttgctaaatgcattatgcattctatctaatttaatcaccacaataattctatattgttgaaactattagtcccattctaaatataagaaaaactgagtctcagagaggtgaaatcacataactagtgagtgaggagcctggatttgaattgaagtttgcttgaccccaaagcctgtccacttttctctacatcctgccgctagctctcagttcacccctctgtggtgaaggctggctcttctgtatcccaggaaaggaaagtggttctagctgcccaaaggacagtagagaaatgccagtgtttccaaatctgcatgtcaatgctcaccttaactttgaggcttgccctcacccacacgctcctcttctctactccaccgacagtgctgtcatttaaaaatcaccttccttatagaagaaatgtcattatgttcacaaaatctaaaacacccaaagagaagataaagaattc

SEQ ID NO: 205345 - DNA, 1000 bp, Homo Sapiens
tcacacctgtaatcccagtactttgggaggctgaggtgggtggatcacttgagatcaggagttcgagatcagcctggtcaacatggtgaaacgccatctctactaccaaaaaaaaaaaaaaaatacaaaaattagctaggcatggtggcatgtgcctgtagttccaggtacctgggaggctgaggcaggagagttgcttgaacctgggaggcagaggttgcagatcacaccagtgcactccagcctgggtgacagagcgagactctgtcttaaaaaaaaaaaaaaagctcctaatatgtcagattttaacccaaaggtaaattccagcagggcatgctcatcagctagagcggcaggtctcggcttcactgtgtaagcatcggctggggagcttttggtaaaatgcagattcccaggttcaaacctagaagttcagacttggcagctctgggatgatgccaaaggtacatcctgcagttgctgtgtccccaggtcagcgcagagacaagcaaaaactcaaagcttcctccctccctcaactcccagccaagactggacggggcaggggaccccagaatcctgaaaacagatagccacatggaaacagtgaccacagcacacttgaactttgtaagcacagcagaagcgtgtgggatgggctggcccatccagagatggggtgcaagaggcaggaatctggcctcatggtggctcctggcttcagccccagcactgccaccagagggagggccgtgtgttttcaggggtgggcatggcaggggtgtcaggcaaacactaacacagtgaagtgcaactgccaagtcttccagccagcccgatcctcaggctcggaaacggtcccagaggaaaagatggttcagaagagagagagagtaagatcccggggacatctgagccaaaccacacgcactttccactgctcagcagcccctgtcccagacttccaaacagaattccattttctgaatctagacagcca

SEQ ID NO: 205346 - DNA, 1000 bp, Homo Sapiens
tggggtaggtttactgaaaatagaactgtaccagagaattgcatctgaaatatgcaaagctcacctggatatctcaatagcatggcaataaccaccctataacctttttaaaaataaatctcagtggaagtgatgctgaaatctctccttaaggtcctctttctcaatcaactataattcagcaaacattaaacttcagttacccggaaaaagattaggtaataaatgtgttaatcatagactggatcataatcagcaccgtcacctaaagaatactcaccccttaagtaatccaaaagaaaactaagaagcaaaaatccagggtttgtttctctataaccaaaatagaagaatgtccatagtcattactgagcattaaccatttgaagatctccttccttttaacctcaagacattataatatctcttccttactgtcaggagacctagagtcctgtcctggctctgtgcctatagtcataagttgatcttatccttaaaaacgtaaaaatctttgtctttattttggccgagcatggtgatatatgactgtaatcccagcactttgggagactaaggcaggtggatcatttgaggccaggagttgaggacagatcgcttgagaccaacctggccaatgtggtgaaaccctgtatctactaaaaatataaatattagccaagtgtggtggcacacacctgtaatcccagctacttgggaggctgaggcacaagaatcgcttgaacccagaagtcagaagttgcaatgagcccagattgcaccactgcactctagcctgggtgacaaggagtgagactctgtctcaaaaataaaataaataaataaataaaatccctgtctttattttgaaaccagaacaaaggacacagtgtgatctttgcaaaatcacagaatcttgagctgaaagaagcttaaagtttatcttgctaagtagttacttttttaagcacaatttttatttttatttttattttttttc

SEQ ID NO: 205347 - DNA, 1000 bp, Homo Sapiens
tgactctgaatttatcaagcatttgactttctttatcaggagatgaagaaactgtgctttggatccatcatgattttacttatccagcttactttttacagttattaaaatcttactcaataccttctctctgggccaaactcagaagcaggcattgctgactagacagtgaattcaactcagtcattctgagtttgactcttgcttctgccttcgtctcccactaccctgcttcccccacccccaatagtgctgtgcaagtcaaagaagataaataaatacaaaataaaataagatctcaacacaaatacatcccctttctgtgccaccaaaatgctttctgagcgatttgtattcattcaggaccaatgaaaaggaagcctcctaccctatagctgtatagttgtggggtcccaactgcagaccctcccgtgctccctgagttgttcttgggacacctaaggacctcaccacactgttgctgagacatgatgtgctgcacatatgataagaaggccagacaggctgaagcatctggagaaagatctcttttgaaacaaaaaaaaaaaggaaggtaatattaatattattgttactttaatataccataataaatctagtcataagacaccataactaactcttagtccatagtcacttgcattatatgataatccagtgctgaaatataaagaaatttctgaattaagtacccagaagtgccttccttctgtactcctccctctctttcaaatggctatcattgatcatataacacccccacctccttgtcttaatatatttatctctgtaaaactagctcaaccacagaagggacatctagaaacagcaatattgatttggtttggcctgtttgtttttaaggactttccagttgctgaattctgaacatccaatccgagtccttggaattctgcagacttctctggggtggagtggcctcaccggaggcttggttctgttttctctgtggcaattg

SEQ ID NO: 205348 - DNA, 1000 bp, Homo Sapiens
gcctgtccagagattctggactggccatctggcatgttctgtgggcaggcttgctgctggagtcctcaggcaggctggtctggtgtctgggtcagcaggtaggtggacccgatgtctgggtccatggggtttggcctggagcctggatccaaacagatgggcctgttgattgggtatgtgaaggtgggcctggagcctgggtccacaaaagcacagctggttcctggatctgcgggagccaacttcatgtctgggtctacaggggctgacatggtgctgaggtggacctgaagcctaaatctgcatgtcaagcctgggttctgggtccatgggggctggcctggatcctgggtctgcaagggtggtcctggagcctcagtccacaggagttggtttggcaccaaagcttactagggtgggcctgaaccctgggtcagctagagcctttggccatgaggaccaccctggagcctgggaactgtgtggtgctggggccggtgtggagcctggattctctaggcccagcccagtactgggatctactgggatgggcctggaccctgggtctgttggagcatggggctgcagggaccagcctgaagggtggggccacagagatcagcccaccactgggcaggcctagagtctgtgtctgtgtgtgccagcctggtacttgaatctagaagtgctctcctggtgtcggggcaggcctgcggcctagggctgtgtaggtcaacctggttctgggctgggctggaacctaaggtgggcctggagcctgggaccacatggcctggcctggcactgggtgggcctggagcctgtgtccacaaggtcttgctggatgctggtctgcaggtgctggcctaatgactagtgctgtggaggctggcctggtgctggggtgggcctgaaacctggggccgggggggccagccccatgctggggatggtctgggacccacggccacctgggctggcctggccctggaacaagcct

SEQ ID NO: 205349 - DNA, 1000 bp, Homo Sapiens
ctggctgtacagtaggcagtcacagactatggtgccagccttgggtatgaagggcccagttcaatgaagaaagacattgagacatcaccacatggccagcagcagcttctggtgcacaaatatctggggaggggaaagcactttcagtgcccaagtgcaaggagctgaagtaggcctgctggaaaatgccaaggtggtgcgctgtctcaccactttctgcagggccagcagaattcctctgtgagggaatctgcctgggtgatggaggctcaccagtgcctcgtgaccagaaggccatctgcttcttcttgatcaggccagtgcttaatgctcagatctctgaattcaatgtaagctcaaggtttcgtgctgagcctcttgggattgccaacacctcaggggatacattttccagctcctacccatataccagtctcccagctcagcattctcatttggatcaaaagtaatttgtgcaagcctgatttgttaacacatcccaaatctgaatccgtgtgccttttaaaggtggcaagctgccatttatgagccatacgcacctctccttcctcatcaccactgcagtaatcccaagaaccacaggcatgaataaaagcccgaacttttcgtttttggtgacagaaatttctcttacaagctccaggagatgatgaggaagacagtgttctctgttttctgattttgcttaattttttaaaaatgagcctctcccttgacttggtgacacagctgtgatcttatctggccggcagggggatgctccaggtaggacaaagagtgctttgttttgttcttacagcagccacgcataactgggctccaaaaacgcaatactcctcaaagggagagtgagagagagggagagagggagaagggtgtgtgagagagagagcggagggagagagagagaggaggcagagtgagaggtgtgtagtggtgtgtgtgtgtgtgagagagagagagagagagagagagagag

SEQ ID NO: 205350 - DNA, 1000 bp, Homo Sapiens
gtgagtaactttgagctcatctggggaaaaggtgagaaaaagacaagagaatattctttacaataaatcacaactgtagggcagtgtacaaattaaactttggaggaacaagagagaagagagccattaatttacaaagggaaactcaggcatagaatataaggtgtgatgagtttgagtctagcgggcgccttgaagagactttggagaaagaaaaaagcttcatgttttttgcttaatgaaagaacagtcaagaactttacctgtgagcttttctttaaaaactgcaaactattattgaatgttctaaccatcttttaggataatttttttccagatgaagtcaaattatattcttttttcctaacttagggtttagctgttggaatccttctgtaaaaggcataattgccaaaataaccacaggtttaatacctgattatatcagaaatctcagtggaaataaaaatgttaatgtgggatatgggtataacatgcactaatacacagtatgagaacatctgtaactttgtttttattcttagctcaaaagttaaaagcaaggggtttaatttcagggtaaagaaagtgaaaaaccatctgttttccttagatgttcctaaagcttatgtatattatttctcgttaaaaataagaacatactaaaaagttgagctacagatataacaatagcatatccataaggcaatagaatacgctacaatacaaaataaaaacaagaattgaataactgtttaaacagcgaagttacaaagttctattattaaagccattattatttccaatcatatttgcttatttgaatatattttccttttttaagcagtatatttcctttttcagcaaatagctgaacttttaagaaaaaaagactgattaaagtgtatactcttatatgggtatgtgtgtataaaaaacctgattttctccttttcaaaaagtcagtggccaaatgaatttagcacacaataatgaattc

SEQ ID NO: 205351 - DNA, 1000 bp, Homo Sapiens
cattggagacagaaaaccccgcctctccacagtcaatacttcagtggcagctcaaacttctgaactttagcgcagctaggggtatgcaagtctgtgcagaatacagacttctgggcataaagaaaaagaacttgattatgaattatcaaaccatacttctgaaactacaattttgagaaggggcttaatacagtagatagatagatagatagatagatagatagatagatagatacatccaacattcctagatggatttaggaatgtccatcatttaaggaagtatatttccaaagagaatataacggacccggctattcactcccagcttccaacaaaggtgaaacgcagccatcattgtacctgttactgtcactcctgcctgtcaccagcagccagagtgtggggctggatcctcctctgccgtatcactgggagcccctgggggttattcctctccaaccttgaatgatcatcctatcacaaagagtcatcagagagctacgctagtggcacttagctgcaggctctagccctgagcctcctctgcaaactatctagagccacagcttgcaatgcatttgggtgtagcatttcacccaaggctaacttactacaattccacggtcctaggggtgttaaaagtccctgcaactttccatcatagagacttgggtcggcatctccttctcccaagcgttatttggggtaaggcaaataagcaacgagtagagaactaggtctgtagcactttgctttactcagcatcgatcagatacattaaaattaacaaactgcaatagaaaataaactgattaaaaattttaaaaccagaattttgcatcatacatctactccaattcactgagattttaagaagaaggctctacaagcttactgggacaggaacacttgtagaagatagtcagaagttctacaaagtgttactaagataggcagttcatattacaccatgtaaataatgacagagaacaggtat

SEQ ID NO: 205352 - DNA, 1000 bp, Homo Sapiens
cctagaaatgctagcaccagcagagtataatcactggtataaagggtgttatcccagtgaagaataataaccaaacagccaggtcaaggaaaatggataaaactatgaataattagatgagcatgtcttctcctggtggaagaacagaagggggttgctagcttcctgacagcacggcctcttaccttctattccttctgtctccagacaagggcttgaccttatattagttaatttcagcaaatacatgtgaacaaaggaacgaattaatcactgactacttgattcaattctcaagggatacagaacagaactgcagaagctgttcaaagaagaaaaggaggattctacatcccaattagaagctagaataaacgatcagaactatggctaattagtcaaagggttagggacttcttaggccaagaacaacaatgtgtctgtcagtgtccagactcttgggattcttaaagaaaagataagtgttgatgaccagattatgaccaacccatggagctttctctgcaggaacaatgaatttattagcacttagggcctttaggcaagcatgggcaaatcataatcctgggaacagcaggtaaattctcaaactcctattcactttccccagagtccgatgttcagaatgcagcaagggagtaaatgtgggcaaggctaaaagcaattttgagaaataaaaacaatgtttatatcctaatgtttaaaaaaaattacttgcaaagcttttatactgtattactttatttggttaatttgttacaggattatgatttttataaatatgtcagggctaatgttctgccattcagttgacatccgctctgcatataaaatgcaaatgccttagcttggcatacaaactctgtgtggtatgttatcaagttgactacttttccagaatcatctcaaatccttttcatatgcaattaatgctccagccatactaaatttatctttcaggtcttggtgaatttgcata

SEQ ID NO: 205353 - DNA, 1000 bp, Homo Sapiens
tatctgcaaggtgtttttagcagcatgtacttggttgtttagcatctcctgtgttaaaaaaaaaaaaaaagcaaccctagaatctatggatatatggggcatcgcttcctggaaaatattatgcatcctttgtgcctatttgattataaaatggaagtgtttattactgatactttttatcttttgtgtaagtaatgtgccagaacttatttatcgtagtaggaagagatccagtgaatactcaacctctcaccttagttctccctgagcctctagacactagacttttatatcctaaaaatgattaaacatttctatttcatatgagtctaatttgacagttgaattatttgtaccatctcaccgatgataaaattagcagttatattgtgtagaatatacagataggtaggttataatttttctatgttaagtttatatagagaagaacaaatgccactggtaactggtgatgaagcatagaacaatgacttttctacatatctaattcaataaaagagtttacatgtggaaattcaacaaagtaactatactctggcaatgcacatcaacttaactggtgggaatatttcctgaggtggaaatacttcagttttatggtataatctaccaaggatgagtatagtataatccaccaactaagataaattgtctccagttttattaatcaaatgaatattatattggaagtgagcatttaatatttatatagttgtctacttcaagagtttctgattatatacatcagaaaaataaaatttttgataataaaatatattcaaaggaccctcccaaacatcccacagtaacacagcacatgatctaacaaccctaatagtcacaacagtccacataatgtctcattgtatatgcttccggttttaatttgaaaacagcctgtactttctcatccctagtaggcagaaaagaatagctgttcaccatttcaagcctctttatttgtttgaaaaatgaattc

SEQ ID NO: 205354 - DNA, 1000 bp, Homo Sapiens
aggcctaaatacataaataaagcagcagagatgcagttgaatgtagaaaaaatgacatcatcaacatttagggaaaaaataaataaatgtagaaaaatatttttaaaaaacttttctaaggagtggaagggggtacaagaagcccttaaaataaattctttccagttttaggggagcttattaatatcacattaacatttagttgagttgttttttgctgacattggaactggagctctgtatcgtattagctactgaattttactgcataagtccctccccttgattagctgaagggagtgagaatcctttctaagtttgtttccattctgtttggactgcattaagacatcagtccataattacacagaaccaagggaaaagcctataaaatcagatcaactaccgtgttgttagtttattccgttaaccatctaaattcaattatttttaatgaaacgtattgtgatataacttatatataataaaacgctcctgttaaatgtacactatcagttttgacaaatgcatatgatcatgtgaccaccatcacaatcatggtagagaacaaccccattaccccccaaaatttcctgtaatccttcctagttaatctttctctcaccgtcagcctggtctgctttctgttactatagattagatttgtctgttctagagtttcatacaaatgtaatcacgtcgtatgtactcttgtgtcagtttctttcattcagcataatggatttgtgatcccccatgtcaccatgggtatcagcagatcattcctctttactgctaagtagtattccgttgtatggatatcctacaatttgtttaaatttgttgatccatttgtgtattgttggacatttggcttgtttccagtttggggactattatgtatacagttggtatgtacatacatatacaagtctttggacatatattttcatataccttggataaataattaggattggaatggttagatcacatggta

SEQ ID NO: 205355 - DNA, 1000 bp, Homo Sapiens
accacctctcatcccatgctccctatgaacatacttcgactcatcttttctaacctaagtaccctcccctgcagtcaagcatgctcttcacagccttcataaggcccttgtgctcacctctattgcagcacagatcacactgcattataaaggaccatctcctgtctctctgtccatctttcagagtttgctgtattgatcttagtgatgtcagcacgtgacactcagctagacaaagaaagcaggctcaataaaggctggtagaattaagtaaagaattgtataaaggcattaaatagagatggggtacaaatatgtcccaggctgcctggtatagtcctggtttaggccatggtcctgatataattactaacaacaccctctttcactgtcaaaaatatctcctttggacaatacattataaggtcactctaggtattagagctgtgattctcaccctatcaggcccaattttctctttgcttaacagttattttagaatgccctatgcactatctttaaatgggattgataggcaatagaaactgcccataacagaatttcaaaaaaaccattgtaataccctaaatagaatgctaaatggaaaatgaaggagattttttaaaaagtagcttaaactaaaattatgtgtgcagtattttgatgtgtaaatgcttaggtcttacacttctggccaagatggagtaacagagaccaaaattactttctgacctaaaacaacaaaaatattggacaaaatatatgaaactatggccctcaagcaacaaagggaatcaatcactggaatcaagcatcaaagggcagtgatcctcaagagatgagaaacaaatgaggctagccccacaattgacctcccaaacaccttagaaaactttccaggccacagcacaggaagaaagaatgcagatggagctcagagatcttcctgagttgagaagacagaactgtgagtctgggaaggcaaatgtggctagaattc

SEQ ID NO: 205356 - DNA, 1000 bp, Homo Sapiens
aaacctttagattatatagatctaaaaatagacatcatggatgctgattggaaaccctcccagtcattcatatgagagatctcaatttgtgttacatagaggggcagctcacttctgtcttgttcgccagttatactactccccagagaagctcaataaattttataggaaagtttcctccttatgtggaaggagctaagctcaatgactggtgtgtctgatataatttagggctccaagggagtacgtctgccttgtggaataacctatcaaaagtaaatgtacagaaactttcgatcttggttgatttggctatgtcattgaaactgctcagcactggaccccgtgaacccagcctgtctgctttggaattaaactgctcccccaaactcacattcgattcactgttaaagcggccttttgtgtgtctcactggtagtggcttctgggctcgcctgctgttgttccacggtttccaccgctggccctttgaaacccccaaacttggacgtggttgagtttttacatccctctttgcctcttctgttgacattaggaaagcagacctgccttctctttaggcttcgagtggaacaagcctgccagtttcctcagtctttcagctagcagtgaaatacattttgcactggcttttttactcagtgatttacactgggagacgtggctgggtgatgtccagtgtccttttgtctttgtgtttatttttcttccacatttaatgtatttaaaggatatattgtctttatggttcactgggataaggagggattggtgcaagttttaatgagaggtgccccagctctctgtgttgagctgagaattatcttcttggttagatatctttctttctttccttaggtggcaggaggcagtgttttgctgctttttgaaataatgtttctgcctaacgatttctagaaggataccgagaggacattcagcttcagggcatcatcagcaactttttctcctgttgttt

SEQ ID NO: 205357 - DNA, 1000 bp, Homo Sapiens
cgcagccttatgagcaaccgaggtggggcacctgtggggcaggggaggtgggccaggggtgggagtatgtgttgtaaattacacctgttgttaggtgagttgttgggcttcccagaacataagaaaaaaaaatttggggccgggcgcggtggctcacgcctgtaatcccagcactttgggaggccgaggcgggtggatcatgaggtcaggagatcgagaccatcctggctaacaaggtgaaaccccgtctctactaaaaatacaaaaaaaaattagccgggcgcggtggcgggcgcctgtagtcccagctactcgggaggctgaggcaggagaatggcgtgaacccgggaagcggagcttgcagtgagccgagattgcgtcactgcagcccgcagtccggcctgggtgacagagtgagactccgtctcaaaaaaaaaaaaaaaaaaagaaaaaaaaaattgggttaactttttttttaatggaagtatgacctgcataaagtgcacaattttattattattattattattattattattattattattattattgagaccaagttgcactctgtcgcctgggatggagtgtggtggtgcgatcttggccactgcaacttccaccccccaggttcaagcgattctccttcctcagcctccggagtagctaggattacaggcatctgccaccatgtctggctaatttttgtatttttagagaagacagggtttcgccatgttggccaggctggtctcgaactcctgacctcaagtgatccacccgccctggcctcccaaagtgctgggattacaggcgtgagccactgcgcccggccaaagtgcacagttattatgtgtgcagctcaataaatgtttatattacacccctttaagataaaggtcattacgagcatcctagatgtcctcttctccccactgccagtccagagtcaaaatttcccttagttctgtggctttatatttgcatttgctgtgaattc

SEQ ID NO: 205358 - DNA, 1000 bp, Homo Sapiens
cacactgcttcttcccaagacacatactaatggggaaagggagggtgtggatcaggtactatgcttattacctggctgacaaaatcatctgtataccaaaccctcgtgaaacgcagtttacctgtataacaagcctccacatgtacccctgaacctaaaagtttaaaaaattttaaggtaaaaacatgaaattatccatagaacatattaaattggaatttcacttgaatcaaacattgctcaggacacaatttattgagattttattcctctatttattatataattacaaggaatgaaaatcatgagcagtgtttcaaagcattcatctattaactggaaggttttaaccaaatgcatctctgctgctttcgatcaggccaaggacaaaggttaaacaaggtaacttgcccatatgcttaggaagcactttgaaaacaagaccataacttttttttttttttttaagacggagtcttactcttgttgcccaggctggagtgtaatggtgtgatctctgctcactgcaacctccgcctcccaggttcaagcaattctcctgcctcagcctcccgagtagctgggattacaggcgtcagccaccttacccagctaatttttgtatttttgtagagacagggtttcactatgttggccaggctggtcttgaactcctgacctcaggtgatccacctgcctcggcctcccacagtgttgggattacaggcgtgagccactgcgcccggccaaccgtaactattctgtagaaactggtatggttagtcaaaaccactcatgcacaaagcatactatcagattcactcacagtgattttcctaaatgtttatattaattaaatggcctaatgctgccataaaatatttctcttctgctgtctttcttagcccacataccatgctaaatgtcagctaggagagctcagagggcagtccctgattttaatgagttgtattctgaaagtagtttagaaatggaattc

SEQ ID NO: 205359 - DNA, 1000 bp, Homo Sapiens
ttagcaatgaaagcccattaggctgaatcgtataaaatagccattttgtaagccaaaagtcaaaaaataataactccatatggtcccacctgtcacttgttgccagagaggtataaggaatgctgaagagcagataataacctgtaggactgactggatcttccctacctgaaaccgactccctctccaacatctagacttttttctcttccttatattatctgaaagttcagcatgtagggcagtgaagtaagccaaagagagtactattgtctagaaattcacattctaataaagattaggtctacttgctttttctctgagcatgaactagaagtgggacttttgaattaagagctgaggaaagatggtgagaaggctgttctagagcatgggatcctgggttgaacagcagaagcagccaggcaggagcttgggggcactggagagaggaaactgaaagcagagcaactcagttccgcaaagagatgcgcctacactgatatttttgcacaggacattccctagagttgggcttgaagaggagaggaaaaatgcttccaagtggaagtcacgttggctaaactgagttcctacagatgagtgtcttttttccttcttctgtgtcttttaaccagaaatctactgacagaactatactttccctgaaacagaaaagacctttaatctccctttgttttcagaccattctctctaaggacttcaagggacaggtataccaatgttatgtttcctagggtggagctgattatggcctgtgtggttaggttacatgggaacataggagagaggtagagaaggcacacgaccacctctgtaacatacaaatctaagtagctgccatctcctggggagagcactgcaacctactggaagacacatggacttgaagggtaataggtgccagaaagtctaggaataggaacagagatacagcatttgaactatttatccagcaggttatagatgacgggaattc

SEQ ID NO: 205360 - DNA, 1000 bp, Homo Sapiens
gcctagaattcaactgctttcagaatcattcatctggctctttctctatggagatttgtgttgtcttttcagttttcctggtttcttggcttctcttatcttcttcaccagatcaggaagactggagcatttccatgcatgcccttgtctctcctgagtgctctgtggactgcacctagctacaaggtaaaattgcaaattgagaaactcagtttcttatctaccttcctccaagtagcttccactccaccacattctacctgcttatggccgggtgtggtggctcacacctgtaatcctagcattctgggaggccgaggcaggcagatcacctgaggtcaggagttcaagaccagattggccaatatggcgaagccctgtctgtactaaaaatacaaaaaattagctgggcgtggtggggtccacctgtaatcccagctactcgggaggctgaggtaggagaaccgcttgaacctgcgaggcagaggttgcagcaagtcaagattgtgccactgcactgcagcctgggagacagagtgagactccatctcaaaaaataaaataaaataattcagtaccttcagaattgtaacaaaaaaaattgttttcttgtttgaaccgctaagattctgttctacacatgtgtagttcagatatatatgagtcagtgaagtggggaggcagaatttggggatttgtttccagtactttcccttctgggatttcccattcttttcagtatttatagcttccaggcttattttttctagttttccagctagatatattttggagttttccaggtacattccctgagctgtcacttgcccaaaagaccgaacctagcccctcaaacatgggaattatttgtacaactcctgtctccccttatagcatagattgtctgtaagaatatatttgcttctgttcagtattttgtacctttacgtagtttttttttttttttggtccaggtttcatagttattgtctgcagagag

SEQ ID NO: 205361 - DNA, 1000 bp, Homo Sapiens
gacctagcaaattagaaactgcattttaactgttttaacaagcccaacaggtgatctcaagttgcagaatctctgtaataagaactcatgccaggcactaaagaagtaggtcttttctgggggcagctgtttccccccgactgaacatttatattagaacagtttcaaagaatttcaggccccttgaaatagtgctttagttattccagccctgtccatggggtcgtggcccagaaagctgaaaacaggaatagatgctgatgtgatctgtattcgtttaaactcgtgtctggatcagccctgaatgtgagagctggaaggggcctggagatgaccttgttccagcctccccaccttcagatgagaattcagagaagcaaagtgtttttgcctgtggtcacctgtgagtgtaaaaggatgtatcctggtaccagtgcagaaaagtcttattagggctgagttacaatggaaatccttgtctcttgactcctggtccaaggcctcccttccccattagagggaacccatcttccagttgataaatataggtgttttagaaatttcaagtatcttcttcattccacattgtttgtggcacatccatgggctgatggagggggaggatgggaaaagcgtggttttgccatgcttatgttctgagctttcccttgcttttataacaagttccccctcctcagcaaagagaaatcatacacactaaagtacttatttctacaacttgtcattacacatttattgatcacctgctaaatgtgcctggcactgtgctaggtgctttgggagttacatggatgaatgaggctcagattgtatcataaaaatgtttattactagggtgaccatttcatttatcatccaaaccaggacaccttttgaaagccaaaggaagcgttgataatatatgccctgggacaatagatgtaaactaggattgtactcagcaaaccaggatgcatggttacctgcttacagatgaata

SEQ ID NO: 205362 - DNA, 1000 bp, Homo Sapiens
gatccctagaagccaaggaaagaagcaggaaacttgttaagtcacatatctttgataaaaagtaagcaccaagctaactgaatcactctctaatttctggatttaagtagattatttaataggatcagtaaatgacactattgtaggggaaatttttatcaaccttctttaaagttgagaacttaatagtaaaggcattcattgaagaattagatgaaatgatgttttctgatgatcagatttaacaaattagattttagagactctagagaaatagttggaggcatatgtacagctgacccatgaacaatgggaggtttaggggcgccaacccccgtgtagctgaaaatcatataacttttgactcttccccaactaataatagactactgttgaccagtaaccttaccaataacataaacagttgattaaaacatattttatatgttatatatattatatactgtattcttaaagtaagagaaaagaaaatgttattaagaaaattatcaggaagagaaagtatacttactattcattaagtagaagtaggtcatcataaaaatctttacccttgtcttcatgttgagtaggctgaggaagggaaagaggagtgattggtcttgctgtctcagggatggcagaggcaaaagatgtggaggagagggaaggggaggcaggagaggcagacacactcagtgtaactttacagaaataataatttctgtccaacttttttgctttttcatttctctaaaaatgtttctataccatggcaccaattcttcttccaccgttggctttaattttagtgcctgtgtcataggagggtttgtgtcctaaaaataaatcaaaagcagtcttggataattgtaacccttctgccagattgtctaaagtagatttgttttctggcactgcttcttctgctgcttcctgaccgtctggcactggtttggaagcactcttcttcatcaagttgtcttctgttaattcctct

SEQ ID NO: 205363 - DNA, 1000 bp, Homo Sapiens
caacctctagttatcctcactgcttattatacactaattataataaattagcatgctaaaagagactaaagagactctcataagcaccatgatggtttacagatgccatgacaactcacaggagttaccctatatggtctaaaaaggggaggaaccctcagttccaagaattccctgcacctttcctggaaaactcaataataattcaccccttgtttagcatatgatcaagaaataaccataaaaatagccaactagcaacccttggggctgctctgcctatgaagtagccacccttttattcttttcccttcttcatagacttgctttcactttactgtcagcttgctcttgaattcttttctgcatgaagtcaagaacccatgtgacctcccaggttgaggttcaattttggggttcaccctgtgacattataagatacttgattggtagtttttgttctttcagcaccttgaatattttatcccattgctttctggcctccattgtttctgatgaaaaatcatctgttatcttattgaggttcccttgaatgtgataagtcatttttctccttttttgggagtctttcccccatgatttttgtgtagagtggggtcttgttatattgcccaggctggtctcaaactcctgggctcaagctatcctcctgcctctgcctacgcctggctcatttttctcttgctgctttcaaatttttccctttgaaaatttctctttcaacatttttactgtcacgtgtctgggtgtggatttctttgcatttgttctacttggagctcttcaaacttcttggattgtagatttctctgagcctctgtttatttttcttctttcttttttctgtttgttctttagtcacataatctctatcagtccatcttcaagtttgctgattcttctgctagttccaatctactgttgaatgtgtctagtgaaattctaattttagttattacactttccaaatttagaattc

SEQ ID NO: 205364 - DNA, 1000 bp, Homo Sapiens
gcttattagcaaaaagccttttgaaggcttcttttcaaaagctgcaagtacccagtagaggccatggtgatataaaaaaggttgttcttctcttagaaggagaaacttcaaagcaatccctgacatcccagaattcgctgcttttccagtaaatatctgtttgggccagagaatttcaagcttttggataaattcaaagatgaagagcctgtatttggcgcagcatttctatttgtgttctgcaccagaaaacctcatcaactgcatgtatataacatcacaagctgatcactcagagtcagaggggcaaacgttcactttggctttgctgagcctttccttgaagagccaaatccagcaaggacataggcaggctcctgaggcaggtgtgatggaggtgaacacaaggcggcaggggtaggagaggagtctgtgctcaaaaggagggttcattgcaaattcactggtgggcaaccttgtggaaaggaaggtttaaagtatttgactcacaacttttaaggatgcaagaaatactgtgaagtatttgccgtattaattatgagtcatttatatgtatttgttagaggacttatattaagaaaccggagggttttcattttgcgggggtgtttttggtaatttgtcccccctgccaaccctcactcatcagatgtcctttctgtgtccagcctgggctccaatttcaccatctttcacagacttgccacaattttccctcctaagcttcagcagcagctcaggtggactattactggttttctgctggcacaagttaccttccattctatagagatcaatctcaagcaaagcccttgaacaacatcttttcgatagggagaattgttcacttgtccatcactgactgctgccctgggtgagatctctagctctctgtctataatcacaacaagcacatcatgcacactcttccttgtcgtatgcaaagtaaaatctcaagatcactaatgcaaaagaattc

SEQ ID NO: 205365 - DNA, 1000 bp, Homo Sapiens
acgagactctgttctattcaaggattagtttttggttaaaattcagatcactccagcaaacactacgggagatggccacatagccttgaggaatttacaatttgaggaaaaaataggtgcatacacaaatcatttcttaagtcataaatattttatttttgtgatatatctgtacttactgaggaactgatctgtttcagacacttcggcatagcacagaggatctaagataaataaaatgccatcctgatttaatgcatgagattcccacctggcttccacttccgtggctcaccaggtaatttgaggctctccttccctccatgtagggagcccgggtgtgatatggacgccctggcatgcagaatgtcaggatcatgcatatcatctcccaccagataattcctgaataaaagtcataattattacaatgagaacattagattctgtgggtttgtttcctatgttaatgcattggaaactgatagatgcctggacaataggttgaaaggggtttgttgaaataaatcaaaacttttagcttgctctgatcctcctttcattttgaaataattttatgctctttcagttgtatgtagtcttaagtttttctgctcaaaagtgatctgtgaaatagatatcaatattaaaaattataattggtgataaggaatgtaatttcaactgaattaaataagattatttaagagggagaaattagagaagtgactgaacgttgactaaaaatgagggtctcccagcaaatgggaaaatctggtctagttatcaccagggcactgtgactgcacatttgttccctaaggcgaggcattttatttgtaccacgagtgatttaatcaccacaactctaacggcactgtttcacatgttgcatttcctaatgcagttttattaaattggatacaagggaaaacttcatatttagttatgatgatgatgaactgtaaagagaagacaatatatttgttttaatgaattc

SEQ ID NO: 205366 - DNA, 1000 bp, Homo Sapiens
ctggcctgcccagaccgagggccccgggattctggaggcgcagattggatcccaggatgcatgactagtgactcctaaggtgggaacccctgggtgagcgaggagtgggaggccggtgcacatccaccttctgtcccggcctcctcttccgccggtcctgtatttctctcgaagtctcatcccggccatcagagcctcaagacttctcaagctcctggcacattctgaggtaagcacctaggttgatggtggccttctctccacacacagcacagccacgctggggagtgggggccggtgaatggcctggggacaggccacaagcaggcctaggtgggggtgccctggcctgctgtcccctccacccctgtcctgggagcctgtctgcaccagcacagaaagaatatcacggctgtcacccacagggcctagcagccgggtttttctcaccaagagctcgtgtggagagggacgcaacatgtttcccttttatgaggctgctccctgtccccaaaggtggggctgacgggtgttcctgggaaatgagagcctgccctgccctttccccggggctccctcgtccatgctcagcctcccagaagcccctcctgctgagttgcccacagccctccctgccggcctggcctctccttgcagctcttcctcttctcatgaaggtgtgtggaggttggggtttgcgctctctcttccttgattaaccttgccagaggcttgtctgttgcagagaacccgctctcagtgtcattgataccactcgctctgagtcatgaatttctcagcttaccctttcttctccttccctctagtttagtttgttctttactatcctgcttcttaattacaacatttattttcatttctgttgaattttgtaaaacacattccagttatcagttttccccagggaacagtggctcacgtctgtaatctcagctctttgggaggctgaggcaggaggatcacttgagcccaggaattc

SEQ ID NO: 205367 - DNA, 1000 bp, Homo Sapiens
ccctccacttccctcgggccggcgctgctggggagggcgggaaggccgcgccagcccatcaggggtggcccggccccggctgcttgcccgggttcctcggactgccgacggcaggcgtgggtgggtgggtgacttcaggcctgcaggattgccttcctaaaccctgtgacacctaaggtaaattgaggcaaagaactttttaaaaaaatatgatcaaagggatttcctccccatgtgataacctgtggcttgtgtggagcagggtggagtgtgtctggagagggcatatgaaactgaaagaataagggccaaagagcttccggaagaggaaattagctggtgattctttccaatctgctttcccagtcacctttccggcatgttctgtaaaacaaaatgtaatttgactttgtttcattattttaactccataacacttaaattgttttcttttcggggaggggagtgtttattctcaaactaagcagtagccctctccaccttcgaaaaaggaacaacgtcaatccaacctttgttaaaaaactccaacctatcagattttaataatctagtagtttgctttcaaatataattatgtcgctagttctgtcacaactatactttgatagtttaatgactcacagaaatttgtaagactggaggttgcagtagtgtttctttcttattcttttttttccccataatatttattatagtcaatgaacagtgttacagacggccatcttagaattataacattttagagttggaagggatcttagtcaaaccctgtccttttacaaaaccagaaaccacggcttaggaagatttcatagcttgctaaaggctatccaactagttagattagaacccatgttatctggcttcttgcccaccactcttactgcgcaattgctccatatcgcctccaagcatgaaaattaaatgtattcaattcaacacacatttctgaagagtataatactttgtaccagtgact

SEQ ID NO: 205368 - DNA, 1000 bp, Homo Sapiens
gtctcccactattactgtgtgtgaatctaagtctctctgtaggtctctaacaacctgctttatgaatctgggtgctcctgtattggacacatatatttaggttagtcagcaattcttgttgaattgcacccttccttgtctttttttatctttgttggtttaaaatctgcattgtcagaaactaggaatggcaacccctgcttttttctgtgttccatttgctccactcctttattttgagtttatgtgtgtctttgcctatgatatgggtctcttcaaaacagcagactgatggatcttggctctttatccagcttgccattcagtgtcttttaattggggcttttagcccatttacatgtaacatcaatattgttacacattaatttgatcctgtcatcatgatattggctagttatatggttgcttcacagtgtcactgctctgtttaattcaatgtgtttttgtagtgactggtaatagtttttcctttccaaatttactgctttcttcaagagttcttgcaaggcaggcctggtagtgatgaattccctcagcatttgcttctctgaaaaggatcttctttctcctttgcttatgaagcttagtttggccagataggaaattatgggttggaaattcttttgtttaataatgttgcatactggtgcacaatctcttctagcttgtaggttttctactaagaggtctgctgttagtctgatgggcttccctttgtaggtgactgggcctttctctctggctgcccttaacattttttctttcatttcagccttggagaatctgatgatcatgtgtcttgggattgatcttctcatggattatcttagtagggttctctgcatttccagaatttgaatgttggcctgtctttttaggttggggaagttctcctggatgatatcctgaagtatgttttccaacttggttccattctccccatctcgtttaggtaccccaatcagtcgtaggatcagtt

SEQ ID NO: 205369 - DNA, 1000 bp, Homo Sapiens
ccttttgccacttgagacgatgcatgttcagagagctcatggaaggagggattgatttttcaacatcatagcattaggctgcacatcctctgacacatcccagatggatcccttagccattcattagttcaagcaatattgatagagttcttacagtggacaagcctgtgctggattctgcagtcacagaggtgagagaggaggcagagtatttcactggttccaagttaaaacaaccatgactaagacctgctttattcatatcaaagaattttcagggtaggtaaagaatatgtataaccacgtggctatgatacaattaatattgagggtagcaagagctttaagaaaaacaaaatatataaacacacatactttatatttatcatatataagcatatattatatatatatatctcatgtatagttatataggtatttataactgtgtatgcctattctatatatttcctatatattatatataaatgtatatcttatttattcactatagtgcttcctataagccagatcctattttgaatgtttttacaaattaattcatttttaaattctcacaatattgccatgaaataggtactattatcatcatctccattttatacataagaaacttgaagcttagatattttaagtaatgtactcatgatcaattaagctgctgagtaaagatttgaatcaggtagaatatctcccatggctatgttattaatctctgtgctataaactgcacaggggattatgaggggaggctgcacttgtgtgcaggcattaaggcgtgggcagaaatagcttgaacagatcctttgagttggggccttggcagactattctcaatgactggcaagtaaaatagcatggtttgatcatgatgtagtttggatgtgtgtccctgcccaaatcacataatgaaatgtaatccccagtgttgggggtggggcctgctgagacgtagatttcttatgagtggtagagcacc

SEQ ID NO: 205370 - DNA, 1000 bp, Homo Sapiens
cattatactgcatgcatcctgcaattacttttttattcagcatggaattatatgttattatgtcatccattcacatttctccccttccaccttgtgatctactgcatatatttctgattagataagtttaagtagaatacaatttatagtaatttgtaaaaatgttactgacttattctgatttcaaatgtaagatgcataaacacaacacagcctgaacctccctgacttgatgaattcccctcttccttccagccagtcctctccaagtgttgtcttttgacaaagtatattcctagaggctgtacacagagaatgtcatatcttgaaagaaaactatgaaatcatctagcccaactgttcattttacagacatagcaacagaactaaagaggttaagatagttacccactatgacccactgtgacttaggcagaatattaagtggagaaagctgattatctgctatgagtgaacctgcagaggtaggctatgctttataccactctcacccccactcacctccatgtcttcattccagctatattagcctgctagggttgccataacaaaatcccacagactgggcagcttaaacaacagaaatttagattttctcatatttctagaggctagaagtccaagatcaaggtactgtcaggattagtttctatgaggcctcagttcctggcttgtagacagtcgccgtcttgctgtgtcctcatgtggcctttcttctctgtgtgtccggagagatccctggtgtctcttccttttcttataagggcgccagttctgttggactaggaccccctgcttcttagcccattttaccttaattacctcctaaaggccctgtctccaaatacagtctcattggacgttagggcttcaacacaagaatttggggggacacaattcaatccacaacacaatgcagaattcctaatagctctattcctgccatgctcatccttgttattactgaatacatgaattc

SEQ ID NO: 205371 - DNA, 1000 bp, Homo Sapiens
cacactaagcccaaaacttccaggaaaaagtattccatccctatgtttgagaatcattttttttcacagtcatttattgtgtaaggattgagaaaatcctgagatatctaaggaaccttagatactcttgggctttaagaagaaataaacctcttgttcacctttttagaataattttcatctctgtcattcagctgaagataagaacttgccacagatatcagcaatcctaaatatctagaaaatatggagaccagcctggccaacatggagaaaccctgtctctactaaaaaaacaaaaattagcccagtgtggtggtgccttggtggtgcctgcctgtaatcccagctactggggaggctgaggcaggagaattgcttgaacctgggatgcagaggttgcagtgagcccagatctgcactccagcctaggcaacagagcaagactctgtccccaccaaaaaataaatgaataaataaataaataaataatataactagctgtaaaatgtaataaaaaccacttcacagtggtaaaatctatgtaaacagtgatattctatataatatgtagaaaatatttattaaaatatgtaaaatatattttttaaaacagaaagattcaagtatgtaaatatatataatctcatgaagatggcagtatccacaatataagcttacattatctataaattgaactatacacatttaattggattctattaataatcataaaagatagaccataaaaagtttattctatattttgcattaaagagaaattctcaagagtagctaagacattcttgaagaaaatgaaaattaaaaaaaaaagttttggcaataaaagttgacatgaattaactcaaatttgccaattaagattattagaggatctgtatgacattgtcttccagcaagagaagtttattactttcaatattagaagccaactaggaaaggggcagactaccttatacaatctaaaattaaatttatt

SEQ ID NO: 205372 - DNA, 1000 bp, Homo Sapiens
gtcagtcttttgagtgagaccccaaaccgagaccatgactttgttttgtcttacttgcccttcaagtatgaaattgaggcaaaccccaccaaacttgtttcttaagatctttatgttggactgccctgaagtggtaagaaaaaattctgttacaggtagatctgaactgcgcccaaaactctcgcaaaaatagaaaggctcgatgctgtccgccactcccacctgagagtgcctccttggcctgcatctcttatgcataagcttggcccaccgtcccttgttctccatctgtaggctgtagaatcagaagacagttacaacagaaagacctagagaagatcactgagcaagaactgaaaggaaatgatggaaaagagcagactccttcacttcagacactggggcaggccctgctgaaacaaaagggttttggtggcagaaaaaaaaggcgtggttcgatttttagcaagaattaaggtattgtgacggagggggtgtcaaaaatgttagcccatcccacacaattgtaatttctcatactctgcttctcccatctttaaaaagaattcagaaaaagttgccagagttcattgccacccatagtaaataaggtgggaccacctgacaaggcttgtatcccttagtgttgacttccacagccaaacaccaccctccctggttgaggctgagcaggagctaaggcagggacctcacagccgctgcactaggaccagctctaggttcagttggctcattctgtgcctttccagatgatttcaggagcttctcttcctctgtcaacatgtttgttcctatttgcattgtcttttgatttatggcttgtatccgtttcttgaatttatagatgcagaattcatatcagaaagatcaattaagagcaacacaactctggggctcatctttaaaactattcttaatagggttgttttttctaagtagttaaaacggcaccttgaaaatccctgtggtaggtgaattc

SEQ ID NO: 205373 - DNA, 1000 bp, Homo Sapiens
gctgcagaccagatggctttcctgctaaattctaccaaacttataaagaagaattaacatcaattcttttcaaactattccaaaaacctcaagagggaagaattgttcctaactcattctgtgagaacagtattaccctaatactaaaaccagacaaggacacaacaaaaaagaaaactacaggccaatatccctgatgaacagacacaaaaatccttaacaaaatactagcaaactgaattgaacaacacatcaaaagtcccactagatcataatacaccctgatcaagtgggatttatctcagagatatgagaatggctcaacatgtgcaaaccaatgagtgtgatacatcacatcaacagaatgaagcacaaatatcatactatcatctcaatagatgcagaaaaggcatttgataaaattcaacattctgtcatgataaaaaaaactctcaacaggccaggcgcagcagctcacgcctataatcccagcactttgggaggctgaggcaggcggatcacctgagattgggagtacgagaccagcctgaccaacatggagaaaccccatctctactaaaaatacaaaaattagccaggcgtggtggcgcatgcctgtaatcccagctactcaggagactgaggcaggagaatcacttgaatctgggaggcagaggttgcggtgagctgagattgtgccattggactccagcctgggcaataagtgcaaaactccatctcaaaaaacaaaaaacaaaaaacctctcaacaaaagaatgtacctcaacataataaaagccacatatgacaaacctgcagctaacatactgaatgaggaaaagctaaaagtctttcaagaattggaacaagacaaagatgcccactttcaccactcctattcaacatagcactggaagtcctagccagagcaatcaggcaagagaaacagaaggcttccaaactggaaatgaggaagtcaaactgtccatctttgcagatg

SEQ ID NO: 205374 - DNA, 1000 bp, Homo Sapiens
gtagattatgtaaatctacattcatttttttccaagtagctgcaatatattctttacattttaaattattttatttgttcaaaaactcctttttaaatacataataccaaggcatctcccagtataggctgtgtccagatgaccacacacgtctcgtttcatgtatgaattcacaaagcttcactctgaatattttaaagaaccagcagcaaatttataactccagaagtcaaccagccaacaaaaccctctaatatgcttttaatctcctccttgcgaaatgaaagaagacaacttttttttctttgtggaaagaaattatacataaaagctcattttatagcactgagactgtctcattttgttaagagttttatgcaattagacagtaggaaaaattaaagagtttttccagtttcagtgtctctcagacacttctttggtgttttgattcattaaatcccaacataagattattattgccacgttactgtcttggatgatttactctattttattaaaatgggtagcagagagcagaagaataaaaaaagttggtgtacatgacaatttaaaggagcttattctaactgaggattgctaatgattaccagaagcaatttttttttgttcattcaatcactccacaaatataaattgaagtcagatgttgggaatacaaagacaactaacatatattccctgcccacagggacattatgatctaattggatatgcaaacaaacaattgccatgcaaaatgacaatctgaggctgatgtacatatgtcttaggcacttgggaacataatggaataagggttcagtgtccgggttaactggcattcagatactggactcttgagagagcccagtaaagagaacctctatttcccatgtgagttctgaataatttgtttaaaaagaagaggcagatgggcaaaaaatttttccacattcattattaatggaaatcgaattggaggaacaatccggaattc

SEQ ID NO: 205375 - DNA, 1000 bp, Homo Sapiens
ttaccctcaccaaattgtgtgattattaactttaggaaatcctctgtggagttgaattaatcaatcaacaagcatttatttaactatgaattagaggaaggattctgcagaatgtaagacgattgatgcttgtgccctgtttatatctcctcagttacttaaggaggctaacataatgctgataataaggaaagggtaaagagaagaggtgaccaggtgttccagattgcaatttcaatgactagcttgtttaagctacttctcagatagtagtatacagtacattagaatttcttaaagattttgttaaaactgatgttcctgggctcaactcccccaaccctccagagatcctgatttagtaaatcttgaatagtcccataaactttcatttttatgtgtcttagtccattttgtgttgttataacagaataccagaataccacagaccataagtaatttataatgaacaaaaatgtatttggcttatggttctggaggctggaaatttcaagagcatagtgctggcatcttttgagggccttgatgctgtgtcagcccatgatgaaaggccaaagggcaagtaagggcaagagcaagagagagcagaactcacttctataacagtccactctcacaataaccacatcagtccattcatgagagcagagtcctcatgacctgatcacttcttattaaccccacttcccaagaccattgcactagggattaagttcccaacacctgaactttgggggacacatttagaccatagcagtatgcttccaagagatatggatgttgctggtctgaccacaccgagtacacctggtttagtctagccaacaacaggagcagctgactcacgtgatttccgtctaccacttttgcaataaacctgtgttgtaagaaatgaaagaatagctgaaaaaatatagaagaacctctagttatgtaactcacagagtgatgtggtcagaacgtggtggatatggtactc

SEQ ID NO: 205376 - DNA, 1000 bp, Homo Sapiens
attcacaaaggaacatagacaaatgccagtacacacatgagaagcgcatacacatccacaaacttcaaacaagcccacctcatgtatttctagtgagtaaggaaaagaacgcaaacacttttgaaaattgtttggttgtttcttgtaaatttaaacaaataccctattatattatccagcgagtccatccttaggtttttatccaaggataaagaggtgaaaactcatatctaacaaatagacttctgaaaagatgaaaatagaagctttattcataaaagacaaaaactagaaataacccaaatattcattcacaggagaatgaataaacagactaggttgaatccatacaatggaatggtagcagacaataaaaagaaaatgaactattgatgccccctactgcacagcagaagctctgaatcgtgttcctgaatgaaagaagtcaggtatgaaagaataaacattgtatgattccatttatatgaaaatgaatctgtgatttaaaaatcagactagtattaggttggtgcaaaagtaattgcggtttttgccttttttttttttttttttaaatagttgctttggggtttatggatggagtggcatggtagaggttagctgaagggggcatgaaataactttttgggggtgctagagtgttgtaaatcttacagtgggggagggacaggagtgcaggcatttgacaaaacacattgaattgtgaaatttaagatttttgaatttctttgtatgtaaattacctgccaataaaaacatgacgaatagagcagttatgagcatttgtgtgtagctttttgtgcaaacttaaattataatttctctgataaaagcccaggaatgtgattgttgagtaatatggtaagtgcatgttttttgagaaactgtcaatctatttttgggagtggctgtgtgtatcatgttatattcccacaagcaagggatgagaaatttggtttctctgcatccttgctagcat

SEQ ID NO: 205377 - DNA, 1000 bp, Homo Sapiens
tgaacagatgttatcatttgctaacttaaagtcttatatttaactctaggacattcattggatttttagaaaataaattctagttctctgttaaaatactccatcttttgatccatgtagtccatcttttcctctgtttccactttaacataaatgtgttactttgaagtctttttctgccaacaacatcttaggtctactttttgggagtttctttgtttttacattttgaggtgttcttttcttagcttttttattgatgcatagtaactgtacatatttatgaggcatgtaatatgtttatacgtgcatacagtgtgtaatgatcaaatcattgtatttagaatacccatcaccttgaacatttattatttctttgtgttggggacatttccaatcttttcctctagctattttgaaatacaaaatatatgttaactatagccatcattgtgatatcaaacactagaacttattccttatcttgggtctacttttattgactgttttgtcacttgagtatcaatcactttcctgtttcacctattaatgttttattgtgctagacatggtggatgatacattgcagaggttctagatgatgctgtctctatacagaatgttgagttttgttctggcaggcagttaagttgctgaggaataatcgtgattctgttgtaacttcatgttagacaatgttatggtaaatttatttcacttttgcactgagtcctaaggcatagtcccaggactgaatgtgtaggatgttcacttaggtctctttactttgtctagatcaggagatgctagtatattcttagcactaagacccctctgaaatcttgtccaacatttagccacccagaagttgttctttactacacctttgagggttatgccctgtacatgtgcagcttaggggttcaaggacaatctctttacacatttttgggttatgttctgtctagctcctctttagcactctgcttcccaaaatcta

SEQ ID NO: 205378 - DNA, 1000 bp, Homo Sapiens
taactggctgatcacgttaagagatttcagttaagatccaccagtaagaacttaagagtccaaggaaaaagagatgccagtaatcaagcaaacgcattgggttattttaatggacttacgtgcagaaaaagggtaacacatcaggcctgggttgcccaaactctacacattcccaaaaaagtcagtcttcagaactggcgccgttggccaactcctgggaaatgaattctgagcctctgaaatattctgcctggtcagagtatttttgtatgctggagatcttgggccacatggtaccagtttgactagatagtttatgcaaacaacaggatgcatgattaatacttcgtgcctgattttgctctgagaggttggaatctgagcatctcagggcagtcatgaaggtactgcttgcctatgtgactgacttccaataaaaaccctggacaccaaggctcaggtaagcttctttagttgacaacacttcactactgggagaattaaaattaaccatcacagatgcacttatgtgtcaacttgactggattaaggaatacctagagaactggtaaagcattactaatagctgtttctgtgtttccagaggagactggaatgtgaattgatggactgagtgagaaatattcacccacaatgtgagcagacaccatccaatcaactaagagcccaaataggacccaaaaaagcaaagaaaaggcactctcctggaatggggacactcctcttctcctgtccttggacatcagaactctaggctctctgacatttggactccaggctttataccagcaactccctagtttcccaccaaaacccaggttcctggcccttagcctcagactaagaattacaccatcagcttcccagggaacttggacggagatacgttaccagcatcccaaggtctccagcttccagatggcctgtcttgggaattttcaacctccataatcacatgagccaatttcccagtgaattc

SEQ ID NO: 205379 - DNA, 1000 bp, Homo Sapiens
aattactaatctattttctgtctctatggttttgcctattttggacatttcatacaaatgtaatcatacacagcattttaggtttggcttctttcacttagcttaatgtttttcaagattcatccatgttaaaagcacatataagtacttctgttctttgcaagtctgaataatattccattatatggatatatcacattttgtttattcattaattgaatgacatatggattgtttccatttcttggctattataaataatgctgctatcaatatctgcaaacaagttttgtgtagacacatacctttgctcatcttgggtatatacctaagagaggaattgctgggtcaattatgtttaacattttttggaactgccaaaccacttcccacagcagctgtatcattgtccattcctaccagcagtattctatgttctccaccatcatcaccaacacgtgttattgttttctccagcatcatcaccagcacatgttagtgggtataaagtggtatcttgtgatttttttttttttttttttttgagacggagtctctctcttttcaccccggctggagtgcagtggcgtgatctcggctcactgcaacctccaccacctgggaagtgattctcctgcctcagcctcctgagtagctgggattacaggcatgcaccactacgcccggctaatttttatatatatatatttttttactagggatggggtttcactatactggccaggctggtctcaaactcctgacctcaagtgatttacctgcctctgcctcccaaagtgctgggattacatgcatgagccacagcgcctgactggtatcttgtgattttgatttaaattttcctaataactgatgatactgagaatcgtttcatgtgattgttggccattcacgtatctttgcagaaatatccattcaaatctcttgctcatttttcagctgggttacttccctttctattgttgaaacttaggaattc

SEQ ID NO: 205380 - DNA, 1000 bp, Homo Sapiens
gaagtgtttctactatttctctgaggaatttaatcaattcagtcaaagcaatcaacaaaaccagttgtttattattatacatgccaaatcatttaatgactaactaggtttcttcagatttcactgactagatgttgaactgctgggataacataaaccaacatgcccaaaaggctcttcaggttgcaagacttgagaaaattcactagagctaatattaatgagtaaaaccccatcttctctcaattattttacattagaaacaaaaacactcttgaattattaaatggtcaaaacaaccagtgaggctgtataatatcatacattcttattaatttttttaagttatcttgctctgaggggtgactatatttttaaattttgcctctgggatccactttattaggatatctttgtgtttctgggacagaacagaccctgtatgctctgctcgtggtataagctcacgactgcttcttgatttgatttgtgttactctagaaagacaaatgaggaaccagactatttcagtctgtgattcattctcaagtcaagtgtggttcctggacctagcaggagcagcatgctcccgggaacgtgttggaaatgcaaatccacaagcccacctcagacctaccgaaagtggcactttggggatgaggcgagcaatatgagttctaacaatccacccaggtgactctgatgcatgctaggaggaggtctggctgacaccactccccatggtgtattcttcggaagggtattctgtggcatattaacacgtgtcacacaatgaaagggttcctcatttgaatacgtttgggaaattctgagataaaaaagttaaatagagcaaatggaccacactcctccacagtttccctataggttatcatatacagatacctgtttaatgtcccacaaataggatatcccatgctctttctcccaagagtctagttctccatccctctcagctattcagagagagaaagaattc

SEQ ID NO: 205381 - DNA, 1000 bp, Homo Sapiens
tagctgagcatggtggcatgtgcctgctgtagtcccagctactcgggaggctgaggtgaaaggatcacttgagcccaggaggcagaggtttcagtgagctgagattgcaccactgcactccatcctgggtgacaagagcaaaactctgaaacataggtttcaccgtatattcttttgtcctttttaaatttggggcaagtgcatgtattatctattcagaagtaaatattttaaaatcaaatgtatgtaaaagtttgttcgcattttatcatatttgtgctttccctgctctctccttgcctgcatgtttaatgtattcatcctaagagttccagttcaaaggccatcagccatatctgattctctcaggcatagttactcagacagtactttgtatatctccagaatagggatttctttttattattattattattattatactttaagttttagggtacatgtgcacaatatgcaggttagttacatatgtatacatgtgccatgctgatgtgctgcacccactaactcatcatctagcattaggtatatctcccaatgctatccctcccccctccccctgggatttcttattttatggtaattgtcaccatattagtttctcctacccaaagaggaggtagagatgaagtcccattaatggttaaacgcaaagtctgtagttccagaatccctaagggtgataccaataccacagaaggtgctgcacatacctcagcccattcaagggagggggggtttagagtccctgcagttctactgtgcttaatggagaaccaccaggctctccttgtgttttcagaaacaggttcattattgatcactgtctgccatttagggccatcaatagccccctgctactgctcctaatcgctcagatccctgctgctaattttatattggcctagcgatggtagaaaggtatatcaattggttaagtgtgtgacttctagagccaggctgtgcttggattgaattc

SEQ ID NO: 205382 - DNA, 1000 bp, Homo Sapiens
tttgttatatttgttgtatatcatctgtctcttccagctagaatgtaatcttttggggtcagggagctttgttttgtgcctggaacaattggtaattggttgaatgaacaaatacgtaaatagatttattcatatttgtatatgcacagagaaactctggaaaccttcttgagaaaataataacatttgttgatagaatagggaaaactggagaagtggtctgtatgaattggagacgagtgggaggaagatttcaattcttaatttttgaaccgtgtgaatgattatatatatatctcagacatgactggttctgaagtcaccagccatccttgacaggcctgatttctttctctccactctttataaagagacctctctcccttctcttttccctgcacctccttaatttctctgtcaagcctcaaaatagcaaatgctcttcctgctacatatgcgcatgcatctgtacatatcttttctgtgtcaatatatgttttaagaaaagtgtgaaattaaacttcaatttcaaaacagatattctactcaaatacagactgtaataaaaacatctttaataaaggcttaccgaacaacggcagcaacaaaaacttgaattcaaagaagaaggccaaccagggagaaccatggtgactttagagggtttgatgaattggtaaatgatggcagctgctttaaagggcgttgccttcgttcccagggaccacataatggaaggtccattatggagtaggtgaagtgacctctgggctgggaacagggactctgggaagtccttgctgagcattccctgaggccaggatgtctgtgcctctgggctccctcctcttccattctgatcaaaggactcattggtgttatggcatttgaggcaaatgcctcagattggctgagagaacacaaacaagcagatctacaacgtggtgcaaagaaaacagaaggggcacgtgtgttgagatgtgttaaatattatgaattc

SEQ ID NO: 205383 - DNA, 1000 bp, Homo Sapiens
tcctgaccttaggtaatccgcctgccttggcctcccaaagtgctgggattacagacatgagccaccacacctggccaactcttctacattctatcctcacaagtcagcaccagtccccttagaacctgaactcaacaggaagctcagagaggcaacaatgagggtgaggggaggaggccaggaaagagcaagagagcccagctggcactccgccgtccgcaggctgtagctgtgcctgattctgaaagcagggggttccattgctttgccaagcctggggagcaactgtgggcctcagtgtgagagggcctcacctgtgggacagctcccactgcgtggcctgagtagggggtacctgatcttactctgtcaatttggggctaaagtcatctcaccctaaagctaccaggcaacgtgagcccagatctcccagcaaggcagtgaaagccaagccatcagagccacataagggttccaaggctgaagatgcccggagtccagtggtatagtgtgaccaggtccaggaaagctggcagggatagctctaccccatggttccacctggtagacacaccaatctccatagggatgaggggtacaaagatggcactgagcagatgaaacgccaccactgatctccccagctcagtctgtcctcatgtctacccaactacaaaggagctgaagcctggccaaggcatggagggtcccccactctacactgagaagcatccccacaggcagccacataggagcgcacacatgctggcaattacctacttgacatacagtaagggactgtccaggatgaagagtccgccagcctccctgaatgggtctgtggtcatgctccagttggaggtgaagtgtgggtggtggggaggagtctggaattcagacctggtgcctccagcttaagatctcttggagcaggattgcgggaggagagcagagcacatatattgtgctgtaaaacttttactgccgaaggacatagctt

SEQ ID NO: 205384 - DNA, 1000 bp, Homo Sapiens
cccagaccagggctgcccaggcagagcgtgagggggactagtgtttactcagctcatttttttcctcctctctcctctaagtcacggggctttgagtagggcttccccagccaccgtgcccctcccagcagaccgcagtcagaagccaatctcacatttgtctggtggctcagagaggggacagaaagagcagcagcttatgtccttggctatcctctcaagtgggctaatttgcttattttcaactctgttgggtccagccctgttgcctctgatctcagctcaaagaggatttggcgggagtttttggttgtgataaccaataacaaccaactatacgcactgcgaacatctcctagtgccagaagccctgttagctcattatcttaatcctcaggataacccaggcaatttgtattcaccctaaaaacttcccctggccgggtgtggtggctcacgcctgtaatcccagcaatttgggagactgaggcaggcggatcacttgaggccaggagttcctaaccagcctggccaacatggtgaaaccccatctgtactaaaaatgcaaaaaattagccgggcgtggtggcacatgcctgtagtcccagctacttgggaggctgaggcaggagaatcacttgaacctgggaggcggaggttgcagtgagctgagatcatgccattgcactccagcctggagacagggcgagactccgtctcgaaaagcaacaacaaaaacaaaaacaacctccaaaaaaccttcccctgtttacctttctaattttggtacctacagaatctccccgttagccttgaaaatcagcatgatctttaaggatttaggagcaaatctttaaaggattgagttgtgggaagaccatgatgtctttgctactggcttttgcagtgagaatagctttttctctgatcaggtttggagccttccctctctcctgggggtagggggtagctggcttcctttctctgaaatgcagaattc

SEQ ID NO: 205385 - DNA, 1000 bp, Homo Sapiens
tctccccttattctaagcccaccaggttttttggttctggacagtaaatctcttatctatagaaaatagaacaaataatataaacttcagggagacagggattgttgtttacttcactgctgtatctctgcctatatagatgctcaataatagttattggatgaatggataaatttctgtaggtatttcataatttagcgaagtaagaaatagggaaattgcaagcagaagactgctgtaattagtgaagtcagatgcatgctttttttttttttttccccaagacagagttttgcttttgttgcccaggctggagtgcagtggcatgatctcagctcaccgcaacctccacctccctggttcaagtgattctcctgcctcagcctcccaagtagctcgggttataggcatgcaccatcatgcctggctactttttgtatttttagtagagacagggtttcaccatgtgggccaggctggtctcaaactcctgacctcaggtgatctgcctacctctgcctcccaaagtgctgggattacaggtgtgagccaccgcacctggccagcttttctttttaagtaaaaaaaaatatatattatcttttagaaatacagttttattgttgtcaggtatatatctagaccactccaaccagactgagttccctaagggtgggtgtctttttaccagtggatcctcacagttcctgacgcagagcatgcactatgctcattgcatgcacagtgcaactggagctgggctaacacctgacacttagttcactgcaccggggggccggggaagctgtctttgcagcgtgatgaggcatgtgagtaggtatccacagcggtctgtctataaataggtgcttctgacgtttttgcacttgaacgcactgttctcttattaacataaatattctcctagcaaactcattaactctatttcattagcaactcctttgcagataatagaaaaataaaccaccatggcctgttt

SEQ ID NO: 205386 - DNA, 1000 bp, Homo Sapiens
atcaataatgaatggcttgtttaaggatcttggctgcaaagagaatgatcaagataggagtaatagctgcacagggaggaggtagagtagggagctcaaaaagtagtagtaaatgtttgaagcagtcatcagaagggtgcttaccagggagaagtagaaggatttccaagcagcactgaaggcctcaatgagatacatagtcatgatcaggacaggtacaattgtgccaaggttagcaataagaaaccaatgtcaagaaagacttgctaatgagtgacagaggtgagattcaaactatgtttctctcccttcatcaaatgtttatcggctcctgctctgcactgctttgcatcaacactggcattggtgtttccaatgctgatgaatcgtattgactatcaatcatgtgcccaatgctgtggaagcatgatagacatttaatatatattttttcacccttaaattgtttagaatttggttgaggagacaaaatattccacaaatgcatatatattataaatatatataatatacattatatatatacatagtgaagctctgctgtctctctctccccccttacctctttcttcctctgatcccccatctctctctttcttctttcccaacgttgggcagcacttcaatgacccttacactgaagcgttattgactcatttggaaagtccctatattttagtcatatggagcccctcaaacctctttgccaacttcattcatttattaagaagacagtttttgaattgctgctctggataaagcagtatgtaaggcacatgagatacagagatacataagatatagtcttgccctcaagtagctcacaggctaatagggaagaatgagggtttaaacaggaaattgcaacataatgcaaaatgtactatctctgcctcagtttcttcatctatacaatagggattattagtgcctaccacaaaaaaacctgtgacgactaaataagttagcatgtaaaaag

SEQ ID NO: 205387 - DNA, 1000 bp, Homo Sapiens
tgaaacgcttcagaaaatgcaagcagggccctctgcccccactcagtcagtccctgcaggcacagtgaaataatcacaaaaagaccgatgttgtttttggctttcttccctgaactgcattttccacagtatctgcttggcaggcccagccagcatgaaaacaaccttagtatttgctgctatggtcacagcattttttttcttctccccctcccctcaaggaagagaatgacaattcaagatagtttgcagcatccctggatcaaggtgagttgcatattacgaaactgtttagatcactttctatgtgattggtttgggcaccctggtattcatgtatcatagagtactgctaaccacaggtcacacctggagtgttaagtttgctatttgcatcgtatcttaagaaaagctgacaggttagactgtatactaatgatcccagaggtggggagagaggaataagcgagcacagagcaggaactgaagaaggtcaagcccactcgacaactgtgtttggagtgacctgtggggtgttggcccaaacagtgtatttaacattttatgttgattccagcatgtaaatatcaatcaaatctggatttccagcttctcttgggaaatctgaagatctgctgacactgagccctcattccacgtggccttgggaagtggcacaggtgccttggtgctagggaacagggcgccctggaacattacacctttacattacctgcctggcctggttgacatttggattaaagtatcttcaatccagggcagaaagggctaagggtgggaaagtatgatagttacagaataaaatcatgaaataaagaagtgaacatcacagaatcaggctctgggggcaaatagctttgctgtgcaagttcccagcagttacctgggttctcctagccagctatggtgtctcctcctcccagaggtggaggacaaaagctaaatacatctactgaaaaagatacaatacaaggaattc

SEQ ID NO: 205388 - DNA, 1000 bp, Homo Sapiens
ttacaaacattaagactcacgtagcagtgttctggaatcgtaagtgagggacaaacacttagaacccagcagcagtgttctggaatcctaagtgagggacaatcattcaaagcacagtaggagtgttctggaatcccatgagagggagaaacacataaaatgcagcagcggtattctggaatcttatgtgagggacaatcattcagaccacagctggggtgttctggaatcctacgtgtgggacaaacatacagacccccgtagcattgttccagaatcctaagtgaaggacaaacatacagaccacagcaggagtgttctggaatcctatgtgagggacaaacactctgaccacagcagcagtgtcctggaatcgtgggtgagggacaaacattcagaccacagcaggagtgttctggaatcctatgtgagggataaacattcagacgaaagcagcagtgttgtggaaccctatctgagggacaaacattcagaccctcgtagcagtgttctggaaccttatgtgatggacaaacattcagaccttcgtagctgtgttctggaatcctatatgagcgacaaacactcgaaacccagcagcagtgttctggaatcctatgtgaggcaaaaacattcagaccatcgtaacagtgttctggaatcttttgttcgggagaaacattcagaacctcgtagcagtgtactggaatcctatgtgagggaaaaacattcagaacccggcagcaatgttctggaatcctatgtgagggacaaagatttattcctacgtagcagtgttcttgaatcgtacgtgaggggcaaacactcagaacccaacagcagtgttctggaatcctaagtgggggacaaaaattcagaccacagcaggagtgttgtagaatcctatacgatggagaatatttcagaaccccttagaagtgttctagaatcctatatgatggacaaattttcagactctcttagcagtgttctggaattc

SEQ ID NO: 205389 - DNA, 1000 bp, Homo Sapiens
cggcagcattcctgggcccaggagcagggccaatagcttccttgcacaggctttgtgacaagaaaggctgagtagccaggaagtggaatgtttgtagggaaaagaactcccgtcccctgggtcagcttacccatcttgcgtaagtccagtgattaaatcaataatgtttccatagttgaggattgagtacggtttttctgtattcccaataacagggatttttaaacatcatatttcagtcttactatgtagccttgaagaataatgatgtatttattgaaatggaaagatgtttgagctataaagcgaaaaatcagattactcattgtatgacccaaattgatttatatgtattcatatgcctaaaaaaatttattaagttaacattttcggccaggcgccgtggctcacgcctgtaatcccagcactttgggaggccgaggtgggtggatcacctgaggtagcgagttcgagaccagcctggccaatatggcgaaaccctgtctctactaaaaataaaacaattataattagctgggtgctgtggcgcacgcctgtaatcccagctacgcggaggctgaggctggggcaagatttcttgaggccaggagtttgagaccagcctgggcaacatagtgggacccaatattttgtctcaacaaaaagttttcaaattggccaggcgtggtggcatgcacctttagtctcagctacttgggaggctgaagtgggaagatcacataagcccagatgacagtgagctgtcattgttccactgctcccactctgcctgccccacccctgaaaaaaagaaagagctaaatagcatgcctgggttagtaggttattcaaaattcctaacacagctgataggtctaaatcggttcctttcttttctcaccacattcctttgttgaattatctatatatatacatggtttcacatgcctggtaggccccggttatcaatgaaatacttcttttctcaagatatgaattc

SEQ ID NO: 205390 - DNA, 1000 bp, Homo Sapiens
aaaaacctgggacatcaaagaataaataagctgctctaattgccaagaattcacatgtggttgtatgcagcattactgggaaattgaagtgtatctgcatgtgattctgctgtgatggacacttgtaagtttgttcctggagtctcctggaatttgccctgagaatctttttcctttgttgatatgactctgcatccttttgttttaataaactgtaaacatgagtataattgcttctctgagttctgagagttttttaaataatcaaagctgaagagcaatggagacccccaccaaaacatctttacacatttcaattttgtattgaagtaaattttattttcttttttatacctcccatatatattctatttttctcattattatttattttatcccaaatcttttatctgtgatcattttcctttgtttgaaatttgtcttttgaaatttctttggaaggtgcttttggatgataaattttctgttattctttgtctaaaatgtcattattttgactcatttataaaaggagtttttgtgttttataaacctctaatgtatagaagtgtgtctaaactcattgaggatattttccaaattttttcctactttttattgctgttgataagaagtcagtgttggtattttgacttttaagttatgtgtcattttgttgtggtagttctgaagatcttccctctgttttatattctccttcacctttcataaatgtactttatatttatttggtaataaattttgaacatatactatgctataaagataatctaggccctttggttacatcttgtaaataaaatcaacaaaatctgttttgagattatattgtaatataagatacccaaagtaaataggatgtgtaccatatgtttgaaggtggtaaatacgatgagaaaaatagatcaggtcaggaagaatgaagatgattgaaggtacaggttatgataaaaacttaggtgtgccgaggaatgaattc

SEQ ID NO: 205391 - DNA, 1000 bp, Homo Sapiens
ttcatatagaatctgtgtaaagacaggggatgttgctggcttatgtttttcagtatgaacccttggaaattattgttggttgaatccttttagctttcttgctcacacctctttcttgcttcccagaattgagccacaattcacttctaacttgataatagtcatgttaagaaaaatattatttgtgtgcttagctcacttttcttttcctcaaagttatttgctaatacaaaacacctcttagagcaggatgactatttagtgttggacacaagttttgttcccttcatgaacttcatcatttattattacatcaactatctcttctttcatccaccatatacttggcattataattcaaacacctctaaaagtgtatttatatgcagtgttaattataataataaataggagcaacagtaatcattatatataatgtgcaaaatttcaggcagttttaagtgttttacatatatgtaatatttattatacacaataattaggaagtgagtgctaattttactcctatttgcaaatgaatttgtagaacacagtaattaaagtacttttctaatgttttataatttttaattatcttcaaaccaagggagtttgagtccagcagctaggatctgaaacattatattctactactcaaaattccattcgttaataaaatgagtaaattagttacaatgaattatggaacttaaattttccatggttaaattcattcattttttatccactagtgaaaacataatgataagcatggccttgggctcagatattcactgatgaaatatatatcttatcactgctaaaaatggaatcgggtaccagatcattaatgtgaatcagatcagttatgtgaatcttcctagcttataagactggaacctgacagcatgaatatgagaaatggaacaaagatcagttactcagcacttgattcagtcctcattgtggatgaatgctttggtgtgagccaagtgaattc

SEQ ID NO: 205392 - DNA, 1000 bp, Homo Sapiens
ttcttgccaggcctgtttttagtttttggactggttgttcagaactcattattttcttcacaagaatgcctcagcttgactcagtttccccttgtgtttgacagctgccattttctcctggtccctccaaggcttataatcttaaagtcactctaccccgtctcttcaaccctcatcctaggtttattactttttaaaattgggcctgtcatcttcacgttcaatcatagctccaatgactctgcatgcagattatttcgacagcccccttgcctctagcttctcaactacttaaaaaaaattaccctctgtgggccaggtgcagtggctcactcctgcaatctcagcactttgggaggccgagtgggtggatcacctgaagtcaggagttcaagaccagcctggccaatatggcgaaaccccatctctgctaaaaatataaaacttagctgggcacggtgacgggagcctgtagtcccagctactcaggaggctgaggcaggagaatcacttgagcctgggaggtggaggttgcagtgatctaagatcgtgccactgcacttcagcctgggagacagagggaggctctcaaaaaaaaaaaaaaaaaaaaaaaaaattactctatggttctgtggtagcctccagttgctaccaaattataaaaagctttcagttaccctcccagataactgatatcatccttagcctgcaggacagctatgcaaatctgaaggtcaactatccacaatatatgctttggtcttaaagtcactcctttcagttttgaaccaaattcataccttttgctttcaaaacactcgaggactccccacctgccttctgaagtctgaaattttctctaagtaatcctgattttgcacctgttacttcgatcactccattacccttagcacttgttattgtacttcctgtgcaagttttgtggattattaaatgtctttcacaaatgttccaatgtaatttctatttaaatgaattc

SEQ ID NO: 205393 - DNA, 1000 bp, Homo Sapiens
agtcaaggttacagagaagagagtaaaggaaggcagaaggtcatcacagtccctgggcccaaatgccattgcatccccatgccactagccctactcaaaccctagcctcccaatatgttctttgtgccctgtcgtgccatcggcatcatcaccagtgggggctcaccataccagaggtaaacactccttttctcactggcaaatcaattttattgggccactgccccaatctgctggcacaaatcgctatgccctcacaactgattgttatacagacccattcttggcttatccttcctgcccaactactgccaacaccaccactattatagccctcagttagttccctttgggcttctggtaacaccgactctgaccagggtacgtacgttaccgctcattcagtctgggcatgggccttttcaaacaaggcatcaccttggagcttccatttgtcttttttttttttttttgagacaaggtctcactctgttccccaggctagagtgcaggggtgcaattatagctcactacagcctcaacctccagtacttaagtgatcctcccacctcagcttcctgagtagcgcaccagcatgccctgcaaacatttttatttgttgtagagacaggatttcaccatgttgcccaggctggtctcaaactcctgggctcaaggctcaagcaatctgcctgtctcagcatcccaaaatgctgggattacaggtgtgagccagtgcctggcccatctgttgtactgttcacagaaagcaggcctaatagaggcataatggcttgttcaatgctctcttaaacttactaaatggacaatggtctcttaaattgatctctcttttgccgattgccttagttgtatgacatctgaaaaaacacaattagtgcttcctttgtcccctttctagcctcaaaatgagatactttccatctatgagtctataatacccaaacagaatccccctcacttaacgacacctcctcat

SEQ ID NO: 205394 - DNA, 1000 bp, Homo Sapiens
tccaaaaaaaaaaaggtcaaacaaagttacttccctttagggagtcctacaacacttgagggcttgttacgcaatgccccagtgggaggattaaggccacacaggctcctcattgcttcacttccaagctttacaaaattttccttaacaaagtggtgttgacaggatgggaaatggaaggattgaccttccaagctctgtcaggattacttctgagtaagaatttcaaatctttttgctctgaaaagcctagttctgctaccacttcaggttgatgataagaaaatgaaagcccaaggctgggtgcggtggctcatgcctgtaatcccagcactttgggaggctgaggtgggtagatcacctgaggttgagagttcaagaccagccgggtcaacatggcaaaaccctgtctctattaaaaatacaaaaattagccaggcatggtggtggttgcctgtaatcccagccactcaggaggctgaggtgggagaatcatttgaacctgggaggcagaggttgcagtgagtggagatcgcgccactgcaccccagcctgggcgacacagtgagactttgtctcaaaaaaaaaaaaaaaaaaagaaagaaaagaaaaacccgggaccagttctggtggctcacatccatagtcccggtataggaggccgaggtgagaggatcacttgagcccaggagtttgaggctgctgtgagctgtgattgtacctctgcgctccagcctgggtgacagagtaggacccagtttctaaaacaaattttaaaatgaaaaataaatttaaaaaataaataaaaaagaaaatgaaggcccaggaaaagggtgtgacttgtccaagatcacatagccacgcctagaagaggagcagaggctagaacctactttctccaacccccgtccccaggtcccctggatggcttgcctggccctgcaccctgtggggtccaggaactgctctgcatcctggcgggggttagggggttgtctac

SEQ ID NO: 205395 - DNA, 1000 bp, Homo Sapiens
atattacattgcctgatacactaaagtgtttcaattcatgaagtggtagaaaaaattaatagttgtccgtacaataggcggtatgagggggccatattattcacagtagtaatagtagtagaagagctttttctctataaaaaaaatagagattgattactttgagtttcgtagtctgattaaatacattttaagatgtctcttgagagataactctaaactaattagaaaacagtcaaagctttacaaataaattgttgggaacaagcccccaaaatctggccataaactggccccaaaactggccataaacaaaatctctgcagcactgtgacatgttcatgatggccataatgcccactctggaaggttgtgggtttacgggaatgagggcaaggaatacctggcccgcccgcttaaaggcatttttaagccacaaacaatagcatgagggatctgtgccttaaggacgtgctcctgctgcaattaactagcccaacctattcctttaattcagcccatccctttgtttcccataagggatacttttagttaatttaatatctatagaaacaatgctaatgactggcttgctgttaataaatatgtgggtaaatatctgtttggggctctcagctctgaaggctgtgagaccactgatttcccactttacacctctatttttctgtatgtgtgtctttaagtcctccagcgctctgggttaggatctcccccaccatgctggtctcggcaatatatataattaaggaaatggaaatctagatgaaatttcatcatccaacttcatttcttagaccaaaatcgttcataaaacttcatctatgcaggaaacttcccttggctaattctcaactgaataatgtatgtcttctacttaaccttttaattcattatttttgggggcagctcattattcagattgtatgtcaaacatactcagtgaaaattcatacttgggtattgataagtcagagaattc

SEQ ID NO: 205396 - DNA, 1000 bp, Homo Sapiens
catggtcatcaggatgggacctaacccctcccccacaacagcgcaggctcccagggaccgcgcccggtgcccacctggtcacagcggagtagctggcggccactgggaggatcctgtgcaccagctccctgatggacaggtccaggttggggtccacgaggaaggtccggctctgcctcccagccaggggctgagcactgacgtacctcccgtccacgcccaccagcacgtacagcaggtcctccaccacggccgactcctgcgaggccaggggcaacgtgcctgcgggcacagacagcgctgtggctctgcagcccccactcccatgcccccacagccacgtgccctcatctgcgggtcagtctcactcttgctcatctttgtttatgggtataaaaggtcagccactgcacttggctttgactgaccccactggggagccacaggctgagttccaaccgccgcaggacggggccggcctgggaggcgtggtggctggtgtcaagatctcaccacactcggctccgcaatgctcagatacatggctgacatttgaaaaggtgaagttaggagttgaaaaggcgactccagcagaagctgcactttcaacattggtaagtacaacttggtaagtctgagttactctgggacaaaaaaccttgtctttaaaaagctatcacttaaacgttaagaaactcttgataatttctatccagagaggatgagacggctgcaggacacacagctaagcttcctcacgaggacggccacgggccgccacccaccaaacccctcaggtcccaggaccaagttctcagtccacagcctcaggcgggccatgcctggggggccgggaggagcaccagacgaaagcaggatgttgaaactgtccccacgagggcctgacagggccccgtgccagccagaccatacccaaaccaggccctggcagctcaggaaggctccgtacaacaggctttcggtttacaaaatcactctg

SEQ ID NO: 205397 - DNA, 1000 bp, Homo Sapiens
tcaagaaatatcatcatggaaatatcaatgatggtcctatcttatctcagggtacatgtcagtattagtatcactgagataaaaacagatctgaatatgtttagggtagacaacatcctttggtccagaaagtttctttcaaataatctgatttacaaaagacactccatttaaaaatttttcagaaatggcaagatccttctctcagtgcctgcctcccatctgagcccttaatttagaaatctgagggcttaaaaggaccatgcctttcataatgatcttttacaaacattccttccttttctagtgcgtctttgtcttgttgtcccttgtatatattcctcactctgctaacatgtagtaaacccagacggattaagaaaactaaggttcaaaaatgttaaagatcaactgggcacggtggtgcatacctatactcccagctactcagaaggctaaagcaggaggttcacttgagcccaagagttcaagaccagtctggccaatacaatgagaccccatctcaaaaaaaaaaaaaaaaaaaaaaaaaagccaaagattatttttcacgacggggatttcggcgagaaacatcgacaccctcagcgttgaccagatgggcagtcctgcactgacaaacccactgagttaatgtagaatatgtcagctagctcaatgctaagagaccagtaatatctgtggcccagtctcttccagagaagaaatcaagccactcctctctctggcaagtatgtctcctctcataaaacaggctgacttcagaagtagctttcaaagacaatgcttagatcaagccaatcagcgtaagtactcttcctggttgggtgatagctctcactgtgacttcatataagaaaagccagtggtcttgtcttgctcttcaagaatggagcagtcacggctgggcactgtggctcacccctgtaatctcagcagtatgggaggctgaggcggaaggatggcttgagcctaggaattc

SEQ ID NO: 205398 - DNA, 1000 bp, Homo Sapiens
ggagggaacacccagactgcttcaagcttggccttctcttttcacagctctcctcagtcccagcctctgcagtccctgagacagcagacaagaggagcctgagttccgggcctggctccaggccctcaattttaagggggccaggacagacacctgggatctgtttggatcttgagatctctctttctctccctataagaatccttgagttcttggccgggtgcggtggctcacgcctataatcccagcactttgggaggccgaggcgggcggatcacttgaggtcaggagttcgagaccagcctggccaatatggcgaaaccccgtctctactaaaagtacaaaaaatttagctgggcatggtggtgtgtgcctgtaatcccagctacttgggaggctgaggcaggagaatcacttgaacccaggagccagaggttgcagtgagccaagatcacgccactgcgctccagcctgggcaacagagcaggactccatctcaaaaaaaaaaaaaaaaaaagaatccttgagttctcctcacagcaggaataaaactgggcagcagattcagcaggcgttagggtgggctgtggacctgagcaacagagacccagctcgagccttggctccaggacttgctgcttctggccctaggcaagtcatgagacttctcagtctcgttgacttcatagatcagagtggcgaggatgccccaggtgatggcacctggaaggtgagagcagtgggggagggcctatacatacctgaagagccttagtgcgcatgctgtctcagtgtttcactgaaagaagtgactcatctgtgagtgcgaaagcaagttgaagggtgaagactatctttaaaaataaatatgtataggccagacaagactgcaatatgacatgcaccacttacagtaagggtaacacgcatgtgctcctggaatgtatttctactggttgcagtcaaaaatttcgatgtcttccttttaaaacattctggc

SEQ ID NO: 205399 - DNA, 1000 bp, Homo Sapiens
tagttggtgaggatcacggaggaggtggtgttgccaagtgtcagcctcttcatgggttggctccactcgggaccaagcctggccatgtccacacctcgttccttcaggctttctcggattgagggcattctcttgaggaagatcctggcccagggtggaggaagcaaaaatagaaaagtgctgtacctccaccacagtggtggagtccctgaggccaaacccctgcttttagtacaaccacctttaacgttagcccagccacctggaaatcacctctgtcgctgagggcctctggagcatttataagagttacttcttgtcaagagtcaatttagaggagtcagctgcccggggattaaataaccctgaagtgacttccttctgttgcctaattttgattagacaaggctatttgtttattggtccgttcattcatttattccgtaatcacctgctgaacaactactttgtgcctcactgtgctggacactggagctagaaagataatgatcatgactgcctttaaggaactccacctggcgggaggacagacaggaaacaggcacagacattccctctgaagagattaatgccagggagtgcccctgtcaaaactaggggctggcggggagacagtgccatgggaggccgctaggtggcagcagatgcccacagcagctgcaaggtctccaggataccaggggacaggcacccagccagggctgtggtggagtggaccccctgagctgggttgggcctagagagatgccagcatcttcagagcgccatgcacctcgtccttggagagatgtgtcccggtcccttggcttcttgtctagatgttttcccatcacctttgagaggcagaattaaagagacctaggaaactgactctactgagccgctactgaaatcacaccaacaagctagctgtcatccattttatagatgagaaaaatgaaggctcacagggacaaaggtgactcagaaatgttgaagc

SEQ ID NO: 205400 - DNA, 1000 bp, Homo Sapiens
ctgcctctcaggttcaagcaattctcctgcctcagcttcccgagtagctaggattacaggcatgagccaacaaacctggctaatttttgtatttttatagagacggagttttgccatgttggccaggctggtctcgaactcctgacctcaggtgattgcctgcctcagcctccccccagaaaaagttaattataaaacagcctcaggcaggtccttcaggaggtatcagaagaaggcattgttatcataggagatgacagctccatgtgtgttactgccctggaagaccttccagtgggacaagatgtggaggtggaagacagtgatattgatgatcctgaccccgtgtaggcctaagctaatgtgtgtgtgtgtgtgtttcttagttgttaaaaaaaagtttaaagagtaaaaacaaaaattaaaatagaaaacacttatagaataaggacataaagaaaaaatattattgtggctggcgcattggttcacacctgtaatcccagcactttgggaggctgaggcagatggatccctggcagacaggagtttgagaccagcctggccaacacagtgaaaccccatctctactaaaaatacaaaaaaattagccaggcctggtggcacacgcctgtaattccagctactccagaggctgagtcatgagaattgcttgaacccaggagatggaggttgcagcgagcggagatcatgccactgcactccagcctggtcaacagagccagactgtctcaaaagctgtctcaagaaaaaagaaaatatgtatgtgtgtgtgtatatatatatatatatatatatatatatacacacatacacacacacacatatatatacatatatatgtatatatatgtatatatatatacacacacacacatatatatacacacacacacacgtatatatatttgtacagctgtacaaagtgtttgtattttaagctaaatgatattacaaaagagtcaaaagttttaaaaag

SEQ ID NO: 205401 - DNA, 1000 bp, Homo Sapiens
gactcacgtggactgagaagcattttcctcgaaccagcgggcatgtcggatggctgctaaggcactctgcaatactttgatatccactaaaaagacaagcatgatatgccaggatgaaacattttcattaaacaagctactcattaccactgctacagtcttaaaaacttggaaggagggcaggatagacggagtctcgctctgttgtccaggctggattgcgtacagtggcgtgatctcagctcactgcaacctccgcctcccgggttcgagcaattctcctgcctcagcctcctgagtagctgggattacaggtaaccgccatcatgccccactaattttttattttagtagagacggggtttcatcatgttggccaggatggtctccaactcctgacctcaggtgatctgcctgcctcagcctcccaaagtgctgggattacaggcgtgagccaccgcacccgaccaactctgcaattctttaagccaccctgtgtttctcatatcagcaaatcacttgtctaaaaatcactagaaacatgcaagatctgttttcttcaaaagcctatccccctccataaatattttctcagtcctttttaagtcctccaaatgctttcttggtcaccccatctgaaaattccactagcaagctgataaactatttccaaattacagagggagagagcaaagttcagaataaacctaagttcttcaattcccaggaagctgcatgtggaatagcaacaagctaagtaaactaaacagcaacaataccatgttttgaatatcccctaaattttccagcaatggaaaaaaaagaactaacaatggagttctggatccagttttcgaagattgggtggcactgttgtaatgagaatcttcactgtagcatcagaagaactgatttcaaagccagtttcgttggtcagcatggttaaaactgaaaaaacagaataaacaaaaactataactcacatttccattagatgatc

SEQ ID NO: 205402 - DNA, 1000 bp, Homo Sapiens
atcagaatatcagggtatacaccataaatatatacagttttttctgagacggagtcttgctctgtcacccaggctggagtgcagtggcgcaatctcggctcactgcaagctccacctcctgagttcaagcgattctcctgcctcagcctccggagtagctgggactacaggcatgtgccaccatgcccagctaattttttgtattttagtagtgacagggtttcaccatgttggccacgatgttctcgatttcttgaccttgtgatctgcccactttggcttcccaaagtactgggattacaggcgtgagccactgcccctggccacagtttttatttgacaattaaaaaaaacattatcatagggagaaaataggttagtaggtataaatgaagttgagatacatcatctccttctcttcctactccatttttcattgtcatgagcatttccctttgggagggatctttagaggacatttgtaaaagcagttgcttgtgctctcttaatctgggaaagtgggagtgggaatctcgtgagactatcaaagtcctaattggagctagggaggagaatctttattactctttattaaagaaaatggatataatgtttataattttaataaagcttgtgttctagtaacttacgaaaactattagaaagttgggttatccataagcaactagcaagccacatgctattatcatgttctaaaacactaaatttgcctctcaactattcaacacttttttttaatgttcactgtatactgaataagaaaaaaccctgatgctttagagttttattgtacaggattattaaaacttattaaagaggcttttcattgggttctttttattttgaaattttgttactgcgactgggcatgtttgatgctgtttgcttaagtctcaagctctgacctgccttgtttgatcacctgctgaactgaatgtcttgcatgtacctcatacttcacctggccaaaagagaattc

SEQ ID NO: 205403 - DNA, 1000 bp, Homo Sapiens
agcttttgaaagtactttaaggttgtgaggctcagaacaaattcctcacacttccctctgccaccaccctgtggccctatgctaagcacagcagtaaaagttactgccagaatttagatttgaagggctgatcagggaacctggttaacactgttcctagaaaagtatttgagtgcagcctatattcagaccctactgggactgcctctaaacaggaagttaacacacatcacatacggtcagggaaggcaaaccacagtgtcataaagatggatgctgctgtcaactacaaatcactctcacctcatggagagtgttctcaagtaaggaataataggcaggacaaaagtctgtaagcctcacctctactcaaactgggtcactcagcctatagattcagccttctgattcctgctgattagtacttttctaccttgttccatgatgactatcactgccactggactaaaaaaactctattcccctaaaaagtgaagacagccttaccatcaactagttattcatataagctatctgcttatatgaatccgatccttgacccagtccattcccaaatggccagggactagatatccgtcacaaaaaaagcagcacgatccaacaagtgtgggccttccctcaaaatatactgaactcctccatagcacctccagaagtggcctccttcccaactaagtactgacagaaatactactctaggacaatacttgaaaggctgctccagcaccaaaataagaatccaagttatcagactgcaaggaagagttcaggtcagcataccaaatgaaaagcaataaagttagcactaaactcccaaacaggataatcaccaacaacatataggcaccatgctgctgccagaaaacatcaaagtcatctgtgctaggaggggaaggagactagatggctggaggacagagatgggaaggaagcttacttttcactttgtacaaccacatgcatgcttttctactcaaaa

SEQ ID NO: 205404 - DNA, 1000 bp, Homo Sapiens
ttgccgtgacttgaagtctgtcttttctaataatgagggaaggaatgtggtcttcatgtcattaggcatttggtaatgatatattaatatagttgagatgcataaagtaatgaaatcaatttttcactttgactcttttgaaggtagcttcataacattacagacaccttgtgttattttaatatgacacttttagctatgagttaatgagactgcctttccccatttcagtgatttttgctgataaatatatagattaagcacaataacaagtgttctgttaatagcatttctaagtcatatagcttctcattcatatttggaatcattattctaagttaattagttttttttcttttttttttttaaacaaagtgttgctctgttgcccaggctggagtgcagtggcataatcttggctcagtgcaacctctgcctcccgggttcaagcagttctcctgcctcacccacccaagtagctgggattataggtgcacaccaccatgcctggctaatttttgtatttttagtagagacggcatttcgccatgttggccaggctggtctcaaattcctgacctcaggtaatccacccaccttagcctcccaaggtgctgggattacaggcgtgagccaccgcgcctggccagtagattagttttatattggcaaatagaaattatttacattgaaatccagtgggaaattgtaacattgctgtataaaactacaaagaggtgtgctttgttcttactggatattaatggcagttaaactagttccagagtatatcttgcatgatataagaagaataagagatttgtctgatttaagaaattaatttagagaggttcaaatctggtagcttttctgaagcattctatacaggtaatcttccatttagtcaattaatccttgttggtgagaaaaatttaatgcattcttttcaaaccgtatttcagtaatttgtgttcattactcagttttgcctaatttaagg

SEQ ID NO: 205405 - DNA, 1000 bp, Homo Sapiens
tttattttccaaattcttttttgagattgaatcttgctcttttgcccaggctggagtacagtgatgtgatctcagctcactgtaacctccgcctcctgggttcaagtaattctcctgcctcagcctcctgagtagctgggattacaggcatgagccaccacgcccagctaatttttgtattttcagtagagacggggttttgcaatgttggccaggctggtcttgaactcctgacttcaggggatccgcctgccttggcctcccaaaatgccccagcatcatcccaattacaggcatgagccactgtgcccagcccaaattcttttttttttttttttttgagacggagagtttcactcttgttgcccaggctggagtgcaatggcacgatctcagctcactgcaaccttcgcctcccaggttcaagcaattctgcctcagcctccaaagtagctgggattactggcatgtgccaccacgcctggctaattttttgtatttttagtaaagacagggtttcaccatgttggccaggctggtttcgaactcctgacctcaggtgatccacctgcctcggcctcccaaagtgctgggattacaggaatgagctaccacgtccacccagcccaaattcttaaatagtacctagcacatagtaggggcttgaacaatatgtgttgaatactgaatcagctgattggtccctccccggggtgcccgtgctcaccagagccacgtggactgtgaactcaacgccaatgcctacagaggccacaaggatcaccacggggatggcactcagcttgatgcccaggaaacccatgataccaaagagttccactgtcatcatcgccaggaccagcacctgagggagacagggctcacagagggctcctggcaggagggatgacaggctgggcagggaagggtggggtgtctctgtccccactcctgcaagcactcactatgaggccagccgtccaggggttgaggagcagca

SEQ ID NO: 205406 - DNA, 1000 bp, Homo Sapiens
gtgagtaacatacactcagaaaacagcaggagtgttttggaatcctatgtaagggacaaacattcagatcctcatagcagtgtcctggatttctgcgtgagggacaaacattcagacccccatagcagtgttctggaatcctatgttagagagaaacattcagaccacagcaggagtgttctggaatctcctgtgaggaacaaacattcagactgccctaacagtgttctgaaatcttatgtgactgacaaacatttagacgccagcagcagtattctggaatgcaatgtaagggacaaatattgagaccctagtagcagtgttctggtatcctatctgagagacaaactctcagaaccaagcagcggtgttctggaaaattatgtaagggataaggattcagaccagatctggtatgctctggaattctatgtgaggaacaaactctcagaatactgcaggagtgttttggaatcctatgtgagggacaaacattcagaccctcgtagcagtgttctggaatcccatgtgattgacattcagaccacagcaggagtgttctggaatcccctgtgaggacccaacattcagacctctgtagcagtgttctggaatcctaagtgagagacaaacatttagaccccagcagcaatgttctggaatcctatgtgagggacaaacattcagaccctcgaagcagtgttctggaatccaatgtgtgggataaacattcagacaatagtagcagtgttctgtaatccaatgtgagggacacacattcaggccctcgtcggaatgctttgaattctatgtgagggacaaacactgagacaatcttagtactattcaggaatcctctgtgaggtacaaatttttagaccacagcagaagtgttctgcaatcctatttgagggacaaacattcaaacaacagagggaatcttctggaatcctatgttacggaccaacattcagaccctcgttgcagtgttctggaattc

SEQ ID NO: 205407 - DNA, 1000 bp, Homo Sapiens
gactagagagaaataggctctcttaagtgaaagcttatgattcaatcaaccaactataaaataattttagtctaaatggacccataaaatattctcaaatcatatttgaacacatcaagaagcagagattcagagaggtagagtgacttactgacagcaagctgaaatggcagcagaactttggcttccagatcctacatagtaagtgttttctgatttgtttcacccttagagttgccaatgcttgggcatagcggtgagatttctattcagtgctttcctggaattgctgattcttgatcctatatgctgccctttataaaaaatggatctgtaaacttatatcagtctctttcaatgacactgttcagtcacttgaacactggagcattactgaagccctgaaaaggatttggcagatggaaaaaagctcatggaacctaactattaacacagtggtctttcctgaacctgttccgcattcactggactgtgcctgacttgcatatctgtggccttgtcaaatatttgccttaaatttcacttcttgcaaaataatctgttaatgaaggggtcataaccaaagtcttgattcatttttgtacaggttatcttttagaccttctacatggtttttattaacacaggatattgcttaggaatcttgaggaggttttaatttactttcctaagacttttttatatcatttttcattttgccaggtacttttataagacaatttcacgattatagatgtaattctgtagtcacaagtctatatattgtttttgcagcaatatgatttgaaattgatgtaaaattatggcaattttggtcattctaaatgtattgtcatatatttaaaataatttgcaaggggttagtgaactacattaattatggatattgatatgcttttagattattttgaatatatttaataaaaggaatttatgcagagttaaataataggaagaatttcatattaaaacataatta

SEQ ID NO: 205408 - DNA, 1000 bp, Homo Sapiens
gatatatatacctgaaaaaattataaaataataaaaatatatattgtatatatttaaaatatataaaaattatatattaaatataattatacattttaaaaatatattaaaaatatataaaagcatatataaaagcatccatttcaagtttgatgacgtgtttattactttaaaaggtcctcctgtgcccttgcagtcagtcccgccctccccctaccccagcaatcaatgatgtattttctatcactatacaggttagttttacctgttctagaaattcaccttgatggcgccacacaggatgcactcttttcatcactcggcataatgtttttgagatgatccattttatctcatgtttccgtaatgtgtcccattttattgctgggtagttcgggtagttggggtagatcgcagcacattctgccgacaggtgagactgcgattccgacctacgggccttggttaatataagcaagggcacctgggcgcggggagagccgttcccctacagaaagcaagcgtgttgtgtctacaacggaacggggacactgctctcatcccaaagaacagcacccgtctgcgtagagtttctacctggctctaggaggtgagaacacattccctgctagcacagaaatcctacaaactactgcgggggctgcggttagaagcagaggctgtgtgaagggtgactctggaggctacgaaaaaacacgaaggttttcacagagaacccaagagactggagaccatgaagcaaagtctgcaaaaagcagccccacatagaaaggttggggaagagccctgcggccacttagtttgtgttaaataagctcacgacagcggcggagaggacggtaacgcgatactttgtttctcacgcttgagacagtaaggacgacacttaacatgccgtcaaagctacaaacccatagaaactaagagtagcccttcgcgtagagctcacgttttgcactgcagtatctcagcggaattc

SEQ ID NO: 205409 - DNA, 1000 bp, Homo Sapiens
gctgctcatgcagcactctgccctgctgtgtaccctgtttcctagcggttctagtcacccccagagggagcaccctgttgtgtagcgaggagcagagtccgggtgctggtccaggtgacattctcttccaggcctgcgtgttccccccagaggcatccctttctctgcctccatccatttcctccattgtctgggctacacctcctgtgcccttggggcactgggcaagtggctgccctctcctgctgagtacaccaccaatggtcaggcctggcaggtccctgcgcctgattagagctcaggctcagcccagcctccctctttacccgcttccttgtggtcctgaggctgggccggtttccacccatagcatccctttctccaccccctgctgcgggacacctaggtggatgtggcctggggctggggacctggctctagggaggggcttcttggagccccggcctagaggagacaagtgtggcctctgtgaatcctgctctgccatttagcgtcccggtgaccttaacctcgctaagcctgcttcctcatctgacaaacggagaaaaccaaaggccccactctcggatgactgtcccagcttagtcaggtcacagagcccttcactcacaggccagccaacctcccccagcccaccccggcatccgcccttgtggtttcacacaggccttcctcacaggccagtgtcctaatgggagactctcccctctccacaaactgcacgcttggttttgccaggatgccctgcctcagccatggacacggggctatgggcaggtatgtggttctgctctgatcgcacctgcccacccccgaaggtgtctgtcctggcagcggctgggcctggggcaagctgagcctgctgctgtactcctacttttgctgggctcagttgggggaagtagaatgacaccctgggcccctgggtattagcaacattcatcagcccaccagacctgggcctgctgggccccacagt

SEQ ID NO: 205410 - DNA, 1000 bp, Homo Sapiens
taaatatattttggctgggtgtgtggctcacacctgtaatcccagcactttgggagaccaaggcaggaagatcacgtgagccaggaggtggaggctgaatgagccatgatcatgccactgcactccatcttgtgcaatagagttaggccccaacacccctcccaaaaaagactaaactttttgttatatcttagattggttgtcaccttctcctctaaagcagcatcggctctatttgaaaaatgacccaaatacaaattcaaggtatgaggagcagaccttgagttcacctcctcttacttctgcttttggatagaggatgcattcttctttaaggtgtgtgtgtgcaaaagaagaacaaagtatcagattactctatctgatcctttaattcaggagtatctagaggactgattcccaaaagggcacaacttcaatgttatctgtcatggaaggaaagcataaaattcaaaaagaaagtgatttggtcgaatgcggatgcacccattaggacgtgtcaaaataaagtcagtattaaacacaaaccccacctcagcaatggaatgtcaatcacactacggcacacacttggcaatgcactgctttattctttgtgataaggtagttgtgggatgatccagggttgacttttgccttctcactgagaaaaccaatagtctgttgaaagccattattaccatacacatctccacacacctcccaccatttgttataaactctagcttgacctggtgattcagagggatgccttctcagcccccaaaatgttggctgctctttcacatccttggatctttgataatccagtcccccacactaaagatgacatggccttcttttctacctgctggactgatacatgtccttcaagttttggttcagagtgaaggctatgttcatcttccatcaactctttcactctcaccagcaagactgcagtgttcagtgggctggattgcacactgcacaacactaagga

SEQ ID NO: 205411 - DNA, 1000 bp, Homo Sapiens
gtttgaaaaaaatatattgtttaatgttaagataaaatagaaaactaaaagggtagtagtcttctgggagtgaaattattcagctgatatgatgaatactttttcaagcctgagttggggaaagaacaacatatttttatgtttaaaaaatacttcagtgggtggttagaatgaagaggcaatatcaaactattttatagtgttagaacagaaagagttttaaatttgtcctgttgtctaagaatctgataactttaaaatctataaccaagacgaattttactatgtaagaatacagaaagttaactaaagaatacaggaacattgtagtttatgctttttaaaacagaccaaagttggaaattctgaaatattttctattacaaacagctgaaacactgaacaatgtaaagttcagatggttccatttcatttaaaatatgcatactgcaacctacacaattattctcaaaacagataaaatatgttttggactgaagctaagtgtctagatttcatatcttggcaactgctctacaatttgcttacattcttttcaaaaacattttgtttattggaagtactagtcatagactaacgatggtatttttaattatcttcagaaaaaactgaaaatattaactactatataatgccatctattgactaaggaatatctgtaacaagttgttttaagtagaggttgattatgtaaagtaaataaatttcatgcctcaccatgtgatgataatgtgacatttcatctgtatcagcccactgaatggtcatatgtcttaagtcttcagcataacaaatttaaaataattatgaaaattcacatccaaatcttacagaaaaagaacctttcatttcattattttcctaatagtcataaagccagtgttattgaagaaagcaaaattaggcttatttcctaagtaactgaagaaagaaagaagccttcctttgtttaagaaatctgtgtttagcagaggagatc

SEQ ID NO: 205412 - DNA, 1000 bp, Homo Sapiens
aacccatcatgtgtttgcctttcttctccccagtccctggccccacctcttctgccacaaacgtcagcatggtggtatcagccggccctttgtccagcgagaaggcagagatgaacattctagaaatcaatgagaaattgcacccccagctggcagagaagaaacagcagttcagaaacctcaaagagaaatgttttctaactcaactggccggcttcctggccaaccagcagaacaaatacagtaagatctacaggctcaccatcatgaaagtgatgaatgatatcctgtcttctctctgagacactaaatgctctctccatcaaaaataatttcatccttcctgtacttctaggaaaacagaaatgggtattttaacattttgtcaaagttggaagacagaggtaccaaagtatttagcaactttccatgttttcaatcaggtgggggtgggactagagttaaactgccatttattgatttctgacacaggcacagaatgacctgttttctccaagaggctcaatcgtgttttcaagaatcctctctaccatataagatcctgcagacaaataacatctagtctgttgttctaaatgtctgagactagtgaacttttattcagttcaagtttctgttgaggcccaacagacaaagctctgttctagtgactctgagggaaacttggtgatagtagccagtacctgctctgagggcttaaagaggagtctattcctaatagaacctgtgctgtctataagtgacagcatcaagagcagggagtaggggccgtgcatggtggctcactcctgtaatcccagcactttgggaggctgaggcgggcagatcatgaggtcaggagtttgggaccagcctgggcaacatggagaaaccccatcttcactaaaaatacaaaaagtagatgggcgtggtggcaggtgactgtaatcacccctgctcaggaggctgaggcaagagaatcctttgaacccaggaggct

SEQ ID NO: 205413 - DNA, 1000 bp, Homo Sapiens
ggcggccgccccgtctgggaagtgaggagcgtctctgcccagcagccgccccgtccaggaggtggggggtgcctctgcccagccgccccgtctgggaagtgaggagcccctctgcccggccgccaccccatctgggaggtgtacccaacagctcattgagaaggggccatgatgacgatggcagttttgtcaaatagaaaagggggaaatgtggggaaaagaaagagagatcggattgttactgtgtctgtgtggaaagaagtagacatgggagactccattttgttctgtactaagaaaaattcttctgccttggaaaaaaaataaaagacaaagacttacatcagtgaagttttcaggggtctaatggtctgagggatggcaagatatattcttcaaggtgaaggacaagttgcagcttgtacttcctacccctaagaaaaaagttcagtgcctagtggatctctttagattttgaaagcaggaccactttgttcatgagcctgttaagcgaaaatggtgggaggtagagggctggagaaagaggctgactataccacatttgggcctgtttccttcacgaaataacccataaggctgccagattttttttttgtttttagatgcagcctcgctctgtcacccaggctgatgtgcggtggcatgatctcagctcactgcaacttccacctcccaggttcaagcaattctcctgcctcagccttccaagtagctgggattacaggtgcctgccaccatgcccaccttatttttgtatttttattagagacaggatttcaccatgttggccaggctggtctcgaactcctgacttcaagtgatctgcccaccttggctttccagtgtgctgggattacaggcgtgagcagccgtgcctggccaaggctgccagatttttttaattttttgtttttttttagaaatagggtctcgctatgttgcccaggctagagtgcagtggctattcaccagtgtgatc

SEQ ID NO: 205414 - DNA, 1000 bp, Homo Sapiens
agccagatccacctctgtgttccttccaccattatcccataccctcaatatccattccaatgcctgttctccagatttctgtttatataaattagagaactcaagcagttctttttgaatgtagtgcaactcctcatgggtcacactttcaacctcacctctaggagcctgccaggactttagttataggtctagaagcaaacagaggtgttgggagtggctcctaaggagaatcaacattattttgcctggcaactgcctcagaggaggtcatcactgttgcctcaggcagcacagggtttatctcctcagacaaaggtggagaggctgatggcagcatgggtcaaggaggggatgctgccactactggggatggggaagctgttccttctggccaaaaaggttcatcagagtttacaagctcagtgtccccagcttcatcaggtaactcccacacatccccattccaaggtgcagggtcccattcttttccaatcaatgccctcactttaacagcagacacctggcaaggctgtgcatgcacctttcattgcagatcagccactgacataagagcttgtgtctgtttttccacaatttcagctgtttccctacaggagataagactctcactcaggaaaatcttagcagatttgaggctcagtatctgcttctgaagctgaaagacagaatccctgagttcatcattttctttcatcaatttgtccactgaacttaggggcaaaaaaacagcttcattacattcattggttctccacatatgtccaaaggtattatgtatagagtcactaaactccttgactctcacaagtggtgaatcaggagtgtcaaatgcatttgttttgcataactttctaaacagttcacaccaaggactatcagtgttttccatcgcattagaagtagagtctttagcattattgggtctaatcatattaagtagctgactccagaaacctcaaaaccaatgagagaattc

SEQ ID NO: 205415 - DNA, 1000 bp, Homo Sapiens
atggaggaaggagaaatttcatccacctgaggaattaagaaaggcttcccagaggggacatttggtttattgaaggatgagtaacattttgataagtgatgaaagagggaaggacattctattgactggaaggagcagccagagaacagccaagcagtaacgttcaggcagtgtgtgtgtgtgtgtgtgtgtgtgtgtgtgtgtgtgtgtgtgtgtgtgtggtggggggtgcgtaggggtgagggagtggggaggtgctgggtggtgggagatgtaatgggaaagatagcctggggctgaatgaaggaggggttgattgttaggctgaggactttggactctatttggtgggcaatggggagccacagaagatttttgagcatggaagaaacacagtttggttttaggaaggtgactctgggtgggtgaagagggtggtctaggtgggctatttaactcatgtcagtagcttgttgttttcatcggggtttttcttgtccctttggggtgggacagggacgggggtggtgtctctgaagtcagccctcctggtttgcattctgggtgtacacgtgttcgtgtgtttgcacacatgtaggtgtgtgcacagcatcctcactcctggaggtcaaatattggaaatctgctgtgtgtttgacaccaaacatcgcccattaacatgttcctgacctctgccccctacaccccagggctacacccacccacccacccacaggaattcattgcctctcaggcgcctctcaagaaaacgctggagaacttctggcggctggtgcgggagtagcaggtccgcatcatcatcatgctgaccgtcggcatggagaacaggagggtgatgcgccttacaggctcctggaaaggccaccaggtggcgcacgttctccttgtgggaatggccccgttggcatcttcccgcagggaaggcggggcagactggagtgaggccaatcaggcctggagggtggtggaaccacctccc

SEQ ID NO: 205416 - DNA, 1000 bp, Homo Sapiens
gcagcataattgctggtgattaagtaattgccagactttgtccaataaaagtcagcacgtgaccgtgcccagactctgggccatctccagaagacaatggcctagtgttctgtcccctgcgcggctgcagaaggcaggggctctgccctcgacaaagcaacaggtcccgcaggggtggtactcacacgcaggcctccgtgccattggccgcttcacacttcccgccattcaggcaggtctcaccgggctgggagcatcgcgggcctaggcaggggcaggagaagagaggtcagtctcacccgcaccaccaccaccgaaggccctggttaccctgggggcggggacctgcacccagccaaggggcatcgtccgccccctaccccggacgcactctgctcagtatcatgggttgctggggcacgggtccgcaggaagcccctccatgaaaccaaaggggcgtcaacattctgcccagagttctgtagtcagaaatggggggaaggggagcagcagggaacacgtcctgcttgaagcagggtggggtggcctgatgtgccgcctggacgcagtgggggaaaagcagagacaaagtgggctactctccaaagcgttgccccccaccctggaggctcactgaggagtctggcagggcagggccccccatccagccgccgagattgcctctgttcaaacccgttctgcaagggggcagagctggacggggggagggggggtggccacactcagctcccgcccgtgggaaaatgcgacagctgctcgcccgctaccccgcccgccaacaaagcgccggcctccgcctcagaatcagagcggcccattgtggagtcggggccgcctccaggggcaccgggacagcaccctggggacgcggccccgcctccgccgacacccaatacctgcctccgcgggcgcgcatctccagggcagcccccatacacccacaggagggggatgaaggtcccccattcggaaggaattc

SEQ ID NO: 205417 - DNA, 1000 bp, Homo Sapiens
agtcaaattgtttcagtttgtggatgatatgattctatatttagaaaaccccatcatctcaggtccaaaactccctaagctgataagcaacttgagcaaagtcccaggatacaaaataaatgtccgaaaatcacaagcattcctatacactaacaatagaggcaattcatgaattaactctcattcacaatgactacacagataataaagtacctaggcatacagctaacaagggatgtaaaggacctcttcaaggataactacaaatcactcctcaaggaaataggagaggacacaaacaaatggaaaaacatttcatccttgtggataggaagaatctatatcataaaaatggccatatcgagcaaagaaatttatagattcaatgctaatcccatcaaactaccattgacattcttcacagaattagaaaaaaacttcttttaatttcatatggaaccaaaaaagagcctgtatagtcaagacaatcttaagcaagaagaacaaagctggaggcatcatgctacctgacttcaaacaatattgcaaggctaccgtaaccaaaacagcatggtagtggtgccaaaacagatatatagaccaatggaacagaacagtggcctcagaaatagcaccacacatctacaaccatctaatctttgacaaacctgacaaaaaaagcaatggggaaattattccctttttaataaatggtgctgggagagctggctagccataagcagaaaacagaaactagaccccttccttacaccttatataaaaattaactcaagatggattaaagacttaaatgtaaaactcaaaaccatgaaaaccctggaaaaaaacctaggcaataccattcaggacataggtataggcaaagacttcatgacaaaaaacaccaagagcaattgcagcaaaagccaaaattgacaaatgagatctaattaaactgaagtgcttctgcacagcaaaagaaactagcatcagagtgaac

SEQ ID NO: 205418 - DNA, 1000 bp, Homo Sapiens
tgatgtcttattcactagaaagatttttcctaagcagaagttgccaaaatatgacaaactaggggaaaaagttatgacttgggaaggcatgataaaagggtaattttcttaatttataaaaggatcttataaattaacaaaaaaatagataagttgattcaaatcagaagggaaaaaagatatgcaaacagccaattagactcatgaatcctcaacctttgatatggtttggatctgtgtccccaaccaaatctcatgttcaattgcaaccctcagtgttggagttaaggcctgctgggaggtgattggatcatggggctggtttctcatggtttaataccattccccttggtgctatcatcctgagagtgagttctcatgagatctggctgtttaaaagcatgtggaacctcccccctctctctgggtcctgctcctatcatgtaagacatccactgctgctttgtcttccaccatgagtaaaagctccctgaggtctcccagaagcagaagccgccgttcttcctgtacagactgcagaactatgagccaattaaacattttttcttgataaatgacccagcttcaggtatttcattatagcagtgtgagaatggactaatacagcctctcatcacccctcactaattctacaaatgaagatgctgggctgcaaatgtacacattactgataaggaatttccctgctcccctgaaggcacccccaaccccagcattggtgaagcttaaacagggcaggctatgatagataatggctggtgaagacagcaaagacttggcagcactcaccatggcaaagttcctcacttgatgtctatccccatcattttgcacatgaggaggtggaagcatggaaaggtcaagttacccatctatctaggtaactatttcttctttgatgtctcaaagatacctctcactcgctgttcacaataggctcatcatcttttttcccagactatcttcttctcttgaattc

SEQ ID NO: 205419 - DNA, 1000 bp, Homo Sapiens
ccctggacctttcctccctgctctgaggtcctgcctccatcatactcatttctcccctggaatcctgagctaggaccagagcaagagaaagctaacttggagtagaaaggatatgggggatgaatcccagggtagttgagggttgtgaagggaaaaatccctagaattgagaattaaggctgggcgtggtagttcatgcctgtaatcccatcactttgggaggccaggggaggaggattgctgaaggctagcagttcaagaccagcctgggcacatagggagaccctgtttctctaaaaaaaaaaaaaaaaaggccgggcgcggtggctcacacctgtaatcccagcactttgggaggctaacacgggcagatcacctgacgtcacgagttcgagaccaatctggccaacgtggtgaaaccccatctctactgaaaatataaaaattagccagtactaggaaggctgaggcaggataatcgctggaacccgggaggtggaggttgcagtgaactgagatcacgccactgcactccagactgggcgacagagcgagactccatctcaaaaaaaaaaaaagagagaaagagaattaacctcccttctttatgcacagagagtcatagcaaaaagggaggaggtgggggtgttaaatcttgtgtgaacgtgatggtagatggtgtacttcaggtacaaagaaactgtaagaaaaagggaaccgagtgacagaggaaagagctgagtgattcctctggttaactctgagaacttcctctccctttacaagctggctctgaagcaccgacaaggcaagaatcacaagatgcgcatcattgcctttgtgggaagcccagtggaggacaatgagaaggatgtgagtccaagtggcagctggggaatgtggggagcccatgtttgggactgaggtcttccagccctcaggagaacctggcagaggcatcaggctcatcactttggggaaaggtgaatgtggagaattc

SEQ ID NO: 205420 - DNA, 1000 bp, Homo Sapiens
aatacgtgaggccaaaactgatagaaacatgttgataggttgatctactattacagttggagacttcaacaccactgtatcagaaatagagaaattcagtaggcataaattcaacaaaaagatagatgaacacaccataaccatagactactccatggaacaatgcagaatgaacattcttaagctcacctggaatattcataagatagaacacattctgggccttaaaacacactttacagatttaaaataatagaaatcaaactgatagcaaactctgctatcagactgcaatggaattaaattggaaatcaaaaacagaaagataactagcaatccccaaaataagtggagaataaatgcttctaaataacagttaaaagaagaaatttcaagaaaattcatttctcatgaactaagtgaaaataaacgcatgccttattaaaatatgtgagatgtagcaaaagctgtgcttacagggaaatttatatctctgaaggcctattttagaaaagaagcaaaatctaaaattagttctgtaaattgataccttaggaaactagagtatgaagagctaattaagccaaagtaagcagaaaaaaagaaataataaaagttggagcagaaatcattgaaatttatgaaagctggttctttggtaaaattgattagcccctttccaggctaatttaaaaagagagagagagagagagaggacacaaattactaataccataaataaaagagaagtcagacatctctacaaatttcatgaacattaaaagtataataaaagggcattatgaaaaacagtatgcccatacatttgatgacctaataaaatggatcaattccttgaaagacacaatctaccaaaactcacacaagaaaaaaaaaagataattggaataagtgtatttctactaaagaaattgaatcaatcattaatagctttccaaaacaaaaagcaccaggcccacatgagttcacaggtgaattc

SEQ ID NO: 205421 - DNA, 1000 bp, Homo Sapiens
tctgaagatttagaaacacctgtcttgtgttttgggtcaatcttaatgagcaattcagcaaacctaaatttgatacatacagggagaggcagtaacttcattaacaagtttctggttaattgtcggctgaactttcactttgcttgacaaaactctagtcttttcttcatgaataatgagcatatcaaagatgacagcatgggtgtttgaagagtttagggaacagtcttcacaagttccttcaaaattgccaacaacttctcctatctactccataaaatagctactctaaatttgttattaaaatgaactcacgaaggcagcaatgtttcccatttctctttgtaacctagaacttaaaaacggatgagcaaggagcaggaccccaaacatgtttgtgaaataaagcaaagggctacaatttgcagcttcttctttgctatgttatggtgaagtaacaatggtgctctttgaattaacattataacaaaactttatgttactacaaaaacttcctggacttcatttttatggctatgtgtacatagagccacttccatatatactcattgtctgactgaattatctgaattatttatttaccattatctttctgtcttttttttttttttttttaaagagacagggtctcactctgtcacccaggctggagtataaagaagcaatcagagctcactgcagcctccatcttctgggctcgagcagtctacccgccttgtcttcccaaagtgctaggattaaatgcctgagccagagcaactggcgcattgaccatttttcttattgtttaaacagattgtttccaaatttttgctctgttaagtaacactttggtaaacaacttggtgcaatattacactttacacatcctatttgactcagatcttctgtgaattcttagtgacctttctgaggggtgaggttttggtgtgctgcatgctttgtcaagaaagaagtgggttaccttattgctcaggtt

SEQ ID NO: 205422 - DNA, 1000 bp, Homo Sapiens
cagtggtttttcatctcagaataaaagccaatgttcttataataacctatcaagcggccagccacattaaccctcttatggtttctccaggggaccagaatagtcctgctgcaaggcctttgtacctgctgttccctctgcctggaatgaactttctctgggtttccacgcagctcactcattcacttctgtcaggtctcgttgcaaatgtcatcttatcaaggacactgttcctaaacactctgtttaaaatagtacttcctctgcctctttctctgattttattttccctgctaccatatattatcacctgacatcctatgtattttacatattaactgtttattgcctgtttacccattgctagaatctaaatcttttaaaagtgaaattgtctttttttcctcactgtctcgtccttagtgcctacatacagtgcctgccataaagatggtgctgaagaaatattcgttggtgtttaataaacaaagcaacaatactaatcaatttctacaatttttaagtctcatacctttttctttagggatgtgggagacagtggtcatgaagggagaggcttattaaaaagttgacaatggggccgggcgcggtggctcacgcctgtaatcccagcactttgggaagctgaggcaggcggatcatgaagtcaggagatggagaccatcctggctaacacggtaaaaccccgtccctactaaaaatacaaaagattagccgggcatggtggcgggcgcctgtagtcccagctacttgggaagctgaggcaggagaatggcgtcaacccgggaggcggagtttgccgtgagccaagatcgcaccactgcactccagcctgggcgacagagcgagactccgtatcaaaaaaaaaaaaaaaaaaaaaaaagttgacaatgggctgggagagagagagagaggagaattaagtaaaattccacaaaaagaatcatcatgcatggttctaaagtaacagaaagaattc

SEQ ID NO: 205423 - DNA, 1000 bp, Homo Sapiens
taatactaattgggatacaacatgcccatagatgcctatcatctttgtcttcaaatggtctttcctctgtgttctagtttcctcttcttgtaaggacataagtcatattggatagggctcatccatataatttcattttaccttgattgcctctttaaaggctctatctttaaatacaatcacattccgaggtactgcaggcagaacttctcagtatatgaattctgcagggacacagttcagcccataacaccatcctaatgaatgtgaatttgtaggtcattgtggttttgatgtgcatttccctgatgactaatgctacatcttttcatgtgcttattggccatgggtatggattctttggagaaacattttcagatcatttgcctattttaaaattgagttatttatccttctattgttgggttgaaagagttctttatatattctggatactagactctagtcagatacatgatttgcatatattttctcccattctgtagattctcttttcactttgatagtgttctttgacacacaaaagcttttaattttgatgaattccatcttatctatttttactttgcctgcttgtgctttttggtgtcatagcaaaccatttcctgttacaaggccatgaagatacacacttatgtttccttctaagagctttatgcttttacctcttacatttccatctttagtctattttgagttaattttagtatgtggtgttaggaggggtctaaattcattattttacatgtgaatatctagttttcccagcaccatttgttgaagactatttctctgctctccccatctctccttcctattgattgctttttgttgaaaatcgcttgactgtaaacatatggatatatgtctgaactcacaactctatgccattatctatacagttacctttataccagtatcacactgccttgattactgtagatttgtagtgagttttgaaatcaggacatgtgaattc

SEQ ID NO: 205424 - DNA, 1000 bp, Homo Sapiens
atccagttatctttattttgagtcagttggtcctttgactgaagccaaacttcaaatgatgaaaacttaacggggctcagagaaaagctaatgtaggatttagaaagatccactcacgggttacacatcatcgtttttcatggatgattactaaattagtcagagcaaatatctataattttacctgcagagtcacagccctagctctgccaagtaccctgagctttgtgtgatctgagggacagcatacatagccttggtgcagtcaccggggtgaccacagaattcccttattccaggtgacactgaccttcaaattaaaacaagcctctgtcttaatggctaaaattggtgagaaatggaaccaaagtttttccgattttgataatgaaacactgtaggagtaaccaggcaaaaacaaaattaaaaaggtgactttcaatagtacaaaaattagatttgcttcaaactcatgcaatattgaatgtccgtcaatagtacgaaaagactatattcgatctattgccttttacaagtggagtctttaggagacaatttttcgtacacaaagccttagaaaacagctactacgtaccctttctgaaaaagaaagaaaaatattttactcaacagaaaaatgaatcaaaatttacaagtcaaggccaggtacagtggctcatgcctgtaatcccagcactttgagaggctgaggtgggtagatcacttgaggtcaggagtttgagaccagcctggccaacatggtgaaaccctgtctctactaaaaatacaaaaaattacccgggcgtggtgatgggcacctgtaatcccagctatctgggaagctgaggcagaagaattgcttgaaccctggaggcagaggttgtagtgagcccagatggcgcctctgcactccagcctgggcgatggagcgagactccatctcaaaaaaaatattcgcgagtcaagatagttttgtgacatgtaagaactgatgagtgca

SEQ ID NO: 205425 - DNA, 1000 bp, Homo Sapiens
cacatttctaattggccctggctggattccctggaagaggacgtccagtccaagttaggtggggtttggttcccggtgcgtgaacttgcaggctccactctgtactatcacacccaccccccaatgccatacacttctttcaatttaggattgtttatagtcagtcgagtttttccagattgactaagagttcctcatctgcctactgtagtcagctacaagaacagtaaaagagacccaggacttgggccagctggaagactcagaaaaaagtttctgtgggatgcagacagctaaagaatgacaatcacatgcaattgtcccaaaccccacgtccgccccaaaggacaccctcatctgcccttttcagtccccttcacaaagagcttcaggagcccttttatggggcatcgcctcaaggaaatgaaactgctgagaacaactctgacttccccttattcgttgtgtccaagggttaaaaacgcttcccaactccccctccaaatgcaaggtcaagcggctgtccaaaccacccaaggagaagagggagtcctggacagccagacccctgctagcttggccaccacaggctccggccagcccggctagggaagagttaatcggatcggctttggctgatagttcaggctccaaagttcagtcccagtcagagccaccccggaggaattgtaaatctcagggcagtatttaacaaaacaaaagcaacctggaattacatgcaggtttggttttctacagtacatatttacttaatccccaaggtatgcggctccatgtcagatcagctggctttgcggccctttcacccccctagttcacaacagtttaagtttcaaactaattccctgttttcgctcttcctcttcacagggctggctggagacagcctggcctgcctccctctcctgatggctctggtcaccgcgtgagtcagcctggcctgggctgggagttgggtgacagcctgcccactctcccc

SEQ ID NO: 205426 - DNA, 1000 bp, Homo Sapiens
taccaagtctgatgggatctggggcctctatcaaagcttagtgtcttaggccgggcaccatcatctacctggtgacctccctcagtgtgtacaatacagccaaaggtgcactccctgacctcaagaacacttgtatcgtggtgaactggatgattgcccagacgtgatggccatgatctagtgtggcatcgtaaccattcaatactgtgtggaggtggatgatgatgcagtgctggcacaaaggagctgatgtcaggtacatggggatcctagattgttggacgaagatcttgaaagacgaagagagcaaagccttcttcaagggcgcatggtctaacatcctcagaggcatggagtgagccttcatactggttctaacgatgaaagtcatctaggtgcctctatctctttgaaagcatgggagccaagagaatcttgaacagtaaatcagaaaacactgttagggaccattgaccttcaagaaattccaattacctttgtcctggccagattatctctgtagaaggatggagaaggctctagaaaaggagctcattgttatcacccattggcactggattctatgtgatatggcttggctctatgtccccatgcaaatctcatgttgaattgtgatccccagtgttggaggtggggcctggtgggagggaattggaacatggaaaggatttcccccttgatattttcttgatagtgagtgagttctcacaagagctagttgtttaaaagtatgtagcactccccccttagctctctctctcttgctccccatagcaagacatgctggtttccccttcaccttgcgccatggttttaagtttcctgaggccccccagccatgcttcctgtacagcctgtggaacaataagccaattaaacctcttttctttataaattactcagtctcaggtagttcattatagcaatgtattgattactgagggggtgatggggggacaggaatcatgatgtcattgta

SEQ ID NO: 205427 - DNA, 1000 bp, Homo Sapiens
ttgaatgaggttatttgttttttgcttattgatttgtttaactccttgtaggttcttggtattgtcctttattggaagcgtagtttgcaaatattttctcccatccagtagggtgtttgtttactctgttgatagtttcttttgctatgtagaggctctttagttgtctaactaggtcccatttgtatatttttgtttttgttgcaattgcttttggggacttagtcataaattgtttcccaaggtcaatgtttagaatgatgtttcctaggttttcttctagtattcatatagtttgaagtcttacatttaaatattaaatccattttgagttaatttttataatggtgaaaagtaggggtacagttttacttttctgcctatggctagccagatatcccagcataatttagtaaatagatagtcctttccctattgcttatttttgtcaactttgttaaagaccaaatgactgtaggtgtgcagcttaattcttatgttccctatcctgttccactggtctatgtgtctatttttgtaccagtgccaagctgttttagttactgcagccttgtagtatagcttgatgttggatagtgtgatgaacagaaatgcaaaatcctcaagaaaatactagtaaactgaattcaatagcaaactaaagatatcacacataatgatcaaataggatgcaagaattgtttgacatgcaaatcaataaatgtgatacatcccatcaatggaatgaagggtaaaaatcataagtgtttaacaaacttttgcctcctttcataattaaaaacaactcaacaaattaggtatagaaagaatatacccaaacataaaatggccatatatgacaagactgcagataacatcacatgtaatggataaaagctgaaagcattttctgtaagatcggaacaagacaagaatgcccattattgccactcctgttcaacatatgcatcaaaaattgttattagtaataagtgaattc

SEQ ID NO: 205428 - DNA, 1000 bp, Homo Sapiens
tgctgttatatgcaaccctatattgtattctgaacacaatgaaaataagatgtggcccaagcatggtggcttacgcctgtaatcccagcacttcgggagaccaagatgggaaaatcacttgagctcaggagtttgagacctgcctgagcaacatagcgagatcttgtctctgaaaaaatatattcttttaagtgaaaaaaaaaataagatgagatgtctgcccttcagcatataataataataattttagagcatctattctacaccagacattgtgactaaatgccatacaaggcactgttataatttccaatgtacatatggtagggctgaagtttaggaagtttagcttgttcaaatgagaacacatggacacagggaggggaacatcacacatcagggcctgtagggggatgagggacaagaggagggagagcattaggacaaacacctaatgcatgcggggcttataaactagatgatgggctgataagttcagcaaaccaccatggcacatgtatacctatgtaacaaacctgcacattctgcacatgtatcccagaacttaaaaataaaataaaataaaaaagtttagcttgttcagcatcccatagtaagacactgagatgcaggactcaggctcttaactgaacaacaccctattacacagatgctacttgaagaaacagatcagcccacctacctgacttgacaccttataaatgaaatagccctgtgagcacacctcaatgcaatctcagaagatcctcccaagctatttcacttatttacaagggaaattggaaattgttgctgtagctgacaatatatttattgaaaacattagagtggaagaagtaaagtacaagtgaatttgacatttcagaacattttggctttttgtcaaaggtatttgaaattgcaaatgaggctttggcagttactgaaaagatgtatcaactgagttcaggagatgagttttggggtcaatcttgaattc

SEQ ID NO: 205429 - DNA, 1000 bp, Homo Sapiens
ggtggggacacagagccaaaccatatcagtcctgtgagaacaaaacaaacactgattccaggaggtaaacatggcatggctgggcttggtaccctttctttcttcctttcatccttcttcccttctacccatccatccattcatctatccaagaataaaaatttagaattcagaaacaagatgactgtcacaaggatgcctaataacatattcactgaactgaaaaatggtatcagacctttactgacagcaaacaagtgtggtatggctaactggtttgacagggactggctctgtccattagattatagagcagacaattttcatacatgaatgagctgcattagcaactccaacgtcttgacaaaaatacattttaaaaagcatatggtttaaaagcattttatcaaaaaaaggatactgacaaatgtttattaatgcttaattatcttttctggaacattttgagttaaacagactgcctctaaataaaagaagagcaaatttaatttacaactgtttgagaagtttgggtacaagttttttggtgtacttcccagaaactaaaaaaattaaatacctttaaggcggaatgataattccttttgtaagttagataattgccaattcttccaacataattaaggaaagacctaatcaagttgtcattttttggtccagaactcagaaggaattcaaagaattaagtgacatgactgtaacaaaactcctaccatctcatgtatttattcatgatttctcagtgcatcttatctctaaaaatgaaaaataggaaaaagaggtaatatcaaattctttcttattccagcaataagtattatttgtccatttctttagaaactaacttattaagagccccttcattccattataagttgaaacttcaatgcaatttctatttaataattattttgatgaatgacaatttaataatattaatgatatattaacatttatttttcagatcaattgtgaattc

SEQ ID NO: 205430 - DNA, 1000 bp, Homo Sapiens
tcatgtatttcataactgcctctctgtttggctgcctcacccattatccaccaaggcagggactctgagttcttttttttttttcctttgagacggagtctcactctgtcacccagactggagtgcaatggcgcgatctcagctcactgcaacctcctcctcccgggttcaagtgattctcctacctcagcctcccaagtagctgggattacagacgcccatcactgtgcctggctaatttttgtattttcagtagagacagggtttcaccatgttggccaggctggtcttgaactcccgacctcaggtgatccacccgcctcagcctcccaaagtgttgggattacaggcgtgagccaccacgcccagcctctgagctttttatattcccaatgactagcacagagcctgagataagctggggcttagcacatattagagacacagacggtagatgctggtcaccaacaggaccgtgcctttgggctttgggttatgtggcctctgcagacaatctggccatcaaccaggctcttcctgaggcaggggcgcctgcctgacatggcagcttctcagcacacagtttcctcccctacgttccccacttccctccctccttcctctacacaaggcacaggctgtcagcagagtcagtgggagcctgtcagcaggagcccaggcactgcccccttgagggcctctggctcagcctctcctctcctccttcagcacaggcctccctgcctgtcacacatgtcatgcatgtggctccagcttgtctggacacggatgtggccacagttcctaggcaggcggggtgggggcagtagctggcagtatttcagaatggggggtgggggtgtctgtgaacattggaaacatcactggaagcctggtgctttggaacagggagatcaaagtgtccatgaggatcacacagaggcggtccccagactgccacaggtgagcaggaattggcctggattagccctggaagatc

SEQ ID NO: 205431 - DNA, 1000 bp, Homo Sapiens
attctgtggagaattgtgcaaaatggtttggagtttttgttgtttggtgggggtgggcaggagccaactcatgaagggtggggactgctgagagctgggtatgacggctggagcaggatccccccaagcaagaagggctccatcaggattcaaattccagcttcaaatcacaaaatccagactgtgggaaatttaacaagactcagtccatggttttatcaacaaaatattacgatgaaagaaaagagaggtggagagggtaccttcagatcaaaagccacctagaggctagctgagggggaaatcctttcatgccaagcacagaaaccaaatccaagccctacagattgagctgggtaagtgatgtttagggcagagttgcagcctggtgagcacccaggaagcagacaccctgaagggtgagctcaaagcaaagaccaacccagactccacccactggagcatggatatgatgcccacagcctggactggctgggtgggcagggctgtgcctcttgagggaggaaggaggagctctgagggtggggaagcttcctggacccctggttccctctaggcctcctgatgttgacgcaatcacgtatgcaagcagctggggccacagcggtagataagcaattcccagccaggtagtcacagtgctgcctgtgagtgcaggtgggaactgcagcctgggtgaacagagtaggtgcctgacttcctgggggtggggggtggctccaagtgtgctgggggcaggatatgctcagtgtattctaagcacagagaggaagcctgtgtggccagaaaaaaaaaaaaaatgataggaggaatttccaagatcagagaagtagtccgatgccaggtgccaggttacagggggctttggctctgtggagactttggatactacagagtgagatggaggattttgagtagatgaatgttatgatccggttacattgtaagagaatgactggctgctgggtagaaagagact

SEQ ID NO: 205432 - DNA, 1000 bp, Homo Sapiens
tctggtcctatgctgaggccagaggatgaagaatcaagacaaagagcttgcctcagaggaactaggtctgtaggagagatgaataacacagcacatgtgttaccaatctttgggcctagagaagggcccctctcggcgtggggagtcagggaaggtccagggaggtgatgctgaggcacattctcaaagatctggaggtagaaacctgtggcaggaagtgcagaagaaaaggcagaaggtgctctctgtgcaaaaaggcacacaggctggaaaaagcagtgtgtttaggaaattaaattgtcttttggggtctaggacatacctgtgttagtacctcagcgcttctgcagtggtgacagggaggacagaatggagaggatgaggctggaggtagacggggcagtcacacagatccttgaggccaggtcaaaaggctttaccttattttgaggacgatggggaatgatggaaggaatttaagcaagggagagacaagctcagacttatgttttagaaagatcactttggcttcaaggtggcgaacagattgacagagggcaaataggaggcagggaggctagggtggaggtgatccaggcctccaccttgtgttggggagtgagccagtgggctggaggaaagtggaaggtagggcaggccaggtcttggcatggtagccacaggagagagaggcgttgagacctccaccatagccagatgtgagggtcagtgagggctcctccatgtagcaggaaaaggaaacaaggattacccttggagctctgttaattggaggcatcaacacagctggactagagcagaatctagcgaaagtcatcaaaggagagccataagactggattgtaaacaggaggaatgaatttctatgtctcaattttaaaatgtgggcatctgagacccaggaagaggaggctcagtggtgggcagcacttgtcagtgtctgggtatgggatcctcgagtactggttttggagaattc

SEQ ID NO: 205433 - DNA, 1000 bp, Homo Sapiens
gaccatagatggttcctccccggagattaaggaaaaaagacacaatgggtattcagtaagtgataaggaaactcttgaagaaacagagttaggaaaattgcctaataattggtctgctcaaacctgcgagctattggcactcagccaaactttaaagtacttacagaatcaggaagaagccatctataccatttctaagataatatggactgaacgaggttttattaatagcaaagaaaaattaaaatcccaaacttataaggttttcaacaaaagtaaagtttgctaaaatttaacagtgtaacatgtattatcctaacctctaatcttatggaaatcagaccctatcagcgcccctcaaagctcaagtccatcagtgcagagccatccactaatacccctacttatagggttaggaatggccactgctacaggaaccggaatagccagtttatctacttcattatcctactaccacacactctcaaaggatttctcagacagcttgcaagaaataacaaaatctatccagtaaggatagtaactacgatcccaaatagactctttggcagcagcgactctccaaaactgccgaggcttggacctcctcactgctgagaaaggaggactttgcaccttcttaggggaagagtgttgcttttacactaaccaggcagggatagtacgagatgccgcctggcgtttacaggaaaaggcttctgaaatcagacaacgcctttcaaactcttataccaacctctggagttgggtgacatgacttctcccctttctaggtcccgtgacatccatcttgctattactcacctttgggccctgtatttttaacctctttgtcaaatttgtttcctctaggatcgaggccatcaagctacagatggtcttacaaatggaaccccaaatgagctcaactaacttctactgaggacccctggaccaaactgctggccctttgactggcctaaagagttcccctctagag

SEQ ID NO: 205434 - DNA, 1000 bp, Homo Sapiens
acagagagcaacaaccgacaaacacttggatttttaaaagtgtagctgttgggcttagaggatttgactacggtcatttagtacagaataaaatttaatcctgccaaaattttgaggagaccttcgaaaccagctgcatgcatgcctgtgggatggcagaaagtgctttctctccagcataaacaatgtactctcaagagaagaggactttctcacaatatacatctttgtaagaaaatacagtgtattagggctctccagagggagagaactaataggatacatgtacatatgaaagagagtttattaaggagaattgactcacatgatcacaaagtgaaggcccacaataggtcatctgcaagctgaggaggcaggaacccagtagtggctcagtccgagtcccaaagcttcaaaattaggaaagctgtggctgaagctccaagagcccctggcaaaccactggtgtaagtccaagagtccaaaggatgaagaagctggattcttatgttcgagggcaggaagcatccagcacgggagaaagatgaaggctggaagactcagcaaggcagcttatcccaccttctgcctgcttttgttccaggtgcactagtagccgattggatggtactcacctagattgagggtgggccttcctctcccagtccactgactcaggtgttaatctcctctggcaacaccctcacagatacacccagaaacaatactttaccagctatctaagcatccttcaatccaaccaagttgacacttaatattaaccatcacacacagctataggaaaatgatgagagatgctcacaaaggtttagatacatgtatgtctatcatggggtcacttattgtagcaaaagaggaaatttcagatacccacaagcaaagggttggttaaatacattaagatgcttttgttgccagaaaaaggggtcccgatccaaccccaggagagggttattggatctcgcacaggagggaattc

SEQ ID NO: 205435 - DNA, 1000 bp, Homo Sapiens
tcacctgaggtcagcagttcaagcctagcctggccaacatggtgaaaccccatctctactaaaaatacaaaaattagccaagtgcagtggtgcatgcttgtaatcccagctacttggggggctgaggtaggaggattgattgaacctgggaggcagaggttgcagtgagccgagatcataccactgcactccaacctgggcaacagaaggagactctatctcaaaaaataaaaataaaaataaaaataaaatgtagtagataaaggtcataatttctatgcaccaaagcttttataggaggcctgtattttagcaatcaacctgtccttattctgttcaaattcaagggcacttgaatcactttagatggtgtcacctacattgggaagcaatcacagtatagatattttttcttattatgtttgcaaaataaacttcacaaaattgtctagcaaccttgtgaccacttgttttcttttattgaacataataatccttttaacactttaagactgccattttcaagaaaatagctataaattacataattgaattttatttttctaaaaaattgtaccacactttaggatgaacagttgaccaaagaagggcctctttgccatgtctctgaaaacatcttgtatgaatacagccattcctaatgctccagtatcaatgtctctataatacattagtgtaaaggtacctcttggcaccagcataagaggagattggaagccctttctgagccctgacatcatccaacttggagatgggcattttttacccatgcatctccttgctttgccatttggcatccagtcattcaaaaacatccggtgaccatctactcttggcataattccagatgtgatccttgtagtcacgttagaccttttattcacttttatccctcaacctctagatctgttacacattgtagcaaactcttgtaaaatatctaatgaaagaaagaaaaaaattaaagaatattgaatag

SEQ ID NO: 205436 - DNA, 1000 bp, Homo Sapiens
tttggtttctcagctccactgtctcattcttttggagacttctgggtaaacacattttgctcctctgaacactgtatttctcgaatgttcctccctggcagtcgccatgttctttctgtgaatttgttagaatcacttattaaaccaaagtcagggtcaccccttgtggggcttagaagtgcttttttttttttaagccttttatctgttgatgagctttcgtttctgaatatgaatggtatttggtcaaggtaggaagaggtttgaactagaacaacaactaaaaggcactggatggacaaatcatatttaaatgtaacggctgtaatcagggaagttgaaatagggagataagagaggttatccaaagttctgtgttggttggataagacattcaccgttattattttgtacaatatacagaaacaattgtctactcatacagctggaaggagccatggagattacctctattccccacattttacagatgaggaaacttctcagcgagtagataatagcctgaaattctattacttagagcaagcagggaaagtgttaggagggagttggggttagctctaggcagccacatcagcataatagtagtggcttcaatttttcttcatattgcactgaattcatttgtagtaatgaacctatctgtctatctatattatagtcatcaaattatcttcagtaactatgtaggtgttattagtttaaacctttaagacccatgaaaatacttgggttcaccaagcacgtctgccatatgcacttaaggagattcttcactgaatagtaattgtagtaactgctgccctgctcttgtaatatcttctataaaaataataatttgcacttcaaatgtctctttctgtgaggtgctcggcgtaccttgcaggaatcgcttacctaaatctatccttcaaggtggtgtatggaatagcttccagtggagtagctcagtaggaggagggaagagtgctgagaattc

SEQ ID NO: 205437 - DNA, 1000 bp, Homo Sapiens
tcaagaagaaatactgtgtctgtatttgagaatcttctcaaagaaagatatggtgcagaaataatattataaatggatatatatccagtcaaatttatgtcaattagagacacatgtctcttggaaattgagaggaataaaatacatgcaacattttaaaatgtaggcttgctttctttccatccttctctctctccacacacaatgtgccctcctgcaaatgacttctgaaggccctattgtcaaaattattgataagttaaagtttttgtatgttactaggggaagaaaactagagtagatttagtgtaatttatcaagcatttatcgattgacactctggtaggcaacgtgtacggtcaactgacacgaagacaaataaaatgaagccgtgccattaaggagcctgtccctgccacacccaccatgtgcccttctttttgagatgtcatactactaccttttttttctcattgtagttgtttttaaatttttcatcattgctacccagtagcacctttcccattttcgttgtccagtaagagacattgtaaatgatagtaaattaaagatagaaaacaaggaaaagctgggccatatcttttgtttgacccaggcaacatgtcacaaagttcagacaaacagtctcccatctgaagccagtattttcacaagcacctgctgtgtcatgaatttgacagaaatgcaaacccactttatcttcctgcttgcacatctaggccacagccttgcttccctatctggtgtcttgaactccatgctgaatattctgatgttcatgttttcctccttgactcttctatcctctctgtgactcagcaaccactgacatctgcatcctgtaggaaagagcccctgttcttaagcaatcccagtgccttcaaatatccctataaggccttacttctttcaggatcattttgattttccacataacttgttttgaccataccaaaaagattgaatggaaagtgaattc

SEQ ID NO: 205438 - DNA, 1000 bp, Homo Sapiens
cccattggagggctttatattaatctcacaagtacagagattgcaagtaaaacaattccatcagcagtgatagccttgtgtgggaagtctgagtggaccggccctcatgcaaacactgcaggcacattccacagggatgaaagtgatctcagacacccagctccagttgacaaaatctaggagtcaggtgacaaagtggtgacatggtcaatgatgacagccaagaagcagttccaagttaatatcacatacagagacttgagccagcttcattctgtatcacattgttatgtagcagagacaaacagcagtgaggaaaaaaaaaattaaaaaattcattccactagccttcattgttgtgtaatgagataacaatacaaaggtttgctacccatgggaggtctttgagcaatttaccacccaggaaccaaagtgaactagatgaattcttcttaaaacaataagctgaaggttctaacttgcatgacctcaccaggcaaaagcgaagtgaagaaataggaatataataaggaaatagatacatttcctatggtatctttctcatgacatttttctcttgagaattcatgggctagcactgttttacaataacctgctttagaaatagcatgagagaagcatatgcaatccatgtttaatgaactgagagtagtcttttggttaaatgatgtattaaatccctgccaaggcaacccctggtctatgatcccctaggaaacaaggattgagagttttccagaagtatccattgctttcttgtttcttatggaaaaatctattttttaatgttttttttgttgttgttgttctttttcccagaagaacatgtgtaaatcatgaggttcattttttcttgctctgcaaaacaaaatctttaacttctaccaaagttagcatttatggtacagtagtccccccttatccacaattttgcttttcacagtttcagttaccgatggtgaaccacactctgaatata

SEQ ID NO: 205439 - DNA, 1000 bp, Homo Sapiens
acattaatatgaagtgttttaaccccttccaagaatatcttccccaatgtcatattggactctatagaaagcagttgtgcctttcctttcttgttaaaataaattatcagtggtgagaatttcatatcagataggtttgacaacaccatgtcagatcatgaaagtattactgggcttgtggagactttcagtgtctccacaagagacacacaggggattttatgcctcataacaattaatttcttgaattaattggaattggaaaatgggaatgattatttaatttgaatgtagcatacttgttttccaatgaattgtcttccctacccatgattttgcggatcataagtgattttctgtttgattttcccttttgcatttatgttgtaatgctttatatatcttttctgaatttcagttctctaatggagtaagacaatacttaggatttttgttgccaccttcagttatgttagttgttaattttgggataggtcaatttttacatttggtggtatcataataagagttttctttaaaattaaattttgggacgcatgagtggaatacaggacacatggtcctcaaaatggctataacaaattagaaaattgttggcagtcagcaaatgtttgttttctttcttttaaatacaaaacattcatcctgatgctgttgaaaattttccttactttatgcctgacttccccccactcccagtatctagataaagttcataagaactttgatagaaaaactatgatagaaattttgatataagacactatagaactgatgtaatattttctgtttctaccctactcaaatagttttgctttttcaacaaatgggactgggcaggggagttgtagggagccttttaaacaattagtatgtcaggaatgcatagcaaatatcaatttcctatctgttatcctgtatcatcagtaaaaaaaaatttactctggaaatatgagctttaaaagtcataactgaattc

SEQ ID NO: 205440 - DNA, 1000 bp, Homo Sapiens
atgtccttttccaactctttaaatgtattctatttatttatttatttatttatttttgagacggagtcttactttgtcacccaggctggaacgcagtggcaccatctcggctcactgtagtctccaccttccgagttcaagcgattctcctgcctcaacctcccgagtatctgggattacaagtgtgcaccaccacacctggctaatttttgtatttttagtaggggaggtttcaccatcttggccaggctggtcttgaactccggacctcaagtagtctgcctgccttagccttccacagtgcttggattacaggtgtgagccactgcacctgtcctgcccacttgttaatggggttattttttgcttgttgaattgtttaagttccttatagattctgaatagacctttatcagatgcacagtttgtgaatatttctaaaattttctccaaacattagatctttttagagacatgttggatttgacatgtgtccatgttttaagtaagatttttaaaataagaatacagggcaagttgaaataaatggtaactcattgcatctagtaagtcacacacatacacacaccatcctccaaaagctcaaagcatgtcaagatacaaatcacaccagtgttagcctcttatttatgtgtcttagccctgcctactcaagagcctgtctcctcttgacagctctgtcatatagggtagaaaatatagaacagctgtgaccagggcttactcatctgtacagtcactagatgataatagttataaaaattaacatgtgtaaagggctttgtggcatataagccactactgggcatatgattttaattcaattttaatctttatagaaactcctctcctctcctcctcacctcggatgggggtatcaaagcttaggaatgaagtgacttgttaagatctctcactatgctttttcctcaagtacataaacattcctgaacctctctcaattaaaaaaatggaattc

SEQ ID NO: 205441 - DNA, 1000 bp, Homo Sapiens
ggcgtggagttcccatcatgcagctggattgtagatgggcaggaatgcctgtgtatctcatgtacagaattaattcattgaggctgggcacggtggctcatgcctgtaatcccagcactttgggaggccgaggcaggcggatcacctgaggtcaggagttggagaccggcctagccaatatggcgaaaccccgtctctactaaaaatacaaaaattagctgggcatggtggccggtgcctgtaatcccagctacctgggaggctgaggcacgagaatcacttgaacctgggaggcagagttgcagtgagctgagatcacgccactgcactccagcctgggcaacagaaactctgtctcaaaaaaaaaaaaaagaagaatcaattcattgagctggactcaggcaggcatttcccgcaggcagagtttttgcttgccctgtattccagcacaggctggtactcgagacacatctgtcctgtgtttgttttccattatttgctggtaataatggctgtcattagaaagtggagaattgccagtagcccttcggatgtgttgtttaatgagctttctcttgagcggttctcccagcttcagtggaaatgagaaatgtgaggaaaggtcacaggcaggaggccccagtagcaggaagcaaggtttgagaccaaagattgaaagaggaagttgggaggaaacctattactgcagaaagaggctgagcttgtagccaaagagaaaaggaaataaaaatctagaacactgaatcggtctctgggtttgccactcccaacctgtgtgaccttggagaagccacttaacttctgagcctccatttcctcatgggtaaaatggccatggtaatccctgccccacctgcctcaccaggctatcatcaggatcaaatgagagtctttggaaactgcaaaccaccgtgagttatggtgcgtcatcgtcatcctcatcagtcttatgatataataactggctttggaagaattc

SEQ ID NO: 205442 - DNA, 1000 bp, Homo Sapiens
cgtgaatcattaaattctattattcagaattagttcctgtggtgggtctctccccactgtggtcctgggctggtggtgggtaaaagtagtaagtgactcagatgccttatacagaagattagcaaacttaactaaggcaggaaatgttggttagaacttgtgagtgtgtaatactacccccttacttgcagaccactgggatttaagagttgatttgttaaattaaaaaaaggtcatttgtgggctttctatgagcaagtgttctagtgttttgtttttagcagctaatagaatgaaagatctctaagagcttgagagaaatagttaattcaggcatttatgatattttatctccctgctccccatgaggagaaaatcccaaaataaattgatgtttcccttctgatctaagttatctttggctagtacatctgatcatgcactcataggtagcatagatttttagagccaggaaggtattcttagagatgaggaattgagacccagagaaggtaacttgcatgaagtctcaggactagacaactttctcttgtttaaatgtagtttgtaagattttgttctactgcccaatctatactttccagaaacatcttaaaccagaaacatctggtttaaaacattgacttgcaggtggaaatgaggttagaaaggggatggagtgggaagacaggtgttggtggagggagaagggagagtatggtgggcagtcatggagagaggttcttattccccatatttaaaattttcaagagcctaggattgcaggactttacttttttaaccgaagttcctcttgattgtccatagaaggaggtcattattattcacaggtgttctgaggcctaaatctatgtttaatttaaggagtgtttcagttcctaggaaagcacgtacaaatggtttagcttgtcgttccatcttttggtatgcagggaagagtgccaaggcactgtatttttttcatttaaaacatgaattc

SEQ ID NO: 205443 - DNA, 1000 bp, Homo Sapiens
tcagcaccggcaagtggagacccctgccatctcctgggaagaagtttgcttggagaagcccttccagcttccatggtctggcttacctggcacaggatgggacctgtgccagggtgtatttgagtgatattaaggaagaggaatccaggagacttgatgattaactggatttagggcagacggggagtggagcttgagggcaatgctcagatttctgacttgaatgatttgggggagatgcctttcacagagagggcagaccccagagaaggggcagtttgggggaatggaggaagagtggacaggttgagaggtagggagtgtgagctgcctgcgggctttctaatggggatgttccagatgcagatgtagattggagctcaggagatagacctgggtgtgcagaaggtgcccaaaggcaggatgcaatcatccgcaggaaaagtcaatacacacccatttgctccaagggcattcagcaatggggaattctcagtgtggcagccccagggactcactttacagagctcccctgcgcaccctgcagtgtgctgcaaggcctggacccgggtgccgcctgctggatgacctccatccccagatgtctatgcttgtgtcccagcagctgccttcttttttttcctgttccagctgcctctgttccaccctccagagaacaaagagtggcctggtttgggcaccaggaaacctgagtcccagtcctaactctgctgactgactttgggatttctaaacaagtctttgtctctctctctctctctctctcagtctcctcaacagtaaaatggaaccaaaggctggtagggtcaaacaaggtggtgcatttgaatgctttacacatgtaaggaatctgggtaaaagctgcccgaagttctggccaggtccctcagtcctgtctccccacgcctccccaaccaccagactcgtagcagatcctgcacccagatgtgtgtggcaccactctccccatcctttgttg

SEQ ID NO: 205444 - DNA, 1000 bp, Homo Sapiens
gaaaagggcaaataggctctttacaacctcattccagaccactttttaaaaataatatagttcattacaaactggcccagctggtatccttaccatagcctagtatatttgtgttttcctatgtttatctcattccttacccaaactcctcaaatcatcttctctcttagggtatttcttaccaaactctgattcagtgtttattataaagcctttcgtaatatccacagctacaaccttttcttttgatctccatggcacatactgtctgagccattctgaccacaattatttattacatggttttctttcattatattaaaaaaattccaatttgattgtaaaactccttgaagataggattctgcctcatagtgctttatgttttctatcacccctggtaaatatttgttgactttatatattattattattttatttatttatttattattttcatttcttttttagagatggggtctcactctgtcacccaggctggagtgcagtggtgtgatcatagcccactgcagcctcaacctcctgggctcaagggatcctcctgcctcagcctccagagtagaagggaccacaggcatgtaccaccacacccagctaatttttaattttttgtagagattgggtctcgttatgttgtccaggctggtttcaaactcctagcctccagcaatcctcctgcttcagcctcccaaagtgctgggattacaggcacgaactactgtgcccagttgattttatattttaaataatgtaaggctgagattggcaggtaaataatacaggtgagaatgacagatgaaacccacgaatcttttgtttccctgcaaaccctataaaacagtacaaaaagaggcatatactcacaagatggagattacaagaatggaggcagtgacagtcatatttaattgtttggttaaaaaaatacataatttaggctaagtgtggtggctcacacctgtaatcccagcactttggg

SEQ ID NO: 205445 - DNA, 1000 bp, Homo Sapiens
acaaaaacagtgaggatgagtagctctgcttatatgagatgaaacagactttaagtcaaaaactgtaaaatgagacaaagtggattattatatatgataaagacatcaattcagcaagaggatataacaattttaaatgtatatgcacacaacaccagagcacccacatatataaatattattagaactaaagggagacatagagtctaatacaataatagttggtaacttcaacattcaactctcaggattgggcatatcatctagaccaaaaatcaacaaagaaacattagattaaaggtgcattttacagcaaatgaatctaacagaaattttacagaacatttcattcaacagcttcagaatacacattttttttcatgaacacatggaatattcctaggatagaccacatgttgggccacaaaacaagtctcagcaaagtttaaaagttgaaatcatctcaagtgtcttttctgaccacaatggaataaaactagaggtcaatgggaagatgaactttcaaaattgccaaataaattaaaattaaactacatactttcaaatgaccaatggttcaatgaagaataagaaataaatttttgaaaatttcttaaatgaaagtagaaatgcaacatatgaaaacctatggaatgcagcaaaacagtattaggatggaagcgtatagtaataaaagcctacatcaaaaaagtaagaatatcttaaataagtgatcaaatagtgcatctcaaggagctagaaaagcaaaaacaaatcacacccaatagtagtagaaggaaagaaataataaaaaacgtggcagaaaggtataaaatttagaggataaaaaaaacaaagatcaataaaacagaaagatggtgtttttaaaagataaacaaaattgaaaaacctttagctagactagtcaagaaaaaaaagagaaaatattcacataaaatcagagaccaaaaaatagaagaaatgacaaatggtactacag

SEQ ID NO: 205446 - DNA, 1000 bp, Homo Sapiens
ctttgcttgactaagggaaagatatttaataagtagccctccacttctaagaagtgagtaaccaaatcgaaattgaatctcccctcccctacatctgatccgacaactctttgaagctatgcatagaccaaacaatcaaatatctccttttgatgatagataacttcaagggaggagatgggaagcggttaactgtgttcacagctggaactttagcaactggcatatcaaattatttgggtgacattaagagatttgattttactccttaatatgtattaacagttccattcaagtataaacataaacatgtctgttcattcaacacattcttataaacacttacatgcctgataccaatccaactaagtattggggttacagcagtcaacaagacagatatgctcctttatgccttgtctccactctgatgaaactcatgagtactgtgacagacactgaataaaaacatcttcagggcagtgtgtattataaaatgggaagactagggtgttactagaatgtacagttctacaaggttcagactggggttcagaaaggacctcctgaaaaattgcatacatgctactactgctgctgctgctaggctcactcttgcccttgggttttggcctcatttctactcatctttcaagtctcagcttgcatttcagatcctttctggaagccagctctaaactgtcctcatgaagtctggatcagtctttctgacttcctggtcttgccaaaattttttgttgcctctaacctggcatttaccaaaagtagggcaattattactagtctgtctttcaactagatggtgcattcttggaagatatctataaatcttaagtgcctagcaacagcttaataaattttgctgaataaataaagatttagcacatacttcatttctgcctgtgcctttacagccaaagcaaaagataacaggtacaacttgtaaccaaagtgtttttggtagaggtttggaccacag

SEQ ID NO: 205447 - DNA, 1000 bp, Homo Sapiens
caacggactaaaaaattctgtgaacccaattagctgtggcatagctctttgagtaagccacacagttgagacatagtgtcgtctctgccactcatccagcagtggcgaatgcctaaccattgacagtgactgcgctgtgctgcccttgttcaggtcacccacaggacaggcatactctccttcacttttcaaatactaaagtgaaaataaatattgcccggcgaaaggtatcaattgagaatgtggaatggggaacaaacaaggaatcattgcctagcgatgacagcctggaaaaacaaaattttggatgtaggtgctttcatttttcaatgatactagttaatcctgctccccttctcccagaaatacaccgctttattcagttctgtgctcagcctacaggtccaacctcgtccctagtgccatgcacaccggctatttcccttcccattttggacagaaaacaaagtgttcaggaagaccctactgagttacgagttttataacaataacactcaattacaatagtaaaatttttttaccaatttatttgtggagttcctttccttatagtgttgatgcaatttttttaaagccaacactaccaagaaaatgtatcactataattagttttttattcaatttaaaggctttaaaaaataacgtttgtcctgacaaaataaccaaatgttgatcacctatatattttcagtttcaaaagaaaatgtttttgccttcccccagggcctctgcataaggtgagagtgtgatgatgactcagactgggcttctgtttgagtaactgttactctcctgcccaggtgggtttcccaaattgacattcctttcacatttctcacaaaagccatggaatcaaagtggtatttggtcagaagtagtgcaagactgaaaacttatagcctgggcaggtatggctgctttggaaattgtgcgcctttataaaataagaaaacaatgcttctttttaatagctttaaaa

SEQ ID NO: 205448 - DNA, 1000 bp, Homo Sapiens
aagaaattaaaggcatacagattggaaaggaggaaataaaactatatttgaagatgacatgattgcctacagaaaaaaataccaacacatttacaaaaaactctcctagaactaataaattctcctagaactaataagagaccacaggatacaggctcaacaagctcaccggatacaaaaatcaattgtacgtctacatacctataatgaacatgctgacaccagaataagaaatatagtgctaattttaatcactcaaaaataataagtgtaagtacatttaaatatattatatttgtaatgtatattatgtaagtttaaatataataaaacatacataggacttgtatgttgaaggctacaaagactgatgaaagaaataaaaagatctaaataaacagagagacatactatgttcatggaagtacttgacatagtaaagacacaatatactaaagatggcaattctccccaaatcaatatatacatttaatataattcctacccaaatctcagcaacgttgttttttttaaaatagatagaaagaggattattctaaaattttgactaaaggctgaggaaccataatagctagaacaatttttaaaacaaactaagtgggaggaatcagtctaccctatttgaagacttattatatagctgtagtaatcaaggctgtgtggtattgacagaagtacagacatagatcaaaggaatgcaataaagaattcagaaatagacccacacaaatacacctctgtgttgccttatttttcagaaaagctctagactcagagtcaggaagcccaggtttaggtccttggccttgcacaagtgagttcttccagttataaaactttgattttctgggtctaaatcacttaaacttttctatctcagttttcttttctgtttaagggaacatccttccttcttccttccaagcctctatttgacaaggatgataaaatatctttcttttttaagcataaggaattc

SEQ ID NO: 205449 - DNA, 1000 bp, Homo Sapiens
ggccataagaaatccagagtaaagaagtctgtttatccatgcttaatacagcatttattgagcagaaataaacccaaaattcttttaattcatgaactattaatatgttgtagaatggttccttataacatatattgggaaaccctggcccaaagccaaaccacagaagatccaacattgcccataacctcagccctttgctcagttcaaggcatctccttatccctagacctatacttcacaaccattcttcttcaggtctctgtcagttcttgccttagggtttcagggttgagggctgtgtcctgaactcctttcctctttgtgagttagggtaaaacttagagccagacagaaatagatgggagaactcttggtcccaaggggcaaaggagctctaggtaaccagttgtccagtctgcacaatgaaagggggctggattaacaattacaccagtacaaaagttataaaccagaagcatcctcaggcgagacagtacgtgtgatcaaattatgagggagagtttcttgttgctccagtggtgactttgagactgccacaatcccaccagtcaccacagggcactttgaacaccaattatctcattacttcaataggcttcacctttttttttttttttttgagaaagagtctcactctgtcacccaggttggagtgcagtggtgtgatctcagctcactgcaacctctgcctcctgggttcaagcagtttttgtgcctcattctcatgcctcagcctccccgagtagctgggactacaagtgtgctccaccacactcagctattattttaatttatttatttttggtagagatggggtttcactatgttggccaggctggtctcaaactcctgacgtcaggtgatccgcctgccttggcctcccgaagtgctgggattacaggcatgagccaccaggcccccagctgcttctttctttctcctgatataaagctatcagtgtttctagtgagaattc

SEQ ID NO: 205450 - DNA, 1000 bp, Homo Sapiens
ccagaatgttcatgatgttgctggagggaagataattatttatgaatatttatccatacaaatggaagacattgtaagatactatcacagaaggaaaagtacaattagagtcacttttcagagctattttcattctagactaagagtgaatatgataaattgcaacatttagattcattcacttattcatattaatcactttcgcacaagcaacctctcatagaaactaaagatttttataagtgatgaagtcaagggacatcaagaagtttgcatcatataccaatttaattttggctcatctatttatacggagttttgtttgctttagggatactttaaagacaggttaaaagaaaaatcttacaatagagagatgaggtaaatctaactaggcaagttttcaagtggaaaacaattgagattttcttttactccatactcaatgtgaagtaattgtgtgatacaattgctaaaatgggtataagactagcaaatatgacttgactgccctaaaatattaattaagtagagcttcaaagtttctaatgtgtgttttataaatagtgcttctcccaaaaccaacgttttacatagttttttttataaaaaggcagctagttgtattgtgttatggacaaggggaaagaaagcccctacctgaaaacccaaccaccatcagaaccagatatatatgcagtgctatgatacaaggcattaaagaattttatatctttaaaagacattcatactacagcatatgtttgcttggaggaaatcatcataacataatgaaatgagcactggaataaagagaagccccacattaaaatctcaaatatgccccagctcattttttcccatgactcaaataatttaacctctgtgaggtttagttacctattttgaaaatgagttatgctttaattatttctatgatcttagcagttcaatattgcattattctaaattcatagagagtaagaaggaccaggaattc

SEQ ID NO: 205451 - DNA, 1000 bp, Homo Sapiens
aaaaatagaggaaaatgtaggatattaaaaacagtactacctggaatttgtatgcacacaagtaatttaaagtccaaaatgacacaaactccctgggccgcctctgaaccaatgtgctcctgagccctcttcggcctccctgggtcacgtctctgcagattagaaccatgctatgctgagcccaccttcctgttgccattttgtggggaaggaaaacgagtttaatctcttttcctgaccccaccctccttttccatagtgaacaacaacagaagtcatataatggaactcagaattgatggggcccacagcataccgaggctcattaagcaataaagatcgtgactgagaatattgttcacgattaatgacaggctgggggccgaaaacgcacagctgacggccaggaagcccagttggtaagaaccctgccaagcatcccccacaaggcggtcggtgccattgtcagcagcagaggacgcagacctgggcagggtctcctccctgagaagcccgccctccgcgcccgcacctcccctctgtctgccgcgccccttccccgccgagcccatctgcggctgcagccacatcctgcattccacccacttaaagcctgttgtgcaatccctttggaccggtggacacctaattaaaacaaattaacgatctgaagcagaaactgtgtttaatgaagcctcgctcaggcttgcgcgtagtgccagggctgtttgcctacaaatatttaccagcccttggtgcggaagaagcacggccacctgtccccagccttccttccacccgcaggcagtgccaagcagggttcctcccaccatcgccaccacgacccctggtccccatgcccatggagctgcaggagcagcatccacctccctctggcctgctctcccttgggccagggtcctgccaggcctctgctggccaacccttctgatccagtctgggtccagctttggcaacctcaagttcacccagcaattgg

SEQ ID NO: 205452 - DNA, 1000 bp, Homo Sapiens
ctatctcacctatctagttcattcctatctgcaagttcactattttctttttctagattatcaattcatatttagcaacctgcatgtctttagaatataaatatagctaaatattatttattttccttatttttacaatattcagaactgcttatattcagaagctcctttttgagactattcacatgtaaatcactacccagcaaacattatgtttttggctaataatgtagcttccataagataatgtggtctctctgcatagggatacactctagggctgacatttgagattgttgaagtggatcatcaattaacctcacttaacaatgagttgaatcataccatgttctattactctttaatgtactgtggaaaaaaatctatttgatgggatacactttttctttttttcataaatcattttttctttagtctgttttcatcatgagttatttaacattttagtggcttttcatcacactagtaatattgtgattagcaataattagaatggccaaaattaacctacctggatgtgaatgaaatcaaccttctttatatcatgaaaatttcattgagttattctagcttgaagagatacagatgaaaataaaatgcttcactagaaattatattagatgacaatgtcaaataagtagggaaaaaaacctctgatgccagtcaaaaatatactcaatttataattttccacccttacctcttatgttttcctgtagtaatagcaagagtctcaacccgagttagtgttcaatacgttttctcttaagtgacttttttgtgtttaggaaatgtgttatttattttatacattttcttccccctccccccgcttttgttttggagaaaaagtctcactctctggcccaggctggagtgtaatcacacatcactgcaaccttgaacttctgggctcaagcaatcctcctgcctcagcctccagggaagctaggactgcatgtgtgctccaccatgcctg

SEQ ID NO: 205453 - DNA, 1000 bp, Homo Sapiens
aaaaaaaaaaaactaaagataaagagataaagttgactgaaaaaaatgagtagaattttctttatttacattgtctgggatgccttttatattagtttctgttcttaaaaaatctgtgtagtggtccattaatacattttaatgacatttggtacatttttattcttagtgcattccttctgttgaactttaaacttaagtgtatgaaactatggtttttctctgttgaatttcctccagttctgtgcagatggtatttaggtcgaaacttttgaaattgctactctttgtggtatatatatcaggcgtatagcaactttgtggccatagaatcagcaaggtcatatgagtcaaacttggcgaaagctcatatagaactgacttctccaaagcgaaaatgttttcgctcaccattcaaggtttgatgaaaaacacattttgagtttcagaacacctggtatgtttttatgccaaggttaaagaaagaagttcccacatggtttctcacctgggaaaatattgaatagctgagaaatggaataaataagtttgtaggtctcacagttttgagagctaacatggtgggttcaaaataaccccaagcatgtagattccaaagaaacatgagaaggcaggaatgaagatggtgaactagagagcggttccagttcagggggccatgggcagtggtgtgctggagctgcttctcccggcttgagagagctgatcatgcacatctcttcccatttcattgctcagggacatcatactgctgccttgaaattagctatgatgggagtatttacaccacagaaatcggcatgcattacataagatagtaatttagggtcacccagttgttaaatatttcccagatcacactgtatagatttctttttagattacgagccaggagttaagaacttaaccttaaactccaagaaatgatcataatgaaatgttaagaaaattgagcttcctattatttgaaggttattaa

SEQ ID NO: 205454 - DNA, 1000 bp, Homo Sapiens
ttcacacaagtaaaatgctaaaatatggggagttcacactaggctccaaagcagcaacagcagaatagatggaaaaaatacccagtcctgaaccttacctccctgacgcccatcgaaaccatcattcttattcaataaactctgctttttataaaatgtggtggttcctcaaaaatctgtgttcagggaagtattcttcaagcacatacaagtattattacacagaccactagaaaagcttctcatcattgaggtctctatgccttcctaattaataacataatttagcatttctatcccactgtatttccaaaacacacctgtcttcggtgaattcatgcaaatacaaacatcttctaggagattatgaggcgatgtgttcagagcaaaccataatcagaaacagcaaaaccagaagtcatcagtctcagaacactttcttcaaatacataatattctggttttatattaagagagtgttttctttttttttctttttttttttgagaaggagtcttgctctgtcacccaggctggagagtgcagtggagtgatctcggctcactgcaagctccgcctcccaggttcatgccattctcctgcctcagcctccccagcagctgggactacaggcacccaccaccacacccggctaatattttgtatttttagtagagatggggtttcactgtgttagccaggatggtctcgatctcctgacctcgtgatccgcccgcctcagcctcccaaagtgctgggattacaggcgtgagtcaccgcgcctggcgagagtgttttctttagcaggatccaacagttgagcatcactattgtctactatactcctttggggaaaatagaaaacagattcgccaaaacattgggaggttgcattaagtgacttaaggtgaaatggtcttacagtgtctttcctctctggttaagtcttacatggggtctgaaattttgttcaaaagcaaggtttcaatgtgcagaattc

SEQ ID NO: 205455 - DNA, 1000 bp, Homo Sapiens
agactcttcatctcttcataagcttgctttgcttcttttattttgagacagagtctcgctctgtcgcccaggctggagtgcagtggtgcgatctcggctcacttcaacctctgcctcctgggttcacgccattctcctgcctcagcttctcgagtagctgggacgataggcatcccccaccatgaacggctaatttttttgtatttttagtagagacggggtttcatcatgttagccaggatggtcttgatctcctgaccttgtgatccgcccgcctcggcctcccaaagtgctgggattacaagcgtgagccaccgcgcctggccgctgctgctgcttcttcttcttcttcctcttcttcttcttcttcctcttcctcttcctcttcctcttcctcttcctcttcctcttcttcttcttcttcttcttcttcttcttcttcttcttcttcttcttcttcttcttctccctctccctctccctctccctctccctctccctctccctctttctccttcttcttcttcttctttttatttttattttttttttgaggcggaatctcgctctgttccccaggctggagtgcagtggcacgatctcagctcactgcaacctccacctcccgggatcaagcgatttctggcggagttttgtatttttagtagagaggaggtttcatcatgttggccaggctggtcttgaactcctgatctcaagtgatccacccacttcagcctcctaaagtgctaggattacaggcgtgagccactgtgcccagcctgctttgcttcttaaaattaatgttcagtttctgaaagctacaaattcaaaaactcaattcatcctgaatattttaagtttggcttacagttcttgtttttctatttataagacctgcaaatcttaagagtcacctttttagagcttttggataccataaatttagttctttaaataacttcaaacatttaaaattgcaataagaagtggaatacac

SEQ ID NO: 205456 - DNA, 1000 bp, Homo Sapiens
cactgcaacctccgtctcccgagttcaagcgattctcctgcctcaacctctcaagtagctgggagtacaggtgtgtgccaccacacccagctaatttttgtatttttaatagaggtggggtttcaccttgttggccaggctggtctcgaactccagatctcaggtgatccacccacctcggcctcccaaagtgcttggattacaggctccagccaccgcacccggccgtaaaaagaattaagagagtttttcagagtagtttctgagttacatgtaaaaacaagataaaaaaatttagtaacagctctgtagctttcaaaattaagcagtcagatttctgtgtggctgagaatttctagcagtctcctccattagaatttgccatgcccaaaatgtcccatgctatacagttaaatgattaatgtttgagtaatattcagtttgaaatttaaatttttcctcttgaggggaaaacatgcttagcctttcattataaaattatccaagctttcctctcatttctatgttcaaattcattgcatgagttaaagcatcttaaggcttccttctaaacaatttatatatttgccctacgatttcaactagtcctaatctcagaggatcacttcactggaagttgtgcaaaagtaaaacgaaatggagattaactatactaaattgtcatgttgagcttcgtgataaatttagttacaaagatattattcaaattggaattaactgcaaatctccccccaatgaaagtggagtgaagttggccgggtgcggtggctcacgcctgtaatcccagcactttgggaggccgaggcgggcggatcacaaggtcaggagatcgagaccatactggctaacacggtgaaaccccatctctactaaaaatacaaaaaattagccgggcacggtggcgggcgcctgtagtcccaggtactcgggaggctgaggcaggagaatggcgtgaacccaggaggcagagcttgcagtg

SEQ ID NO: 205457 - DNA, 1000 bp, Homo Sapiens
actaaattatattaaatgggtctgatattattttaaagacttcattaattgggaaaataaccaattttatgtaaacatcacatctatttctgcccacaggagttctctaatttcacaaagtaaataggccattattattttagtggtcattttgcacgtagcatgtcttgttattctatagtacacatcttgtaagtggaagtgaaagagatggtacatttagtttacttttttccttccaaagatgggtaccgttgaatagaaaagtaacattattactcttaaaactgatatctctaataagatgtggggaaacaagtatcggtcacagaaagtacacctgtttgttaatcagcctctaggtttaaagagagacagtcataattcattatacatgtaaaacaaaagttacactaccttgcatttttaatgaattttcctaatgcactgagaatttttgagtttaataaaatctaaattcaaaaggctctggttctaatgaagaatgcctactctctattatcttatctcctcaaacctggaggtcagtaagagatgtttaagtttaatgttcttcataagtttgtgtactagaagaaagaattctattgctggacccaaagagctattaatactcactcattggagattttctcaaggcagatgacgccatgccaaatacttctccatcatccaccccaaattctgtagcatcttcaaagtcatctccatcgctatcactaaccatatgaacatcggtgatttgctatttaaggaaagtcctgattagtttcatattgattttggcctatcaaattctaagaataagttataataataacaacaggacataagcgttataaaatttttatcaaataaactcatttgctagagtaaagcttactattttttccttttaaggcttacatacttcctaaactttctgtgatacctgtagaccgaaggtctccaaccttcgggaaatgaagaatgcttacaa

SEQ ID NO: 205458 - DNA, 1000 bp, Homo Sapiens
ctgagggagattctgtctcaaaataataagaataaaataataaaactcagctcaactgccttcttgtttatgaagtcatctctgatctcccagacgggaactcaagttctaaacttcaatattactttattcccacccatagtatagttactgttttttgttttatacagtttgtatacatgtcctttctcctttacaagaaaattcataaactccctaagggcagaaactgtttataattgacctttatattctccacaggagtataactttagcatcttatatattgtgcatgatgaataaacatttttgaattaatatcaattttaatttagagagaacaagtggctttaattccagtctattgcctaactctccactagaccatgctatattagtgttgttttaaaattctttctgcgatgagtaagagacacagtttgttaaataatcttaattcgtatctaagaaaatgcaatgaaatgtgatgaaatattacactataatttgcatatattgatatttgtagttctacaatattttcattccatgggccccaggctatttaatgaatagtcaaggcataaaactatgtcccagtgaaatattcccacaggaaatgactgatagcaaagttgccaataatggttctataaacacaatttgatctctatctcagaaattgtttccattccaactctgttgcaaaatctttttatgctttgtagttaacatagctgttaagaacactataagctgcatatatatctatatgcagatagatatatatgagtagaaaaatataaccttgaagatctggattgaacttcatcccgaattcagtttatccacttgttcaggagttataaaacattggttattggccaatataaaatactatgcattgttctaggcgttactcagaactaagtttgatgcagcataccacgactgaacttaatgcttctttaaagttgagaatgttctaactcatgaattc

SEQ ID NO: 205459 - DNA, 1000 bp, Homo Sapiens
gctgtttaacagcagcaaatatcatgtctcccatttttatgaaaagtaatactgtaaaacatgctatcaagtaatcaacatatttattaaacagttctccatacaagccatgtacatacatacacacattttattggacagtgtagtaagtgaccacagttgaagtgttcacatccaatatcatacatatgtacatcccctttatatggtgcaactatagcaatacaatgacattttaaggattgctcttattgttatttaacatatatgttcttatcaatattgaaatatatattttttaggggaaagcaacaagcatgtacattagtttctacggaagatctactttcttaaaacaaccatattaaaatcatatatactagctctccaatgtagcagaaatatctatatctcatgatatctttatctttctttgtttctttctttctttttttttttattttttttctttgagatagggtcttactccatcactcagctggagtgcaatggtgcggcctcagctcattgcagtcttgacctcctaggctccggtgatcctcccaccttagcctcctgggtagctgggactgcaggtgctcaccaccacacctggctaatctctttatcttttaaaacagcttaaagtatgtccatatttcttcctccacgtggcctttcttacagtcttcaaactctggcatccatggttagattttctttcattttttgatgtgggttttcaaacttaaaaagagagtataaagtaatctctcttctttattttctgctacatagacagtttttaactttaaatattttacatttccctaattacaagtttctgtcattttcttcatcagtcttcaaactatgaaatgatgaaaagatatatttggttttaaaaaataaaatgatgaaactttgtgatactggtgctcttcttcaaaggcctttgagtcttctgtttcagtatgtatgcaacgtgcatgctgacatg

SEQ ID NO: 205460 - DNA, 1000 bp, Homo Sapiens
gtgatcctcctgcctcagcctcccaagtagctgggactacaggcatgcgccaccatgcctagctaatttttgtatttttagtaaagacagggttttaccatgttggccaggctggtctcaaacacctgacctcaagtgatcctcccgcctcggcctcccaaagtgctgagattatagaagtgagccactgcacccagactgaaaatccaacattttaacagctgctcctcaagagttcgtcatagccatttttcttccttaatgtataccacaaacatttaaatattaaaattttttaaatgattagatttctctatatggcagtcacttgaattcttcattgattatattattaaaatgtagcctgttagctgtgaaatgagcttaataagccttatttatgggatgtagggtatgagggcacattctaatgatggtttatttcattcatgatgattaagctttcattcattcattcattcattcattcattcatttttgagacggagtctcgctctgttgaccaggctagagtgcagtggcacgatctcggctcactgcaatctccacctcctgggttcaagtgattctcctgcctcagcctcctaagtacctgggattatgggtgcccaccacatttttgtatttttagtagagatgggtttcaccatgttggtcaggctggtctcgaactcctgacctcaggtaatccgcccgccttggcctcccaaagtgctgggattacaggcgtgagtcaccgtacctggcctaaactttcatttagaaatagctcagtttggagattcagaaccacatgcatgcaaatattgtccagggctcggcctcatagtcattaatttgactggagctcatgtatggcacctgtttacaaaattcagaagatactgcaccttttttttttttttagagatagagtctcactttgttgcccaggttggagtgcagtagtgtgatcatggctcactgcacccttgaattc

SEQ ID NO: 205461 - DNA, 1000 bp, Homo Sapiens
tcctgggttcaagcgattctcttgcctcagcctctctagtagctggaattacaggcgcagagacggggtttcgccatgttggccaggctggtctcgaactcctgatctcaggcgatccacctctccttggcttctcaaagtgctgggattacaggcatgagccactgctcctagccaatctttttctgatttctaactgcttcctggtgccagggtggaaaagggcccagcaggtggagctgctgcccctttgctgggattccttctcagggacttggtgtccacccacccagcacacttgtcttctttcaaaagtgtccttgtacttaggaagtacttgcatgtgtttgcttattgaatttaatgctaggggggagagctcccatgaagaaatgggattttctcaccctgagtttgagatgagtgtggccccaggaggaagactgggcaggaaggtgcttttccttcctgtttctagtgaggaccatgcagggaggtctctgtcacatagccccaagtttcccatagggtggttccacccagacctgggaggggtctccctccgtgcagctttaagcatctgtttgtcgctcactgtcctctcccccatgctgctgacggtggggcactgagcagttagagctgcacgtcctccagcagggaaggcagccaacagatgcagactcgctctgcctacctgtggaggccggtgaggccagggcctgttgggacttgaaacagtgaggcaagtgggtgtgtggtgctgggctccccgctcaagttctcccagcgtgccagttcccggagccttatgtgcagggtgttggggaagggcgggctgaatcgtgggtgggagtcttggctcaaagccccaggtgagtggaggaattgggggcggacctgaagtactgtcttgaagtggacctggcaggcctcttgggcttgtgcagctgcctccccgggtcagagggtgcgccctctgtacccaaccaggtctcca

SEQ ID NO: 205462 - DNA, 1000 bp, Homo Sapiens
ggcaagccactgactggatttgaaagtttgatgtgtttatgaaaagtaaacgtttccaagaataaattagtataggcatctagtatttaggttggtgcaaaagtaatttcagtttttgccattaaaagtaatggcaaaactgaagtaagtttttggtgtgctggatacaaaagaaacatttttttcctctggtgaagcaggaagccattgggaggggtgggataatacaaaggaaggagagtggtagtgaagatgggtgtttggaaccatgaaaaaagagggtcaaaaccaagttttgcagacactgatagtactataaaaacaagaaacatagtactataaaaacaagaaacaaagctggcttactttcgggtttcattcttgcttcttgtgaactcagagtgcagaccaacttcattcagaagatgtgctaacaagattcccatgaaattgcattaggcctctaagtggatttcccataccttggttgtcctggtagaaggaaacttgacctaagtcagggttgttccagacttagcttagggaactgtatcttccctcgtcacctttgcactagatatcattccctttcctcttctggaacatcagggcatcaattactctgacccctctgtttattgcttcagtttctctttaaatgcttgatctttctactcaacatgtaaacataaatgagtctcatagaaaaagggaaagtaaccaatacctctcttcaggtgaaagcttctatgccatttctacctctctccctgtccactctcccattgggatcttcctcctatccctgccattctgtggagcatagcagtagagtgacctaaggacattttctcttcttgggctattgcccatgtatgtggcacttgctgtcaccaagaattccgtgctttttaaaaactttttggccttctgttttcagatgggcagtttgctgaaattaagtgcttctaatgaacaattgctttataaataattagaa

SEQ ID NO: 205463 - DNA, 1000 bp, Homo Sapiens
ggggcattttggttgcttccaagttttggcaattatgaataaggctgctctaaatatctatgtgtaggctttgtatgtagacgtaagttttcaactcctttgagcaaatgccaaggagtgtaattcctagatcatatggtaaagagtatatttagttttgtaagaaaccaccaagctgtcttcctaaaggctgttctattttgctttaagaccagcaatgaatgagagagaattcccgcagctccacatcttcataggctgtggtgttgctagcattctggattctgggcattctaataggtgtatagtggtgtcttactgttgtttcaatctgcatttctctatgacatatgatgtgaagcgtcatttcatatgtcgatttgccatctttatatcttcttagatgagccatctgttagtctttgacccattttttacttattcattttttaaagacaggatctcaaaatgttgccgagtctggagcacaattccaaggcgcaatcccactactgatcagcttaggaattctgacctcctccatttccaacctaagctagttcacccctcccaggaggtcgctgggttgacgccgaacttagtgtcgacacctgagaggcataactcacaacaacccggagctcctggactcaagtgatcctcccgccttagcctcctgagtagctgagactacaggcacatgccatcacacttggctggcccctattttaatcagattgattgttttgttattgttgacttttaagagttccttgtatatttcaaataaaagttatcatttatgtcttttgcaaacatcctctccctgtctgtggcttgtattttaattactttaagagtctttgacatagcagaacatgttcatttttattggagtccagcttatcaattatttcacaccttgcacctttggtgtcatatctaaaaacttatcaccaaatcaaagtcactagatttttaccttatcttctaagaattc

SEQ ID NO: 205464 - DNA, 1000 bp, Homo Sapiens
agccaggttccttggagaaatggctgatttaaggtctgggtcaggaaatgaacaagagaaacctgaagcaccttgtcatatagataacaagctattgaagactaataggatcattccaaaagaagaggactctcaagagccaacttaaagaggctcccaatggccaaagatgtgacagtttgaatatcagtagggataacaatagcaatagattgaagcacatcaaacatgtttaaatctatgagttcataatgatgctcaaaaattggtcatgtttaagagataattgggatgttaagttgaaaactggtaaataaatttttttcctgacattcctatgtgaactgtatacctgaataactacatagtacatgatatgaagttcctctttataggaataatccagctgctaaatgacaaaggaatgatagaattagagtgtcccttttttacaacctctaaagttgtggtatgatcatagctgactgcagcctcaaactcttggcctcaagcaatcctccctcttcttcagcctcccaaagtgatgtggttacaggcatgagccactgtgcccaacgtttgtacttaattttttaaaaactctaaaagaaattgcaattatgagaaaattgataatttgaacaatgactcaatgtttgatgatgttaaggaaatattgttaatattttagatgtgataataatatggttttttaagtctttatttttattggtgaaattatatgctctgggatttgcttcaaaatactatgcaatggggttgggggtagagatgaaacagaattggccctgagttgataattattggagttgggggatggatacatggaagttcaccactattctttctactattgcatagtttaaaattaccataatgaaatgttttgtaaaattaaatgcctaatttttgggttgcacaaaatacatactgtttctaataaaaatacataagtaatttggtccaaaatactttagat

SEQ ID NO: 205465 - DNA, 1000 bp, Homo Sapiens
gctccccctccaatgagggatggagcacagggggaacgagtcagtggagtctgcccccctgctggcacagaagtggccaactggttctagtgcccatgcactccaattcctgcccatgaaggggtcagggaaatatcctgcttcacaatcacctcacctgttttctttcagtttcagagacaagtgcttatagggttgaaggccggtgtctccatttgtgctgagtctcctcttctcctgcttcaggggtcttatttcaccatttcttactcctttcctgtgaatcttaaaccactctcttttatctattcctttaacatctaatcatattaagtaaacatactctgtctttaaaatagtgtttaattctatattctctctctagctagtaccctgtctctcctttcctttatagccaagcctcgtgaaaattaatcatttctgttttaatttctttgtgatttaatccagttaacatttcagcccattgcaatatgatatagctcctaatactctgagaatattgccctttttgaggtcattataaagtttttttgtgattaaattcaaaaaagtacttctagtcctcattttaatcaaatccactaagcatttgactgctttacttctgtatacattcatacatgtcactctctgaagagaacttcactaggcattttatcttctccaaaggactctacttagtttgtacaattgggcaacagaagagtgatggggaagaagtcgaagagagtggtaaaaaactggaatttcagaaatacagctttcatcgggataatttcctcttcttattggtaggttcagattattgcagagagcaaaaatcacataatgaataagatactgctgtatctcatttcaacctcggaagcagtttaaacacttccaaaggggagcagcatatcaacacagaaacggcttattcattaaatttatagaagtataacatcacacttgtagagcgaaccttccattacct

SEQ ID NO: 205466 - DNA, 1000 bp, Homo Sapiens
tattttgtctttttttttcctgattagtctatcattttaattttattgatctcaaaaacctgtgtatgttctttgttgggttttttggtttgttttttgagacagggtctgtcacccaggctggagtagggtggcacaaatatgactcactgaagcttcaacctcctgggctcaagcagtcttcccacttcagcctctcaagtagccaggaccacaggcacaccgccatacccagctaatttttaaattctttgtagagatggggtctcatcgtgttgcccaggctggtcttgaacctctggattcgagcaatcctcttgccttggcttcccaaagtgctggaattacaaacgttagccactatgcctggcgttgtgtatggttttatacattttctctcttgttttccagtggtttttttattaattgatttctactttggtctttatgattacctttcttctgggtttcatttgctcctcttttttaaatttcttaaggtagaaagtgagagcatttcttgtttttttttttttgattttttttttttttttttttttttggtttggtgttttttgttagagaccaagtctcactatgttgccccaactgatcttgaacttttgggttcaggtggtcctcccaccttggtctctcaaagtgctgggagttagtctttcctttctaatatagtgtagtgatataatttcctttctaatataatgtagtgatataattttccccctaagaactgctttagtggtatgacatgtgttttcatttttattaaaaagacatagtcttgctctgttgcccaggctgtagtgcagtagcctgatcatagcttactgcagcctcgacttcctgggcttaagcgatcctcctgcctcatcctcctaagtagctgggaccacagttgcctgccaccacacccagctaatttattttattttttgtagagacgtggtctggctatgttgcccaggatggtcttgaattc

SEQ ID NO: 205467 - DNA, 1000 bp, Homo Sapiens
ttgcagtgagacaaaactgcgcaccactgctctctagcctgggcgacaaactgagactccatctcaaaaaaaaaaaaaaaaaaaaaaaaggaataaatagactgtatctactataatagtgggagattttcccctttctttagtagatataaatgaaaccaaaaaagatgcagaggggagaaatatgaaacaaatctaattataataagcattaaaaggagaaaagaaaatttaaaaataaaatagattccactaatattttgttagaaatgtatcaaaatacaagtaaacacaataaatttaaatgagctgaattatcaattaaaaaagattatgaattgaagaaaattccagctttatgctgtttataggatataacatgcatcttaaaacaaaaacattaaaatgaaaatgagggaaaaaataaacctggaaaacattaaaggagagaggtaataaataagttaatatatagaatatatttcaataataaattatcaaagagtaactatacaaataaatagatgataagttgtagattgtagaagctcataaaaaactaaaagaaaaatccaaatgatggattggaatgttgttcagctaatattcagctgctcctcctcttcttaaaacagagtaattttcccactccatttatgtgaaataattactctgcaaaaaaaaatgccagaataagctcaaagaatgaagaaatatgattaatgacctaaaaacattaagtactaagatatgacacaaaacacatatacataagattaaaaatctaaaatatggttattttgttatatttgtcaaaattaatacaaattatacaagcaaaactattatgaataaatagagatttaaaataatattatgaataaatgtttctctaaattttttggcagactggtggttaaaaaatctgaacgttcatctcataaacctaagacaaaatagaaataaattgataaacttagaaaaaagaaataaagataaa

SEQ ID NO: 205468 - DNA, 1000 bp, Homo Sapiens
ttggccaggctgatcttgaactcctgacctcatgatccacctgtcttggcctcttgaagtgctgggattacaggcgtgagccaacgcgtccggcctgaaaatcctttttttttttaattaattaatttatttatttttgagactgagtgtcgctttgtcacccaggttagagtgcagtggcaccatcccaggttagagtgcacaggcaacatccacctcctgggttcaagtgattcttctgcctcagcctcctgagtagctgggattacaggtgtgtaccaccacgcccagctaattttttgtgttttaagtagagacggagtttcaccatgttggccaggctggtctcgaattcctgacctcaggtgatccacctgcctcggcctcccaaaatgctgagattacaggcgtgagccaccgtgcctggcctgaacatttcttattgtcatgactttggaatcctactggcatctaatgagtggcagctaacgatgctgctaaatgtcttacagtgcacagaacagccccctacaacaaggcactatccagccccaaatgtcaacagtgccaaggccgagaaaccctgctctagaaaaaataaagctaggtacacagtttgaggctctatcatgggactccaagtccagttttacaatctccaacagtgattaggactaataaatacttgtggaataaatttaagccttgaaaaaccagttaaatggtaaattcagagcaaatgttgaagaaaactttatcagatacagaaaggaagaggaagtacttttcctcttcagtcaggccatctcttcagacatatgtcatcttttttttttttttgagatggagtctcggtctgttgcccaggctggagtgcagtggcacaatctcggctcactgcaagctccacttaccgggttcatgccattctcctgcctcagcctcccaagtagctgggattataggcacccgctgccacgccctgctaatttttttttgt

SEQ ID NO: 205469 - DNA, 1000 bp, Homo Sapiens
attaatacttgaaaccatttagtaagcctggtatctagtacacactcattaaatgtttagtattcttgtgaacaatcatttcttaaatgtactagtatgatatataaagaccaaaacagggaactattttctttaagggattatcctattattataatggtcttattttctggtgactaataacatctcactatattatatatttcagaaatagtatttaaaatgaataagatttaatagtatgaccccttcctctataaagaccttatcagtcctaaagctacagaaaaatagacattaattaaattactaattaaaataaaattccatcacaattttaataaattaaatcattttgttcagtatttctgagatcacaaatcttaaatatcattaagaggatattcaaagatgactttcaagtaactaaaaagtttatgggctacatatggtggctcacacctttaattccagcaatttgggaggccacggagagaggatcatttgagcccagaagtttgagaccaacctaggcaacacaaggagacctcttctctacaaaaaaattaaaaaattagccaggtgtggtggcacatgcctgtaatcccagctactcgagaggctaaggcaggaagatcgcttgagcctaggaggttcacgctgcagtggactccagcctgggcaacaaaatgagatcctgtctcaaaatttaaaaataaaataaaaagtttatgcagattttctcactctacataaaatattcttaaactaacatatgtaaaataaacattcattatatatattaatgaaacttttatattaaaataaatcatcacccaatatcaataataaaataaataactgtatttgtatccacttactgcaatctctctacaagccgacatggatattcctgtgccttcaatttgcttcaatgcatattccttttcatcttttctgcacataaacaaaaaaacatcatttttccatatatcacttt

SEQ ID NO: 205470 - DNA, 1000 bp, Homo Sapiens
gtagctagagctgattaatacagttacattgaattgggggaaattttcaaaagaaaggataagagcaaacaaagttaaagatgatgtcaggaaaggagcacaagagagaacttctctttttaaaagctaagagaggaatgaaagttattaaaaagaaacaaagttccatttgccttcaattcctggcctgctctcaaacactggattaaattaattgttatccccatattaaaatttcagtttttagggtgcccactagtgtgagtagtgaataaaaatatctagtagcaaaggaatagtctaattttctcaaataggaatacactgggagatgaaaggtaggcacagacgggctgtgtaatttcagcctgcctgagtcacaatttccagtgaaattctgtgtgcctctcaattaggtttaaatgttagaggtccatttatagagtacagtatatctgcttttgatatcccaatcatatgtcatggaaaaagtaatagggacttggggaagaaaagaaaagaaaagaaaaagacaacattcttaagaaaaaaagttctgaaacatgacgtgagttgaagcttcctttgagtatctctttgctcccatcatattaggagaaactgcatggaaaaactgatccattatttttaaaactggaaaattagaaaattactcttcaatgcttttatgaatatataactaatgagaaataaattcagttacattctttaactgctaccccctcccccaacatgagtgatgtctctaattcagcatgacctactgtcagctcaggaaatttccatcctgagattttcctagcagagtcaaaatcagtcaccgtcagaaacagataaaaaatgttttaaatgagagtgcttgaaactgcatttaaattctatcttgaaaagttgcaaagtgcttggttaataattttccatagtatcatttttaaactattttggcatgctccataaacaatacgtacatttactgttc

SEQ ID NO: 205471 - DNA, 1000 bp, Homo Sapiens
gagaagccctatcaatgcagtgagtgtggaaaagccttttcacagaagtcactgctcacggttcatcaaagaactcactcaggagaaaaaccgcatgggtgcagcgaatgtcagaaagcttttagtaggaagtcactcctcattttacatcagagaattcatactggagagaagccgtatggatgcagtgaatgtggaaaagccttcagtaggaagtcgcagcttaaaagacatcagataacgcacacaatagagaaaccctacagttgcagtgagtgtgggaaagcattctcccagaaattaaaactcatcacacatcagagagcgcacacaggagagaaaccctatccatgtagtcactgtggaaaagccttcttttggaagtcgcagctgattactcatcagaggacccacacagggaagaaaccttacggatgtggtgagtgtcaaaaagccttcagcaggaactcacttctcattaggcatcagaggattcatacaggagagaagccctacgaatgcaacgaatgtggtgaagccttcatcagaaaaccacagctgattaaacatcagataactcacacaggagagaagaactatcgatgcagtgattgtgaggaggccttctttaagaagtcagagttaataagacatcaaaaaattcacttaggagagaaaccatatggatgcattcaatgtgggaaaaccttctttgggaagtcccagctcctaacgcatcacagaacacacactggggagaagccttatgaatgcagtgagtgtgggaaggccttcacccagaagtcaagcctgatatcacatcagagaacacatacaggtgagaaaccctatgaatgcagtgaatgcaggaaaaccttcagtgagaagtcaagtctcattcatcatcagagaacccatactggagaaaagccctttgaatgtagtgaatgtaggaaagcttttgcctggaagccacagcttcttaggcatcagagaattc

SEQ ID NO: 205472 - DNA, 1000 bp, Homo Sapiens
cataatatttacaatgtctaccatctaatcaaaagttaatagaaatgtggagaagccagaaaaaatgttactcaaaccaggaatttaaaaagtcaacaaggcaccatagtgcatgtctgtagtactagttactcaggaggctgaagcagaaagaccacttgagcttaggagtttgatgccaccctgagcaacacagcaaaaccttgtctctaaaattttacaagtcaacagatacatatccaaacatgacagagatgatgaaattagaaaagactttaggctgggcacagtggcttacgcctgtaatcccagcactttcggaggccgaggcgggtggatcatgaggtcaggagatcgagaccatcctggctaacacggtgaaaccccatctctactaaaaatacaaaaaattagccaggcgtggtggtgggcgcctgtagtcccagctacttgggaggttgaggcaggagaatggcgtgaacctgggaggcggagcttgcaatgagccaagatcgcgccactgcactccagcctgggtgacagagcaagactccatatcaaaaaaaaaaaaaaaaaaaagacatgactttaaaactaatattattaattgtttggggagctaaaggaaaatatgaacatgatgaggagagaaacagaagacataagaaaacagatcttctagagctaaaaaatacaatatctaaaatgaaaaattccatagatgggattggacactgcgaactagaagtttggatactctaaaggattaataaacttgaagacagagcaaaacaaactagacaaactgaagcatagagagaaaagagtgggaaaaacttagcagagcctcaatggctgtgggacaatattgggtggtcttacatatatatatataattggaatcccagaaagacaagagaatatttgaaaaaatatggcagaaaacattccaacttgattaaagctataatcccacagattcaagaagttcaatgaattc

SEQ ID NO: 205473 - DNA, 1000 bp, Homo Sapiens
agaggttgcagtgagctgacatcgcgccactgcactccagcctgggtgacagagtgagactccatctcaaaaaaataaaaaataaataaaaataaaaacaaatctggatgtcatcagtgtatggatggaagggatcaactaggaaaaggtgggaggaagaatgttctaggcagagcctggagatcttcgaagtccctcccaatttgaggattctgtgctatttcttctgtttgacagtgctacctgcacagagttttagtctctactcaggttcatatttcaccttcaacctgtcacctgtcttgagtccagaggatccaatggaacaagttgagatggagggcaatcatggaaggaaaagccagtattgaagtgtgacccctgaaaatttgagacaggtctcagttttttttgctttttttgtttttttgttttttgttttttgaaactgagtctggctctgtcaccaggctggggtgcagtggtggatctcagctcactgcaacctccaactccctgatttgtatttataatagagatggggtttcaccatgttggcctggatagtcttgatctcttgacctcgtaatccgcctgactcggcctcccaaagtgctgggattacaggcgtgagccacgacgcctggctaagaataattatttttttacataggctttaaattggctttgatggaactttgtccatagaaggaatcccagataagactttttttaaagctgatactggccatggatttgtgccatcaaatatctatgagttgggtgaattttctctccccttgaggttccaagatgaacctggggcttctgtgcctgttagaaagtgacactctttacttaccacaggtcagaaaccctgtacatgaactgtgtacacaaaatatgaggccagtttttccaacggctttattgggtccataagtcaagttttattccttaaaggaaagcagaccattccagtcaaagccttggttaaaat

SEQ ID NO: 205474 - DNA, 1000 bp, Homo Sapiens
tcctgcctcagcctcccaagtagctgggattacaagtgtgtgccaccatgcctggctaatttttgtacttttagtaggcacagggtttcaccatgttggccaggctggtcttcaactcctgacttcaggtgatccacccgccttggcctcccaaagtgctaggattacaggcatgaacctccacatccggccaaagtgtgcatttctatctttggggagatcgagagccggccactatttttgagcaggagaggagtgggttcatgtttacctttcagaaagatcccccactgggagaagggggtcttattgctccaagaagccagagaaagggagaccagttgtggggtgggtgggttggttgggggtggaggcttttaggcaaggacatggcagcaactgccaggatgcccacagctgggtggcatgcaagatggactgaaggcaggagtactatttgaggcaaaggagacctttagagaaaatgccctgtcaaagccatttattttaacaaatactcttccattgctctgtttttattcccttcagatgcatctttccttctgggattgtgaaaatggatgtcatttctgtagctttctgaagtttcggtgaagtttccttttcctctcagtggattctgtgtagcaggaagcatgagttgatttcagctttttgtcttctgagacctacttcagagtgtgttgctgctggtccgaggctgaaaggaaggtctgtgatgtcataggctgtgatttttctagaaatgtgtactgagatcagctggcacaattgtgttttaaaaacaaaaacatctcaggggcagtccccacattctgcataacgggacccttcaccccactgcctagatggttaatcccgacaactcagaacaccccactaaccaaggtgttaatgacgtaactctctcctcacaggaaaagctgctctgtaagaaaagggcactgaaggaagtggcttttgttctaatgccgaattc

SEQ ID NO: 205475 - DNA, 1000 bp, Homo Sapiens
gcctatacgaatcctgctactgctcattttagttttgatgctgtagacttatggttagtaaagaatgtactatgagtggacaataagtcttagaggagacatgtttcataggtgatgattcatttaaaatttcactgtctgccttgttaatctgagatatctgactttgaataagcatgtaatgtgaccatggacaacataaagttaagcagatcagtgagaaatcaactaattagtggccaaagtcataaacagataaggcagcaggacaggcaggaatattttctaagaggataattgaatttggtggatataacacttgacttctgaggtactgaagtagcctcaaattagcaccattaatcagtcattcagctgtcctcacataagtatctaggagagaagacttagataccaccaatagaagtaagaagacctgttgctataagaaagtaaaatagtataaatgagttctggataagcagctgctggacatctttactaacccatttatgccggaggctgcaaatttttttgcgtgaaaattcagaccttggttatgaccttgaagagtaggatataaataactctcacaaacttagcattccaataatgaaacactaggcataaatcggttaagaggtagatatgattccataagatagttaatctctacttttacatttctgttcctctacaaaacaaaaatacttcaagcttaatcatcagctctgatgaaattactttagtagatctgactttactccttttaatttagtaaacaaatactgactgtactaatttgctgtgtgcaccataaagatcagatgcaaagaggaaggatgcctatttgcacaagattggagaattcaatcactggaggtatctattagggaaactttgagatacatattatttgaatcatgttgactctcacttatgtttgatctgccaaataccttcctagatttctgacctgtcttcaatgccaatagaattc

SEQ ID NO: 205476 - DNA, 1000 bp, Homo Sapiens
gctaccacttttccctttagtcaactacgggcaattcggacactgctgacccagggaggtcttaggaccctcagttggatgttcgaaggtgggcgggccttccttgtctgtgggaggtggtctccggtagaattcctctttctgtggctggtgaaatgacttggtggatcaagtgctgactgcacaaggaaatgagtttgattcctgaaaccaaccaatgttaaaataaataaataaataaataaacaaataaaataaataaaagctgggtggtggtggtgtctttgattccagcaggaggatcggcatgagttcaaggccagcctggtctacagcctgagatccaagacagccaaagctacgcagagaaatattgtctggagaaaaacaaaaacgaaacaagagcctgatgttgtggtgcaaatctgtcaagacacttcgacagagaaatgggaggcagagacagaagagccccagaatttcagaaggtcctaagccggttaacctggaatatgtcgaacaacagaagcaagagagacagacagaaccaactaccaaaagctgtagcatactcacgctcgtgaacacacattcacacagtaaaaatttaaaaaaagaattcctccttctatggtgaagatcttttactggtcctgatgtaagtcaaccgtgctttagctatagttacgagatagtcacttagaacagggcttatagcctaggaccagcagatgggatgagaggaggaggcaggcctgtaccctgacagtagctgaggttttacatttcccttcttagatggaaataccagagacccttactgaggtcttatatatgtcctgtatttagccaccacagtgagtctcttattcctgggaagtgtgtgtgtgtgtgtgtgtgtgtgtgtgtgtttgtgtgtgcgcgtacatgtgtgcacatgcatggatgtgtgctagtgtgtgagtgtgcacatgtgcttgtgttcaatgccgtagaattc

SEQ ID NO: 205477 - DNA, 1000 bp, Homo Sapiens
agggtgaatcatctgtctgaaatagcatgcaactgcagctgcagacatcaatctgcagcacatatcaagcaattcaactttttcttgtaatgtcccgacttttctctgcttcttgggagcacttccagcatcactagtggcactttgtataggtcccatggcgttattcaagatttatggtattgtactaaacacgatgaaaaatacttgagaactgcaagagatcactttttactgcgatatgcagtttactggagagatgaatggctcacatggagatgattagcgtcacaggttgttttaagggatactcttaacagctgagctcaccacaatggctataggaggtggctccaaaatcattacagtagtaccttatgcactgcagttaacttcttgtagttatgatttaatactgcatctttatgtttgtttacatttttctcaactgcaaatggcactatgtacataaggtctgtaaatgtttgtgtgcataagttttgataaattttatttattttttattttttgagacagggtctttctctgtcgcccaggccgacacgcttgcagtggcacagtcacggctcactgcagcttcaatctcctgggctcaagtgatcctcccacctcagcctcttgagtagatgggactacaggcacgcaccaccatgccgggctaattttttgatttttaaatagagacaaggtctcactttgttgcccaaggctggtcttgaactcctgggctcaagcgattctctcacctaggcctcccagagttctgggattacacgtataagccaccatggttaacaaattttaactttttacagtagatttgtatatattttattgtcataagtgattaaatagaattgtttctacatatattttatgcattcatgacataaaactttttcttaaattttttgatatttctaggctacgtggtttatctgagttttttcaaattgtctcaaacctccaaacaattttt

SEQ ID NO: 205478 - DNA, 1000 bp, Homo Sapiens
ccctcgagattttaaatgaagacgaattaaagatgttggtcaatattttgcccaaattgaaaaggcttatctctcttaacctagaggaggttaactgcagctcatcaatcattgcacttaccacattctttttacctggacagtctgattcctccactagacagatttcaggtcttgttttggaatcctctagattggtgcttggcacaagtaggatgctcagctaattaatttttttttttttttttttttttttttttttgtagagatggtgttctcgctttcttgcccaggctggtcttgaactcctgggcttaaacgatcctcccaccttggcctcccaaagggttgggattacaggtgtgagccactgcacctggcctcaacaaatacctgttgatctcacacaaactgaattgcatgaacagatcatattccaaggctccaggagacattaggaaaggatccaaactaaccagatgctatttaaaagttacaaaaaaaaaattcctgttgaaagttttaaaaaatactaattgcacaaaaggacaggggaaatagttgacagtggttcacctaaaaaagcacccttgacctttttttttttttttttgtgagtgaggtggttgcagatttctatgaaaaagaagttaattcttcagctccttaatggaaccctggatctcccagctatgcaggaggttatgctagaagtagaacaaagcggaatgtacaaatttaaggaaggttactgccctgtgttcttttgcatgggtctgtatctagcattgggagccaggttttgttgttgcttattgggagagataagaatggtatatacacaaataactaaaaaaaaaatacgtggtaaatgctaaaagacaggtgcaaagaacactgagatggagctttcttgggttacacagccagttttaatgtttcctaatatagaagagctttcaacaaacctctcaggcaggctgtcttcaaatgacattac

SEQ ID NO: 205479 - DNA, 1000 bp, Homo Sapiens
catagaaactcaaaaaacaagcagaatctgtcagaattaacttcttcagactctggaaaaaagtcagaggcttacagccaccaagtggatgctgaattaagaaaaataaaaaatgggccagttgcagtggtggctcatgcctgtaatcccagcattttgggaggtcaagacaagaggatctcttgagcccaggagtttcagactagcctgggaaacacagtgagaccctgcctctataaaaaataaaaaaataaaaatcagccaggcctggtggtgcatgcctgtagtcccaactactggggaggctgaagtgggaggatcatttgagcctgggaagtcaaggctgcagtgaactatgatcttgacactgcactgaagcctgggtgaaagagtgagcccctaactaaaataaataaaatttaaaaatatatatatatgtatgtatgtgtatatatatatgtatgtgtatatatatgtatgtatgtatatatatatgtatatgtgtgtgtgtgtgtgtgtatatatatatatatatatatatatataaaatacagagataaggctgggcatggtggctcacgcctgtaatcccagcactttgggaggccaaggtgggtggatcatgaggtcaggagttcaagaccagcctggccaacatggtcaaaccccatctctactaaaaatacaaaaatttgctgggtgtggtggcacgtgcctgtaatcccagctactccggaggctgaggcaggagaattgtttgaacctgggaggcagaggctgcagtgagccaagatcatgccactgcactccagcctgggcgacaaagagagactccatctcaaataaataaataaataaataaataaataaataaataaataaaataaactcaaaaatggtaggaaagttttgtggcatttttatttgctgttattccacaccttaccttgcaatggtcctgaagacagcagcccatactgtcggcatgggagtggggtcc

SEQ ID NO: 205480 - DNA, 1000 bp, Homo Sapiens
ataagttttttaattgtttattgtaagttgacaatttatatttgtatatgtttatggtgtataaaatgttgaccataaatacaatgtgaaataattaaatcaagctacttagcatattcatcacctcaaagagttaacactttttgtgatgagaacatctaaaatgtacaatactatattattaactatattcaccatgctgtgcagcagacctcaggaaaaaaaaaagcttcttccacctgtctaagtgagattttgtaccttttgaccatcatctcctcatcctcctttcagggtcttattgttaattagaaaactaatgaacaaaaagtaataatgaaatccttgaaggtacacaacttcattttgtttaaaaagcctttatatttctgttcacagaaatataaaaggtaataaaagtcatactacatagatttgtaagattattaacttctttttcactaaatgtaccacatgaagtaggcactcaataaatatctgttgtatttatgaatgaaatcgtttggacctgtcttcagcttatttttaaattttaacttatatatatataatatatatgtgcttcatctttctatgtaatatatacacacacctatatatgcttcatctaaaaattatttccttatcttcagttaagtttatacttgaataatagctgcatcattagtcaaaatcatatcttaagatatcagcatatcagaaagagtaggaagaattttcatttaaaagtaaagacaaaatttaaaaaccattcttattttcaacagcagaaatttacaactaaaatgaaaagtgcctcggaatgaaatattaaatccaagctggtgtctgtccacctgtccttaggaagtctcaacttacgaagtccacaaaatttctcaaaaaagagttttatcactttgaatttgtcccctgcttaaaatccctcaaaatatacaatatctaataaaaatcagccttttacttataaaatgaattc

SEQ ID NO: 205481 - DNA, 1000 bp, Homo Sapiens
ccttttgggaggccgaggtggaagggttgtttatggccaggagttcaagaccagcctgggaaacatagcaaggaggctccatctccataaataaataaatagccaggtatggtggtgcacatgcatgcctgtagtcccagctacctgggaggctaaagcaggaggatcacttaagtccaggagtttgagattgaagtgagccatgatcatgccactgcactttggcctgggtgacagagaaaggcattatctctaaaaagataaaaaatctagaaacaatacaagcaaacatagaaatttagtctattataaagattattttccattcaggagggaaaaataaaccattcaacaaataccataggaataatttgctaatgatatcaaagaaataaagttagattcgcatctcatgacatgcaaaaatgaattattgacagacaaaaggttgaaaacgtatattcaaacacacaagcacacacacatataacacatacatgaaccttctggaaaactaattttattatcttgcagtttagaagacattttaagcaaaataaaacccagaggccataaagaagtaaaataaaagatatggctacataaaagttacatctcagcaacaataacaacaaaaagcatgagaaaagttagagaaaataagcagagataaaatatatattaagtatatatagactatcaagtcttaatacattacttataagtgtataagtaatgtattgtacattataagtattatgtattataagtgtacttatatgtcaatttaaaaactataccagctgggggcggtggctcacgcctgtaatcccagcactttgggaggccaaggcaggtggatcacgaggtcaggagatcaagaccatcctggctaacatggtgaaactccgtctctactaaaaatacaaaaaaaaaaaaaaaaaaattatccaggcgtggtggcaggtgcctgtagtcccagctactcgggaggctgagg

SEQ ID NO: 205482 - DNA, 1000 bp, Homo Sapiens
taaaaaaataacaatgacacaacaattaaaagccagaaattgcaacatactacctgagaaaatcaacttcaataatagaaagataggaaaggatgtagtaggaagagaatacacacacacacacacagaaaataataacaaaatggcaggaataagtccttacttatcaataaccacattgtgtgtaaatggactgaattctccaatcaaaagacacagagtggctgaaagattaaaaaacaagatccagttatgtattgtctacacgaaacagactttacctataaagacaaacgcagactaaaaatagagacggaaaataatatttcataccaataaaaattttaaaaagtaggagtagctatgcttacaatatacaaaatagattttgaaacaaaaagtaaaatatgacaaaggaggttattatatattgataaaggcttcaattcctcaagagaatataagaattgtaagtgtatgtgcacccaacattagagcacccagatatatgaagcaaatattattagacctaaggagggagatagaccccaatacaataatatcaggagacttcaacaccccactttcagcagtcaacagattatcctgatataagacggaaaatagaaacctcagatttagtctgcactatataccaaattgtagtaataagtatttacagattattttatacaacagctgcagaatacacattcttctcagcacatgaattattcacaaaaataaactgtatgttagtccacaaaaaagtactcacaaaattaaaattacatcaagtaacttctctgactgcaatgaaataaaactagaaataaataacaagataaatttttgaaactacagaatcgtaaaaattaaaccacatgttcctgaattgccagggggttgatgaagaaattgaaaaggaaatttaaaaatttcttacaataaattaagatggaaagtgaatataccatagcctatggaatacagcaaaatc

SEQ ID NO: 205483 - DNA, 1000 bp, Homo Sapiens
atgaagcagggaaactggttaggaggacgttacagcatctgggtgggagattaagagagtctgaagaatgaccgtgccagtgagaatggaaagaagggctaagaatacagtagacactcaggaggcaacattagcaaaatagcaaatgctgtttccccagaggttttcttcttcttgccctctctctgggtgattagttccttagtgtccactgccatcaataactaagtctccaatcccaacagctctcttacgatccagactgcaaagctaactagctccccttggatgtcccatggacaccttgaactcaatatgtccaaaactgttcatccccattcccttcccctcggccaaccagacggcccaaaccctgagccctgatcctcctctactgcttcacacatcagagaacagcaccaccattcatgaaacctcccaagccaaaaacctgaaactcccaaaattcactatgaaggagtaaatttcttccatcagccccatatctagtctgtcaccaaatcctgcctctttcagttacatctcttggacaggcattgttctagttatgtttttgggtgtgtgtgaacggagtgtctgtatgttgcagggaggcaggaatctagttgtcagtgagtagcacttgctatatttgcttccatccactcttccacccatctgtcccatcattctttcatcagtgactcagtgtctacccagcgcctggtcatcggcattcctgccaagtggatctcaggacaaagaaaggacatgactgcctgaagagggcccagacatgcagtggggcaggtgctggcatctgagaaagtcctaggagagaacctcctccagtgtgtgaagagcttcccaagcaccaggtccactgactgtggcgtcaaagacagtgaaaagctggccttggggtgatgccatccaggaaggcatgccagatcagatgcccaggtgggttcggaggcctcctctgtactttctcatgatc

SEQ ID NO: 205484 - DNA, 1000 bp, Homo Sapiens
attgcttgtggataaaccaagtaaacggacatttgccacagaaaggatgacttcttcacttgtaagtatagggtgctaagggagcacccagcaaggacacttaaattagtctcaacctgcccggtccaacttggcagccacccgcggctagagaacacatgaaatgtgactgatctgtgttgtcaggataaaacacacactaaatttcaaagtcttagtgtgaaaaatggaatgtatttatctcattagtaatttaaattggttataggtttaaatgattttggttataggttgaaatggctataggttgaaaagatttaggatattttgggttaaataacatatattatcaaaattaatttttcatgtgtctcatgatgctttgtaaagccactcagcaactctgtgaggtagatattgttctcgttgccatttaagtgatacacaatgggcttagagtggtaaatgacttgcccaagttcacatgacttaggaagggtaattcatttgcccagaatcatataattggaccttccttctgagaaagcccattgatgatttggtttagaaattgggcctttaatgggaagttagttgttttctctcaatgtgttttaatgttctctatagagggcccaggagtatgtcagaaatgtgaaatatatccagtagtacatcagttttagagagcagggcagataaattctgaaagcaaagcattcatgtctgcggtagagacaggctggctgttcccaaataactactctccccttcctccttaacaatacaacccttgatttattttttaattttttaaaattttattttagagacaggatgtcactctgttgcctaggctggagtgcagtggcatgatcatggctcactgcagcctcaaactcctggcctcaagcaatcctcctgccttggtctctcccaaagtgttgtgattacaggcatgagccactgtacccatccagaacacctgatttttagctgg

SEQ ID NO: 205485 - DNA, 1000 bp, Homo Sapiens
tgcgctaaggagaaaattgtacattctaaagtcattggatgaagtgttctgtaaatatcaattaggttaatttagtctgtagtgcagattaagtccagtgtttctttgttgattttctgtctgggtgatctgttcaatgctgaaagaggagagttgaagtctccagctattgttgtattggggtctatcacttcctttagctctagtaatatttgctttatatatctaggtacttcagtgttgagtgcatatatatttatggttgttatatcctcttgctgaattgaattatgtataattatataatgaccatctttgtctctttttgtaattttcatcttgaaatctattttgttagatgtaagtattgctattcttgctcttttttggtttctgttggcatagaatatctttttccatccctttattttcagcctgtgtgtgtctttataggtgaagtgtatttcttgcagacaacgatccttgggtcttgtttttaaatctattcagccattctatgtctttgattgaagagtttagtccatttacattcaatgttattattgataagtaaggacttacttctgcctttttcttatttgttttctggttattttgtggtcttttcttccttctttccttccttcctgtcttccttttagtgaaggttattttccttggtgttatgttttaatttcttatcttttatttttttgtgtatccattgtatgacttttggtttaaggttaccatgagactttcaaataaaatcttgaaacctattattttattcttatgtttgcagtatatgcttgtttgtgcccatctttcttgggaaggctttccaggtatttgaagagccttgaatgttgtgatctaagtttttggtcactgcagccatatctgcattgggactcaccccaagccaagtaatactgtggttcttgcagactcttagaggtactgctttggtgttcttgaataagatccagaagaattc

SEQ ID NO: 205486 - DNA, 1000 bp, Homo Sapiens
gttcaataaattcctattctagaggccaagagaacgggtggaaaggggatacactgcaaatgcttacttaaatttcagaagaaggaaataaaacttattgcaatagtcaggtaggtctgttaaaactgaagtttcatgatctcagaaaatggaaccactttctcttaaactcagctaagtcatgacagacctccccgctccaactctccatgcctaccacaaaccttggataatctcccaaatgtaaaccttgtctaccgtatcctgtgaccattagaacaatcagaggcaaggagatacacggtcttttgattaaagtaaactgaaataaccaattaaaatttacatttgtgcctctcgctcaaataaacagttatagaagagctctcactgagatgtggaacagaatcaagcagctctgaacttttcaaataataacaactgttatttccaaataacaatttctaaataacaagctgatgaacaaaatatttatttacccaccaagccacagtagcctgagacattctctggttcagataataaaataaatgccttagagggctttcgttcctaagatgctggtgagtttagcactgtgactgcaagaaatcgggaacctacgacaaaaagacgcccagcctgcccacactaaccgtccagaactaggtctggagcagcaaggcgggcggggccgcgatttcttccgcatcgctgcgcccgttcttctccgcctgcgtgagcaccgcccacccactcgcggtgtgaacatactgggtctcgcctctcctttcccctcccctcggcctggtgctgaatcatgagcccaatgtctccaaaaggtaaaatcaaagaacaaagccacccttggggctggtctgaatggggtaccacgtcggggtggggcagaaggctggaaaccacaactttgctctccttcttccccaattcccccacccaacccccaaattaagaggagtactgcagtgctcaggaattc

SEQ ID NO: 205487 - DNA, 1000 bp, Homo Sapiens
cggcctcccaaaatgctaggattacaggcatgagccactgcgcccagccaagtctgatgtttctttattgattttctgtctggatgatctatccattgctgaaaatggggtattgaataccctactgttactgtattgctgtctatttacctcctcagttaatatatgctttatacatttaggagctctgatattatttgcatggatatttataattgatatatcctcttgattgacccctttatcatttataattaacattataaaattaataataattaattacccctttatcaaagggactctcttgttccttgtaacagtttttgacttaatgtctatttcatttacatattagctacccttgctctctttgggtttccatttgcataaaatatatttttctatcccttcattttcagtttgtgtgtgtatacttaaaggtcattctgcaggggacctggagcctaggtctgtagtgcaggtctggtcctggttctacaaaggctggcctactggaatgggcttggagtctgaggctgtggaggacagcctgctagcagagttcactatgacaggcctggtgcttctctgtttgaaaactggcaaatacctcaaaggaaaaattgcttaaatgttagacttatctaggaactttgtttccctctggaatcttggcccttgaagcctttgctaatttggtaagctttctgatgtcttcaaacaagtattttaaaacattttctggagtttataattgtccttggcagcagtgctggtttgtaataggcttatctatcattactggaagtggaaaccacttcctgttgcattttgtctttctcattttaatatgccagctatcttttctatttccttctctggtttattaccttttatcatatttgactttgtctttcttatttcaaatctactttattgcagatgctacctcagtgttgatgttattattttttatccttacccttttagtgaattc

SEQ ID NO: 205488 - DNA, 1000 bp, Homo Sapiens
acttggaggctgaggcaggagaatcacttgaacccaggaggcagatgttgcagtaagccgagatcgcaccactgcactccagcctgggcaacagagcgagactccatctcaaaaaaaaaaaaaaaaaaaaaaaaaattaagaaaagaaaaagctgcagaattccttccacatgatttgcgttctaccccaatgcttgacatactaaatccaccacctctcttgaagctaggttttgaataaaatgagaatgacattttctttctttcttttgagacggggtcttgttctgtcacccaggctggagtgcaatggcaccaactcggttcactgcaatcaccactttctgggttcaagcgagtctcctggctcagcctcccgagtagctgggattacaagcgcctgccaccattcccggctaattttttgtatttttagtagagatggggtttcaccatgttggccaggctcatctcaaactcctgacctgaggtgttccgcctgcctcagcctcccaaagtgctgggattacaggcgtgagccactgtgcctggccaagaatgacattttctaggtagccttttttttggtttaatgtatagacagggtgtcaccatgctgcccaggctggtcttgaactcctgggctcaagtgatcctcccgcctcagcctcccaaagtgctgggattacaggcgtgagcccccatgcccggcctctaggtagctttcttaaattgagatgttaaaagtctaagggaaaaggagtggcttgtttacctgtaggcagaactgactgcagtgtaactaggaccccttgcagtcaccagggtctatgacggcgtcctggctctgcccctctctgttcctaaccatcaagcctggatgtgcagccctgctacttcgagtgtggtcctccaaccagcagcatcagcctcacggaagagcttgttaacagtacagcctctcaggggccacacgggaccctgaatttgaatctgcatt

SEQ ID NO: 205489 - DNA, 1000 bp, Homo Sapiens
tatattctgaaataactcttgtctatgagtatgtatgcaatgagaaaggctataaagttaaatcaaggagagcaacagtgacttaaaagttaggcgttgggacactatggtgtggagtttagagcactggattgacagcctgaataatagggtctggtattcctgggtacagcacttaactgctgccacctctgccctccctgagccccaggccccttacctggagttagggcatatcctagcacatctgtgcatctcagctctgcccaggggagagagcaggaccgtgtgtgtggaagagctttgagaagagaaagtactacttagtgttgggttattcatgttaaactattatacagtcaatattaacttcttatagagaaaatatatgatttctggtgattgttttaaattggaaaaggacagtgtggcattgtgagtttcactttcctcaaagttttatgatttttattttacttactagtagacaagttttctagtaattgattatgttgtgagtagatgaacatcttgcataagcagctagcctgggctgctgtgtaacctatgtatagagacgaatggtgatgaagcctgtatgtttcagcctcggttaggaaaccttctgtcctaagccacagaaaagttaaagaagactctgcctcgaaataactcatttcttccctcccttctccccttcttccctcattccttctgtcctttcttcctcccctccttcctttcctccttcctttcctcccctccttccttctacccctcctttccttccttcccttctttcttccttccttcctgtttgcttgccagccctgttcttagacattggtatctggagctgccctcatggggtttatagtctgatacagccaactcttccatatctgaaactctcgaggccagtggtgtttcagaattccagtttgtcacagtgcagagagacaggtgggagctgtgtgaggccagcggtgtttcagaattc

SEQ ID NO: 205490 - DNA, 1000 bp, Homo Sapiens
ggtatgtgtcaccacacctggctaatttttgtgttgttagtagagatggggtttcaccatgttggccagactggtctcgaactcctgacctcaagtaatcccccctcctcagtctaccaaaatgctgagattacaggtgtgagccaccgtgctcagcctccagctgttatttttattgacaaagttatgaaaatatttgagtgggaaagtgatttgcacaggctccatcaagttgacaaaaccaagatcggaacacaggtcttttggggcccccagccttcagcagacttccccaggagtagcagtattgcctgcttttggaaacctcttctccaagaagggaatccctgagcttgggccagtctaggaagcacccagttgaatctacaggcctaggacacatgaaaacccttttaccaaccaacatctggaaagggactctgcaatgccagggtagaaggagccttattcatggagcttcatagaggcactgggtcttattttctttgagacggagtttcactcttcttgcccaggctggagggcagtggtgtgatctcggctcactgcaacctccgcctcccgggttcaagcgattttcctgcctcagcctcccgagtagctgggattacgggcatgcaccaccatgcccagctaatttttgcatttttttagtagagatggggtttctctatgttggtcaggctggtctcaaactcccgacatcaggtcctccgtctgcctcagcctcccaaagtgctgggattacaggcatgagccaccccctccggcttgggtcttattttcaatggccaggcctctcattaacgtggcaggaatgcagcctgtgcggagctcccaacagtgcagtttgccagaagttggctgggattgtgctgggtttctcaaggttcccctccttgttcactctcttcagacccacctttgcctgcagctggcaagcagctgatagatctctattttgctgttgtgagaattc

SEQ ID NO: 205491 - DNA, 1000 bp, Homo Sapiens
aagagaagtctgactactcactagacaagggtcataccgggggtgatgagaagcaggtatacctggcctgtagtataccgcaaattttgtttcctactttctaccctaatttagttaggactactttctctggctatgagctgtgaggccaaaaaaaaaaaaaaaaaaaaaccaacaacaacaaaacaattttgggtgaaatttgctgagttaaaaactaaacttgaagagcaaaataagtacttaatggtgttgtactaagttgccaggtgttcctctctatatttttgacactgctcatcttagagaaatgtctttgcaagctagtagtctcaggcaaaaagaaagaaagaaaaaatgtaaagacacctaggaacttggaagactagagaagctgagtttggaaattagaaaaacttaaaaatcaaaggaaagattggatcaggacctagaatcataaaaaagaatattctggtaaacattcatagtatgattgctcacttgctacaattgtaatagctgataagaatttatcctgtttctctctctttatatgactatacacaataacttacatcctttaagtgaatattatcaaggtcacagttgctgtgcactgtttcaaccaaccagccttctggagtaatcatgttgaggattaggaggggtgattcaggaatatccaaaaattttgccactggtccaagagaagaaacgtcattagcccctgacatcagttctggttccagaacaaaacggtaaaagctgttaataaaacataaaaatacataatgtgaccaaaactgagatttttcttttaaaatattttcaaaattgaaaattgcttaatgatctgaccagaagtctacaatcaaaaagactaagatgcattatactgcagaaaagttaatgcttatgagaaatagacaatcattatttgttgacactactatctaagtctatgtatattatctaccattgttaactattccttaatgaa

SEQ ID NO: 205492 - DNA, 1000 bp, Homo Sapiens
gtgataaacagatctgagtgtacccaatgatctagttcaaactcgtgaattgcggggtttgtttttgtttttatttactgtgaaaattaaaattcatttaagcactaattagatgatcaggagaacaccctccatataacaaatgactagtacctctggaaatttaaacagcattgacttagtactttatgccctgattgtgattggttctgtactagaacttgggcttgttttaaatttttttcctcccatgaagagaccgctgataatgaattttctccactattagggcaaaacaaacaaacaaacaaacaaacaaaaacacatttaaacaaaaatcaagctaacaaaattctaagttgttagccagatgtgttagctcatgctgcaggagcagagccccgcccaccagagccccgcccaccattcgttggaattcaggtgttgctgccccccccccccctactcttttggccaaaagggctgacagactgtttgcaaccagagagagagagctctgagctccagctgccattaattttttctttattgttttgttttgttttctaccaggaagaggctttctccttcctctgttcctacctggaaaaggctgtttttttctccctttatttttttgtttccggaacctttctatttcaggcctccgttaaacacttcgccttcgcccaccagaaaagacctttttcctcgattcattctttgtctcaggagccttattattgctggtatagagatgggggatttattgcctaacaaatcctggtgtctccctttctctgtgagcaccccttacctccagtcctggagtgttacagcccctctttatccaagctccacgatgttggacaccaaatgtcccaaaagtcggtgtcctgggttaggtgggatgattgcaggatgaacttaggcttctcagccgcggggaggtcagctcctcaaggactgatctatgaacccattttgcagaatatcttta

SEQ ID NO: 205493 - DNA, 1000 bp, Homo Sapiens
aaagattttgacttttcagttgagatgatgccaattctttgtaattttgttttccactttagttgttttttcaaaatgatttttttcttttttttttattgtaggctttgcacttctgggaggacatccttgttttcttaccacacaagatattcatttgggtgtgaatgaaagtctcacggacacggcccggtttgtaaatattttcttctctccaaagctgatttcagaatctgatggataaatttcaaaaataaaacataattctctttaaataatggttttccctctaattgttctgttctccattttccctctttccctgatattctgaatacctctccctcatcctgtggccactttccatcggttgaaataatttttcttggcaattttttgaagaagcttctgatcataaaatttcaaacttatggaaattttgagttcatcaagtatgactcttagatttaacagttgaggaggaaatgaaggtccagggaaactgacattcagtggctcataactagttactatcagactaggtaataatattaataactactaataacacttattgagcatttattgtgtgctaggtatttttctgacttgtttaatccttataacaacccagattgtcataaagaagtgaaacaacttaattaggcacagactagctgctataacacaaaatctcaaatgtcaatatgctaacatagtgcagatgttcctgattggtaaaagggaagaacaggttattaatttatgtgggttattcagggacactggctgagagtgattctaccatcttcaacatgtgacctccaaggtcagtttgggtgttaacatccagccaggaccaaggagaatagagcatggagaaggcatacttgtttcaaagccaccttagcagggaagcagtacaaacaattccacttatatttcattaggaagtactagtagctcactcccatctagatgaagggagagacggggaaag

SEQ ID NO: 205494 - DNA, 1000 bp, Homo Sapiens
gcctgaagaccaaagagcactcagagcctggagagcaaccgcccaggggatgtccaggaggctggcacggaaggggctggtacccacgcctgatcacacagctcctgcccctgctcccttctgagcctcttgtgtgctaaatctagcacacacacacatatgcacacagacgtacacatgcatgcatgtgcaacacggcacacacatgcacacacatgcacacagcacacacatacacatgcatacacacaatacctgtgcacacaacacacacatgcacagaacacatgcacagcacatgtccatgagtgcaaagcacacacatgcacacacatgtccaatgcacacacatcatatgctcacacacatgcatacacatgcacacaatgcaacacgtgtacacatgtgcaaagcacacacatgcacactcgtgagtacacactccccacagagttctgactggaaatgctcaggcaggagcagcattggaaggaggcccctggcgggcacagagacaggacataacccacactagcccaggacaccatcagctcctctatcccaggctgttgccctcggaagagcagtggcccctaccccgtgggatccctcatgccctcctgctcccctctgtctgagacccaccagcccaccgttgcatctctggggtctcttccctttcctctcatgcggagccatgcgctgtcccccggcccagacatccgtgtccacactgctgactgccccaccagtggcgagagcctgcctgggatcttccctttacaagaaagaagaaaagggataaatacttatttttccttctcagggacagtaatagtggtcattttcctttccttttcttcttaaacatctcattatggaaatgttcaaacacctgcaaagtaggacagaatgagccccagtgccgtcatctctgggccgtgtcctttgatctggtccccacccagcctcccacatcccacgctgattcctttgaggc

SEQ ID NO: 205495 - DNA, 1000 bp, Homo Sapiens
aagtggtattgtacggtgtatactgttcttcagcttgtcttctctgtgtaacatatttttgagattgtcccatgtcgttacatgaagagtttcttgattcttggtctataattgcagatgttattgtatgaatgtaccataatatatttgagcagtccctgctgacatttttttcctaaccttttgctattataaataatgattcattttataaccttttatataggtcacattgcacatgagtgagtttactgtaagctggaaatctaaagttagaattactaggttaagatatgtgcatttttacttttgatagatattggcaagttgccatctataaggattgtgccagtttacagtcccacccacaatgcatgagagtgcctattaaatctttgtaagtgttatcaaatgttttgatctttcctaatctcttactttaaaaatggcgttttaatctcagtagaattttgtatattcacttaagaataaggttggggactgggcgtggtggttcacacctataatctcagccctttgagggcctacacaggaaggaagatcgcttgaggccacgagttcaagatgaggttggcaacatagtaagacctcatcactacaatttttttttttttaaattagtgaagtgtggtactgcacacccgaagtcccagctacttgggaggctgaggcaggaggattgcttaagcccagaaatttgaggctgcagtgagccatgattgcaccactatgctccagagtctaggcaacagagtgagaccttatctctttaaaacaaacaagaatgaagttaggtatctgtttatttgtttgagccatttgtatttccttttttgtagactgtcctgtttaaacgttaaaatcactgctgtggttttgatttatacatctcagctggatggcacaataaattattaagccatgttatgaaaatataactatatttaagtaacctgcaaagaaaagactatttctttat

SEQ ID NO: 205496 - DNA, 1000 bp, Homo Sapiens
ggtggagcttgcagtgagccgagatcgcgccactgcactccagtgactcctgggtgactgagcaagactccgtctcaaaaaaataaataaataaaaataaaaatataaagggaccaaatgctcctggtaaaagataaagagtatcacataagatttattttaaatccaactttttgctattaacaagaatcccaacaaaaacttaaggacatagaaaggttggaagtaagagtgggaaaagggctacaaggcaagcaagcagaatattaacaaacatgactatatattggaccataaagcaactcccaacaaatttcaaaggactgaacacatgcagatcacattctttgatcacaattcatacatcagaacgcaatagtaaaaagataatagttttggccaggcgaggtgtaatcatacctataatcccagcactttgggaggcaaggtgggtggataacttgaggtcagaagttcgagaccagcctggccaacatactgaaaccccatttttattaaaaatacaaaaattagctaggcatggtgccatgcacctgtaatcccagctacttgggaggctgaggcaggagaattgcttgaactccagagatggagattgcagtgagccgagatcacaccactgcactccagcctgggtgacagagcaagattccatcccaaagaaaagaaaaaaaagataatagtttttttaagttcacatttagaattaagaaatacatttttaaataaccctttggtcaaagaagaaatcaaaatcagaatttaaaaaataattagaattgatcaaaaaagaaaatatactatatcaaaacttataagatgtaacttgagcagcagagacaaacttatagccttaattgtgaatatattttaaaaataaaaatagaaaggctgaagattaatgaggtaagtattcatcttagaagggggataaataaaagcaaaataaacccaaacattctgtaaccaggtctctaca

SEQ ID NO: 205497 - DNA, 1000 bp, Homo Sapiens
cagcctgcctgggggtcaggatccaggttattgcagagcagctgagaggctccattgtgtggccttggacctgttctctggcctggtgctgctagccccctcccctctagaccacacagagggtcttggctactggtcctaggtgactgtggagtcttctcttccattgccagaaaactggcttacatcaaggaggcaggtgcaggctgtagagcctgaaatgccagagcttgcagggtctccaaggctaacattgtatgggaaactggtctagagggggtgagcggtggcatttgcccagagttgctcagcaggatcctagatataaagttggaccctgcagcatctatgcactaacatagacaattaacatagataattaacatagacaaataacatagactatagacactggtccagatcttttccttttatttttagttgatgcataataattgtagtaaataatttactacaattattacaaccccacaaatatgggatttaattgtatgtaaatcccatatttgtgggatgcagaatgatatttgatacatgcatacaatatgtaacaatcaaataagggtaattagcataactctcacctcaaacacttatcatttctttttgttgtgaacgttagaaatcctcttctaggtttttgaagatatataataaattattgttaactatatctaccctacagtgctatggaacactagaacttgtttctcctaccttgctgcaattttgttttcattaaggtatagctattttgaggaaactaaaaacttagcatctcctcttgtctctagggaaatctcaaatgtcacctgggctgtcaatgcttctgaatgccccttccttcctaaaggcaggataggagtaaggtcaagatcaaggtgaaggatagcagacaattatccagataaatcaggcatggaatagatcacctttaggtgagagaggtgctcgtggctttagggagaagtgtaggtta

SEQ ID NO: 205498 - DNA, 1000 bp, Homo Sapiens
ctttttatgagtgtgttctacggggccaacttcaggacttgagtatgtgtggaatttggtaaaagtaggctggtggtcctagaatgctattcggagttccactaatggaggaatggtattgttcacaacactgaacaaaaccaatcctgacgactgtattcatgggacatacagtctacgaggagagactgatggtcatcaaacaacataaaatatattacatttcatgtgtgataaatgaagttaggaaaatttattaagtactttcctcaatcaagaccatgggtgtagacagccctttcatgaagacataaagtaatatctgaactatgagtcaagttaactaggaaaactttctaggcagagagaacagtatatgcaatagaactaggcagaagaaaatacagtatttttttgtaagaactcaaagaaacttacagcaataaattgtgaataagatttgggaaggggtcacggtaatgatggtggttcataaggctacaaagggaagaccatgcaagtcttataaatgaatatatttggtctatctactactaatgtgaagatgctaacagattttatgcaaagcaggtgaaacggtagatttttatttggaaatatattcacaataattgactgcttcctttgggaaccacaggtactttgggaatcttttttgttttttggttgagacagtctcactctatcacccaggctggagtgcagtggcgtgatctcggctcactgcaacctcttcctcccaagttcaagtgattctcctgcctcagcctccggagtagctgagattacaggcgcgcaccaccacgcccagttatttttagtagagatggggtttaaccatattggccaggctggtctcgaactcctggcctcaagtgatctgcccgcctcagcctcccaagcgctgggattacaggtgtgagccaccatgcttggccaagggaatccttgtttaaatttattactgaggctttttttg

SEQ ID NO: 205499 - DNA, 1000 bp, Homo Sapiens
ataaaaattaatgtaatgtttagtcctgggtgccatccctaaggtatctaattatgtatatacaaatattccaaaatctgaaaaagtccaaatctaaaacacttctggtctgaaggctttcagataagggatattcaacttgtattagaattccaaatcactaaaaacactctcacccaacttcctacctttaaaggagggtattaaggatacctcagttgagtaaatgtcaaacaactaagttttgtttttgtttcctgatgtttttccatttataaagtaaacatacacttcacatataatactttaaaatatcacaaatgtataattatgtcaccataaatacagtattaaaaacttacaaaacagcagagctgaggagcaagcacatttcatcatcctcttcttgaagcactgaacttattttctttcctgtagctttacttatagatgtcttgagtttcttagctagcttttttggtgtgttggttatagaagattcttctgtacagcaactatacacttccacctttatctgaaagtctggccctgcttcattactaaaaacaagggcattcataatgttggaaatttaactcagtagaaaataaaattataccattcttttatgtttatgtaacatttaaaatcagcatttaacatcaggaaaatgcaaattaaaaccactatgagatactacttcacacccataaggatggctattatcaaaaaggcatgagataaattgttgacgagggtatggagaaaagggaaccctagtacactgctggcggagtcattatggaaagcagtatagaggttcctaaagaaattaaaagggaaactactacatgatccagcagtccttcttctgggtttatactggaaggagtaaaatcattaccttgtgaagttatctgcactcccctgttcattgcagcattattcacaatagccaagatattgaagaaactataagaatgcagcattattcacaatc

SEQ ID NO: 205500 - DNA, 1000 bp, Homo Sapiens
ctccgtcaaagtagaatggatcaataaattgtcacacgacagactaacatatgtggtgaaaacaagtgattcacagctacacccaacaacacagtgcgctgcagcaccacaggacgacagcttagctctcttgtgtgaatttcaaaagcatgggactgggcgaggtggctcacacctgtaatccccgcactttgggaagcccaggtgggcggattgcctaagctcaggagttcgagaccagcctggacaacatggtaaaaccctgtcttctatgaaaatacaaaaaattagccagttgtggtggcgcactcctatagtcccagctactcagagactaaggcacaagaattgcttacacccaggaggtagaggttgtagcaagctgagatggcaccactgcactccagcatgggcaacagatcgagactttttattttttttaaaaagaaatgaatttcaaaagcatgtacaactgcacaataaattgcacgtagatgtacagagagaaagggaacggtgaacacaaaattctggacagtgatgacctctgagatgcggaagtccgggaggggctgcaccgtgcttggatgctgggatcctctgtgtcttccacagagccctagtgcctgttattatttgtagaattaaatgttaattatataaaaagaaaaaaaccctcctagttctcctccccgcttccccataaggggacccagcacacagtgacagagttgagatctacaggggacatcgcaggaacaactgaagaggtgctgggcttgcaggtgctgtgctgggagggtggggtgcaggagcctagtgtggagggcggccggggtgtggctacaaccaccacctcccaccgcaagggctgtgaccaactttgggacccctggaggagtttctggggaaccagagtgacaccagtctgtccaatttgtgaccttctccagtggcgggagcctggatgggtgtctctggaggttccagatgggaattc

SEQ ID NO: 205501 - DNA, 1000 bp, Homo Sapiens
gacactgcctgtttctaaccttttttcataaatctttcctactctctactctcttatgctccagataccaatgaaatcctttttaagtaccgtagtataattatgaaatgaattacaaataccagggcaatatattcagtgtagtgatttactctatatcagtagtctcaaccaaaggcctccagggaggacacttggcaatatttggagacctttttagttgtctcaactggggtaatggtaggggtgctactgcctctagtgagtagaggccaggaggatgctcctaaatatcctacaatgtgtgagacagccccaacaataaagaattatctagcccaaagtgtcagtagtgctgaggttgagaaaccctgctctctatcaaaggagtggtgtaaaacagtttcctaaactgttatgtaagtggatcattcaagcatattatagtgaactttgtctggaggtgcagaagaattttgttacacagaactaaatagtattaagtaataatccacagcccctatctattggcatcagcaataaagaattgatgatgactgcagcacatgttgtactactaatatcagggacaatttgagagtttgacatgtttatgctttctccctttttatttttatttgtttgtttgtttttgagacggggacttgctctgttgcccaggctggagtgcagtggtgtgatctcggctcactgcaacctctgcctctcgggttcaagtgattctcttgcctcagcctctcgagtagctggtattacaggctcacaccaccatgcccggctaatttttgtatttttagtagacacggggtttcgccatgttggccaggctggtctcgaactcctgacctcacgtgatccacctgcctcgacctcccaaagtgctgggattacaggtgtgaaccaccgtgcctggccgatgtgaaatttctgatgaggcaaaatttgaacagaactaggttccttatggaatgtggaattc

SEQ ID NO: 205502 - DNA, 1000 bp, Homo Sapiens
tgcccaggaagatgaaaaggatataaaattttaataaacacattgtattgcctgtcacaagtacttggaaatctttagaattgacagaaaagtctgaactcccattcctccctccagatatttattcagtctctcttcctatgtttttcccctcaacctattccttaaagatgggaaaatcccaggcattagtcttttgttctcgtctcactttgcatcctctcccctaggtaaacacatcctctcccatgacttaacattaacacttttttactgataattctcaaaactatggctttagccctgaccattctttggagatcagtcccattcttctccctgcctgtggaacagacacgaacgcctggcaagcttccctcaatttagcatgtgcaaaagtgaacttagtctcaagtaatgtcactttcccttcaatcctattcaccttaaatcaacccccgaatctctctttccctgcagctgcaaaatccactttatcaccaaatattgtttatgcaactttaggagtttttctgtggtccataccaccagacattcttgcctcagtttattgactttgaccgcagtggtcgtgtgtactttatttcatcagccttctaccatgaattttgtcatcaccactaattactccacgtatgaaatcttaaatgttaaataaaaattctattataatttggctttctagccttccaactccttctgtgactccctctacatctactcattaccttatcaaggccttgtccttttattcactccttatcagtcaccttctatgctcactgtctccataccctatccggaccctgtgatacaccacttgatatatcacttcacttacctactcccatgtacccatcattctacaccttggatcaatatatttgaatataatttccagtagggcacgaaacatctgttttggtaacagctttatctccagcatctagactaatgtctaacacattgtaggcatcca

SEQ ID NO: 205503 - DNA, 1000 bp, Homo Sapiens
ttctcccccaagtctgccttacctttgtttcccagaaacgtggtcccaatgatcaactattcgaatctccttctttcccatttccccattcctttaactccccacttcccttatccttctgctataccatccctaaccctgtaacctcatgatgctggattcgttgctattcacggtctaagagatgcagcaggagaaaatgatacaattatgtaaattgttgctactatgaaaaacagtttccagtctcactgtagtccttaagtgcctcagtttttaatctctaagttccaggtttttttcttagtaaaatgaaaataataggattgttttgagaatcaaagaggtaatatgtataaaagcactttttatagtacccaggacatagaaatcttggatacaagttgctgttgttttatctgggcagctgttttgaacattcttcccttcctacacattgcctaatacccctccacccctaaaaacacttggcagataacttcatccatgtcacagagaaagtgtcagacagaagctcccttaaattccagcccttcctctaacctctgtgctaccatactggcctttccaccgtggtatattagtacttagaacatattacagttactgtattttgcccactaagctgctaactctttgaagtcagggactgagttattcatttgtatcccctaacactttgcacagtacctggtatatggcaaatattcaataaatgttgattcaataaatcattgttgaatgaacagtcttgggccttaatatccctctctcacagtaagaaggatcttctttcttttcctatacaatttcattgcttgtgtgatcctatccatcccttcgtatctactctttctccaccagttatcctttgtctttcgcatattttcaacctttcagtgcagccaaaaagtatgttcaagtcttccatttaaaagcgtttctctggccgggctcagtggctcacgcctgtaatcct

SEQ ID NO: 205504 - DNA, 1000 bp, Homo Sapiens
ctttcttgatctcattctttactagcaagattattgtcaccaggtgcactctttaaatttgtagagcctcgggcaattttttttaaaagcccgcttatcatatgactaaatatttaaaagttacaaatcaagcctacaaatgctaaatcaaagacatgttgcactatggtggcaagggatggaacacacatcggtgtggacaccatcaaggtccacaaggggccacatgcatatggtcctggggacttcagcatcccaccacaggtgtgtagctgtggtgggatactgaggtcctcaggaccaggctctgtctacaccctcacctcggtcactcttggacccctgagggttcacagggtagtggagcccaccctgaggaagcagacccagggaaagtgtccacacaggttctgggagctctatactgtctaagcagggaattccaaggtcctggctgccactgaagaatggtctagaaggaagggtatgggtctgtgttcttggcccttcagagctccataccctgtggaaagggacttaagaaagggccagagcagggccctctaaagcatgggtcccagggcaaggggctctgagtggtaatgacctttgatagccccatgtaccaataatgcctctaataattagcaccatgtgccaaggtttagctgtcccaagcattttacatgtgctaacttgtttaatcctcctaacaactctatgaggtaggtactattactaccgtcattctatagatgaggaacctgagacagagagcaggtaagcaacttgcccaaagtcgtaagtgatggagccaggtcatctggctgcaggtcctcactcctactgactacatcatatcccctgtacacacagcagggcccacctttgaggcacatactggcttacagggcagcctcccacagctcagccctgaaggcaactcccaaccaggcactacggagcacccattgtgtactcatggcctatattcatgaac

SEQ ID NO: 205505 - DNA, 1000 bp, Homo Sapiens
caccatgcctggctagttttttgtatttttattagagatgggtttcaccatcttggccaggctattctcaaactcctgacctcaggtgatctgcccacctcggcctcccaaagtgctgggattacaggcgtgagccaccgcacccagccaacgattgcacacttctatctctagccctgctctgtttgctactccagactcacatatccagtggcctatttgacaccttctcttagatgtaactaggcaactcaaacttagtacacctaatagagcctcctacttttgtccccgaagcctgttccttttctagtctttctcatagtaaatgtcaccatcagctatttgagctcaaaccaaaaaccaaggtgtcatctttaatttttcctttgttcttatcatcaatatccaccccatatgtcctgctgtctctgcctttaaaatacatctcagggccgggtgcagtggctcatacctgtaatcctggcactttggaaggccaaggtgggtggactacttgaggtcaggagtatgacaccagcatggctaacatagtgaaaccccgtctctactaaaaatacaaaaacaaaccgggcatggtagtgcgcacctgtaatcccaggtactcgggaggctgaggcaggagaatcatttgactctgggaggtgaagattgcagtgagccgagatcatatcactgcactgtggcctgggcaacagagcaagactctgtttcaaaaaaaaaaaaaaaacagtgttacttatcctctttataattctcatattctcattttccttagaagtaaaataaatagacatacttgtttcagatggcttttttagcaagaattaaaggaaataaatggaataatttacagagtgccctgtgcataataaacattgctatcattattattaccatcatcaggattatcattattccacacatctctttcatcttctaaagatccaccacatgtaggcaaaaccagtatcactaa

SEQ ID NO: 205506 - DNA, 1000 bp, Homo Sapiens
cttgggtggctctcaaaagcattatgctgaatgaaaaatagcctatctcaaaagtttacatactgtatagtttcacttatgtaaaattattaaaatgacaactttattgaagtataatttatataccacaaaattcacctgcataagtatataattcaatgccttttaatgaatttactaagttgtgcaaccatctccataactcagttttagaatatttccatcacgctaataaaatcccttgtactcatttgcagtcactccactcttctcccctcagccctaagcaactactaatctactttctgccattgtagatgtggacatttcatataaatagaagcgtataacatatggtcttgtgtgtccagattctttcacgtagtataatgttttgggggtttatctgtggtggtacaacatatcaataattcattcctttttgttgctgaataatattccatcatgtggatgtaccacatcgtggttattcctttgctagcagatgggtatttgggatagttccagcttttggttctcatgaacagtgctgcagtgagcattcatgtacatatccttgtgtagacataagttttcatttctcttgggtagaattttaggagtagaattgctgggctgtatgttaaatttatatttaattttttaaagaaactgccagttttccaaggtggctgaacccttttatagtcctaccaataattcctgggaaatatagcttgtgtacttgaaaagcatgtatattttgcttttcttggagtgttttgtagataccagttaggtcaatttttaaaatagttcttgtttaggttttgtatattctttatttttttctagttctatttattaccaagagtggaatgttaaactctgttagtgtccaattgtctgtttcttcagttctttgtctttagttttcagcagtttgatcatgatgtgcctaggtgtagattcctttgtatttattctgtttggtgttctt

SEQ ID NO: 205507 - DNA, 1000 bp, Homo Sapiens
gaggcacgagagttgcttgaacccaggaggtaggtggaggttgcagtgagccgagatcctgccactgccctccagcctaggcgacagagtaaggctccatttcgaaaaaaaaaacaaacaaataacaaacaaaaaacaaacaaaaaaactttgggcaaagattgcacaggatataattatactaaaagattattagttattaaacctgaaatttaaatttaatgaactgtcctgtattttatttgataattctaccacatgggttaaatgagaaaagtcttcataagtacttagaacagtggtggtacaagtagtgctcaataaatggtagtctttattttttccttttcttctgcccacatgatctgcaggaattatttttgaaactaaaaatgataactaatactttacaaatgatggaaaactcaggttaaataatttgcatttggttccatagataaaaagtagttcatctggattgtaaaatgctgcagccactttagaaaaacagtttggcagttcttcagaatgataaacatagagttaccacatgacctggcaattaagtccacccacacttcagggtaggggattaaacagagaagtagataccaggaggtggagattatggagggctaccttagaagctgcctcccatagcatgggatggttatctgtccaaactgggactgaggatacttctgtatgccactctgatggtttgctcagctttttttagatgggaaagcaaaaggttaatatatgtcagtaaagtccagtctctccatacgttggaggatggaggccattttttttttaaaccagtggaagaacagggatttgagtatgaaaatgctgtaggagagtgactttaaaattgctttatcttccttattaaggtaagggacttgccttccttattccattttaacttcaaattttttttcttttctttttttatacaagtgtggcacagattgtctagcaattcacagaattc

SEQ ID NO: 205508 - DNA, 1000 bp, Homo Sapiens
taattttaccaactaatctacaaggatatggtttttttctactgctaatatttgataaagactttttggtagtttactctttatttctagaaacagatatgatgagaaaaacatgtaactagcactactcactccaaatttattatgtcatatattcatactaaaaatacaatattgaaatggactaataaggcaaatcttacaagcatgtaaaataatgtaaacaattcaaaaattaataactagatttttaacctaaaatatgctatactaatgtctataaaagacagttattgaaaaactaacaagattgataatttcaaatagaaaattataaattagtagcattcacttcatcaagaatataatcaaaattatatatcttccaaaagctggttttttctctagtctatctagataaaatgttctatcaatcataatttataatttcctcagtaatgctgaaattttaatgctgttttaaaataattaaaaacaactgtaaacaaaatgatcctacccctgctactgtaatctaaagtactaacattgaatatgcacatattacatttcactttgatattttaatagccattggtcttaatttaacatttaattagataatggttaccagaaagtaataagtaataataaaattggggttacataagcagttcagtaatattgagtaattcttgcccaatttcattgtttatattattatcatttactccatatataatacacatgaaaaatatgcacgtattcctagccatgggaatattttttaaaaagagagaacatagtctaatttctaaaattactgatataaaattaaaagtagtctaagatatcttttttatacccaaaataactatatgaacgtgatttatatatatgagatgaccaaattaaggcattttctcttggaaatttattaataggacatttaaatggatactttggaacctaccagagcccccttttctccagactggcc

SEQ ID NO: 205509 - DNA, 1000 bp, Homo Sapiens
tcatctcagaaaattactatctgttgcatactttatattcaaaaattatgtttaaaataataataataatcacctgttctaccgtgctcatagagatggctctttcccattattgtgctcacagagttggctctcttagcacttcctgaacatcaatctgagaggaaaatatgaaagaaatccccagaatataaaaattatacagtataaagatctgaaattggtcaggattattaaggtactcttctccaaagacagggtttcaaaattcactataatatacacttttagcacctaattttaatcatttcccttttaatatgtaagtttcaccaacttcttctcaaatccaatcaaaatgagaaaaattatcatggcttctccctttaaggaactgtcaatagcaattattagatatatccatgtaatatgcaaaatgcaaattttgagaatttatttaaaattaaactttacactttatagtcacaaagggttaccaaataattaaaattacagtgaatatgtcataaacttatgtcccttttggatgctttttaaaaaatgttttcagaaccagaattacaaagaagtgatgagcataaaccaaattattaaacttatagccaacataaacataacatcatattatgttcctttcaggtatttaaaaaggattttcgaactagcattacaaaatatggtatacctgaatgtatttttttgtgctttgtaaggtgatcatgacggataaatgtttttccacattcatcgcactcatatcttttatcatcatgatgtactcgtaagtgaagtctataaagaaaaaagaattgaacaccattaaaactggtgacatagaaggaaaaagctcaataatgaataaatgatgaataaacaatgaaaactgggctgtctactcaaccactcatacattattggctttatttctatgactttcagagtccttttcagtcttttaccacctgaccccaggtcccta

SEQ ID NO: 205510 - DNA, 1000 bp, Homo Sapiens
tgagcacccatccctgccatttcagggccttcccctggctgtccttggcctagtcccaggaggaggggctggacagacagaaggaacaggaggctgcacctcacgggccaagcctggggacttacacacaccccgtgggggtccctgcatcatcaggtgattgatagctcctaggagctggggtggggtgcagatcagtcaaaacaaaacaaaaatgatggttcaccagcacttcgggaggctgagacaggaggatcacttgagcccaggagtttgagaccagcctgggcaacatggcaagaccctcgtctctacaaaaataaaataaaataacaaaattagccagatgtgctggcatgcaccagtagtcctagctacttggggggctgaagttggaagatcacttgagcctgggaggtcgaggctgtagtgagccatgatcgcactactgcattccagcctgggtgacagagtgagaccctgtctccaaaaaaacccaaaaacaaacacaaaatgtggttcagctagcggaggcttctctcacccagatgcacagatggggtgacattctagccatcatacgtatgtcagttttgtaaggggcatgacaaaccttgtcctcgaacccacttagacaggtaacagcactggcttagctcctgtaactcaacgtttatgcgcaggctccattccagcagcccagtggggaactttacttcctcctctcaaggaacctgccccgccagagtggtgtcaggtctctcaggcgatgccgaggctggggggccctggtccctgagtcagctgctggcgggttgctgtgggagcaggacctgggcctgcccatggctcctgtggcccggggccccctctgctcccagtcctgccaggacccctccctgcctctctgccagccctagcactcacatgtcaccactgcactcacatgtcaccagcggctctcagcaaggccagccaattcaccctggaagttacctcc

SEQ ID NO: 205511 - DNA, 1000 bp, Homo Sapiens
tttcatagttgaattgatttagttgaacttcattgggtgttcttatgttttagtcatgagtccatgctctttaacaagctaaaggaaaccatattatatgctaaaagatgtcagtttgtgaacaatttaatgaatatatagagttacaacatttttcccgattggatgttggggtttactataattctttgttactttatatgtgaatatactcactactcactatgtttatgtatgtaggaaacatgctagtgatgaaaattcaagcagttattaccctagttttctttcattaacaaaatacagaatagaaattatctacttattcttggaggtcttaaaatatcttttcagttgactgataattctgctatcaagagctacaagtaggtgctctggccgtctatatctgtatttccatatattcaattccttactatatatttctcatttgatattctatacccaattcaaacaaaaccatttcatgtatacaatgtacttttatttatgcttttctctatcattaagtagaaagccatttgcaccttagtctaaatctgaaatgtgcctctacctaacctttgtaatacattttcactatttcttagttattagaataaatttacataatttctgaaacaactttctctatggagtattccctttagtttcttttcccttccaaacaatttaatgaattacaaatatgggggagatattttttcaatgggtaagacttgacttctacaaatacatgtttaattccttctcaaaattatttctacttcctcttattcaacactgtgctagattttagggatatataataagacaatatatgaggtccttgctgttgtgaaaggtacattcttatctttggcaaattgtagaatctttagctttggtatgcaagggcattggtgtttggtacatgcttggctctttgccttaagaattgcctctttccaccatgcatatttcacctgtgtgggaattc

SEQ ID NO: 205512 - DNA, 1000 bp, Homo Sapiens
aacagtaagttaaattatctcctgtaaagctagagaagttacacagtggaatgggacaagcactgaatcaggagacctgccacatccctgttaccaagatctctgtcttggtgtgggtcaatcatttatcctgtccagtcgttagtgaggtcttggcaaaataaggggttggactcatagattatctctaaggcacctttagtttcatagctcaatatttataagcctggacaaaaacttaaaacttggataaaaccctaaaaggaaccagatgcatacttgtgtactccttgctgtattttggatatagatgaggctctatagcatgatacggaaccataccatccaagttcaaagccctgcttggctgcttgctaaatgcctgctcttagacaagttatttcacctcattccatctcaacatcctcctctgtaaacttggataataggattgcctactgttgtaaatgttaagtgagtttgtgtattgaaagcactaattatagagtacactcataaaggatgaaaacaaagcaaaggtgatcacagcctttggctactgctagaatgaatgtctagattgcagatagagatgtgttttgtcacttttgcaaatgttatttctcctgctccttacagaaagtctaaaggtagctatttaacaggagaatacagagttggaactattgagtgacttgagccaggagctgagggctgtccagctcaaactctagggcccttttcttccttcccagagaccacactccaggattccaggggactgttctgacatcaaggcattgcagggtctctaggagtagtatgtggagggattagctaactagcataagaaaatggtttggaaatttgataggattagctatgtagtatgtattatgtggagggattagctagctagctaactagcatggaaaatggcatttgaaattcttctgaagatgactcctatgttttcagtcctcctctcaggtgtactcag

SEQ ID NO: 205513 - DNA, 1000 bp, Homo Sapiens
gtttggctaccatgtgcctgatttatcaggcaaatttttagaacactggtgaagctcgagcacacagtaatagcttcctactatttccatgagaacgataaaagagagagaaaaaattttttgtaaatccaacgatccttcacatgtctgaaacaaacaacatcaagcctgtttttctcaaagctgtgcctaccaaatgttcccctgactgtgtttgccccaatccagagcacacacacatccaactatgtccacatggctcatcctctccctgcttctttttgcctttcctcttacccaccctccaagttagctctatatgaatgtgggtttggaagagaaagaaagcagaacactcagcctgttttctctggatgaatgagtttcacaaacaatgacactccccaatgccacaaagaagctgttaccaggtgtgggacctgaggagaaatacaactcccgtaccagttgttctttgatgcaccacttcaggagccatgaaacagaggaaatttaagatcaatcatagctcttcacacagttccataaaacattttttcccttgaaagtcactttacttctaatgatacttaccatgccagtgtgttaaaactgtcactgaatcaagctttttattaagttgtcagtgtatccagtgtttcacagaacctctgtgggggactttcttgtcttttaaacctacacatctttgccacataggctttcctccataattagcactgacaggttctctttagaggaaatatcccactctcagagtacaagaggtagcaggtgggtggaaatagatttgaatcatttatgagacagggaaagggaaaccaacagttttcatggcatatggctgtgaagagaatattgaacgaatgggttctggacaagtgaagtcatacaagtcaacagtgaattgaagtaataacacaggttacttattccaagagagctgcaacattttggagtgagattttccccaattcag

SEQ ID NO: 205514 - DNA, 1000 bp, Homo Sapiens
tgatcttcctgtctcagccacccaaagtgctgagattacaggtgtgagccactgtgccaggccaaattctctctttcttatactcactctggctttctctcactctattcctctgtttctgccttttcctcactacagactctgtgaatgtatctttcagcagcaatttgtttatctgttttttcccctttttcctctgcctacctatccttctccatttgtcctttctcttctctaatcttttctcatctttctgttttatttccttacctttccactaccctcccttcccttaacttctcataatgctgaatgaaaaccagttttaaaatatattaatataatatatatataatataatatatattaaatataaccaatctcaatgagggaaaaagtatcctctcaagggagctcctgttaaatgcattactcttgggacaaataacataaagttagcacttatttgcgcatttatatagacacagatgaatatcctacctagaagagacagggcactgaaggaagagaatcccaggtgtttgactttttctggccattggtgatggtagagggaggaaggaagggtttatgcatgggacaccccctggggacagtgaggaagtgtgtcatcagggcaagtggtttagtgaagagactgtcctgagccttttccccacatcatttttctgattctcacaacatccctacgaggtagacagcattattatctgcatttaaggaagcaggtgtagaaagtcagtgatggagctagaacaagggcccagtctgtctgataccaaagcccatggtgacagaacaaagctggctgaacagttctgtctgccagaacaaagccaagtcataaaaaggaactgcggtaagatgttctgagggctcatggtcccacggcactgctctcattcaactttgcacgcgtggtccctaacagtgtgctggcccaggcttggagctcaataaaagattagtgaatgcatga

SEQ ID NO: 205515 - DNA, 1000 bp, Homo Sapiens
ggctcagagaatgttatttgattggaccgtgttgcatttctggacagtgcagctgagatcagactttgtgtgtaactccactagcctaccagggtgcctctcataaaggtaagaaatgtaaatttggcctaatatacaaagttgccagggcagcactgggtcaattctacatacagtacttctatgttcatcaagggaaaccttaagggaaagtgaaaatgcttctagaaggcgactggacaccagcgcctttgcttgttgcctttgggctcttcttctaaggccaacagtgacctgaaattattgactggcttttccaatcaagtggacaaaatggtaccaaggtcaccaacatcgatgtagaacatcgatgttctacaacattgcttaacgcaaggggagacgctcctgactcagagtgtttaattgctcacctacttctttttctgccctcttgggcttctgaaatgaaaagaaccctggggtgatacagtgagtcaaaggggtgccagccgcatcacagcaaaatagattcctaaaaaatccctggcctaagatgacagccttggctggatcagtttgaatgtgctgatagtggacatggtagaatgaaggtggttgaaatgttcatattaaagaacttccacccagattgcaagaaaagagagaagaatggagacggcagcacgagcccctacaataaaagcagatgttttgagatcagttatatttcttctgacaaaaattaaagacagaaaccaaagtttagcctgagactacaattaattgggcaataagccagaggcacatatggcataagacagatttaaacatttctccctgatattaatacaaacactaaaattacaaatactttgattccaaataaaacaaatatttaaaaaatttaatgaataaacactggggtctacagtagtatttgaagatctcacaaacaggtttggtttttgaaggttagaactggtggtctagagaattc

SEQ ID NO: 205516 - DNA, 1000 bp, Homo Sapiens
cctggtctcaaattatatactggacaccatcatctatgaaaaaaattaaaatatatacataatgcacctcagaagtattcaacaaagtatagctggctaggcatggtggctcatgcctgtaatcccaacactttgggagttagaggcaggaggatcacttgagccttggagtttgagaccagcctgggcaacatagtaagaccttatctttacaaaattaaaaaataataataacaataatagccaggcatggtggtacacacttgtactcccagctactcaggaagctgaagtgggaggatcacttgagcctggtggtcaaggctgcagtgagctacaatgggccactgcactccagcctaagcaacagaagaccctgtctcaaaaaaaaaaaaaaaaagattgttaaatgtgaatcccagattgaaacttcaaaaataattaactaaagtaatccataactaaatctaaatgtaatatttttaaaaagcaaacaaagaaaagacctacgctctcagaatcctaactaccttgggcacattcatggtgtgacaatgacactcattaacccaacaaattaaaaccacaactctacttttctgaattaactgatatggagtaaaactgttcctcctccttttgcactgaattacactagaaatagcccaggtaacacagttcatcaaagtcagaccacaacatcaaacgtaagctctttgcataagaaacacagaggggaaaatttcaaaacatcctggaaacgccattaactgtattaatgcaatccatttaaatgacctgtccatccatatttatagaatcagtccccgaagctaaaagtcagagctctggctcttcactgtctagaaagaagtcacgaaaattaactcaataggtacatgaatcacaatgacccaagtccctcaagagtgacctgaagaaaaatgtggaacagagtaaaaaatgcacaagttcactccaaacaaaaaagagagaattc

SEQ ID NO: 205517 - DNA, 1000 bp, Homo Sapiens
cagggtttcatcatattggtcaggctggtctcgaactcctgacctcaggtaatccacctgcctcggcctttcaaagtgctgggattacaggtgtgagccgctgcacccggccttaaaatgtatctctttcttttttttttttttgagatggagtttcactcttcttgcccagtctggagtgcaatggcatgatctcggctcactgcaacctccacctcccaggttcaagcgagtctcctgcctcagcctcccaagtagctgggattacaggcacgtgccaccacgcccagctaattttgtacttttagtagagatggggtttctccatgttggtcagactggtcttgaactcccaacctcaggtgatccacctgcctcagcctcccaaagtgcttggattacaggtgtgagccactgcacccagcctaaaatgtatttcttaaaataataagacttgaaagtcaaaattactccctgatccatgggctgcagaatggatgttgtgttagcaggcatgaaaatcatattaatcttgtacatctccatcagagctcttgggtgatcatgtgcattgtcaatgagcagtaatattttaaaagaaatctttttcctaagaagtaggtctcaacagtgggcctaaagtattccataaaccatgctgtaaacagatgtgttgtcatccaggctgtgttttcccatttatagaggacagcaagagtggattcggcataagttttaaagtccttgagattttccccagaatggtcaatgagcactggcttcaaattcaagttgccaactgcattagcccctaacaagagagtcggcctgtcctttgaagcactgaagccaggcattgacttctctctagctatgaaagttctagatggcatcttcttcctatagaaggctcttttgtgtgtgtgtgtgtgtgtgtgtgtgtttgtgtgtgtgtgtgtgtatgagagagagagagagagagagagagagagagagagag

SEQ ID NO: 205518 - DNA, 1000 bp, Homo Sapiens
ggattttgattggtattgcattgaatctggagatcactctggggagtcctgccatctttacatcattaagtgtcccaacatgaatatgtaatgtctttccatttatttaggtcttctttaatttccttcatgagtgttaagtagttttcagtgtactgtataagtcttgcatctctttggttaaatttattcttaggtatttaatccttttcaatgcttttgtaaatgagattgttttcttaatttcctttcagattgttcattgccaatgtataaaaatgcgatttttataaactattgattttgtggtctgcaaacttgctgaactcatgtattacttctaatagtgttttcatagattgcttaaaattctgcaactaaagatattttaatttttcctttccaatccggatgacttttctttttcttgcctaaatgccatgactagaacttccagtacaatgttgaataaagtggcaagataaggtgtctttggctaattcctgatcttataaggaaaacattcaatctttcaccgttaagtattatgttgtggaattttcctagatgccttgtacaggattgaggaagtttctgtctgttcctaattttgttgactgtttttaatatgaaagtgtgttgaattttgtcaaatgctgtttctgcatctattgagatgatcatgtggtttctgttattatattaatatggcatatattcttttcttttaattttattttttaaactcttattttaggttcagggtacatgtgcagatttgttatatgggtaaacttgtgtaatgaatataacatattatattgattgacttttggatttcacaaccttatattccttggataaatcccacttggtcatccttttcgtatgttgctaaattcagtttgctagtatttcactgaggatttttgcatttatatatttaaaggatattggtctacagttttcttgtgatgtctttgcctgattctggtattag

SEQ ID NO: 205519 - DNA, 1000 bp, Homo Sapiens
ccgtgtggtctgcaaagtcgaccccgtaatcactattttatactcactccccaaattaaatatcattttttacctatcagagtggcaaaatttttcaaaaaacggatattacccagtactgataagaggaaatgggtaattgtacacactgtttgcgggtatagaacctgatacggtctaactggaaggcaatgtggtggtgtctaaaaactttttggtgcgcttcctcctcaatccagcatgatctttctaagtgtctttcctggaaagatacctgaccatatgtaaaaataggcaagtacacagatgtttcccaaaggactgtttgtaacagcaagacactggaaataacctacgtgtccatcagtagaaggatggttacaaactgtggtttgtaaggcgtggaactagaatgctgcagtcaaaaagaacatggtaggatggggtgctctgacatgaaaggacctccaagcctcgtagggagatgagaaattcaagctgcagaacaaatgtataatgtgagcctaaaacaaagcagaaccatatatctatatatgtacacatattgatgaaactatatgatatctgctatttgcttcaaatgaaaagatctggaatgacacatactggatgtcctgcaaaaaaaaaaaaaaaagagtaggataacgggaggggacacaggtcactgaaggagatttttcctttctattctatatattttaaattgtttgaatttttacaattagaacatatttatgtatcacttatgtataaaacaacaaaacagaaattaagaaattaaaagaatggtaatcaaaatactcattttgaagttacctgaaagatgtgttgcatattagtagcacactgaattaaatgtgattctgattattgcacaaaccacatgatatcttggctccatccgggacttgacagagaccctttacctcgatggctttctgagtggtgaaagcctgggaacagctgcctatgagaattc

SEQ ID NO: 205520 - DNA, 1000 bp, Homo Sapiens
tccacatgagctgcttttagttaaccatttcgaatctgtctcccctccttttttttcttttttttgacagagtctcactctgtctcccaggctggagtgcagtggcgtgatctaggctcactgcaacctctgcctcccgggttcaagcgattctcatgcctcagcctccgagcagctgggtttacaggcttgtgccaccatgcccagctattttttgtatttttaatagagacagaggtttcactgtgttggtcatgctggtcttgaacacctgacttcaagtgatccgcttgcctcagcttcccaatgtgctgagattacaggcatgagccaccacacccaagtctctttcatttcttaatacaaattattgcattgttgtaaacttgatatatgcttattatttttagtttttccacatttattgaggtataattaacaagggaaattgattatatttatggtgtacaatgtgatatcttgatatacctaaacactgtgaaatgattaccacgatagagctaattaacatatccatcacttcaaatagataacttatttttctgtgtgtggtgagaatatttaagatttactctctaagcaaattttgagtatacaattgctatggtctgaatgaatccccccaaatttatgtgttgaaacataatcgccaatgtgctagtattaagaagtgggacatttagcaggtggttaagtcatgaggatggagcctcatgaatggaattagtgatcttataaatgttcaggaaggaactagcatcatcccctttcacccttctgtaccatcttccacaggatttttccctcagagggacatagcaacaaggcaccatcttggggcaggcagcagccctcatcagatactaactgtacgggcaccttgatcttggactttcttgcctccagatagtgggaaataaatttctgttgttttttaaattacccagtctgtagtaatttgttacagtaacacaaagac

SEQ ID NO: 205521 - DNA, 1000 bp, Homo Sapiens
cataagttcaaatctctggtacacaagccaaaagtgacatgtattcacgttcttgggccctagaccaattgctgttggttgcctacctcttgtactcttcctatttataaattttttctcctgtgagtctggtgaatatgaatgaagtctccagaggcttatcattcccaaattaagggaaataatttgaattttcagtgtgccagtataggaagcggtgaactatagttgttagaaacataagcttaaatcccaactcccttggcaagtcacttaatctcttttcaaatttaatttaaaactttttttttttttaagagacaggtctctctatgttgcccaggctgctcttgaactcctgggctctagtgatcctcctacgtcggcctcccaaagtgctggtattacaggcttgagcctactcaatatctatgtcttagtttcctcatctatagagtagccatatgaattatcattgtacctttagggtagctgtgaacattcttcctgtaggcaaattctaacacatgcttactaatatggtaataaatgttagctattactattattaaaatctactcccttggccaggcatggtatcccagcactttgggaggccaaggtgggtggatcactcgaggtcaggagtttgagaccagcctgggcaatgtgacaaaaccccatctctgctaaaaatagaaaaattagccaggcgtggtggcatgcacctgtaatctcagctattcaggaggctgaggcatgagatcacttgaacccgggaggcacaggttgcagtgagccaagatctcaccactacagcctgggtgacagagtaagactctgtctcaaaaaaaaaaagaaaaaaaagaaatctactctctggacagcaaagatacaagatggagttttctcatgagtctttcttaacctggaagtctttagtgcttaatggagcctgattaaagaaagttctacttagggacttcccatctgcaccact

SEQ ID NO: 205522 - DNA, 1000 bp, Homo Sapiens
acgctgctgtgggggcaatacggaattcattcctgctggcacccaaaagtgcttgccctggatcctgcacctgctcacctgtgcgccccctcttgtgaggggtagaatgcagtgagttcatgtgagtggagtttgtccctgctgccactgaagcacccagctaggtccagcgcccgtgtactccagttcctgcccacaaaggggtcacggagatttcctgcttcagttaagagttttaccttcacccatatttgacattttccagtcactgtgaatttggctgttatatagtctgtgtgttttcatccaattcgatggtgctgtttatttaaacacacacacacacacacacacacataagatattctctaaattgtgtaataatgtgcctgcattttactggagatggctccccactgaaaactattaatcccaccacaaatatgtttactttttgagattcaaaaaccaaaaatagtgataggatctttgactttatctctgtgtttggtcttgctaccaactgccaactgattttgagattccaaaggaaaatcttttcatatgtgccttctgagcattgcatactttatgtcctaagaatttaggattcaactagctctgctctgagggtggggtgttttggtttatagaaatattgaggcagcaatgcatcagcaagtttgtattgggaagagagatgaatatttcaagctcatattcatactgccttgggaggaatttgtaatctggatcccacagctgttgctaagtgaaccaatggggtcgttttcctctggctaagccagtagggggttcccaaagcctgtctctcctgcaagatgctctctgcatttttattacttgctatagccttaacaactgtgtttggaaatgcatgatttttttcaaaaaaaccctcttataaattatgtatgtctctattgacttaaaatcacactcattcacaggttctgtgtttgggagaaaacaaagagca

SEQ ID NO: 205523 - DNA, 1000 bp, Homo Sapiens
tctgtcacccaggctgaagtacagtggtgggaacatggctcacttgcagcctcgacctcccaggctcaagcgatcctcccaccacagcctcctgggtagctgcactaccaccatgaccacctaaatttttttctttttcttttggtggaggtgagttgcccaggttgcccaggctgttctcaagtgatcctcccacctcagcctccaaagtgctgaattacaggtgtaagccactgtgtttggccaaccatgaatttcgaaacttgcatcagtgattctcaaaatgtggtgagggccacgagttacactgccaagtatgcaactattagtgattgattactgttattcttttaaattttatcctattactgtaacatgtctatctctacactattactagtagataatgtccaatactatgtaacacatgggcattataaaaatttctcaaaacatttaattgttagtattactgcttaacttcagaactcaattaaaaatgtaaaataaccaagagcttcccctaaggcctatagcataactgcatgaaacctaggttcaactatgtttaaatatgtagactattatggaaattccagaatctactcatgaacccacctgagtgtgttaatacccactgataaatgtatgatcactcatgggctatagtcttcaatttctgactgattcctgttttagtcctatttttatgcctgaaatgaccacactagtcatcacgttctttgttccttaaaattctggttcaacatacattacctataagaatcttcttacctaattctatttattattcttcacctactttacattcacatggaacacatataaaatggaattgaaaagccatactcatagtttggcaagtaaatacttccaagttgctagtcaaaaagttaaaatatttgttgcataacagactgggtatggtagctcatgcctgtaaccccagcactttgggaggccaaggcaggcagactgc

SEQ ID NO: 205524 - DNA, 1000 bp, Homo Sapiens
taatgctatccctcccccctccccccaccccacaacagtccccagagtgtgatgttccccttcctgtgtccatgtgtcctcattgttcaattcccacctatgagtgagaatatgcggtgtttggttttttgttcttgcgatagtttactgggaatgatgatttccaatttcatccatgtccctacaaaggacatgaactcatcattttttgtggctgcatagtattccatggtgtatatgtgccacattttcttaatccagtctatcattgttggacatttgggttggttaagggatcaattcaacaagaagagctaactatcctaaatatatatgcacccaatacaggagcacccagtttcataaagcaagtcctgagtgacctacaaagagacttagactcccacacaataataatgggagactttaacaccccactgtcaacattagacagatcagcgtgacagaaagttagcaaggatacccaggaattgaactcagctctccaccaagcggacctaatagacatctacagaaccctccaccccaaatcaacagaatatacatttttttcagcaccgcatcacacctattccaaaattgaccacatagttggaagtaaagctctcctcagcaaatgtaaaagaacagaaattataacaaactgtctctcagaccacagtgcaatcaaactagaactcaggattaagaaactcactcaaaaccactcaactacatggaaactgaacaacctgctcctgaatgactactgggtacataacgaaatgaaggcagaaataaagatgttctttgaaaccaacgagaacaaagacacaacataccagaatctctgggacgcattcaaagcagtgtgtagagggaaatttatagcactaaatgcccacaagagaaagcaggaaagatccaaaattgacaccctaacatcacaattaaaagaactagaaaagcaagagcaacacattcaaaagctagcagaagg

SEQ ID NO: 205525 - DNA, 1000 bp, Homo Sapiens
caggcggaccacgacatcaagagttcaagagcagcctggccagcatggtgaaaccccgtctctactaaaaatacaaaaaaattagctgggcatggtggcgcatgcctataatcctagctactcaggcagctgaagcaggagaattgcttgaacccgggaggcggaggttgcagtgagccaagatcatgccactacactccagcctgggcgacagagcgacactctgcctcaaaaaaaaaaaaaacaagttttgtgaatttaagtttccctaatggatggtacaggtcaacatttgccatctaatgacacttacattccagttttttccttttttgagtaactgggaaaagggtggcattactgctggcttcctaaaattgaaaagtatactagggtttttaaacctgtgtagaatacatgatatggtagcaaatgtgctgtaggaagaaaagcaatgaggaactactggcctgactaggaggcctagaagtccctcccaggcttgagttgttctgacttggcatgattacatagctgcggcaagtgacgtttccttcaagccttggttccctcatctgtaaaatagggaactaatacctacctcacaggattgtagttagaattaaggatgacttcattaaagcacctctagtggtggaagatgtcccatcctatcccccacccatagctgggagctatgtttggctcattcttcctgactcactggattacactgtgactcagttcaatttcacacatgctgctgctaaattagggtcttggtgagcctttgggaggacagctctgaggaatgaattgtagcactgcagccctgcctgaggaacatgatagaaacaggtggtaggcccagctcttgccttccacctactaagcagtttttctgtggttagctgtgtgacataaactatcggtgtattaatttgctttcactagattccccccccccccaacaacttagtccaagaacatacctgaattc

SEQ ID NO: 205526 - DNA, 1000 bp, Homo Sapiens
cacagagacctttgctcacatgttttcctgctgaccctctccccaccattatcctatagtcctgccacatccccctcaccgagatagtagagatagtgatcagtaaatactgagggaactcagagaccagtgccgggtcctccgtatgctaagcgccgtcccccgggcccactgttctttctctatacttcatctctgtgtcttatttctttcctcagtctctcatcccacctgacgagaaacacccacaggcgtggaggggctggcccccttcagtggacagctaattcaagacaatttaaaatgctccaaagtctaaagcaaacaagttcacagagtgcagaagcattgccagtgtacagcttctggcactgtaaattctaatgagtattttattatatttgcttaatttacaacagacaataatataattatgcctttgacagacatcaataatctgtttctgtattcattctccatatttatagagtattgtgttttctagctgatttccacaacatattgttaacagtgccttaggccaaactactcttctttcccaactattctctttcttccctacaaagggagttaaaacaaggagctgttaaaacttggagccaaattagagattaaattacattagctttaaacggttttgtgaagtggctagaaatttttaccagtaatcttactgcaagtcctgggtcactgaagaactcggtaaatatgattagcatgcacgcaccaacacatcactgtgatgaaaacgcaaatcacagtatgtgagtcactactctcaacattgccatgcccctgccttaaacctgccagccccatccagaggatttttctcatctctgaactccaatcatttacaccttcccccatcagaatttaccctacattttattataattgcatataaatatgccttccctgtaacagcagggactgtgtttctccactgtatggcctggcacagtgtccagcacacagc

SEQ ID NO: 205527 - DNA, 1000 bp, Homo Sapiens
gccccacctgggtatcatctatgcagccaggagatgcccaagagccaggtgtccagaagccgcccctgtgtggacagcacagctggggaagacagagggctgggggagccccacgtcctcagttccttcctctgccgcctccctccctccctcccttgtccccgttccctccgtccctctcccccttccttccctccctccctcaccaccattccctccctcccacatccccttccctcccctcttccttccctccctctcacaccccttccctccctccctccctccctccctcagtcactcacgggtgtggctcttttttgctgacattctgggctctggggctgccgcctgagtacaatgtagtcctgagctccggagtccagtgccacaaaagtaaggagcagttgtgatctcggacgtgggctccggggcagccctgacctcatggggggctgcagactaggaaggtcctgggacgggggggctgttcaccaggaaggggcagggctgcagcctcagcctcccctccagatgccggcagcaccagcctctgcctgcatggggccgcgaggtttgcagtgacatcccccgagcttcctgacctgccccggacacggagcacggctcccaggggccgcacaggcacccgctggcctctcggcccctccctgtgcaccaccccctcctccccccgacccccatccctctactgagtgtctcaattccagtgttatggacctgggacgccacagtgcggggaacagcttctgccctctgggagataagaacccgtcgtcaggcagctgggctgctgaaacagtgaccataagctgggcgggcaggcgctccttccctcagctctggaggctggaagtccgagatcctggccgtggaggctgggaggggtggagtggacggggctgctgacagcctcgggggcgtgtggagaaggagggagccccagtggccccaggccctgccacttgggggagaattc

SEQ ID NO: 205528 - DNA, 1000 bp, Homo Sapiens
acccattacagtgccgcagggctgcgccctccttcccccgcagccactggtagctgcgggcagccttgttcctgtgctggcagaggaaccactcacctctgtttccgtctccacatggcctcctctgtatctgtctcttctgtcattctgcatgacggattagcccagagtgaaccctacccacccagtgacatgggccagggctccgggcagcacagggtgtggcctctcactgtgcagctttgaggagaaaagtccattctgccgatggcaggtgcagaccataagtgaccctccccctccccaccaccaccagtgagcaaaagcttttcctttccttcctgcagacactggaggaaagggtggcaggtggacccaccacagccccgctctgctgtggaggtacagcccttctgggcgtgtgaacgagccagtttcacaaacacagaggccaaggcgagagtggcccgaaagcctgcaacctgactgctcagggagggcggctgccctgcagttcagcctgtccgattcccgcctaattgtgcccgggctctgatctcgccacctgctcgtaacgttctctgtccggacctcagagccgctccatgtagtgctcacttcatgttaattgcaggaccactcagatcacctctgctgtcacttaaaaggggcatttcaggaggaaagcacttggttttgtgtgaatcagtaagacttaaaggggaacaagcacccaggagaagagagacttttccgtcctctttgttggtgaagcgaggatgaaagagtgggcatccgtcgctggggactgggctccccgcccagctctttctgtgcacttgaaagcactgcccttggactttgagaaggaagcgttcagtgggggagccaaagggagagagccagcgaggttctgaagaaggaggtgaggaggggctgcctcctccatgaaggatggtgccgggggtggcagggaagcccactcagtggaacagaactg

SEQ ID NO: 205529 - DNA, 1000 bp, Homo Sapiens
tgcccaccttgggacatcaaggccacctctgcctccatttccctgtcctcctgggcacagggcttggcattgagcacacggaggctggagctactggggctgtggcccttggtgtcgccttaggcacctcaggtgcagcagcccttctgccacggacaggtcgctctccatctcagtgccagcgaagggcgtggagtccccaaggggaggcacccatgggtcagggtgagggtgtggggacccccactaggtgccgtgctcaggagtgcaccaggacacctggaggaagcacagggcaggggacccttcctggacagctgagtgggtccctcgccccgtcccagctgtacctcccagaggcaggattcatctcacggggtgcaggggcagcagcacaccatcctcccacaacactgtcaccatgacagaacctgtcatggggatgaccacgtggtgcccgtcccctctgccagcgcccacccctcgccaagagccactgtgtggggagacaccgaccggagccggaccgccactgtgggtcgggggcccgggagcgcaggagacactgaccagagccggaccgccactgtgggtcgggggcccgggagcgcaggagacactgaccggagccgcaccgccactgtggctcaggggcccaggactgctcaacatcatttttggtcttgagcccacccaagagagggcaaacaggtgcagggaccctcagggtccacccgagtggctgcacgtcacccagggcccagcagaggagaggggctacgcagatgctcacagggccacccctccaggaagcacgggacctggcaggagcccaccagaagtgacagctaaatgtcacgtggcctcctgggtgggattctggggcaaaacctggtcgcgggtgggtccaacagtgacacatgatgttcaccatgtgggaaggccccgggcccgggagctctctgtgctacccttgcaatttttctgggaacctaagatc

SEQ ID NO: 205530 - DNA, 1000 bp, Homo Sapiens
gcaatcctagtctcggataaaacagactttaaaccaacaaagatcaaaagagacaaagaagtccattacataatggtaaagggatcaattcaacaagaagagctaactatcctaaatatatatgcacccaatacaggagcacccagattcataaagcaagtccttagtgacctacaaagagacttagactcccacacaataataatgggagacttttacaccccactgtcaacatcagacagatcaacgaaacagaaagttaacaaggatatccaggaattgaactcagctctgcaccaagcagacctaatagacatctacagaattctccaccccaaatcaacagaatatacattcttctcagcaccacaccacacctattccaaaattgaccacatagttggaagtaaagcactcctcagcaaatgtaaaagaacagaaattataacaaactgtctctcagaccacagtgcaatcaaactagaactcagcattaagaaactcactcaaatcctctcaactacatggaaactgaacaacctgctcctgaatgactactgggtacataatgaaatgaaggcagaaataaagatgttctttgaaaccaacaagaacaaagacacaacataccagaatctctgggacacattcaaagcagtgtgtagagggaaatttatagcactaaatgcccacaagagaaagcaggaaaaatctaaaatagacaccctaacatcacaattaaaagaaccagaaaagcaagagcaaacacattcaaaagctagcagaaggcaagaaataactaagatcagagcagaactgaaggaaatagagacacaaaaaacccttcaaaaaatcagtgaatccaggagctggttttttgaaaagatcaacaaaattgatagactgctagcaagactaataaagaagaaaagagagaagaatcaaatagacacaataaaaaatgacaaaggggataccaccaccaatcccacagaaatac

SEQ ID NO: 205531 - DNA, 1000 bp, Homo Sapiens
ccatatgttaaaaagttaagtagagaggtaaaaatataaaaaagaccaaaattaaacttctagagatgaaaactacaatgtctgaagtgaaaaatacattggatgaaattaacacagattaaacagggcagaagaaaagattggtgaacttaaaaatataacattggaaatgattccatatgaaacataggtagaaagagaaatgttaaaaatgaaaagagcatcagtgagctgtgggaaagcttcagacaacctactagacaaataattggagttccccaagaggaggagtgagagggagaaacagaaaaaaatactgagaaaataatgatcagaaattttccaaatgttttgaaaaccataaagacatagatttacactcaatacattctaagcccaagaaacatcataatttctcaaaaccagtggggaaaatagacaaatgaccaatactaggaatagaagagatgacattactacagattctgtagatataaaatgtaaactggaatattaaaaacaactttaagttaattaagtacttagatgaaatggacaaattccttaaaatacgcaaattactaaagcttactcaagaagaaatggataactggaataaccattatatgtactaaagatatttaactggtagttaaaaacagtttaaaactttcctacaaggaatagtcttgacccagatggcttgtgctatttctttttaaggaatttaatttcatttaaggaagaaataataccagttatgcaccaactttttcagaaaagtgtagagaaaggaatcctccctaacacattctatgaggccagtattaccctgataccaaagcaagacaaagatattataagaaaacaggctgggtgcgacggctcatgcctgtaatcccagcactttgggaggctgaggcaggcggatcacctgaggtcaggagtttgagaccaacctggccaacatggtgaaaccttgtctctactaaaaatacaa

SEQ ID NO: 205532 - DNA, 1000 bp, Homo Sapiens
aggcccagcgcagactccaggcccggcacttcccatagccccacctcccatagccccacctcccatagctcctcctcctacagcccacccccatagccctacctcctgtagccccacctcccatagccctggccccacagttcctcccccataaccttgcccctcccatagccctgcctccttttgcccacctcccattgccccacctccaatagccttacctcccatagagccacccccacggccccgcctcccacagccccacctcccagagtccgtcccatagtcccttctcccatagcccctcccccatggtcccacccctcccatagccagccctcctgaccccaggctccttcccacagagcactacccccttcctgagccttctttctcaggctcctcctttctatccaggtccccagtctagtctctgccccttcctgaggccctgccttctatcttagatgcttctcttcccagaggagtccatctcagattccagcgttcctgtgttaaggcctaggacccgcctcctccctgaagccccaccttatcctccaggctcctccctcctctgcttcttgcctggtttcttgcctggtttctgacttcctagctggacctctggccctaggcctcgccccgatgcccgaggccccgcccatttccccaagacgtttgtttctcttttgcctccgatctcatccccctttcctaaggcactgcaggtgcctcccctctaggccccgctctcaagggtccccccaggcctgccttcgggtggggtgtcccttgatgccatcagcacaagacaaagccctgaacaggcccaagaaacgctgtctgaggttcccaccctggggagggagaggtcggggcttcagcaacgctgagacccccatctgtgcctccaggagacccggctgaattgcatccgcattgccaggaaaggtaagtccgctgagttcctgcagcctttcagcggcaggtttctcac

SEQ ID NO: 205533 - DNA, 1000 bp, Homo Sapiens
aaaaaataggtagggtgggtggtatggtatagaagaacagagaataatgagacataagaagcaattgcaatgtgtggaccttctctagcttctgtttcagacagaccaattgaaaaagacaagacagatatttgaatatgcattgactgtttagcaaaattagagaactgttgttaattttgttagtgtgagaatagcatggctttatgttttttaaaaaccctattctgtgaaagatgcatgctgaactatttaactgtgaaattgtatgtaaaggatttgcttttacaatcctccagagatgagtttataatgatataaatgatgtgataaataaatcaatggaggagaggaggcaaaatctctcctgcagaagaactccaaataaggtaggtagatactttgtccttaaaggaacagcattaactccctcttctggaagtgtgaattcttgatatcatgtaatgaaaatggtacctcacttgtggctttcctccccccgaatccataacctctacttattatgaaaaaaaaaaaaaaaacaaaaaaaaaacaccgaattccaatagaggaacattctataaaatacctaactagtattcctcaataacgtctaggtcatcaaaaacaaggaaaatctgaggaattgtcacagccaagaggagcctaaggaggcatgacaaccccatgtaatagggtatcttgaatgggaccttggagtagaaaaatattattaggtaaaactcaaggacacctgagtaatgtatgacttttggttaaaaataatgcatcaatattggttcaataattgtaagaaatgaaccatactaatgttagatgttaataacaggagaaacaacttctcaattttcctgtagttaaaactgttctagaactgaagtctattttttaaaattctcctggaaaaaagtggaaacatatgaaatatgatggacaaatgttagtaattattgaatgtgatgatggataatgagaattc

SEQ ID NO: 205534 - DNA, 1000 bp, Homo Sapiens
ggactgtaattctaaggacaagaggaaggagtgagggcgccttccgtctgagggcctggggctcccccggcttgcagatttgctcagagtggaaggtcttggtcagcccaggctgccgaggcccagagtgggtgggctccccagagggcacagtctgaggtcgcaggctcagctccaagccctgaggctgtggctgtggggcaggtggacctggggctgcattgcaggggtaatgggctggcctcggggtccaaagtccaggacacaggtctcctccacctgaccaggacggtcccattttctcccttacaggcagctgctgaaggttcacccagggcctgcctcccgcagcccacaccaggtgccccggctccctgggcacggctcccacatggaggctggcgcccactcagggccctgctgcagccgctcggtggagcgctgctattcttagctgtaacctaagcagctgcccattaaaattccattagtttcgaaggctgagcggcagttgatatttctaattatcatgaaattaaaattgtccctgtaatttaatgataattgcacaagatgccagctggcaccctggggagccacactgttcccgaacaaaacttggaaagtctcttgaaagttctttgaacaggaaaagacaaaggcgttttggaaaatgagggaggtggggggtcagccccgtggttgaatccaaattccgagcgtgaatgggctctccaaactagggcctctgcgccaggcggccgggcggggagcaggtgggctgttgggggaggccggactccagaccccacccgccctgagctgaggattaaacaagggaataagtcaggagtctaaccctgcggggaactaaggaacacgtggtcagtgcagcactgtggggaaggttctagaagctggcagaagccctctgtggggtggaggggcggtgcctgcaggaggaggagcaggaggaacccgctgcccctgtgcttcccct

SEQ ID NO: 205535 - DNA, 1000 bp, Homo Sapiens
gggactggttggttgcagagtgagctgatttactgcacttagtctagcttattaaaggatgagcttataaacaccccaggtaatatcataatacataagtgctacctaattactgtgtgggtctgttaccaagaatgtctaagtcaagaaattgaagattgtttccttaagattctgcatcctaatgtagaatctttcctattagagtataagtaaattcttttggtatgttatttaagaatatttgtgaataggcttaattaaacaccatgttaagaaattataaacttaaggccaggcacagtggctcacgcctataatcccagcactctgggaggctgaggcgggcagatcacttgaggtcaggagttcgagaccagcctggccaacatggtgaaacctcatctctactaaaaatacaaaagttagccaggcgtggtggtgcacacctgtaatcccagctacttgggaggctgaggcaggagaattgcttgaacctgggaggtggagcttgcagtgacctgagatcacgccagtgcactctagcctgggcgacagagtgagactctgtttaaaaaaaaaaaaaaattataaacttaaaaaaaagaacgttttcctttaaacaaaaatgcatgttccttgttttttgttttgttttgctttgccttttttgagagacagtcttgctctgtcacccaggctggagtacagtggcacaattatggctcactgtagcctctacctcctgggcgcaagcaatccttccacctcagcctccctggtagctggaactgtaagtgcagaccacaacaactgattttttattttttgtagagacagggtctccctacgttgcccaggctggtcttgagctcctggactcaatcgaccctcttgccttggcctcccaaagtgctaggactataggcatgagccactgcaccaggccgtttcttttttttttaaactttggaaaatatggatgaacgaagtgagaaaa

SEQ ID NO: 205536 - DNA, 1000 bp, Homo Sapiens
cttgaacgcctgggctgcgcgccggcgtccctcgacgccattctcgtcacgcacgagcatggcgaccatatcggcagcgcctatgcgttcgccgccaaatacagtgttccggtctggaccagccacggcacgtatcgcgccacggcatcgctgcgcggcgccgaccgggccgccgtccgtttctgccgtgccgacgatgccttcagcatcggcgatctgcggatcctgccctacaccgtgccacacgatgcgcgcgagcccttgcagttcatcttcgacgacggcgcgcggcgcctcggtgtgctgacggatgccggcatgtcgacggagtacctgtgcgggcacctgaccggtctgcatgccttcgtgctcgaatgcaatcacgaccgtgagatgctggccaactcggcgtatccgtggtcattgaagcagcggatcgggggagacttcgggcacctggccaatgacatcgcggcggcgatcctggcgcgcgtccggcacgacggtcttcataccgtcgtggccgcgcatctttccaagcagaacaacacgcccgagctggcggcggcggcgatcgcgtcggcgctgggcgtgcctgcgggcgacgtgccgatcgcggatcaggaagcgggcctcggctggcaagccgtctgagcgagagccggcggtcttgtaagattcagaaacaactttgtgtggcgatcgggcgacctgtcggcaggtgcgtgccgttcagccatgaaaaaagccgacccgaaggtcggctttttcgtctcgcgagaagcgcgcgattattgcttggcagccggagccgaagcggcggcgtccgaagcggccggggcagcagcggccggagccgaagcggcggcgtccgaagcggccggggcggcagcggccggagccgaagcggcagcagcttccgaagcggccggagcggcggcggcgggagccgaagcttccggagcggcggccggagcagcagcttcttccttcttaccgc

SEQ ID NO: 205537 - DNA, 1000 bp, Homo Sapiens
acgccggccagatcggggtcgttctccgggagatggttggccgccgtcgcgttggagaagatcacgttgtcctgccatggcgagcggtcacgggcggcttccaggcccttgccgtcggtgtcgatggtgtcgtcgctggcctcggtgccggccgcgtccaccgagcggatgcgccgggccgcgaggcggaccgggtcatcgtcgcggcgcgcgtgggcggcgggtgcgtccggcccgggttcgggcggcgggatggggggcggggtgtcgtcgtgcatgatgggctccttcggcatgggcgcgggcggaggggcgcatgcctggcatgccgcaatggccgtgcccgctgcgcagcccgcgcgatgccgtgtgtcgagcggctcggcggtcgcgcggcggactggcggccgcttcaatggcgatccgtcgagcgccgggttcccgtgacgggccggcatccatcgtgccatgccggcgctcacacaagcgctgatccaggcgcgcctgcgcgcagtccgccgggcagccgatggcgcgaggcatgccggtgccgccatggatgcgcggcgatggcgattccgccgcaccgaaaccgatgcccggcgccagcgtcacaccttgccgcccggcagtggcggcccgtcttcatgggcgctgcgtgggtggcggtttgcggcatgcggctggcgtcggtggcgtggcctgccgtgcccggcgggcgcctttccgcttcaattttcctcaacccgcggccaatccggcgtgggcacgcgccgtggtgcttgcactcgggcgattccatttccatgatgctcacgacgtcgacatggccggagcggagcctccccatcggggtgcgccggttctcgcagcgggtgtcgagcccatccgcgcggtgtgggtcggtggccggccggtcttggcgtcttcgcgggccggtatgctgccgcatggacggggcgcgcggcgtgccgaacccgcgcgacacgcgcatcggcat

SEQ ID NO: 205538 - DNA, 1000 bp, Homo Sapiens
ttttcaatggctcacacaaactcacaagacacttcttatctagccgggttttttattaaaagtcaagctaccttatggatcaggcaggtaattttgtcaataaattacaaaagttccatggaatcccacttctacattttttataatttctattcagatttgaactatttctctagaccctcttttggccaacactatctgtaaggtttcctcactttagtgcttttagtgatcttcacaaatatttactttattttcttgactgtaagaccctattcatcattgtaagtcaaatcattgacatattcatagctttttgaacgaacgtgatatatatatacacacatatatttgtatatacaaaatttaaagtgcagcacatttaatgcatacttaaaaatgtttggaattttgtagctgcagggagctgctgacatgtgccagattcagttctaggtaatgcctgacttcctgtgaagtcttttagttgtagctgtacgtgttatctggacaaatactgaacgtatcattagttgaactgtaattttgataagcaatatttctataaattttcctgcagcaaaatgtatgttagggctgggtgcagcggctcatgcctgtaatcccagcacattgggaggccaaagtaggaggttcactggaggctgaaagtttgagaccagcctgggaaatgtagcaagaccctgtctcaagaaaaattaaattaaaaaattaactagggtgatgttgtgcacctatagtcctagctactcagaagaccgaggtgggagggtcccctggagccaaggagtttaaggttacagtgagctatgattgtgccactgcactccagcctgggtgacagagtgaaattctgtcccttaaaaaaaaaaagtacattaaaacccttttttagagtccagaaatctctatgtgccaataaaggtttatcttgaaagccattcaaaagatattcagatgctgactggttattttacag

SEQ ID NO: 205539 - DNA, 1000 bp, Homo Sapiens
ttataactgactaaaatcatacttgaatggtgggtaaaattttctagcacatttagaagagaaaatactaatttcttttttatggccttgttctttaaaaattgatgggtcacaaacttagtctaaatagatataaacgttttatttcagaattagtctagttcttctaaaagtctcatgcaaaggagtaagcagatttccttaataaggccatgtttttcagcactgtatctgttagacctctgatgattttcggttgtacttgtccatatcctttaacctgtgttttatgtgccattgtatatttttctattacccttccactaggatttggaactagctctggttttggatgcagcaccacaggggcctccacatttggatttggaacaacaaataaaccctcaggaagtcttagtgcaggtttgtgtgtttctgcctggatttcaggcaaatttaaaggtgtaaattatttaatttaaaagtatgtgttgttatttccagtaacccaaaaagttccctccctgattcagtttttactccctggatgaagtgtgcaagcctaactaatcattttactttatctctctcataaactaaagggcaggtttgtaaaatacttctaacaagacttcttagtttgatttaataattaattacatcttctaactcagagattcatttgaactctagtgactaacttcatggttaaataattttcttcattattacaaaaaggaacccatcattgtgaaagtttaagttttttgtcataattcatcctggagaatgatttctattccagggtccctctggttttaagaataccacagtcttacaaatgattattaatttagtttcttgttcatttttgaaataggtataattttttgactcttcttatgaaaaattccaaatttcatctacttttgcatttatattggtaaatatggcttgttttaatgtgcagtgcttagggacaaataccatatctaatgta

SEQ ID NO: 205540 - DNA, 1000 bp, Homo Sapiens
gccatttggccctattgacagtatcttgccttacagaggttacacttgtcaactgttgatcttagcatctaagacactggtgttctgttcaggaaactttcccctgtggcaatgtgtttgagctatttcccactttctcttctattagattcagtgcatctggttttatttggaggtcctccatcccattggacttttgctttacagaaggagaaaaatgtggaccaatttgtatccttctacaaggagacctacagttagaccaagaatgaatcccttgaagttatgagatagtaataaccaatgattgttgattgttctagttgtttcatgttagtggtgtgtgtgtgtgtgtgtatgtgtgtgtgtgtgtgtgtgtgtgtgtgtgtgtgtgtgtgtgtgtttctcttcttttggttttcctgtgagatgaaaattttcttgtgatttggggggatatttattcttcttatgttggatttttctttctagtatcctacatagggctggatttgtaaaaggatattgtttaaatatggttttgtcatggaatatcttgatttctccatctatggtaactgaaagttttgctgggtgtagtagtctgggctgacatctgtggtctcttaaggtctacaaatatctgtccatgcccttctggctttttagtcattgttaagaagtcatatataattctagtagttctccctttatatgtcacttgatagttttctgccacagcttttaatgttttttctttgttatgtacatttactatgtcaattactatattgcaggacaattttttttctgatctaatctatttggtgttctgtaagcttctcgtaggtttatgggtttttgatctgtgaatcttcttctatttcttaggtttgatcttttgatattgttccaagtttcccagatttttttttgttagaaacattttagatttttcatattctttaataaatgtgtcaattgctttcattgtgaattc

SEQ ID NO: 205541 - DNA, 1000 bp, Homo Sapiens
cataatcaactaaaacagtatgggccaagccactcccaacaataaaaataatctgagacaaagtagttgaaacgagagaaaaatactgagaggctgttatgaactgaatttgttaaattaagtttagccagcagacactgagcatactgcctatgagttagccctgttctgcaaggagcagtttaaaaaaaaaaaaagtttagcctaaagctgcctccttacgttttttttttgttttttttttttttggcagagtctcgctctgtcgccagctggaatgcagtggcacaatctcgctcactgtaacctccgcctcccaggttcaagcaattctcctgcctcagcctctcaaatagctgggattacagtcacatgccaccacgcccagatactttttctatttttagtacagatgggttttcaccatgttggccaggctggtcttgaactcctgacctcaggtgatcccacccacctcagcctcccaaaagtgttgggattacaggcgtgagccaccgcgcccggcccccactgcctccttacatattttaagttcaacttgaaagtttctccatacatagtgaactgtaacctaacaatgtataaacaaactataacctacttttgtaccaatcgcccagttttagccaatcacaggtggtcaactgtcaaaccatgttcaaataaggcaaaggtggagctgtaaccagtccagctgtttctgtacctcacttccgttttctgtccacaaatactatctgaccaactgacagcccagttgtagctctgaatctattctggttctgggggctgctgaattgtgaatcggtctttgcacatttgaagtgttcaatttaatttgtcttaagtttttaacaaattgtatcctccctaaagataccttgaagccctaacctccaagtgtccctgaatgtgaccttatttggaaattgggtctttacagatgtaatcaagttaagataaagtcatgctgaattag

SEQ ID NO: 205542 - DNA, 1000 bp, Homo Sapiens
accactctcttactgcagaggtctgtctatcctgccctggtctcctccaccccaggagagttttcaaaggtagagaggaccctttggtctttattcaccaccatcatacttttttttttttttgcttttaaaaagtggaggtggaaaaaaaaaaaaaactgaaggtgggagaaaagtaaaagcaaaaataacagctggtgaatccaagagcagtgccctcactgtccataaacacaaacaccctaaatagttctgttctctcctgtgtatgaaggggggccctgcaccctcgtactcgggtttcttccccatccctgaggtccctatgcttacaatttgggtcatgcctcacacttttctcctaaagcccacactctcttcaccctttgcccccaccccacggtcacagcccctttcccgggtctcccctctgctcctcaccttccctctccaacccctcactctcccagtcagtggccgcctcatccccattgggctcccggaggctgacagccagcaccaaggcctgcaggagaccaaagaggcaggcgaagtgcaaagggtgggcagtaagtaggctcagaacagcatggagcccatgcagggcagccaggaaggacagtaggccatgtagccagaggcccagcggtccacgcaggcccagtgtgtccaaggctgcccgcagtggtcgtgagcacagggccagcagggcagaggccagcagctccagaagatgcagggtcaggttggtggagatctgcagacactcttctgggccccccaagtaccgggagggagctcctggttccccccgcagccagcccaacagcttctcacgcctaccaggtttctccaatggggctcctggcccagggacgctcagtcccccttcaggggacacccctggtctcctggtgccacctgaatccacatgatcccatctgagtttgggactggcccctccagcctccagtctcccagactcttgagtgctagagat

SEQ ID NO: 205543 - DNA, 1000 bp, Homo Sapiens
caaagagcatactgaaatgtcccctacatcctcacccagtgccccccagtggttcctctttttattgtggtaaaatatacttaacttaaaatgtatcattttagccattttaaagtgtacaattcagtggcattaagtacatttgcaatattatacaatcaccaccactatttagttccagatctttttcatcatcccaaacagaaacctgtttccattaaacagtcacttccaatttttccctattccagcccttagcaaccactaatctgtttctgcctttacggatttgtctattctgtatatttcatataaatggaatcatacaatttgtagcttattgtgtctgatttctttcacttagcataatgttttcagggttcatccgtgctgtagcaaatgtcagtatttcattcctttctatggctgaatagtagccgattatatggatataccacattttgtttatccattcagccatcaatggacacttccgttatttctgctttttggctattgtgaacagtgctgctatgaacatttgtgtacaaggttctgtttcagtatctgtttttagtttttttgttggaggatataggtgcggttcgtttgatagttttatattttaactttttaaggaactaccaaactgctcttcatggctgctgcaccattttgcactcccaccagcaatgcacatggttctaatttctctccatcctaatctacacttactttcagtttgttttgttgtttattatagccatcctataataacattctagtgggtataaaaccgctagaagtcaatccaaaacactagacaaaaaccacaaaacctctttgtggttttgatatacagttctctaatgagtaatgatgttgagcatcttatgtgtttgttggctatttgtatattttctttggaaaaaggtcctttcaagacctttgcccatttaaaaaaaataggttgcctttatgttttgagttttaggaattc

SEQ ID NO: 205544 - DNA, 1000 bp, Homo Sapiens
acacacacaaaataaaatacctaggaatacagctaacgagggaagtgaaaaagctctacaacaagaattgcaaaactacaaaatgctgttgaaagaaataagagacaacacaaacaaatggaaaaacattccatgctcaagaataagaagaatcaatttttttttttttttttttgagacggagtctcgctctgccacccaggctggagtgcagtggctgatctcagttcactgcaagctctgcctcctgggttcatgccattctcctgcctcagcctcccgagtagctgggactacaggcgcccactacaatgcccggctaattttttgtatttttagtagagacgggtttcaccgtgttagccaggatagtcttgatctcctgacctcgtgatcctcccgccttggccttccaaagtgctgggattacaggtgtgagccaccgcgccccgccaaaagaatcaatgttgttaaaatgaccatgctgaccaaagcaatgtacagatgcagtgctattccgatccaactacaaaagaaaggaaaggaaaggaaaggaaaggaagaaagaaagaaagaaagaaagaaagaaagaaagaaagaaagaaagaaagaaagaaagaaagaaagaaagagagaaagaaaggaaggaaggaaggagggaagagaggggtgggggaaggagggaggaagggagggaggaaggaaggaaggaaagaaggaaggaagggaaagacaaagagagagagagaaagaaaggaaaggaaggaaggaaggaaggaagaaagaaagaaagaaagaaagaaagaaagaaagaaagaaaaaaaaaggaagaaggaaaggaaggaagaaaggaaggaaggggaggaaggggaggaagggaaggaagggaagaaagggaaggaagggaaggaagggaaggaaaggaaggaaaggaaggaaagaagtgaagaaagaaagaaggagggggaggaagagggatcacatatgaaatagtgaataa

SEQ ID NO: 205545 - DNA, 1000 bp, Homo Sapiens
tctgtctaatattgacagtggggtgttaaagtctcccactattattgtgcaggagtctgagtctctttgtaggtctctaagaacttgctttatgaaactgggtgcacttgtattgggtgcgtatatatttaggatagttagctcttctcgttgcactgatccctttaccgttatgtaattcccttctttgtcttttttgatttaaagtctgttttatcagagactaggattgctactgctgcttttttttttttttggctttctatttgcttggtaaatattcctccatccctttattttgagcctgtgtgtgtctttgcacatgagatgggtctcctgaatacagcacactgatgggtcttgactctttatccaatttatcagtatgtgtcttttaattggagcatttagcccatttatatttaaggttaatattgttatgtgtgaatttgatcatgtcattatgatgctagctggttattttgcctgttagttgatgcagtttcttcataatgtcaatagtctttacaatactgcaaaaacagtactgatttttttatgttgatttatatcctgaactagttcattagttttaacagtttttggtgtaatatttggggtttctatatataacaataggtaatcagtatacaaagaccatttctttccttcctccctccctccctttctctctctctttctttctctctctcttttgttcattccgatttgtatgcttttaatttctttctcttgcctaattgccatggctataacttccagtactaggttgaatagaagtggtgagagtgggcatctttgctttgtttctgatctgagagggaaaactttcaaattgatggtctcagctgtggggttgtcatacatggtctttattgtgttgtcatacattccttataaccaatttgttgagacatttcttatgaagaaatgttgaatgtttttcaaattcttttccaatctcaaagtaccagaattc

SEQ ID NO: 205546 - DNA, 1000 bp, Homo Sapiens
aatatcttgaccaagttatgaatcccaagaataaaagaatatttaaactttaaatcttttaatgcattttaacacttaattcaataatttaaaaagagacaatcatatttcactagatgtagaaatcactgtagatgaaatctaacactacacctgacctacatttcttcagttatctccacttttaagaatttgtgatcagtgcagcactattcacaatagcaaaggtaaggaatcaacccagatgcccatcaacagtggaatggataaagaaaactgcggcacagggccaggcgcggtggctcacgcctgtaatcccagcactttgggagggtgaggcgggcagatcacgaagtcaggagttcgagaccatcctggctaacacagtgaaaccccgtctctactaaaaatacaaaaaattagccgggcgtggtggcgggcgcctgtagtcccagctactcgggaggctgaggcaggagaatggcatgaacccaggaggtggagtttgcagtgagccgagatcacgccactgcactccagcctgggtgacagaatgagactccgtctcaaaaaaaaaagaaaagaaaagaaaagaaaactgcagcacttatacaccatggtacgctacccagccaaaaaaacaagaacgaaatcatgtccttcacagcaacatggatggaggtggagaccattattctaagcaaattaatgtaggaacagaaagccaaataccacatattctcacctataagtggcagctaaacattgagtacacatggacacaaagaagggaacaatagacactggggcctccttgagggtggagggtgggaggagggggaggattaaaaaactacctattgggtattgtgctgattacctgagtaacaaaattatctgcacaccaaacacccgtgatacacaatttacccatgtaacaaacctgaatatgtatcccttgaacctaaaaaatcaaaaagaaaaaagtaaaaaagaattc

SEQ ID NO: 205547 - DNA, 1000 bp, Homo Sapiens
acaaggatcggtaagagtcagtaatgaaacgatgtctgaagcaagcactgaaatatacctaggcatagcacatgcaaaaaatgtgatgctatgctttttcaaccataatgacctgtaaattgttttatactaaggcccaacggttctagcaatgctgtataatctcacatctttcccctgtcaaatgaagaaaaaattaaaagatacacaaacataaatatatcttttaaaacatatagcatgcctgggtattgtttatatgattcagtggaaatcaacatggtttgctggtgtgtctggttttttgtgttttaatatttatattgcatagctatccaaaattgttcagagttttgaaagaaccaagttgtaaaaaattgtggataggcaggaattctgacaagctttctaaacatgaccctttatttcaacatgaagataaagaggcaaagctatactgattgaacagaaaacaagaatgggacttaaaaaaaaaaacaagagttggatagacagtgttcttccttctagttgataggaaggccacacagtgtaaaactatactcacaactttggtgttcacatgcacaatcttcaccacttagaaagaagcagctttattagtgcttataaaaattcattagtccctataaaaccagaaccaattcagcagataagtaaataaaacaatataaagaaaataaattcacaaactttaatgtagaatttcagaaaatgttaaagttcactgagaaatactatttagtgtgattaagataataaaaataaatcaataatgcaaacacagtattaataacttgaagttttcaaatttgagaggttttgttctcatgagaatattctctcaaaagtagtttagttatatgaataagatttctggataataattgatctgcataggctattaaaaattgcctgtttatacaggtctgactttcaaagccccaatcttgagtacgtgtcaaggttagccttacca

SEQ ID NO: 205548 - DNA, 1000 bp, Homo Sapiens
agctgtggttgggaaccaggtttcattttattataatataggccagggattggcaaagttttcctgtaaatgtgcagaaggtaaatattttattctttgctattgcatattctttttttgtgtgtggtggagaggaggggtattttaattttgttttgctttctacaatcttttaaaaatgtagaaatcatttttcatttacgggccatacaaaaacaagtcatgggtagggcaagtggctttatccttcatagagttagcctttttctccctgagcttaccaagtcaggacagtttttctattagaacattgaagcaacacaagaatcaacgaatgtttcagtaagtcttgttagagaagatcagccagattccacagtaaacagactgacagtcacagcctcctttgcagcagcctacaagagttccattaaatgctgaccagccaggcccaaaatgtcaatgtctgctctgtgaatagtccctttttatagaatggcacatcctgtagagagccaatatcttaacttcatcattctggtctcagtaacttacataagatcttccccccaaaagatctgtgataaaatagggaaggtgactcaagatctttgactgcctggtcttaaatctaaatcaatcaacaagttaagagtctatttaacacctcttccctaacctctagtgttgcatttgggatacaagagaacaaaagctccccgatgaaattttaaatacacaaagagaagacaggaaatcccgtgtttcttaaccattttggaatgagagacccctatgaatactgacaaacactatcaaccacatactcagaaaaatgcctgggtgatgataggaaacaattggcattcattatcaggggattcttgccctgctggaagtctaaccacaggctcagtttcaaaagtcctgttttaaacaattagagaaagataaaatgctgagatgtgtggggttgggtgcagaatcagctctcctgagc

SEQ ID NO: 205549 - DNA, 1000 bp, Homo Sapiens
ccgaaaattggactgtgatagttgtacaattctataaagttactgaaaatcactgagttataaactgtaattatataaattaaattgtataaggtatgcaaatcaacctcaataaagctgttaaaaaaataacgatttgttgagttttggtgtagtatcaaagaataatttctacaactatctcaaagttatcttaaaatattccatccttttctaattgtatttctgtgtaaggttagattttcttcaaataagtaacccaaaataaactggaacagatactagctgtcttctgttatgctagatgttaaagatgtttgcaaaaatgtaaacagtgcctgacgacttctcattaaaaaaaaaaaattggggaagacggattataggctcacacctacaatcccagcactttgggaggctgacgctggaggaccccttgaacctgggagatagaggctacagtgagctgtgattgtgccactgcactccagcctgggaaacagagagaaacactgtctcaaaaaaaaggccgggaggtggcagggggaggacagctatttttcactaaaaaatatgtcatttatgttaatatgtaatgggttttctactagtattttaaagtaaatcaataaatatttaaatttttcctcagtgttaatttctttgtgtttttttgtttgtttgagatggcatctcgctctgtcacctagcctagagcacagtggtgcaatcttggctcaatgcaacctccacctcccgcgttcaagtgattctcctgcctcagcctcccaagtagttgggaccacaggcatgtgcccccacgcccagctcatttttgtatttttagtggagacgacagggtttcaccaggctggtctcgaactcccaaccgcaggtgatccacctgccttagcctcccaaagtgctgggattacaggtgtgagccaccgcacccagacctcaatgttaatttctaacatagtaaatgttgacagatata

SEQ ID NO: 205550 - DNA, 1000 bp, Homo Sapiens
gatcacttactagataaagaccctctctgtaaaccatcgtcaccgccgttagcttagggatggttaatgaagaaacagaaagctgtacaataatccaggtgagagaggatggtggcttcaacccacatggtagcagcctgaaaaggagccaccctctgttaagcccccctaaagcttcctaagttggtatattgtttttatgtaagtcctgagttacagactctgcctttagaacttattaacaggaaaagatacaaatttcccccgaagagtatgctttcttcacatgagaattatgtaataggatattcccccccaccttttttttttgcctctattaagagataaaagactttaaggttaaaaaaaaacaaaaccttgtgtttaaaagcagagagtagctattataatgacagcagcttttattatttacacggagggagggtgttaagccctttatatgcaatatcttcctgacatgccaaaactcatgcattcaatttgtatggaatgcttgctatgtgacaggcaacattctcgatgcttggggacgatttcagtaattaaaagaaaccaaagtcactacctccaaagaagtcccattggagggggtggtgaagagggagaaaagaatagaaataagtaaactacactgtatgttgatggacgtaagtgctacggataaaaatataaagcaggaaggcgggctggagtgttgcggagagtttgcttttaaatagcatggtcactatagggtcttcctgcaaggtgatgacagcggacgtcagccgtgcagacaatgtctactgcaaacaccctgcggtgggaaatgttcctggccttttaaaggaacaaaaaggaggctggagaggcaaaggggaaaataggagatgaaaagtcagaagtaatgggaagggtgagaatcgtgtagaacctagtaggccacagggatagctgtagctcttacccagagggagacagcaactctgagcagaggatc

SEQ ID NO: 205551 - DNA, 1000 bp, Homo Sapiens
caccaacgagctcccattcctcccacatcctcaccaccaattgctttttctccagcattctagctccggccaactggtgcggggaatttgtatttctctgatattttaatctgtactgctctcattgctggtgaggttgagaatctcttcatatgctcattagcctttgagcttctccctctgtgacaggcctgctcgtatgcatcgcctatttttctattgtattaatcttctttttctgtgtgatttacaaaagttctttatggtttctgaataccaggcttttgtcaggtatagaaagcgcctggaatcccagcactttgggaggatgaggtgggtggatcacgaggtcaggagattgagaccatcctggctaacacagtgaaaccccatctctactaaaaatacaaaaaattagccaggcgtggtggcatgcatctgtagtcccagctacttgggaagctgaggcaggagaatcacttgaacccgggaggcagaggttgcagtgagctgagatcgcaccactgcactccagcctgggcgacacagtaagactcggtccacaaaaaaaaaaaaaaaaaaagaaaagaaaaagaaaaagaaaatggatatgttttctcctgtctgttcatccagtctctgttgctagttactgaacagaaatctttagtaaagccagtgacatcatttttcttgtgttttttttggactttttttaataaagattttcctcatcaagactctaaagatattcttctgcattttctcccagttttatagttttaaagctttcttctagctttataactttgcctttatagttaggcatgtaatgaattgggagtcttaaaaattttaattttgtggagtactggattgggtttctatgattctatttcacaccaacagaaaaagtgggaatgaatcaccagggaaagggctgggacatggccactgccccagagtttagtgtgcaacccttcgtccagctcagaggatc

SEQ ID NO: 205552 - DNA, 1000 bp, Homo Sapiens
cagaggttgcagtgtgccaagaccgcactggtgcactccagcctgggcaacaagaacaaaactttgtctcaaaataaaattattatttcacaatttctgttgatcaatccaggagcaacacagctaggtggttttagctcatggtatctcatgaagttgcaactaagccactgggcagagttgcagtcatctcaattacttgagtattaattgagaatggcgttgaaggatcagcttccaacctcactcacatggtcattggcaggcttcagttcctcgaaggttgatgaattgagagcttcagtttcttgaatgccacatgggtctttccataggccttctcacaacaaggtagcttgcttcctctagtataagtgatgagagagagagagagaccaaaatggaaaccaaagtctttttttttttttttttgagatggagtctcgctctgtcgccaggctggagtgtagtggcatgatcttggctcactgcaacctccacctcctgggttcacgtgattctcctgcctcagcctcccgagtagctgggattacaggagcgtgccaccacgcccagctaatttttgtgtttttagtagagatggagtttcaccatgttggcaggatggtctcaatctcttgaccttgtgatctgcctgccttggcctccgaaagtgctggtattacaaggtgtgagccaccacacccggccccaaagtctttttaaacctaatctcagaagtgatattccatcacatccaaaatattctaataattagaagcaaaccactagtccaactcatacctaaggggatgggattacttaaaggcatgaatagcagaaggtggagatcactgggggccattttagagcctgcctacaacagttatactggaagaagcacagaccactagggttttggaatagataattcttttcagaaacagatcttggttttctacggggccctggtagaaactaaacttctgatcatgggaca

SEQ ID NO: 205553 - DNA, 1000 bp, Homo Sapiens
tggtatgtttacaaaccttgagctagatacagagtgccgattggtgtatttacaatccctgagctagacataaaggttctccaaggccccaccagagcagctagatacagagtgtcgattggtgcactcacaaaccttgagctaaacacagggtgctgattggtgtgtttacaaaccttgagctagatacagagtgccgattggtgtattcacaaaccttgagctaaacacagggtgttgattggtgtgtttaccatccctgagctagacataaaggttctccaaggccccaccagagcagctagatacagagtgtcaattggtgcactcacaaaccttgagctaaacacagggtgctgattggtgtgtttacaaaccttgagctagatacagagtgccaattggtgtatttacaatccctgagctagacataaaggtcctccaaggccccaccagactcaggagcccagctggcttcacccagtggatcctgcaccggggctgcaggtggagctgcctgccagtcccggtgccgtgcgcacactcctcagcccttgggtggtcaatgggactgggcgcagtggagcagggggcagtgctcgtcggggaggctcgggctgcacaggaacccacggagtgggtgggaggctcagccatggcgggctgcaggtcccaagccctgccgcgcgggaaggcagctaaggcccggcgagaaatcgagcacagcgccggtgggccggcactgctgggggacccagtacaccctccgcagccgctggcccgggtgctaagtccctcattgcccggggccagcaggctggccggctgctctgagggccgggcccgccaagcccacgcccacccggaactccagctggccagcaagcgccgcacgcagcgccggttcccgctcgcgcctctccctccacacctccctgcaagctgagggagtgggctccagccttggccagcccagaaaggggctcccacagtgcagtgg

SEQ ID NO: 205554 - DNA, 1000 bp, Homo Sapiens
gcaaggatatgctataggatggggaataatataatgcggaggcccatttgtatgcagcccctttttggagacagctcagtgctaagaggcagctagctcctgagtcctgaccccagttactggtaccaacaggctagagctacagtctgaccatgactagtgttctgccaggcagaggggcactggaaacactaggcaccctccaagaaggctctttgccttggtcctcactctctgggatgcatgagtgggtgtgggtcaggaggaagatttacaggttatgtccctccctccagtccatatagtgtaactggggcttggagggctggacaagccagctggcctcacctgacatgtcccctactctccggcagccggaagccattgctatgaaggtgcaggccattggacacaccgttggacacaccgttggtggacatcttgccattctggacttctggcaggagatagtgagaaagtgacagcaacaactcaggaagaggacccatttcttcctggcagccctctagcttccatcacggggtctgatggttccatcgtgggactgttctcccagagtaagatccattcccagaaagcaagttctgacataaagaaaagcccgtgcgccctctgctggctggcgagggacacaacttcaccgtggcattactcagctggggctggggctggggctagggctggggctggggctagggttggggctggggctagggctggggctgggggtgggaatggagtgaggaggtgcctaaatcaactgtaggccccaggaagaaatcaatgagaagactgggccaggatacaaaggagaggggaactatttcaggttctcaagagccaagccatggaaggaacctgtcttttcagagggaagcaaaaagggcagtgatgcaaagctcttgaagagatctctgctctattgtcatcctctttcttactgcataggtggggttatttcagagatctgctatttttg

SEQ ID NO: 205555 - DNA, 1000 bp, Homo Sapiens
gaaataataagaaatctaagaccaatttttcctatggtcttttactgacggttttctctctcctgacattactacagcatttgacatcaatagctatttcaggagacaaggtagacagagttcccaaagcaaagacaggaacagaacaagattgtggcttgtgtatcatcaaatctgacacctgaccaaaattcactagtgcaatgctttgtaaaaatatgcattcaggctctgaagatcatgggctgcttgaatttggtcatattacttaagctttctgagcctcaggtttcttacatttaaaatgaaatgctaagtaccacctttcacaatagttatgaaagttaaaatggaataaataatgagaaggaagacccaatgactacaacatgataggcatgcaacctacctttcctacttatgcagacaattactagcactgtttacctcataggatttttgtgaggctcaaataaggtgatgcttgtgaaagcccttaagtgaaatataattatccaactaagttttgccatactattcaagatacaagaatgaatatagtataatccttgtctttacgggaagctgattttctaaaaagggagctacaagtacataggtaagtataacacaggtaagcagaaagtgctagaagagtagccataatagttaacacaattgagcacttatgggccggacctagtctaggtgttttacctatattcttatttaatccttaaacaaactctatggaacaagtactattatatttctagataaccgaaactgaagtaagtacatgctggataggtaatctgcttaagttaatacaactagttagtggtggagctaaggatttaaatccaagaattctgactccatagctcatacaattaaaaatgcaggggtgtgtatttttaaaatggagaaagaacatgccaacaataacgaggtcactaacgtttactgagcactcacagtgtgccaggtcctatgctaa

SEQ ID NO: 205556 - DNA, 1000 bp, Homo Sapiens
cttgttaggctgtgcaattgtaaagactaatcatttctattagctttatgttggttttatattggtcatcaatagaatccaggaaatgcttatattatggggattttcaagattattacctgaaggaaaacgtgacagaaacagctctagtctccccttcccttacacttggagaacctgagttttgggggtgatggtaatgtgcccagctgaagaaaaccatttcccaaatccccaatttcccggtcccccttgcagccagtgcagtgaggagatacagctctggccaatgtgataaaggcataagttcctggggatggtgtcccttccagatgaaaaggccaaagctcatgaggagaaagccctttgccccttccccttcgttcctcttcctacctggaatgcagatatgagacctggggctcagcaatgctgaggtcagggggagacccacagcagggtgaaggcttcaagctgagagtggagcagagggaagaaatcacttgggtgcccgatggcaatactgagccctgggctgctcctctcggacatttcgtatatgagatgagcagtgtgccggagctcagtgaggtgagcttcttgtgattccagctaaatgggatcctaaatgatatgacacataaacatcatctagaacatgcagacttctgcgaatatctccatgacacatttgggaagacacagtgctcaggattttaagaatgtgggagctacacatagtggggaatgggagaataataaaatgatctccctcttctgcccccatggaggcagcaagtggccaagggagaattttgtgattagagatacttgcatgaatatcagtttattgcaggaaaaaagagtgacagaagagtctcttggttaatatacaggcaggaaaagtccaatgtgtttctataaaatcttcctcctgaagttcaggctggggtttggggctgggcatttgtcaaagggtattggcaagcacaaggaattc

SEQ ID NO: 205557 - DNA, 1000 bp, Homo Sapiens
ccacactcgcccacactcgcccacactcccccacactcgcccatactcgcccacactcccccacaccccacactcgcccacactcgcccacactcgcccacactcgcccacactcccccacactcgcccacactcccccacactcgcccacactcgcccacactcccccacactccctcacagtcgcccacactcccccacactcccccacactcccccacactcgcccacactcccccacgctcccccatactcgcccacgctcccccatactcgcccacgctcccccacgctcccccatactcccccacactcccccatactcccccaaactgttctcaggttaggaaaaggggcctctgtgacagccccactcagtggctctcactgtctgaggggtgtccttgcccaacccaggtgcgcacccatctgagatggccttgcatggacctggttgggaaggttcagctacagcaaccactggaacctgcccacacctagtgtctccactcacacgtggggctagatgttcctccctcccgtagtggcacagccagtggcagagggggcaagtcaccgctgcagttcccacttgagtctgaggggggatcaggcttagtgcccatgtatttcccaattacctggttccatctgggggcttcatggacaggagtggtgcttttccaggcctcttttccatatgccagctacaggcccaggtttccaagtttctggagcccctcttccagcctggcaagcatggcgtgttgtaggggaaggacatgaagcctacaggcagcagaacctgtctgggtatgttctctacccctggaggcccctggttgtttacctcttgggtgagagtcggcttaggatctcaacattcttgtaggacttcagaactgtgccgacaggggcccaggaaggagcagaggctggggctggcagctaaccagtgtagtgggagttgtagggctcagtttggtcttgcagggaattc

SEQ ID NO: 205558 - DNA, 1000 bp, Homo Sapiens
tccacctcagccccctgggtagctgggaccacaggtgtgtggccaccacacccggctagtctttcatcgtttgtagagatgggctctgactttgtcacccaggctggtctcgaactcctgtcttcaagctctcctccacctcggcctcccaaagtgctggcattacaggcgtgagccactgcacctggccaaaagtcactttctgtagtgtgggacatctttatgctgcgtcctcagctgtgcctgtggcctctcctcccacagctgcggccccagagcagcacgtgatggggactgtctgcaggtctggcaacagtcccacccacaccatccagcatgagagccgcccagccacccgcccgaaagtgcagtgatgaagcaggaggatgattttatatatcatcttaacacatttaaatgtaaaaggccccacaaggctactgccctcatactggacagggcagctcccaccagacagagcctgtcacctcctctggggacatcacagtggctacacagtcctacttggccgcactgtaggccgccttctctcctagcatcattctgatgtaaataaggaagtaacactatgtgtattggaatcaatgagaaaattgagttgttcagagagaacacaggtcacaggacaggaacctcatcaaaatcagtaaatccagactgactcaggaaagataaaccttctcagtctagaaaattaaacttcggcatagaggaggaacttatacggtgacccccatgatggcagatgaccccgtgacagcaaggaggatgccctctacattcctgcctcaccggcagcgcgtgacagagtgcttggaacctgtgacggcaaggatgccctctacattcctgcgtcaccggcagcgtgtgacggagtgctcagaacccgtgacggcaaggaggatgtcctctacattcctgcctcactggcagcacacagcagagtgctcggaaccccgtgacagcaaggaggatgtcc

SEQ ID NO: 205559 - DNA, 1000 bp, Homo Sapiens
gctttataacaatgtacatactctattgtatattatatttcacaattaaaataattttcaggtcaggtgtgatggctcatttataattccaacactttgggaggctgaggtgagcggatcacctgaggtcaggagtttgagaccagcctggctaatatggcgaaacccgtctctactaaaaatacaaaaattagccagtcatggtggcgtgtgcctgtaatcccagctacctgggaggctgaggcagaagaatcgctggaaccaagaggcggaggctgcagtgagctgagattgtgccactgcactccagcctgggtgacagagcaagactccatctcaaaaaaaaaaaaagttttttttttttttttaaattaagatatatggcagagctgaggcaagtttagtgcccttgaaaaaaatatcctagaaaataataaaaggaggtccctagtgcggcagaaagggcaccctctttggaacaagaaagaagtgggtttgatccctggcaccgctccttactataatgcatataatgccttgggcaagacatgaaacctttcagaatcttattaaccaacccataaaataagaaaaatagaaaaggtacccagaagggcagctgaaaagattgtctcttgcccggtgcctggcacggattaaaccttaacaagtggcatctgtgattgctggtgttgacatcatggccaatgtctcgggccactagatccaaagatggcaccatcagttcactccccccgacgcattgatgccacctccctactgagaggtagattttattgctcctccccttgaatctgagtgcactgaccaataaaatgcagcagaagcaaggtctaagaacttctgaggtcttgctgaagatcagactggagggcttcctgggacatcagccacccagacttggtccctggctcctccacagccaggttacagaggagacatggcaccctggctcgtggggtgctggaggctcaccgtc

SEQ ID NO: 205560 - DNA, 1000 bp, Homo Sapiens
ccatcaaattaaaaaattcacttaactgagtttaatttgctttcacttaggaagcagctgcctttcaagataataaaataaacagatacaataatatttggtcagctgtggcttttaatttaaatgtttgatttaatgttgtttagtttgctggattccaaaatattctctgcaagagaagcatacacattctaaagcatttcaaatgtttattatgatgtcctagaggtggctgtctttctgttgctgtgcataccctgagcagacttgacattgctttggaagcacatattttctgatagacatattactctcataatctaaaatttttcagaagtgacaaaagtggggttgaccattttcttcttcgctgtctccatgattttgctttttccaagatgtcatgtagttagaatcatacaatgtgttgtcttttcaggttggcttttttcacttagcaatatgcctgtaaggttccgccatgtcttttcttgccttgataattcatttctttttagctctgaatactattttgttgtctggatataaccacagttgaattatccatttacctcctgaaaaacatcctgcttgctaccatgttctggcaatatgaatcaagctgctataaacacttatgtgataagtcttgtgtggatataaatattcaacttatttgggtaaataccaaagagtgcaattactggatcatatggtcagagcatgctagttttgtaataaactgccaaactatcttccaatatggttgtataattttgcattctcaccagcaatgaacaagagttcctgtttctccacattctcaccagcatttcatattgtcaatgttttagacatcagctattctaatagatatgtagtggtatatcgttgttttaatttgaaattctctaatgatgtaagatgatgagcatgttttcatgtgcttattttccatctgtatataagctttgctgaggtatctgtttagattttttcc

SEQ ID NO: 205561 - DNA, 1000 bp, Homo Sapiens
tgcagtggcacgatcttggctcactgcaacctccgcctcccggttcaagcaattctcctgcctcagcttcctgagtagctgggactacaggcgtctgccactgcacctggctaattttttgtattttcagtagaaactgggtttcaccatgttagccaggatggtctcgatctcctgacctcgtgatcctcccgccttggcctcccaaagtgctaggattacaggcgtgagccaccacgcccggccagaagggtcactcttgagcacaggagttcaagactggcctgggcaacacagcaagactcccatctctataaaaattaaaataataaaaatgagccagctgtggtggatgcctacagtctcagctattcaggaggctgaggcaggaaaatcgcttgagcccaggagtttgaggttacagtgagctatgatcgtaccatggcacttcagcctgggcgacaaagtgcgaccctacatctaaaagaaataaataataataataaaataaataaataaaatcaccacgatgcttgttggattggatgatttcactgcagcttcaaatcctgagggttctctcaagcctggcagttctcactgagctaagaaactaaaagtcacatttattggcaaagaatggattgggcccatcagaagataatatgcaaatgatgagtgtgaatttatagtttcctctctatagctttgaacattgctgaatttagagaagaaactatgaatgttgctgccacctgccggccacatctctcaatatcaggttcctggaagtacctggtgggattcttctttcaattgagtcctctattaggctctggattggagaaagactgatttacagatttctccctttttgctgtcatcatcccataatctgccacaaaaccaaattgctaaaagcagggagctgtggcattcaattgtctgcatttgaattctgtctttacctcgggtaaatcagatacctgttctatacctt

SEQ ID NO: 205562 - DNA, 1000 bp, Homo Sapiens
gctcctccccaccataggatatttctacttctttgacagagtaacctaaacccctgggggggctgggagccacagattcctgtcattccaaagtgggggtgggggcatggctaaaaaaaacgtgaccacgctgttcctggtgtgtaggtatggatttagaaatcggtccactcagaacgcaggggctttcaaaagtttcctctaggaagcatctgtcagtataccctcttaatgtttgacagttctaatcacaattatatttagaatttgagaaacccccctgtgtgtctaatggctgccagcgtgatgccagagaaccctggcaggtggcctgcagtaagcagaaggcccacaccttctgcagagccaggagcagtgcccgagtcccccggtctgtgtctatcctttcacccacatggtcactgtggagatgaccatctgaccagacttcggagcccccaggcagaagaaaggctgcagggggcctgggaaggtggcctgggagtaggtgtgcaggtgggacccatcgcttacactgtagaaggacacttccccggcttcgaagtccaggaagatgcccatgtggctgggaggctccatcagcatgaccggggttagggcagagaaggtggataagtacttggtccccttggacagctgcaccacccagaagccgttttcggggcacttggggaccctgtctttccggctcacgttgtccctgcacacacccagggcccacaacgcgtccccggtgatgttcatgcccacctcccagtagtgcctcccagaggagaaggccgtctggcccacagcacaggggtaagccacaaatcggtccttgctgcagaacccactgccctccggcgaagagccgaggtagcgcctctggcggctctcatacaggaggaggtaggggtacgcggaggtggcatcaggcaccacatcctctgtagatgggcgtggtggtggagagatggggagaggtgtggggcattca

SEQ ID NO: 205563 - DNA, 1000 bp, Homo Sapiens
gtaagttttctttatatcctatagcttcagtctaaaacatcctggaagtcagatattttattttcatataatataaagaatagcctatattaaggtatctgtttattgtacactaacctgactaataatacactgaagtctaccaaattgtgatttttttttcaagaaaaatgtttaggtatcttggtgactagaaaagattaatgcaatttctagttccccaaaatgtatgctgctataatcaaagaataactgacatagtaagaaaattttattaaacaatttatcataacattaaaacttctttttttttaaacagagtcttactctgtcacttgggcttgagtgcagtggtgtgatctcagctcactgcaacctccgcctcccaggttcaagtgattctcctgcctcagcttcccgaatacctgggattacaggcacccgccactgtgcccggctaattttcgtatttttagtagagacggggtttcaccatcttggccaggctggtctcgaatacctgacctcgtgatctacctgccttagcctcccaaagtgctgtgattacaggcatgagccactgcgcccagacattttttttttgtatttttagtagagatggggtttcaccatgttggccagactggtctcgaactcctgaccttgtgattcgcctgcctcagcctcccaaagtgctaggactacaggcgtgagccaccgcacccagcctaaaaaatttttttaaacttgatataatctctcccaattttaggaacacagaatataaagtaaaatctcagttttacagaatgaatacttgaaaaataattccaataaggtatctttaagttgtacttcccaagaagtaatcacataaaataatgcaaatcttggcttaagattttaatagaaagcaatccagcctcatactgttaatgacagatcaagtgaataattagctatgtcagtattttctctcatttccttgaaaggttgcagc

SEQ ID NO: 205564 - DNA, 1000 bp, Homo Sapiens
ctgtaactgaggacattctcatggctccttccattagagttgtgctcccatcactttctctttgcccaaaaggaaatctctggctcatatttcagtctctacagtacctcttctcaccttgattttactctttcaactattgtttttattatgcactttctactccatgtcctataaaaactatggtttaaatcatttttgtaaaaatactaacccctatctttggtagaaatagtctcacatcatccttccttccttctctcattaactgaaaaatgtctccatgatactatgaattgtggttccatatactgactctaaaaaagactgcggggagttgctacaaagaaaggacaatgagaaagattgaggtttaatatcctaggactcagatatcttctaataataattgaaccttcaattattattgtattcattcaattcaactattttatggttctcagttctccaaggccaagaagatttccaggttggcatcctttaatcaggaatagggactaccacatgcagtgcaatgaacagccatgtcgagaaaagaacaaattgtgtccaaatttaaataacaaaatgagatacagtggtccatctaaattccaaaggtatttttaatgccagaaaaaacttcagtaacaaatgatgaaataattttttagaaaaattatatggaaatagctttttaaatttatattcaacaaaaatttattgagccctttttacttagccactggggctgtagacatggcccttatcctcatggagcatacagtctgctgggaaaaccagacattatacaagcagagaaagtacagacactgttaggaagaatagaggacattgtggggacatatagctgggagccttaaataagaggggtccctgagaaaatgatgtttgatctgacatcaaaccttgagaaataatattttcttgtactgataatttttattgacacatagttgcagtttctcatgttatagaa

SEQ ID NO: 205565 - DNA, 1000 bp, Homo Sapiens
aattagagtttgtaaaattttgtttcttgtccctttcttgctacttttcctttctaggaatgtagatgggacagggggcctaactcagcccatggctcaagacaggtagtccttggtggcaggtggagttgacagccaatgaatccttcaagtgtccagcccacccagttacaactctgcgtaaaaacaagcagaggtgcacaaactcttttccatgtagtctggtggagagatgatgtggagccatttcccatgcatcccatccagggggtttacaatcatctagatccttgtcccttcttccccaacttctgccagtataaaaccaggggctttcctgtccttagcttgcagtaccaaatgccttggtgtggtgtcaagaacagataaatttaggagatacttttaggatttttgggtcaggctcaatggttcattcctgtaatcccagcactttgggaggccgaggcaggaggatcccttgagcccagcagtttgagaccagtctgggcaacatagcaagaccccatctctacaaataataagaaaattagcagggcatgatggtgtgtatgtgcttgggatcccagttacatgagaggctgaggtgggaggactgcttaagcccaggcagttgaggctgcagtgaaccatgatagtgccactgtactccagcctgggcaacagaatgagaccctgtcttttaaaaaaaaaattaggattcttagtgagctttagaaataaaatctgggctgggcactgtggcttatgcctgtaatcccagcactttgggaagctgaggtgggaggatcacttaaggccgggagtttgagaccagcctgggcaacaaagcgagacacctgtctcaaaaataataaaataataaataaaagtaaatacattttttaaaggaaataaaatttgactagggatgcaaggaataactaggagacaaaaggtccaggttccagtccatcttgaagtcatcaaggctccccag

SEQ ID NO: 205566 - DNA, 1000 bp, Homo Sapiens
tctgtgctatctctgaccaagtccaggacataatcgttgtccacttggcctattatatcgtaactaatttgtttatatctatggtattgcttaatttaaattaatatccagaataagagtctatgtaattctcttgcttcaaatctttcaatgatttcacattgcctgcagaatgaagcacaaacttcttcaaaaggtatataaaatgtcccattactattctatgcccacaactgcagtctcatctcctggtttctattacatcaatattttacgtgagctcgataaccaacacaacttgttatttcataacctcgtgaagatcacttttgtgtgtgtgatgtcttttccattgttcctcactagtttacttctactggaaacagggcaagaatggcagagaaggcaaaggaggaaaagaaataaacatttctaataagtatctaatgtgtgtcaaacactgtattaggtgtcgtacatgttatttaatgtaatattaattcaacattctaagttttgtttgtcttatggttaaggaaactatatgctgtaacttgccaatgtctcacatctgaaaagagatgaatctgaacaactgtccttctactataaggtcaattcatccagaaatatttccctacacccaacccttctcctactctcacagacattaggcacttagagtacacctctattccagcatttactatattctattgagataagcttcataccagaatatctttgtctctattacaagcagcctgagggtcaggcatatctttggtttcatttaagaatataaaatgtcatagatagaaaacagaaaacagtgctgtggtttgaatatatgccccaatactcatgtgttggaaacttaatccctaaaacaaaagtgttaagaagtgaaaacgttcagaggtgaataggtcgggagggctctgctttcatgaatcgattaaagccattatcatgggagtgggtttgttattacaagagt

SEQ ID NO: 205567 - DNA, 1000 bp, Homo Sapiens
tacctctatagatctctctctcaaactgcagccacagataaggaaaaataactccttcaacaactcagagataattttatatccatcagtagagaacaaagcctcattcagatatggaagttaggcagttagactaactcaataggtaaaaaaatttcctttaacactggcttcaaatttttgtcttcagtttaaaacatccaaaatactagaatataaacttccaaggtcattgtcattttttactagttgaaactaactaaaatgaaaattgccaaactacttttaaaaaagggtatttaatgggagttttgacatttatatacacttctaattcttttttttttttgagatggagtctcactctgtagcccaggctggactgcagtggtgccatctcggctcactgcaacctccacctcccaggttcaagcaattctcccacctcagcctcctgagtagctgggattacaggcgcacgccaccacgcccggctaatttttctatttttagtaggatggggtttcaccatgttggtcaggctggtctcaaacccctgacctcataatccacccacctcgtcctcccaaagtgctgggattacaggcatgagccacggcactggccttttatacacttctaattctttttttaaggcagggtctcacactgttgcccaggctagagtgtagtggcaggaacatggcttcctgcagactcaacttcctgggctcaggtactcccacctcagcctcctgggtagttgggactacagatgcatgccaccacatctggctaattttttttctgtagagatggggttttgccatgttgcctagcctggtctcaaactcctgggctcaagagatccgcccacctcagcctcccaaagtggagggattacaggcctgggccatagtgcctggccacacttctaagtcttaataattgaagaattgggcaaatttcctgcatttcttcattgttttgtaatgaattc

SEQ ID NO: 205568 - DNA, 1000 bp, Homo Sapiens
cctcggcctcccaaagtgctgggattacagatgtgagccaccgtgctcggccatgcttaggtataaattcttctagtattaatcctgcctggtgttctctgagcttcttggatctatggtttgatgtctgttgttaattttgaaaaattcttgccattattatttcaaatatttcttgtgatcctgtctctctttgttctctttatttatattcttactacatattaatcattacatattaatgatattaatcatttcttatttcttgaattctgtcctattaaaaatttttttccttgaattttagtcttcgaggtttcttctccttcctctctctctctctctctttctctctctctctttctctctccttccttccttccttctttgtttgtttgtttctttctttcttttgacaaggtgtcactctgtcacccaggttggagtgcagaggcacaatctctgctcactgcaacctctgccttctgggttcaagtgattcctgtgcctcagcctcctgagtagctgggattacaggcatacgccaccacacctggctaatttttgtatttttagtagagacaacatggtttcaccatgttggccaggctggtctcaaactcctggcctcaactgatccactcgccatggtctcccaaagtgctgggattataggtgtgaaccaccgtgcctggcctaatttttgaggatattgacttatcttgaagctcactgattctctccttggccttatctactctattgatgtgcccgtcaaaggccttcttcatttctgttacagaatttttgatttctagcatttactttagattgttagattgttagagctctagtctttctgcttgataacatgatttttttctattttttattttatttatttatttatttgttttttgagacagagtcttgctctgtcgcccaggctggagtgcagtggcacaatcttggctcactgaaagctccgcctcctgaattc

SEQ ID NO: 205569 - DNA, 1000 bp, Homo Sapiens
cgcacacctgtagtcccaactactcaggaggctgaggtaggggaatcgtttgaacccaagaggcggaggttgcagtgagccaagatcatgccactatactccagcctggcaacagagcgagactcaatctcaaaaaaaaaaaaaaaaaaaaaaaaaaaagacgtgggttccaaacattttctagaagacctttgattttgttttttttgaggtggagtctcactctgtaacccaggctggagcgcagtggtgcagtctcggctcattgcaacttctgcctcgtgggttcaagcgattctcctgccttggcctcctgagtagctgaaattacaggcaggcgccaccacgcccggctaatttttgtacttttagtagagaccaggtttcaccagatcagggccaggtgcggtggctcaatgcctgtaatcccagcactttgggaggctgaggcaggcggatcacctgaagccaggagttcgagaccagcctggtcaacatggtgaaacccagtctgatcacgccttacaaaaaattacctggacctggtggcacacgcctgtaatcccagctactcaggaggctgaggcatgagaatggctggaatccagccggcgtaggttgcagtgagccgagattacaccactgcactccagcctgggcgacaaagcaagactctgtctcaaaaataaataaataaaactgtctgaacttattaattcaatgcaaacacaactatacccacatactttgagggtctggagatctattcaagccatgaacagtgctaactccagctatgcactcctgccaagatgcttaaatgttatccacttattgaacaatgaccacttgcgtcaaatacaaattcccatactccctcagggtagaaaagtagaactgctctatttcaatccttttttaatcaataccccattaccagttgataacacttcaccactggtatgtctgatgaaatctacaacctatacttcctttactg

SEQ ID NO: 205570 - DNA, 1000 bp, Homo Sapiens
ttttctccttccacataccccaggcttgtgagtagcagctgagcaagtaccatccaccaccttgcagtcactccaggcacagtcattggaagggcggccacgtggcttgcacagacagtgatacttaaaatacagacatcaaagctgttggtttgttgtttttaccttcttgtctaacagtatgcagggtcacctacctcctgctggcccatcacagctagcaggaatgaagaacaagtcctcccatgtgaatgagacatcagagcaatttaccatggcactctgtaaacattgctgggacttttctcaaggagagttgtgtttagccattactgagactgagaaagatatttttctgacattttgcaaaatgatactgtgatttgggtgggggtgggggttggcacagagacattatttcctgtgttttggaaaaataagatattgtctgtaaacagacaagtgtttgagctgttgaccaaactctaccataaatgactgtagtaccaacatgctatagttgggactgctttggtgaaagggctgctcagttgatttcatggtcagcttacctctagcttcaatttgtgtgtgtgtgtgtgtgtgtgtgtgtgtgtgtgtgtgtgtgtaaaataaaactttatttgcaaaaacaggctacttgcctgagtagcattagtatatagtatatatagcgtatatatagcattgaatatagttacggcttgtttaaatctcagagttgactttgtagcatagattaaaggaaagcacttaaatttgcttatgagtagatattattccatgtcagcaaaggagtttatttaacatgtctgtttcattctgtcatcatctggttttatcctctctcttataattcagtcgctattatgaagggctctgtgtgtcctgctcatttgctagagagagaagaaaggcaaaaatcaaattttttgtagagagagaaggtctcccctttcagttgaatacagttgaattc

SEQ ID NO: 205571 - DNA, 1000 bp, Homo Sapiens
acccactctttttttttttttttttgagacggaggcttgctttgtcgccaggctggagtgcagtggtgtgatctcggctcactgcaacctctgcctcctgggttcaagtgattcttgtgcctcagcctcctgagtagctgggattacaggcatgcgccaccatacccagctaatttttgcatttttagaagagatggggtttcaccatgttggccaggatggtctcgatctcctgacctcaggttatctgcccaccttggcctcccaaagtgctggaattacaggcgtgagccactgcacctggccacaagcccactcttactggtccctataacccacaaggaagagaaaggaagctaccccatcgcttgatgttaggtaagtgtgggaaggcttttattcaagctgctagatggttcctgaccgattaagttgaccccagttgccccttttatctgataccctgaaccctcttcttgacctccttctctacttaggctctcaccaaagcatgactgctgtggaactcagactctcccagagattagaaaggaaacttgcataggaagtgctttaactggccaaggcggaagcattttttttttcagagctctccaaactagacagtccaaggccccgaggagaaattttcttttggtggggctgagttggggcttggatgggggtaggaggccatgcagaggttttgcatagcaatgcttctcacagtgctggctgtgagacgggagatagacctggtctggttttaagcagatacccttttcagagctgtaatttttccagtgccttgcagaacttaaacatttgctgagatagttttaaaccctattctttcttctctttctctgtgcatgcatgtgtgtgcatgtgtgtgtgtgtgtgtgggcatgtgcacacaaagtcatggaggccgttgaaagactttctactttcttagcttgcttagaggacgtgaagtggggaagcgaacatacttgct

SEQ ID NO: 205572 - DNA, 1000 bp, Homo Sapiens
gagacagcatctcactctgttgcccaggctggattgcaatggcgtgatcatatcttactgcagccttgacctcctgggctcaagtgatcctcccactttagcctcctcagtagctgggaccacagttagttgcatgccaccatgcccaactaattttttaaaaacattttttgtagagatgggggtctcactgtgttacccagactagtctcaaactcctagcatcaagcgattctcctacctcagctacccagagttggggttacaggcatgagccactgcacccagccccaatgtttttattaatgttcatgttctgtactcagcttctgtctttgcccttgcatctcatggtgagtctctttctaagctctagcacttcctccagcagtagactgctgttgtttattactccatacttgctagcctggtgataggggccagggaaaggggattctttgttttcatagtctagtctctgccttaggcagaccatgtgtccctgggtctcctgggtagcactttcttagtgatcctgtccccctcctagctgaaggaaactcttaatggtctgggcccaggatggttttctgtccatcccttagtagtagagagcttttccttttccctttctccagcttcagtgagttgtcacctgtgttctgaaggcaacttgtttttgtctaagtggctttaaggctctttcctctaggggcttttttctagagaagagcctgtaagtgggtgtgaactccccttgcgtctattgcttccagggattctgtactcttgtgctgatccatacttggactttagcaatttatttaaaattttatttgaattcttacccatctgtgtggtgtggtgtgcagcattgtcttcccctcatgctttgctactgttgagccagtgctgatgtctcttcgtggaagcacctggctttctttagatttcatccaggctacttggtctccctacaactcagttctcagatgaattc

SEQ ID NO: 205573 - DNA, 1000 bp, Homo Sapiens
tacccattatattcccatctgctttcaaaatctaactggaggttttttcttgacactgtaggggttcattagaccagtcattaaaggatacactgaagaaattttccatcgagaaacgctttgcctactggtcagggtatgtcaagtcattggcagttcacgtggccgaaacagaaggcagcagctgcacctccttgttagagtaccagatgctggtgtccgcctggaggatgcttctcatcattgccaccactcatgtaagacccttttggggagagttttcactttggtaccttagcaatgatgtgttgacatgagcctagcagatacagctccttgtgcggaagaattaatcagggtttatccctgagagctaaactgtaataggttctatgctgagagattgggactgtggggtatttgagggtgttgggtccaggagaccattaagaggaatgcagagaagtgatttgaaatcctttcagagttcctaaagcctcctgtacctcccttaggccttggctgggtcttagctgctccctggctgcatctgcctcttgtgcaaaggcataactgtcttctcgtgctgtgtaccttgtagatgctaggtcaataaatacttgttgactagtcagcagggagctgtgacagctgcagcagcaccctctctaaaaagcagtttgtcattggttctagaaactgcatttcctggtcttagaaaaagaacagaggccattgtctctgtactctgtctactgggagttggttttgagagagagagataacatctggaagaaatgcattgttcttggcttttttgtggtttgactccgtcacgctgtatcataaggacttggtattgaagtgttctttcttggggtatccagattaatttttttttttttttcttgagacggagtcttgctccgtcacccaggctggaatgcagtggtgcgatcttggcttactgcaacctccgccttccgggttcaaggaattc

SEQ ID NO: 205574 - DNA, 1000 bp, Homo Sapiens
tcaagcaattcttttgcttcagcctcccacatagctgggattacaggtgcctgccaccacacctggctaatttgtgtatatttaatagagatggggtttcaccatgttggccaggctggtcttgaactcctgacctcaagtgatttgcccaccttggccttccaaagtgctgggattacaggccgtgagccaccatgccaggcctttttaaaatttttttttattttttgagaccaggtctggctttgttgcccaggctgaagtacagtggcacgatcttggctcactgcaacctccacctcctaggctcaagcaatcctctcacctcatcctcccaaatatctgggactacagatgcatgccaccatgcctagctaattctttacatttttttgtacagatgggtatcggggaacctgccccgatagtcgcgtacattcttttctattttccttaagcgtcagccagcttgagaaataaagggacagggtacaaaagagagaaattttaaagctgggcatccgggggagacatcacatgtcggtaggttccatgatgccccacaagccgcaaaaaccagcaagtttttattagggattttcaaaagaggagggagtgtgcgaataggtgtgggtcagagacatcaagtacttcacaaggtaatagaatatcacaaggcaaatggaggcagggcgagatcataggactacaggaccagggcgaaattaaaattgctaatgaagtttcgggcaccattgtcattgataacatcttatcaggagacaaggttttgagagcaaccggtctgaccaaaatttattaggcaggaatttcctcttcctaataagcctgggagcgctatgggagactggggtgtatttcacccctacagtctacagaccataaaagatggccacacccaggggggccatctatagacctatacccccaggcgcgtattctctttcccagggatgttccttgctgagaaaaagaattc

SEQ ID NO: 205575 - DNA, 1000 bp, Homo Sapiens
tcatatttatttttacagctcatcactgcatttcatgataagatttaaatattaaatagaaagaaactagctagcctaataaaatctgaacacagttaatatctgtcataagactagttttaatggaattctctattgaaactactattttaaagggttactagaaatgatttggttggtcattttgggaaatgtcccttaaacttggggagacatcctctactatgtataacaatatgctattatctgtcttctcagttgcactatttctaagagtacttaaattaatcacatgcttttccctacaattatacctaagctgagtatatcttcttctgtgataaccagctttgattgaaatgtactcatattaggtaaacattaggcaatgataggaggaaagcaaaactaattctttcaaaatgtcaacaaaatttagaaatatccttcccgatggcactaaaaccctgagaggtatttgcttttattcatactcacacaactttagcatttaaaaactatgagtactaaactgtgaccttcaggatttatgttagatggcagaaagaaaatttgggtattagtctaccatataaatgaacttctttaaaaccaaggttcagaactgagaatcatattggttcctcttcaagttagttcaagttgcccacttcagagatccacaaaatctgacattatttccagaaaccccaaactttggtataagtgaccactgctcaaatatgtgatcacatgatcacacagcattcctgtgagttcctttttgtctgataattatcctaattagctctacagagctatcctgcaatccaggttgaaattcaaactctcagttactactacagatttctgaactaggccaagttttaaccaaaaactataggtaatggtgaattactaattagccacaatgcatcaggatttagaaatattttttcttttataaaataacttggtatttttctgataatcttccaat

SEQ ID NO: 205576 - DNA, 1000 bp, Homo Sapiens
agggtcatgactcattgtgctggatttgctgggttttgactcagagggctaagagttgtaggattatgccctagaaagctagattgattgggttgtgacccatggggctgggattcatagggttgtgacccaaatggctgcacttgtagatttgtgacccagaaggctacaattcatagggttgtgacacagagggctaagagttgtagggttatgacgcatagagttagatttgtatggctttagcccatggggctgggattcataggggtgtcacccaaagggctgaattcgtaggattgtgactcatagggctggatttgctgagttttgactcagagggctaagagttgcaggattatgccctagaaagctagattgattgggttgtgacccatggggctgggatatatagggttgtgacccaaatggctgcacttgtagatttgtgacccagaaggctacaattcatagggttgtgacacagagggctaagagttgtagggttatgatgcatagagttagatttgtatggctttggtccatggggctgggattcatagggttgtcacccaaagggctgaattcatagggttgtgactcatagggctggatttgctgagttttgactcagagggctaagagttgcaggattatgccctagaaagctagattgattgggttgtgacccatggggctgggatatatagggttgtgacccaaatggctggacttgtagatttgtgacccagaaggctacaattcatagggttgtgacacagagggctaagagttgtagggttatgacgcatagagttagatttgtatggctttggcccatggggctgggattcatagggttgtcacccaaagggctgaattcgtagggttgtgactcatagggctggatttgctgagttgtgactcagaggacttagaggtgtagggtcatgccccgttgagctagattcatagggttgtgatccaagggactgaattc

SEQ ID NO: 205577 - DNA, 1000 bp, Homo Sapiens
ggctaatctcttctgcaatatcgtaatggccttgaagcaatctaacatctgtgttcttcctttcctcatctatgaaattactttcaaataaccaaattaaacaggatcttccatttgggctggaatggtaagagcggcagaggacagcatgttcccatttataatagcaggcacggaaattcaaccagactttgctgatctaagagatgctcttggaagaccccattacttaaatgatctagaaaatgtcctcccgagtcaaggtatgtcttaaggaagaaaaacgtacaaacaaaacccagaaaactgttttaagagtcttattctgatgagactctatttgcatttgccaaatagctgtgattttctggaatgcaggacaagctgataaattaggcaggatgaagacactttttttctcaagggcaggaacacagataagagcacctaagtgtaacactttgttctgggacacagcccaactccagtccttctgtagaatatctgtattcagtcagaggatatcaaagatggatagagccttgggaattatctagcacaaccttatccattttacagctggggaaaccagagctgggagggcaacttccaaattggtagtgatccatcgtacacaattgaagtcatcattggtagacacaactgaggtcctagtagaaagaacagcctcacaagacagtgatttgaactggggtcttgtgccttctttggccatgactggaggtgggattggtggaagtgggtgatgggtgaggctttactgaccgatttgaaattttgcatgtgtgtacggaaaggagttgactcaacaggcctggcgatatggtttgcatctgtgttcccacccaaatctcatgtcaaattgtaatctctagtgttggaggtagaggagctggtgggaggtgatgggataaagggggcagagttctcatgaatggtgtaacgccatcccccttgctactgtatagtgagtgaattc

SEQ ID NO: 205578 - DNA, 1000 bp, Homo Sapiens
ctctcctgtcacttttaaaaaagttactcctcatatctattggctgaggagatggaagtgtttctggggatttgagatgctaagatgatgatgttttaggcccacggccatggcacctacttttgttctattcagcctactgagaggtgacagtgtgctggcagccctcacagccctccctcgctctcagcgcttcctctgcctgggctcccactttggcggcacttgaggagcccttcaacccgctgctgcactgtgggagccccttcctgcgctggctgaggcaggagctggctccctcagcttgcggggaggtgtggaggagaggcgcgggcaggaacagcagcagtgtgacttccgggtgggcgtgggctcggtgggctgcacactcagagcggccagctggctccgccggcccggggcagtgaggggcttagcacctgggccagcagctgctgtgcttgacttctcgccgggccttagctgcctccctgtggggcagggctcgggacctgcagcccgccatgcctgagcctccccccgccatgggctcctgcactgccggagcctccccgacgagcgccgccccctgctccatggcacccagtcccatcgaccacccaagggctgaggagtgcgagtgcatggcgtgggactggcaggcagctccacctgcggccccggtgcaggatccacggggtgaagccagctgggctcctgagtctggcgaggacttggagaacctttatgtctagctaagggattgtaaatacaccaattggcactctgtatctagctcaaggtttgttaaacacaccaatcagcaccctgtgtctagctcagggtttgtgaatgcaccaatggacactctgtatctagctactctggtggggacttggagaacctttatgtctagctaagggattgtaaatacaccaattggcactctgtatctagctcaaggtttttaaacacaccaatcagcaccccgtgtctagct

SEQ ID NO: 205579 - DNA, 1000 bp, Homo Sapiens
gagctttctctggtcttgcccttttcctagggttagagtccaaaagccaagttgacatgccaacttggagctcatgcctgtgtaggggaggaaaataatttctctctacttttcatagtttttagttgggacagacccctgtaacaaaagacagattaacaagagaaaaacagaagtttaataacaagtataccctcatgcatagatgggaggtactcagaaaaatgaatgaatctcaaagaggtggcttggaattcaggcttaaaaactattgtctatggaaactaagaaacaagggcatggggaaggctggttatgggaagaaaaagcacagtaaacaaagagtaatgtttgtatttgcagatctgagtcagcgccttctccattgataagagtctttagtgatttgagtcctggtacagagagggagacactcttacagatggagatttcaccttttatagatataaatttcccttacacaaaggtagctgccactttgttttcagagcatcttttgtgtctgtagcttctcaaaataataagctcaaaataagtcttaagccaaagaggcatactttggagtagcattttctggtctcctacacctctgccttctagacaatgctccaattcctggaacattggaaagccccatccaaatgaccctgtgttagtctgagttctccagagaaacagaaccaataggttacacacccacatatttaaatgtatatatattatataagaagcatttattataaacactttattataaggaagtggctcacgtagttatagaggttgagatatcctaagatcttcagttggcaaagtggagacccaggagatccaatggtatagttccagtttgagtctgaaggtctgaaaatgaggagatccagtggtgtacattccatccaagtccaagtctaaatccataggtgggagaagaccaacttcccagctagaaggcagtcagacagaggagagagaattc

SEQ ID NO: 205580 - DNA, 1000 bp, Homo Sapiens
ctcatgcctataatcccaggactttgggaggccgaggtgggcggatcacctgaggtcaggagttcaagaccagcctggccaacatggtgaaatactgtctgtactaaaaatacaaaaattagccgggtatggtcacagacacctgtaatctcagctactagagaggctaaggcaggagaatcacttgaacccgggaagtggaggttgcagtctctactaaaaatacaaaaattaaccaggcgtggtggcatatgcctgtagtctcagcaactcggaaggctgaggcaggagaattgcttgaacccgggaggcagagattgcagtgagccgagatcatgccactgcactccagcctgggcatcagagtgagactctgtctcaaaaaaaaaaaaaaggaaagaaaatcaaaggcagagtctattcatcagtttgtgaagtgtttgtcttcaggattacagtggtccctccttcttcatggtagacgtggtccataaagtcggagcaaacgctgagttaacaaatacaaaccgtcctgcaaaaagtccacacttagacgcctgtagcttttgtacctctggtccccaaatttttcacagctgatccatacataaccttattttacgtgtgtttctgtttaaaaagccgtatggagtcgatattgtggacgcagtcacattgaactcacagccaacggcattataattcatgcctgggcaaagcgtctctaacacacctattttctccataagacgcgctgcagtcttcatggccttagggatgctaggcagctttgcagcttctggggcttttgaaacagaaatcgccaacaaaatgcacaaaaatgtaaaaatacctggcactcagtatacccccaaaaggatgagctgatcccggaaggcccccatttttcaccactgtgtatctgtttttgaacgtttgcaaaatcatcatgagtcttggttttggggttccaaataaatgttagtgtgtggaggaattc

SEQ ID NO: 205581 - DNA, 1000 bp, Homo Sapiens
tgtaaatattttagattcttcatggtaaatgagtttactgatcttcttgagcaagcagatcacttgactttaaatagtaattttttccttctggggttatctggggagatctggagacattttcaacagtcatgactgggaagagggtgctactggtgtctagttggtagagaccagtgatgctaagcacgctttgatgtgcacaacgcctctcaacaacacagaattgtctggcctaggatgtccatagagtggaggttgacaaaccctgctttagaggtgcctgattatcatgtactgctttgcagggtacagcactaatagccatcactatgctaaaatattaatttgcttaggaataagttgctaacatatagtccaacacatctaattactttccaatggaaatggctatacacttacaggttgtgctatattgttttctgccaactctttttattcagtcctgtaatcattttttcctaaaagtgttttaatgagttctactaatctattagttcttacactttaattaataatttaaacttggcaatattactgtatcgttagagcaaatattatgtaactgccctaaccctactcccagactttactttttttgttgttgtccaaaataagtccatttataagcccttttgtcttatcaggtgccagagaagcaatctctgaagctcaaattctcgtgcaaatgatttattgagaaagtgctcctggagaaacaagcaaagtagggagctggaaaagaacagagagtggggaagtagccaagcaaggactatggagggttccttcagcctctcaggcaaggggacctctgaagtgtatgttacacatcagaagtgtccctttgcaatacagtacagaggcactgagctttcatctggactcacaggtcagtcattgactaagagcctccaccgtggacataaactccctgtactcctgctctctgtgcatgtaggtaaagatgttccagtta

SEQ ID NO: 205582 - DNA, 1000 bp, Homo Sapiens
attactaagacaaactgagagggtgctgtcttgtttagttgacctggaactgtcaccttttctttgatattgtaaaacttgagctcttcgttgacaacagtagccttgaccgagcacaatggctcacgcctgtaatcccagcactttgggaggccgaggcgggcaaatcacttgaggtcaggagttcgagaccagcctggccaacatggtgaaaccctgtctctactaaaaacacaaaaattaactgggcatggtggcacacgcctttaatcccagctactcaagaggctgaggcaggagaatcgctttgaacctgggaggcagaggttgcagtgtgctgagatcataccactgcattccagcctgggcgacagagcaagactccacctcaaaaaaaaaaaagaagaaaagaaaatagtagtctcagccaggcgtgatggctcacacctgtaatcccagcactttgggaggccaaggtgggtagatcacctgaggtcaggagttcgagaccagcctggcctacgtggcaaaacctcatctctaataaaaatacaaaaattagctgggcgtggtggcatgcacctgtcatcccagctatttgggaggctgagacaggagaagtcgcttgaacctgggaggcagagattgcggtgagctaagatcgcacgacttcactccagcctgggcaaaagagggaaactctatctcaaaaaaaaaaaaaagaaaaagtagtctctaagacactgggcaaacctgaaaagaatagagcagtcctcactttcctgtagtcattctgctaaatgcagcatgtctcttttgaaagaatttgagagctttttttctaatacgaattatatatttgggatttctttttctgatttttttcttgcaggtggatgttcccaaggccttgattattgttgcagttcaatgtggctgtgatgggacatttctgttgacccagtcaggcaaagtgctggcctgtggactcaatgaattc

SEQ ID NO: 205583 - DNA, 1000 bp, Homo Sapiens
atgtattatattctttcttttttatacttactgtgcatatttattataaggcatacaacatgatgttatgggatatgcatagatagtaaaaaaaaaatgccctttctttttcggttgttgtttttgtagcaagagcagctaaaatctattcatttagcctgataccatatgcagtacaattttattatccatagttctcatcctacacattagatctgtatacttgttcatcctacatatctgcttcttcatatcctttgacttgcacctccctcttcccccaccacctcacctggtaaccactgtttggttctctgtctctgtatatttaaacaattttttaaaatgtcacatataagtgagataatgtgaaaaatttctttctgtgtctggtttatttcacctagcataatgttctccaagctcaaccgtgttgtggcaaagtgcaagctctcattatttcaagctgagtaacagtccattgtatgcatgtagtacagtttctttatccatttgccagtcaacaggaacttaggttgtttttatatcttagttattgtgaataatgatacaatgaacatgggagtacatatatctttatgagattgtaatttcatttcctttgggtatatacccagaaaagatattgctgagtcatatgagaattctatttttcgtttatttagaaacttctatattgttttccacattggcgacaccagtctacatttccactgacagcattacgagagttctttttcttcacaatgtctctaacatttattatcttttgactttttgtcaatagccttcttaatgggtatgaggtgatattccatagtggttttgatttgtattttcttgatggttaatgatgttaagcacctttttatatacctgttgtccatttttaagtcttctttggagaaatgtctattcaggttttttgtctgtattttaattgggttatgtttttcccactattgagttgtatgaattc

SEQ ID NO: 205584 - DNA, 1000 bp, Homo Sapiens
gatggccattacagtgagaaagagagtctttacgatgaaccaaattagctgggaccctgaccttggactcttggcctccagagctctgagaacaaacatttttgttgtttacccgccccctgccccatgcctgtggcactttgttacagcagcctaaataaaacaactaaaatatgtgagatgatggcaaggtgggcagaaggaaagttcaggaactatggacacaagactgtgggccctatgctacggtcaaagccaacgggttctctgaatacccaaaagctggttctctctctggctgcattctacaatcaccttaggagcttcaaacaacaccaattcctacgtgccctccagactgaatgatcagaacctgaaggtacagcccaggcaccggcactttaaaagagctccccagaagattctaatgtttagcgagaattgacagtactgtcccagtgggtcaatatctccctagcttaagacataccaggcgggatgtggtggctcacgcctgtaatcccagtgctttgggagaccaaggtgggcggatcacttcaggccaggagttcaagaccagcctggccaacatgatgaaaccctgtctcgactaaaagtacaggctgggtgcggtggttcacgccagtaatcccagcactttggaaggccgaagcgggcagatcacctgaggtcagatgtttgtgaccagcctggccaacatggcgaaaccccgtctctactaaaaatacaaaaaacaattagccgggcgtggtggtgggcgcctacactcccagctactcaggaggctgaggcaggagaatggcgtgaacccaggaggcggtgcttgcagcgagccgatatcgcgccatggcactccagcttgggcaacagagcgagactccgtctcaaaaaaaaaacaaaaaacaaaaaacaaactagccgcgtgtggtggcgcgtgcctgtaattccagctgctggagagggtgaggcatgagaattc

SEQ ID NO: 205585 - DNA, 1000 bp, Homo Sapiens
tacagaactctctaccccaaatcaacagaatatacattcttctcagcaccacactgcaattattccaaaactgaccacatagttggaagtgaagcactcctcagcaaatgtaaaagaagagaaatcacaacgaactgtctctcagaccacagtgcaatcaaattagaactcaggattaagaaactcactcaaaaccgcacaactacatggaaactgaacaacttgctcccgaatgactactgggtaaataacgaaatgaaggcagaagcaaagatgttctttgaaaccagtgagaacaaagacacaacgtaccagaatctctgggacacatgtaaagcagtgtatagagggaaatttatagcactaaatgcccacaagagaaagcaggaaagatctaaaatcgacatcctaacatcacaattaaaagaactagagaagcaagagcaaacacattcaaaagctagcagaaggcaagaaataactaagatcagagcagaactgaaggagatagagacacaaaaaacccttcaaaaaatcaatgaatccaggagatggttttttgaaaagatcaacaaaattgataggccactagcaagactaacaaagaagaaaacagaagaatcaaatagatgcaataacaaatgataaaggggatatcaccactgattccacagaaatacaaactaccatcagagaatactataaacacctctatgcaaataaactagaaaatctagaagaaataaattcctgatacatacactctcccaagactaaaccaggaagaagttgaatctctgaatagaccaataaccggctctgaaattgaggcaataattaatagcctcccaaccaaaaaaagtccaggaccagacagattcaccagaggtacaaaaaggagctggtaccattccttctgaaactattccaatcaatagaaaaagagggaatcccccctaactcattttatgaggctagcatcatcctgatatcaaagcct

SEQ ID NO: 205586 - DNA, 1000 bp, Homo Sapiens
agcctagaaactggagcgtagttgtatatgtaggttgtatatgtaagggttaaagaagaggagcaggggatggttatttttcattaaaagccttgtagagttacagctctttttttttctattctttttctttttttcagacaaggtcttgctctgttgcccagggtggagagcagcggtgcaaacatggcttactgcagcctcgacctcctggactcaagctatcctcccacctcagactctggagtagcagggactacagaagtgggccaccaccaccacgcccatctagtgtgtgtgtgtgtgtgtgtgtgtgtgtgtgtgtgtgtgtgtgtgtagacggggtctccctatgttgcccaggctggtctcaaaatcctgggctcaagcaattcatctcagcccccacaaagtgctgctattgcagtcgtaagccacggcgcccaccgaagttacagctttcagaatttgttgagcaggtttcccggttttcacttgaaaatgccccgccaccccgaaaaatatttgttgaactagttggcttttaaaactatacaaattcctttgttaaagtaaaaattaaaacaaataaaaacttttctttttttttttgagacagagtctcgttctgtggcccaggctagagtacagtggcatgatctcagctcactgcaacctctgcctcccatgttcaagcgattagcctgcctcaacatcccaagtagctgggactacaggcacgcaccaccacacccagcaaatctttgtatttttattaaagacagggtttcaccatgttggtcaggctggtctcgaactcctgagcttgtgatcctcccacctcggactcccaaagtgctgggattacaggcgtgagccaccgcgctcagcccaaactttttttttttttttttttgagccggagttttgctcttgtcgccgaggttggggtgaaatgacacggtcttggctcactgcaacctccgcctcccgggttcaa

SEQ ID NO: 205587 - DNA, 1000 bp, Homo Sapiens
ttgttttgtatttttagtagatacagggtttcaccgtgttagccaggatggtctcgatctcctgacctcgtgatccgcccacctcggcctcccaaagtgctgggatcactggcgtgagccactgcacccggccttttgtttttattttagagatggcgtcttgctatgttgtccaggctggtcttgaactcctcctcgcctcagacagtcttctcacctcagcttcccaaagcattgggattacaggcatgtgccactacacttggccatggattttgatttttttctcaccttgaaggttgtttttgttttgcttgtttagtaacttgcttggactaaatctgtgaagtctctacagtatgcagctgctgatgtctcttttcagtttttatttttatttttatttttaagcttggcttccttgggttctctgtctccattatttagggatcagtcagattggtaagagattatagttaaacacctcgagccagtaaactttcagctctctactaatggatctgtatgtgagctggaagtgcattcttacttcaggccattttcagttcttccctggcttttgctctctgccagattctcttgaaatctctgtatgtgcagcttctgatggccaaggatgtatgagtggcttgagtgtgttccagtctcttatatgtgtgtgtatcgtctagagtcaaccgatttggggagagcttttcaagcctcttgtggctgtctcacctcctacaactacctgttatatccctggcctaacccactagtcttccgtgtttgccccattaacttgacaacactccaaatccaacgagtcctctcaggcagcagcatgccctgcttaaactgatacccacagagctgggattgggggaggggcaggagtctggtagcagctcaaaactgaaaaccaccatttctgcctgaagttcagtaacttaataaataaatgctcccagtttgttttatgcctttgattgaattc

SEQ ID NO: 205588 - DNA, 1000 bp, Homo Sapiens
gcctgtaatcccagctactcggggggctgaagcaggagaactgcttgaacctaggaggcagaggttgcagtgagcggagatcatgccaccgcactccagcctgggcgacagggcaagactgtctccaaaaacaaaaaaaaaacaaaaaacaaaacaaaacaaaaaaaaaaaaacaggcatttgacctggcatctcctaacttcctggtgactgaggacaagatggtgaaatggaaactggatgaaaataaagatgggtgggccaggcgcggtggctcacgcctgtaatcccagcactttgggaggccgaagcgggtggatcacgaggtcaggaaatcgagaccatcctggctaacacatgaaaccccgtctctactaaacatacaaaaaaaaaaaaaaattagccggacgtggtggcaggcgcctgtagtcccagcaactcgggaggctgaggcaggagaatggcgtgaacctgagaggcggagcttgcagtgagccaagatcacgccactgcactccagcctgggcgacagagcgagactccgcctcaaaaaaaagaaagaaaagaaagatgggtgaattatttacaacaggtttaatgaccacctaaaaggtcactgaataataaacccatggaaacctgcaacggcctctggtaacctttcaaaggcatcatacttggttggctctgttcaaccattacatcaaatttgaaaataacacgaagccagaatgaacagatggaatgtggagtcaggattcaaaactgcttgacggagcagagtggagagtcagatacggcaagatgaaatgcaacagagataaatgcagagactcacactagaacaaaacatcaagcttgaagatgagaagcatggttaaacactggtgcgtggtaggggtacttgggggttggagttaaataaaatgcagtgtgacaaggctgctgagacacttagacaagggaatgctagccccatgctactccaaggctgtccttg

SEQ ID NO: 205589 - DNA, 1000 bp, Homo Sapiens
gtcttttgatgggtcaatttatatgtattgcaattatggttatgttaggatttacttctgccatcttattttacttttttctctatttattacactttcttttgtgtatttttttctttttgtttcttgctttccattgggtaaactttccacctgtgaggaacttatacattctagttttgttttctggtagttgctcctaacttgttaagatccgtagttacattctccccgtctatttcttcatcttaacaatacttacatctttcactgaacaaaaaaagtgcctgtccccacctgcctctatcctcaccttcttctcctagcccatcaacctaggttcattatgttgcaaattttattttgggttgttgtgcacatcaacaatggtagttctgaggacaaacatcaatcaatctttcttctggaggcagatgacttcaaagacatttctttggggtcttccttcttcacccaagtaaatttgaaagatgtatgctagagagtgggctgctttctcctggtagagtatagtatagctgttgactcacaggcacttaacaaaaataaaccttaccacatgaataaacatcaaatcatcacaaacaacactttagccctggaaacctggtgggtgagaagggaatgtttcaccattcccaggagacaagcaatctcacttcattgctggatgatagcccagggtgctgccccacgtcccaaaccacactcttctaaacagcagggtacctatgtttatgaagggttgtaagtgaaaggtacacattaagcaaatatgcataagccaagacatgcccatagtgataatttcacacacatatactgcagtacaaacatacctcagtggtagttatatgtgtttctacacacaaacacacacttatatacacacatactgtctctaaacgatactttagtttgacaatacagtacttaaactcccctagactcatttttttttaacataagttccatatta

SEQ ID NO: 205590 - DNA, 1000 bp, Homo Sapiens
ccacccagccacatggattcctcacacctctgagtcaacaggcaaagaaggggttactatgctgcctggaatgattgatcctgactaccaagggggaaattagattgccaccccagtggaggtgaggaagagtgtttctggaatgcaggagaccttttagggcatctcttagtattaccataccctgagattaaagtcaatggaaaaccacaacaacccaatccagacaggactactaatggcccagaccattcaacaatgaaggcttgggtcatgccgccaggttaagaaccatgagcagttgaggttgttgttgaaagcaaagagaatacagaatgggtagtagaagaaggtagtcagcaataccagctatgataacgtgaccagtgacagagatgagaactgtaattgtgatgagagttcctccctcttttgttattcatatttgtgtgtgtgtgtgtctgtgtgtgtgtttctatctcaaatatctttgctttcttccctctcatccctttatcatataacataagatatattgacttatagtatttaggtattgttagctttacatcatatatttaaggtacaggatatcaagaaaagtaaatgtcacccaaagactttgcatcctcttctggggaaagaaacagagcatttttggtgtatgcaggatagcagcatcatgttaggtggaactatggccatgttattgtcagtatttggagattcagtatggttgaagatgtgtatgggagcccaactgagaaggggtgaacttgtgatggttaattttatgtgtcaacttggttaggccacgctatccagatatttggtcaaactttttttagatgcttctgtgaaggtactttttagatgagactcatatttaaatcagtaggctttgagatgcagattaccctccataacgtaggtgggcttcatccgctcagttgaaggccttactagaaaaaatctgaccctgtcaaagaacaaggaattc

SEQ ID NO: 205591 - DNA, 1000 bp, Homo Sapiens
tggaactaagatctctaggaaggcagaacataatgttgtgggaacaggaagcaaaaattttgctagtggatcactagaggtgatggtgagcggtgccacttccatttccacgacttgattcctggacccatgaatcatggctatgggagacacagtaccatatattgagtgctgattcagagcgtagatggccttcaggagaactttgccccagccctgcaaagtattgttacctagatggcattgtaactgtgacttcaaaaggccattctaccattttatcaatccagctgcttcagaatgatgggaaacatggtaagaccagtgaattccatgagcatgagcccactgccacactgctttagctgtaatgtcagtgcattagtcagagacaatgctgtgtggaatatcacgacgatgaataaggcattctgtgagtccacagatggtagccttggcagaagtattgcatgcaggataggcaaacccatattcagagtgttgtgggaagtcagggaccctgaatggagggaccagctggagctgctgcagaggaacataaattgtgaagatttcatttcattttgatatggacatatatcagttcccaaaattaatacttttataatttcttatgcctgtctttacttcaatctctgaatataaattgtggagatttcattttaatatggacatttatcagttcccaaaattaatattttcataacttcttatgcctatcttactttaatctcttaatcctgttatcttcataagctgaggatgtacgtcacctcaggaccactattgtgttaactgtacaaattgattgtaaaacattcgtgtttgaacaatatgaaatcagtgcaccttgaaaaagaacagaataacagcgattttagggaacaagggaagacaaccataaggtctgactgcctgcagggttgggcagaatacagccatattttcttcttgcaaagagcctataaatggacgtgcg

SEQ ID NO: 205592 - DNA, 1000 bp, Homo Sapiens
caaagtgctaggattacaggcgtgagccaccacgcccggccttaatttttgtattttttgtagacacagggtcttgccatgttgcccaggctggtcttgaactcctgagctcaagatagcctcctgcctcggcgtcccaaagtgctgggaggggacagccaccacacccagcatttaatcctaatcttcacaacaagcctgttattatcttcacgttgcagatgaggcaaccgagggacagaggttacatacttgaccaaagtcacatacacagttagtaagtggcagggccaggaattaaatccaggcagtctgattccagagtgtgctcttggctggagaatgcatggcacatggaatctgctcagtacaacattcgctcatttttttcatgggtggcacttccacaccagctcagatgccctcagtgccacctcagtgcttccctcccacccggttccaactaagtaccttttcttttcttttttttgagacggaatctcgctctgtagcccaggctggagtgcagtggcacaatctcggctctctgcaacctctgcctcccaggctcaagcgattcttctgcctcagcctcctgagtagctgggattacaggcgtgtaccaccacacccagctaatttttgtatttttagtagagacggggtttcaccatgttggtcaggctggtcttgaactcctgacctcgtgatccgcccacctccacctcccaaagtgctgggattacaggcgtgagccaccgcgcccggccccagctaagtaccttttctgtagccagcactggggaaactcccagggagaggaatggggaattcctgggatcatggagagacactcccaagggctaggaaagccttccatctctgcctggcatgcttctgaataggggagatggctccagcttgtccagagagaggaatcttcctaaagtagaactacaggtaggagaaaagtacttttgggggacccatgctgggcacc

SEQ ID NO: 205593 - DNA, 1000 bp, Homo Sapiens
tgtctgttacaaacacattaaaattcttcgattatataaaaactgacaaacaagtcttataaaactgtttttgtactacattaagttcaaaataggtggcacatgtttaactttgtacactgtaggaattctaagaatcatttcaaaaagaaaaagcaaatacagtgcacagcaatgcatataattcttatagatgagtattatctatctgtcatatctctctgtaaataatgatggtgacaatgatgataggcaaagtttattgatgttttttatatgccaagcactgttctaaccactttgcatgaattaactcagtcaccatgggacaggaactgttattatcccaatttttacccacattcacagaatgcttctgtgttccaacaaggaaacttcaacaaagtagtgcatgagcttatcacaggtcgtgtgcaataagagtttatgttattagtttttccttgaactgcttgggagtcagtgtcacttttcttagccccattagcctgccctccctttggagtgtgcacgtctcctttactgtctgatacctgtctgctttcctcactgagtgcctctagctttgtctagcaacacctgccctcatagaacttacattcagttgggaagatcctaagaaacagcaatcacaacaagtaatattgatttcaggtaacaagaaatgttacaaaagaaagcaaagtgatatcagggagcaaaaatggaatgacagactgggtgtgaagggctggctttgtgagcaggagagaggccctcctgaggaagggatgttcgtggtgagtcccaaatgacagaaaggacagcaagtgcaaaggccctggagtgggaatgaattgaacatgtgtgaaggaaagcaaaaaaagcagggaggctggaatgtgttgagtaaggagaatactgtggggctcctctctctttcctttctctgctgccaacacttgtgttttctgtctcagactctagtttcactgaattc

SEQ ID NO: 205594 - DNA, 1000 bp, Homo Sapiens
atgcagtaatgttagctattactcttacattctgcccttattagtctgtttttgcatttcttttaatttttatttttataaaataatacatgtatctttcttttaaaattttcaaataattctttgaggattttaggttttacccaacttctctccaccccaagttcccacttatgtgaggctgccacattcaactctcttcttcttttttctgctttcataaatgtttgttctgaatattcttccaatttttaacatggtggtttagcttccaaatgtagaaaataaagatttatctctcatgatttgtgcatcaacatctagacagtttatgagcttggctatagcatatatgtatatgtatgtattatatgttgttatatattatatactattatagccaagctaataaaatatacatatgtttatgtgtatctgtttgaggcattttgtatactgtgagtatatttcttctctttaactttttcccttgcagttcttaattgaatgattttaacatttgcttatttttgtatttgtatcttcctaacttagcccatacccttcaacagatgaaaatctccccttgatgggttcaaccatctagatcatctatttctttcacttttttatttctttgcagacattccttttggagtcttctgttctgctgcaacatggattgattacgtcccaggctttctgggatcttccttcatcatcctcctggaaatttccttcagttcttttctgtattggatcctctgtttcctcacctcattttttctttttgtatgtgtgttctttctgattttattgagccaaaaccttcattagcagcttcagaaatgatgcaagaggctgggagcactcatgcttttaatcccagcactttgagaggctgaggcaggcggatcacctgaggtcaggagtttgagaccagcctggccaacatgataaaaccccatctctaccaaaaatacaaaaaaaattagccagg

SEQ ID NO: 205595 - DNA, 1000 bp, Homo Sapiens
tgactgtttattattgaattataatagtactttatgtcctacacacaagtcctttatcaaatgtatggtttgcagttattttattctgttagttatggtctcataattttggttgtgttcagtttatctttttctttgggtaattatggttttggtgttaaaaacagttggccaggcatggtggctcatgcttgtaatcccagcaatttgggaagccaaggtgggaggattgcttgagcctaggtgtttcttgttgttgttgttgttgttgttttgagacggagtttcactcttgttgcccaggctggagttcagtggcgtgatctcggctcaaagcaacctacacctcttgggttcaagtggttctcctgcctcagcctcctgagctcaggagtttgagactagcctgggcaacgtggtgaaaccccgtatttactaaaaatacaaaaattaactgagcttggtggcttgcacctgtagttccagctactcaagaggctgaggcaggagaatctcttgaatccgggaggcggttacagtgagctgagatcgcaccattgcactccagcctgggtgacagagtgagactccatctcaaaaaaaataaataaataaaattttaaaatctggctgattaaataccagtttcccctgagtagacgatttggggtgtttcttctggttttccttctctacatctgttgcattttcaatttttttctgtagtgagactttaataaaatcaaagaaatttcaaattataatgaaaaacacaaaggctaaccttaggattaaagaactgagtgatcaacgtcatgtacattatgaaatccattccctatatctaaaagttctgtttaaacctgagccttgagggagaaaaagggtcttgggaacaggagtatgggctctaaactgagatagttatatgtttgtcttttttttatttggatatcatttgatatttataaaatgattacaaaagtagtacaaagaattc

SEQ ID NO: 205596 - DNA, 1000 bp, Homo Sapiens
caaccaattctctctcattggagatgtgaatcatacagtcacgtgatttcccacaatttgctggtctcccactggactctgatattctgttctctctctctctctctcaaagtacctctgctgctcctgcatttgagatcagctgcagggacactagagtagctgagaagaataacaaaccagcactgtcaaatggcaactatttttaaagtggacaggcagggccgggcgcggtggctcacgcctgtaatcccagcactttgggaggctgaggtgggtggatcacaaggtcaggagatcgagaccatcctggctaacatggtgaaaccccatctctactaaaaatacaaaaaaatattagctgggtgtggtggtgggagcctgtagtcccagctactgaggatgctgaggcaggagaatggtgtgaaccggaaggtggcacttgcaatgggccgagatcacaccactgcactccagcctgggcgacagtgagactccgtcttaaaaaaaaaaaaaaagtggacaggcagatcatggaaacccgtgaatagaaaagagctaaactaagtgaactatatctgatgaataaaaaacaatttggcaactttgaaaagccaaaaggtagctgaagtgtaaaaaataaaaaaggacccctaatcaagtaggtcatacttcactcttctccaaagtctatccaggtaaagtgtttccttctcatactgctttttaaggcactactctgtatttttagaatagtattgtggtaaatattctatctgatatgtacttaaacatagtgaaagccaacaggccaaagtaagggcctttaaattaattatgttccttggaaaatacatagaagtactgctttacagcagaagaaaataccagaatgaaaaactgtcatacaaataagtaggcaaaatctgtcattttgggagaaagaaatgggcattaacatgtctttctttactttgcaaagaaactttctagcaatctc

SEQ ID NO: 205597 - DNA, 1000 bp, Homo Sapiens
caaaccacagtgaggcaactagcacactacagtgtttcaagtgctatactttttgccatgctatgacttttcatttatttattttatcacactgtaactgtaacaagagaatacaatgtgtgtgcaaattaccagactaggcacttatcacaatattctcaactcataggaaagcaataataaggaaaatcggaaaagttaagcatattcttactattgagtttaagaagaaaaaagaaaagttaaaaaaaattaagcagcaatatctcaacacatagctgacattatttttctttatttttatttttcttttctgtttttcttttcttttcttttcttttctttttttttttttttttttttttttgagacggaatttcactctgtcccccaggctggggtgcagtggcatgatctcaactcactgcaacctccgcctcccgagatcaagcgattctcctgcctcagcctcccacgtagctgggattacgcgcgcgcgacaccatacctggctaatttttgtatttttagtagagacggggcttcaccatgttggccaggctggtcccgaactcctgacctcaagtgatccacccgccttggcctctcaaagtgctgggattacaggcgcgagccgccacgcccggccaacatagctggatttctttttcttctcccctcccctcccctccccttccctcccctcccctcccctcccctcctctcccctctcctttttttctcttcccttctcttcttttcttatcttctgtcgcccaggctggagagcagtggcactatcacggctcactgcagtcttgacctctcgggctcgcgtgatctcccacttcagcctaccgagtagctgggactacagatgtgtgccaccaggctcggctaattttttgtagtttttgtagaggcgaggtttctccatatttcccaggctggtctcgaactcctgggcatcggccctcctcggcctcccaaagtgttggga

SEQ ID NO: 205598 - DNA, 1000 bp, Homo Sapiens
ttctgagatgtagcattgcttcattctttaatcttgattttaatcatttctgggaatctgtgacatcacttttagagtttctgctacttagtccccactacattcttctggttatgttatataaatagttacatttactatttattatggtattattttaaaatgttagctttgctgttaaatttaacattttacattttacagctttgctgtattttttatagttctgagcaaattattcatattcttacatatcatgaattgtgaaaaaaaatttacaagttgacttgttacctatacctatatgtattattcttcagtgtttgctctagaaattataatatgcatccttaatttacaatagcctcccttgaattaatatactactacttgcgtaaaatataggaaatttataataatatatttctgcttactcccacttcccttcctttgtgctttggttgttatatattttatttctacgtgtgttataagcctaatgacatctatcaattatttttatctttgctttaaactgccaattatcttttaaagaaattaagaaagggaaaaattggcttttacattttcctacatatttaccattttgcagagttcctcatctctttctgctgaaattttacctcagcgagaagtagtgtctcccttgtctgaatttttatagcacatattgtggaccatttatatgtcatatatgaccttacagttagttccatgtatatgtcaaatttcctctgccagttttagattattttcttggcaagggtcgccgtttatacagttttaactacttcattgtgtctagcacagtgccttagataaagtggacacctgtatatatttttaactatgtaagaatgagtgaaactttgttcatttatctgagtatttatataatctcacaggattgagttgtattattacagttcaccattagatgtcactttctgacatatgttaaatccttaccaatgaattc

SEQ ID NO: 205599 - DNA, 1000 bp, Homo Sapiens
ggccttataaacattggagttcagcaagaaaagaaaggagataatggggaggccactgggtccatcctcacatatgaggactatggccaacaccaaaggtcctgtggggaacctaacactggatcgtctaggagagaccctttgaattcccttgactcccacaaaattttcagtaagaacctccttttgtctgacataagtcaacataataaagggaagtgctgtatggggaatttattttagaatccttatttctaaatcctctaaagaccctgaggacatgtgatgcaaaggttttattggtggagatttgaaaagaaatgatttgtgcaaaggccccttacacaagtctcatgaagagggcaagtacccaagctccttttatggaggaaataatttgggatccaatgataaagatgggcaatctctgaagaaaacgtcacaatttcttaagggacatggcctgggcacaatgttaacaaaactccctattttccccaccccatagtagctcagcacccgcaatgtgcacttacgtcgggtgtccccagacaaagccagtggggagctcagcaccatcagtgtcactgtcagcgctgtcatgcaggagcctccagggagcttcagacacaccatgctggagaacaggacaggaccaggggccagagaagcaggcaagtctcactcagggagaactatgaacccctccacccacattccaagttatagggaggaagttactgatttccttgctcctgggttgggtaatctcgtgttggagaaccaatcagcatctgagttcaatagcatcatcagttgctggtcagagatgctgtatgaaggtcctcttctgaaacagaatttccttctttaaaggattgttttaatttagcacttggaaggtttgaaccagttgcatgtaaaacaccttaattggggagctattgtagccagctctgtgctggtcagtgatgtgttcacaagtttgagccttgtaaga

SEQ ID NO: 205600 - DNA, 1000 bp, Homo Sapiens
aacacggtaaaacctcgtctctactaaaaacacaaaaaattagccaggtgtggtggtgcgtgcctgtaatcccagctacttgggaggctgaggcaggagaatcacttgaatccgggaggcagaggttgcagtgagccgagatcatgccattgcacaccagcctgggcaacaagagcaaaactgcgtctcaaaaaaaaaaaaaaaaaaaaaaaaagaacagatggtaggtacaggcagaactactgcgggcttaggaagaatctaggtggtaggtgatggactagcatgttggcagtgaagacgaagagagggggacggcttggagatgcattttggagaagagccagcagagtggaacggcaaaacagccgtggagagggcggcttctagtgtcgaggagtctggcttgagcagttgggtagatggtagcgccactaactgagactacggaagaaataggtttgaagtagggggaaattcaagctttctgttttgacaggctaaatttgagaagccagttaatcattaaaatccatagtcagacagttggagctgttcatcgagcacacttcctgtgtgctggaacagcattcatgcctcatggacaccatctccttttatcattgtgacaacctagaaagaaggtaggatcaacaggctgttttacagatgagggaactgggccgtagcaaggtgtgttccttttccactctgctgtggggccaggaggctgacggctttgcacagtggcgtctgtagggtttggagagtggcacccataggagatgagatggagagggtgaggttgagcatttacctccccagttgccattctagggaccattctctccctatcccttggaccttacaggggtaacaaagcccactgttattagatctggggtaatgcactatccgttgtggtttaccaacaccctgcccattcctttgtataatcctgttatgaaacaccttcaaattatcccatttaagagaattc

SEQ ID NO: 205601 - DNA, 1000 bp, Homo Sapiens
cttagtttttggaaaaccaagtgtgacgaatcatgatctatgtcccctggaagtttggatgaaagaatttaagatcctgaagatatagctctttaaaaggggcagcgagtatgtggtgcaaaaaaaaaaaaaaaaaaaatccccctggccccaggttcctgctggttttacttgcaggtgctgtaaggggtgactggagggagaagcctggctgctggtcacaccgcttcccttgtcctggccggcatgctctggtggtcagtgggcttgtctttggttccacgtgcacctggttgagctcgttggccggtgctgaggcggctgctgtgacaccgcaggctggttcctgctccatgtatttaactgctggctgccgtgtgtctggctctgcaccctccctggctcctcctgggtgtcacgcgcctgtctttgtccatggaatgctggtctgggactaaaaacaggaaaatcacagtctttcatagctagttactaactcacaagatgaaaatgagaaaaatgtaaattctagcaccccatgtttatagtcggcctgtgtgtgccatccacctggcgctctctcagactgagaggagataaattagctggtgtctttcccagggcgggacgatcattggcagtgcgcggtgccaggccttccgcacgcgggaaggccgcctgaaggctgcttgcaacctgctgcagcgaggcatcaccaacctgtgtgtgatcggcggggacgggagcctcaccggggccaacctcttccggaaggagtggagtgggctgctggaggagctggccaggaacggtgagtggacacctgctcctctgtcctgcgggttttcgccctgtttcagagctttggaaccgacaggtttccctcttcactgtggcagaagtacctcttctcacagatcttacaggtcaccatctcaggactttttaggatctcaaaaaacaacagcaatgatcgtaagaatgctagtaatttaacctt

SEQ ID NO: 205602 - DNA, 1000 bp, Homo Sapiens
caaggatgaacatggaaccctttggaagtatagtgattgcccttgacgtaaagaatacctttgaggctattatttcattgaaggcgagtgtacaaaacatggcaattaaccaaagtccagtcaagtcacaaccctgacccctgagaaacagcatgatggggcctccaccgtcttatgctcatggatcccctgtgtcacccacacctgcacctcggggtctttgcaccggcccctgccactctgaggaatgctgttcccagaatccagctttcttcctcactcttcgatttctctgtgaggcctcgctgatgaaatacacacaacaggaagcctgctagcacataccacgctgtgctcctggtcctctttcctatttcactgtttaccacagcacgtgttgccagggacagtgtatatttgcttattcattgtctctacttcccactaaagtacgtgccatgagggcaggactttgtattccctatttgtatccctaacaccccgtccttaatacctgtgcttggcatgttgtaagccatccagtaattgttgattagacaagaaaaccaaatgtgagcaatttcagtgacttacgagatgttctggttatttgttgctatgaaacaagtaactcaaaaacctagtggttcataacacccatagttttgttgtctcacagttcgagaggttgactgggcttagctaggccgttgtcactgagggtctcttgtgtctgaaggtggctgggctgagggtcagctcactcatatgtctggtacctgggcactggggcccctgggacatctctcactagccctgtgtggctcccagcatgtagtcagggaagccggtcctcttacatactggctcagggctgtaggggagagtcctcagagagagcccgatggaggccatgtcgccttctgtgttccagccttggaagtcaacggtggtccttttccttcatttgttggtcaagatggtcacaatggcccatcca

SEQ ID NO: 205603 - DNA, 1000 bp, Homo Sapiens
cttcctcaaccactccaatatcctgcctgtgtctccattggctgggccccagtggaagccagctgtgttagtcaacttttacctgtttatgctgctgtaacaaacaatataagaaatctcatttgcttatgcgaatgaacacatatttcttgttcaggttacatggtggtgacaatgggtcagctatggttctgccccatctgccttcgtgttcagctcaggctgaagaagtatccaccatcttggtcttgctgcagagggaaaaaagaaatggcaaactgtacaatggctcacaagcttttgctcagaaatggtatatgtcactttcactcattctatgcacaaagtcctatgactttgggcatggacatatgaatacttctcctctagggggaactacaaatgcgtaaccatgtttaagactgtataatcctcttacagggagagaagcaattaactgggaacaataataccctctattacagcccaccttcttagtcataaatgttcatctctccctttccacaggaaaaacatactcactctccctaaagagtaacgcccgaaagtctcaaacaatcatggtatcaagtttagtatctcatgataatttccacattatgtccagatactgctcctcttcatccagagatgtatgaactcaaaaacaagcaaatgttacctatcaccccacatctatatctttttattgttgttgtttttaagacaggatctcactctgtcacctagactggagttcaatggcacaatctcagcttattgcagcctcaacttcccaggctcaagtgatcctcccacctcagcctcccaagtagctgggaccacaggtgcatgccactacacccagctaatcttttatagagaaaaggtttccctaccccacatctatatctgacatacaatggccaaagacagaataagcactgagattaacactcccattcataaacagaaagaacatcagtggttcttagaattc

SEQ ID NO: 205604 - DNA, 1000 bp, Homo Sapiens
ttcttgatgtcaactgactttccatccatggagaagaaacatgtctgggtgagactgaggaacacctatgaacttagctgcatttagagaaaccaacttgaacctagtcaggctaatacagtcatcctttggtatctgagggggtatcaattccaggacccccatggacacccaaaccccaggatgctcaagttccacagacagccctcaacatttgtggaaacagagggtcaagggtactgtgcatggaaccatatcaagagagggccgggccgggcgtggtggctcacttgggaggccgaggcgggcagatcacgaggtcaggagttcgagaccagcctgaccagcatgttgaaaaccccatctctactaaaaatacaaaaattagccgggcatggtggcgtacacctataatcccagctacttggcaggctgaggcagaagaattgcttgaacccgggaggcggaggttgcagtgagccaagatcgtgccactgcactccagcctaggcaacagagtgagagtccatctcaaaaaaaaaaaaaaacaaaaaacaaaaacagaaggccgggccatgacaagaccagccaatcaagttttaaagtccttacgggacacacattaaacctggaaacaggaagtagtattaaaaacaagattgaaggcaaattagaaaccaaatctgaaagtagtttcaggccagtcgtggtagcccacgcctgtaatcacagcactatgggaggcaggaggatgaccttagcccaggagttcaagaccagcctgggcaacatggtaaaaacactatctctacaaaaaatacaaaaattagccaggcatactggtccacatctgtggttccagtactcaggaggctgaggtgggaggattgcttgagcctaggaggttgaggctgcagtgagccatgattgtgccactgcactccagcctaggtgacagagccagaccctgcctccaaaaaaaagggcaagtatggccaca

SEQ ID NO: 205605 - DNA, 1000 bp, Homo Sapiens
caggggaaaagtacatttgaactccacaccaaaattagcttctttcaatataaaacaccatgcttcaagactgggaagccaagtagcacatcccaatcagtttttctcagcagtcagccccacagatagtgcactctctatctgtaggccaagggtttgccaagtggagaaagaatttctaggatgaaaacacgaccggtgaagaatctcatctgcagcagtgaccatctccttaatagaactatcactagggcaactggcaggttaatccctgttaatgagccccaaatttaattatcttacctggaccagaggtgtcattcaaagagagcacaagagtggcagaaagatttgggggagaagggaggaggggttagggaaagggggttcctcagtgctctttatttggaaaagagatacggggaagtttgggtgggacacaaacggtgacaaaacttttttttttttttttttttgacacagtctccctcttgtcgccctcgccaaggttggagcgcaatggcaccatctcggctcactgcaacctctgccttccaggttggagtaattctcctgcctcagtctcctgagtagctggattacaggtgccctccaccatgcccagctaatttttgtatttttagtagtaggaccctccagagggtttcaccatgttggccaggctggtctcgaactcctgacctcaggtgatccacctgccttggcctcccaaagtgatcggattactggcatgagccatggcgcccagcctcagtggtaaacattttaaaaagatcagggagagacaaaaagaacactattaagaccactgacatccagggtgactgtgcatatgccccaggctgagccctctagggcgtgacatcagaggcttctcataaataaatacatactgtcctttcttctcttcactgacttaaaaagcaattgtaggccgggcacggtggcttacgcttgtaatcccagcacttgggaggcc

SEQ ID NO: 205606 - DNA, 1000 bp, Homo Sapiens
agaaaaatatactcaaataggacatcagtctcctcatatccccaggcagtttcctctggaaggtaaagaattgcagagacagaacagcccaacacgtacctggttcccccttttctcccttggtgccatcacgcccatctttgcctgggaagccgttgatgcctggagagctacaggcaatcactgcagggcaggtcttttgggcatcctcacaggtcacagtttctgagtaagacgctgccaccatactcaggagaaggagagggagtgatggaaacagggacatggtcctcaccttggtgtgagaaaactcagggaaggttaatctcagttaatgaacacatatttaccgagcatgccctctgtcctacaatctgggtgcaggctatatagaaatagatgacccatccctggcctctagctggggatttggaaaagtaaacattccttgtgacactgcgtgactagtactttaacaaaggtaggcactatgatgagcagtggggatcctaaggaggggttcatctgtgcctagacacctggcgttgctgctggaagactataaacatgctttcggtggcagtgagaacaaatgggaccgtgcattgccagctggcttatgcctgttagcttagggaatgagaatgagtggaaacccaggtgtctgtaggagcttcctctttctctccatgtcctcttcgggtccatctgccacctgaatcccatctttgtatctgggcagctgattcccctccaggacctgttaactatcatttactcattggcaggccctgagctgaaagctggtgatccaaagaggaaggtctcaacctcagatcaacctcaaccttagtcaccaacccagcccagaattaactggagtttgcttccccttggtgttttagacaggcttgcctgggtaagcattttctctggaaatttcttactacgttggccctggcagagtgctaaatacctctctactttctggcaggaattc

SEQ ID NO: 205607 - DNA, 1000 bp, Homo Sapiens
ctgacctcaggtgattcacccacctcagctgcccaaagtgctgggattacaggtgtgagccaccacgcccagcctgctcctccttttaagacagctgagatccacctcctcctgccccatcccaggagtcccttctgggtgcccttttgaagtcttccaaagcaccctcaccactgtgcctccctccaccctcaaagccattcacaccctgatttacttggctgtgtgtgtcagtctcccacactggactacacaccagatggaaacagagacagcctattgtctggctccatacaggatcattccatgatttggtgaagaaacaaagcacaataaagtagcaaacatggtgggtgggttttccccaataaacctgggaaaaatatataaagagaatgtatattcaaagacacattgcctgagtatggaagatcctttatgttgcccggtgtatttgtttgggctaatgtaacagaataccacagactgggtggcttaaacaataggcatttattttctcacagttctggaggctggaagtgcaagatcagggtgtcagcagggtgtcagttgatttctcttgaggcgtctttccttggcttgcagacggctgtcttcttgctgagtccttacatggtcttccttgtgtgcatggaattcccagtgtctcttcctctttgtgtaaggacaccagtcctattggattagggcccatccatatgacctcgttaaaccttagttacctctttaaaggccctatctccaaatacagtcagattctgaggtgtactggggggtcaggactttaccatatggattttaggggtactcagttcagtccataacacccagatatagagaaggcaaaacgcccagaatcagagtgtaaccgaatacaggtggctaaatatagccagtatattagatggaaaggcgtgtgtttatattttggaaatttctgaacagattgaggcctggaagatactgtgaaatggaattc

SEQ ID NO: 205608 - DNA, 1000 bp, Homo Sapiens
attttggggctcacctatcctgcatcaggaccagcagccagggctatcctgaggggttgcagacactgggccaggttaaacagtattcccaccaccatatctcttgctagtgtgaaaacaaaatcacaaaacagccacagtctgtgtcctgggcatgaaaaatttgagggccccttggaatgcattggagatgggatgtatgcatgtgcgtactggggagtagggggcctggagcaggggctgccagcttattgcctacgtagacatcgaaagcgagcccaaatcatggggcctccagaggtttgcaatctcccacaccctagggactagcccagaaacaatctgctgagtccaattctccaagttaacaacttgagacaacaatgacaaatcaaacaagcaggatgacaaatggttctaattgtgacacatgcttggccactatcacaaaaaatgatttctaagcagggcttttaggatgagatcaaggactcagccttccatagctaatagagaaaatgatgacttaaacgctggttaaaaataagtgccaaggcattgcgggggtcatgatctggtggaaaattgtctcctacctgccctcagtccaaactcaatgttaagcatggcctgcacccaccccaggcctcacgtgtcctccccacatcaattatggtgctaaagggaggggcagagcgcagatgaatggaaacacgtgggttccagtcacagctattgtactaatgaactgcgcgacctttaggaaaaccctgggctctctgttcctgtttcctcatctggacactgggagcaacagtacctgctttatttacttcacaggcttggtatgagcagcaaatgggagaccagatgtgaaaatgctttgaaatcattaaaagttctctccacgtgtaagttatggtttttgtcattaccaagtctgtcagaagtgacattgtacatttccttctgtgacaaggaaggctaaagaatggaattc

SEQ ID NO: 205609 - DNA, 1000 bp, Homo Sapiens
atttggaagaaacagtagtagaatcagtgaacccagattctagtccaccattaacggtatctgagtgaattattttaacttttatgcaaaagtttcttcattcaccaaatggccataataatatttgccctaccatccacagaaagacattataaaagtcaattgatgttattttgaaatttcttcgaaaagtatgaagtactagattaatatgagtaatcattattggatgctgtatgatatgcaattgtgtggtattttattttgttgttgtttgttaatcatagagccaaagctgataagttttagacctgtttcaatgactttgagaaaattatgaaatgaaaaaataattataactaatcttaatgcagacaaaaagtaaagaagagggatatatacttgtggtatctataattagtctaaggttaatgttagttcttaagtcaatccagaagtgaaacatcactgcttcatatcctatataatttaaggaatactttgttgttgttgttgagacagagtctccctttgtcacacaggctggagtgcagtggcaccatcttggttcactacaacctctgcctcccaggttcaagcgattttccttgtaattttagtagagatagtttcaccatgttggccaggctgctctcaaactcctgacctcaaatgatccacctgcctaggcctcccagaatgctgggattataggcatgagctaccgagcctggccaatttgaggaatacttttaatggaactactgtggcagattggttgcattaatagatccaattcttctccactttctgtattcatgtctgtgtagtaaaaaataaaccttgccccaacaggtatataaaaatatgctcaacatcattatcatcagagaaatgcacatcaaaactacgagatatcaactcaccccagttaaaatagcttttatccaaaatgcagtcaataatgaatgctggcgaagatatggagaaaggagaattc

SEQ ID NO: 205610 - DNA, 1000 bp, Homo Sapiens
actacaaaaaaaaaaattcttgtaaaaatcctcccttcttcagatgttgtaattaattatgccaaaacaaacctctggatttctatccaagcctaaatcccagtttattttatttcttagaaatgataaatactttttgacaatttgttttgctacatccaagtcttttagtggctggctttgttatcaaattcaccattttaaatgattttaacaaggttgccaaagaacatacggggaaaaaaaacttttccatatatccttggcagaaactggcattccccttttctcagttcccttctgagagtgcctgctgtcgctggagcagctatagcagtgtgtttacccagttgatagtgcacacatccttctcactgcaggacaccagcgcaccttccttggcctctggcgccttctgccaggttactgcccagcctcctctattacccacgcccctcattttctgtgcaacccccaactgggcctccttttcactcatcagctaagctacttttaaacatttgggtctcaggcccctaacaaaagcaaatttgcccatctgatttatttcaaaagggagagggccacaggaatgatctgtttgagtgagcttgtttttaggcaaggaggaacgtgaagacaggctggataaggatggttaagaggccagaagagctcatgtttacaactcatcacaaattacagtactgcaaatcaatgacttaacagaaacaatgggaaaagatgcacagatggctctcaaaacatgaaaagatgcttcatttctctcacaatgagaaatacaaattaaaactacaatgagataccattatcagccaagaaaattaatcaaataatatgtgttggcggaagtgttgggaagcaggtatgcttatacattgctggtgggagagcaaatggtaaacctccacaggatgacaactgccctcaggatgacaaaggcacatatactttgtctcagcaattcttttaggaattc

SEQ ID NO: 205611 - DNA, 1000 bp, Homo Sapiens
ttgtgagcgctctgtataattttggcagaaaattactttttttgtgtttctgtgatgatcccctgagatcatttttgcataaatccggccttctattttcagatacaaatctgttgtacagatgattcttcttagaagaaaagatgcatttgtagctaaaaaatgtaaattacttttcatggaaaatacctctctgggcccccatttccaaaatgtgatgattgcacatcgcatgtttttgtgcgtgctcaggggactgcttttcttataattagaaaagtcttgattgtgcagcaggtagaatggggtggcacggctgcttctgcagcataggtgagtcagtggaggtaccagaggaataagcaagagaccttatgtggaggtggcacttcactaagggaaggaggtcttagttgttgaagtgggtgtgtcatgagccttctttacaggatgggaatgttaacagaggacttttagacctggagacatttaaacacaattgccatcctctgtttgtattttcttcttgcttgtgattttttatacaggattcaaagttttatttggtctcttatggaagcatgtttggaatgaacaccctcctcatcacaagttttatgaaatagtggaggacaacagaaacctcttcctaaaatgtcttctgctcagtacaagggttagtgtttgagggactttgaggcactgctgtaaagcaaagtgcaaaaatcaacatattcagatttgtgccaaagaaagacttgagtttgagaacatttacatctgttttcaataattcctcgcatatgttgcagaatgtacgttatccatcttgttatccaggaaataacatttgttgcaaacagtttgccaattcgtaattttattgaatttgtttatcatgctgtggcttcatatgaggtctgaaagatggtgatctttggtgttccagctgttgtaacattctgcagtggggccttaattccaggatgagctggaattc

SEQ ID NO: 205612 - DNA, 1000 bp, Homo Sapiens
atttaaatttctgtgttcataactaaaattttattggaatgcagccacgcccagcccatttgttaatatttctatagctgctttcaggctacaacagtagggttgagtagttgcaacagaaaccatattcccacaaagcctcaaatatttgctaactggcatcttacagaacaactgtgttcttatctatccactttccaaggcacagagtggattgaatgtcgaaggcaaacagaacattttcagccagagtattggtcacaaaggccaaagaactgtgtcaggtagttgtgatgtttttacttttagcgcaacccatgcaacttttagaccgttccattcaagttaccagaatcccatttaggcactgaggtctctctgcttttttacctcagggcttacagtcagtggataattctctaacctccccatcctttggtgggctcattgtagaaggacttcaggggatcgggtgcagtggctcatgcctgtaatcccagcactttggaaggccaaggtgggcggatcacttgaggtcgggagtttgagaccagcctggccaacaaggtgaaaccccgtctctactaaaaatacaaaaattagctgggtgtggcaacgcgcacctgtagtcccagctacttgggagactgaggcaggagaattacttgaacctgggaggcagagatggcagtgagccaagatggcaccaccgccctccagcctgggtgacagtgtaagactccaccaaaaaaaaaaaaaagtacttcagggatccccagtgggaatgagctcagttgccacaccagctcatcaccttgcccttaattagctttcttgcctttgttttctctctttccctcgcctacatttctgcttcctgacataatttcctaagtaaactgcgtacaacttttctcaggtcttggtcttatgggaactcaaagtaagagaataatattgttctatgttgtttaaagcattgcttaattatttggaattc

SEQ ID NO: 205613 - DNA, 1000 bp, Homo Sapiens
gatgtaacaactaaacacaatgcgtgacccttatctattgcacaggcaaagagacgtggaggaaatgcgaatatgcagcctatactagacaatactgtccctgaggttagattcctggggttcattccggtactgggagcagtaggaaattggataaaaggtgccatgccataggtagtccagagtaaagtgctgcccctgaattttttcagatggttctggaagaaaatccatcatctactcacacagtgtctatttatatgtatatctctatctttatctcccctcaaaagaatctggaaaactgaatggaatattggtgttcactgtaccatcctaccaacctctctgtaggtttttataatttctgaatgtttactttaaaaaaaccctttaacgccaaactccttatactgaaccccaggaatgtcagtgcttttgtgttcttgcagcgcagagttctgtgaggccatggagtcactcagcagaatgtctatgatgtccccaccccgtgtggcatgagccacatctacttataggacagacaattccatatgggcagctgcaggggaagccctgtgggttgcatattcctgtccacaaactggtgggtcagctactaaacttcagcgtgtgcgtgaagggtgcagagggggctgcggagccatcttcgcttccctccgagagccaccctgtagggcagtaccagcaatcaccctgagcaaagagcagccctgtagcactgaccccatctggcaggtgcactcacccctaaacccgaacccacacgctggtttcttaccacccgctagctggaagagcgcagtgcttaatcaacacttcagagttttgtccccaggtttccattagattttaattatgtttatttttcctttcatgaacagaacacttccagacatttccaaagataccagggacatgaacacaccacgaggggcaatgctgggctcttcaggaatctcatagtatcagggaattc

SEQ ID NO: 205614 - DNA, 1000 bp, Homo Sapiens
tgttccatatcatctgataaaacagcataggtaccagttgagcttcacaaaaggggaacatacatgtaatatgctttgtgtgtggctctgtgtttgcatgcacgcacgtatgcatgtgtttgttggaaatcgaccactaagtgcaatttcagattgccttacatttctaaagctaaatgttggttttatttttaagaaacagggtcttactctgtcatccaggctaaactgcagggctcaagtaatccttctgccttagcctcataagtagctaggactacaggcatgtgccaccatgcctggctaattttttaactttttgtacagatgggctctgcctatgttgcccaggctagtcttgaactcctgtcctcaagtaatcctcctgccttggcgtcctaaagtgctgggattacaggtgtgagctatcatgcccaactttcattttactatttcaaaatctgtaactattaacatctggaatcttaataatgtaactaaacactgctattaagtaactgttaattacatttatatcttattatcatattcaggaataagaatctagaagaaaatacaacaaactgttaaactctgggaataagactgacagacgggttttctgagttacatgctttcatataatagttgtgtattttttacaatagtcttgcattgctgttgtaataaaatagaagattttaaaaactcaagggtcctgggtatctaagaaagaaacattaactatagagattatttgatggtagagatggtagatattagagagatataatgacggtacaggatggtttgggttttctttgtgggagggtgggagagaggaggaagagaaaaagctaaaatatcacttaacaccctctgtccatcttttctccagttcctcaccattaacatcatctcagtaatccagactaagaaccttaattttacatgcattatcaacaactcctttttatttgtcacccatatttaggaattc

SEQ ID NO: 205615 - DNA, 1000 bp, Homo Sapiens
tgtgtgtgtgtgtgtgtttgtgtgtgtgtgttaacaaaacaaacactgctccttctgtagtgagcactggcctatggccagggtctaaggaatatgcaaaagaaagtgactggaagttttaagcttttaaggttttatcaaaagacatttcttaccactccctctgggcagtactgtagaacatctactagggagaggatgatatgaagatagagaagcaacaaaagtacagacacattagaggcaaaatatagatgccaccttgtaaactggttgataattcagaaaatgacagctctccccgacttagttggaaaggcaaaggccaaatgggaaacatcagtctcttcacgtccatggaagacaatcccctgaatgcaaaattagaacttggtggctatttcctgatccagccccttgtatttttcatgaagcttaaaggagattaatgggacaatcaggatattacagatgagaagcacaggcatttcaaatgaggctgtgacaaatggctgggaggcctttagaatgggggaagagaggatgtggaacaagccctggactgggaagctcctcactatgattcacaccctggtcctgctaatgaccacctggccaggagaccctggagaggcatccaacccttccctgagagccactggacagaggaataggagccccatcactgagtggttgtagggctcaagaaggatcatattggcagcaagaactccagaaactataaagctctatttagatgaatcacattattattaaacagttcaatcaacataataattattaataatagctaagatttattcagtgtctgctattgccagacaatatatatgcaaagtctctagggcttacagcaaccctataagatatgtctatctatccacatcattcgtgcttactagatgctgttacaagtgttttccatatatatgaaggtatatataatatatacatatataatgcataaaatttgtaaatg

SEQ ID NO: 205616 - DNA, 1000 bp, Homo Sapiens
ttctcttttctattctggacatttgtttaatgaaataactcagtagcagagatactaatatgcatcctaccagtgttgttggataagtgtaaaagtgcttttaaattttaaagcattttaaaaatagaataaaagcactttgagccctctagagaatggtgtcatctgaggaaaaaaatgtttaaatcttaaatttttagacaggaaacaaatttacctatctaattttctcattttacagttgaattaaagcccagagatagtgtgacatgttcaagttcacacagttacatatcttgaactagatatgagatctctagataccttgttcagttccctttctagtatagcattcaactctgaggaattcctaaataatgatttttttttggggggggtctctttaggaattcctaaataataattttaaatgaaaacttttctttttttttaacttaagatctttgaatttggctggagttagtatttcatcatttgtattctattctacttaattactgattaagagtctaaatttacagcctctgaaaccagatatccttggggaacaacttatatcctttgttatgtatatcagattcctactggtcttcatttgggaaatgatagaacatatttgataaattgatgcttttgtcattttaaattggcccaatagttaagttggcgcctgagttaagttcaggagacagaggaagatgcagaatgtcaggattcaaagaggatcttagcattttactttttttccttttctatactggatcttgtgtccaaagtaaagtgaaatgtcctacttagacctagtggtagagcctaagatagaatttagaccttctgactcctaatttatgtatttttcactgagcaacactatttcaaaattcccctctgaatattgccttgttttcctaacatcagtgtctagtctggttttgggcatcgcttacagcttgggtttgcgccagggaagactaggaaa

SEQ ID NO: 205617 - DNA, 1000 bp, Homo Sapiens
gtttcacaggtctgccttgtagttttggttaatgtcactctgccctgtaagatggaaagccaggtttgaactgtggtaaatctaccactttgcaggttctctctaaaaaggcagccagtaatcttttctttggtggtaatttccttttttttttttttttttttttttgaggcagagtcttactctgtcgcccaggctggagtgcagtggcatgatctcggctcactgcaacctctgcctcccgggttcaagcaattctcgtgcctcagccttcgaagtagctgggattacaggtggcgccaccatacctggctaattttttgtatttttagtagagatggggtttcaccatgttgcccaggctggtctcgaactcctgagctcaggcagtccgcccacctcgacctcccaaagtgctaggattacaggcgtgagccaccgcgcctggccttttctttggtggtaatttcctgatctgttgaaaggccaaaagtacactgtggattttagaagtgatgtcttttttttagtgatgagggtttttggtggtggtgtttgttttttgagaaagggtcttgctctgtcacccaggctgaaatgcaggggcacgatcttggctcactgcatccttcactttcttgggctcaggtgatcctcccacctcagcttcctatgagtggctgggactgtaggagtgtgccaccacacgtggctaattttaaaatttttctgtagagatgaggtcctcactgtattgcccaggctggtcttgaactcccggactcgagtgtttcttctgccttagcctcccaaagtgctgagattacaggcatgagctactactgcacctggcctttttttttttttttttctttttttaaaaagacatttgtggtgagtaagaattgctttggggtttatgcccacctgttcctcagagctggctatggatgatcttatgagtgagttgtcactaatgtttgtatcgggactggaattc

SEQ ID NO: 205618 - DNA, 1000 bp, Homo Sapiens
ataaaacagaaaaatatgttttaatacattatttatatatttatctgtgtaccaatgtagtcctaaaatgtgacttttaatcttttcctatggaggaaggggctcaggagggcaaagtgcctagaggctaatggaagccacaggcagtgctgtctttacctggtcacagtctccctagaagacagtgactctgtcattttacagagccagagaatgaagcccttctttgcccatggttacaaatccagtgcctgtttcatatttctcctccttatgctgcctcttcataaggcatcgccttgatttcttcttaaaacgatttattctggggctgatttttcccaaccttaatgtaattgtactttaatcaataaaaaatttcctgtggaacaactgggaggggtggggaggagagaagcccagcaaatgtgaattgttgtttatttgtctctcttaaacaatgtttcacgttaaaccagttgcaaatgaaatgaattgtattataaccatcttggaaaaatagctgctgatctcataaattcatcgagcttcctggttccaaagccctctcttacaataatagtaagtgttgctgtgctcagtaaatatctgcctccacttggctggtagtgaaggaactagaatggcaaacccaagatgggccccccttctgcctcctccaaaatcacaggttttgtgctgaccctgaacaggaatggagaggaacatggcttcccaggacagtgactactgtcctgtctcctaggatgccagtatcccaaatatcatcactcacccagtaggttgctcctctgggcacctccactgccttgcgtctgttctcagtgctgcttccgtggcatctgcctttgtgtcatcggttcatctgggcacaggcctctctcagaacttataagcagtggctatgactgtgggctttggaatcagacagacctgggttccagagtcaccttgaacaggttgcttaatctctctaagc

SEQ ID NO: 205619 - DNA, 1000 bp, Homo Sapiens
acatctgtttcccaggttcaagtgattcttctgcttcagcctcccgagaagctgggattacaggcacctgccaatatgtctggctaattttttgtattttcagtagagacaagatttcagcatgttggccaggccggtctcaaactcctgacctcatgatccacctgcctccacgttccaaagtgctgggattacaggtgtgagccaccacactcagtcaaatatcttcttttgagaagagtctgttcatatcctctgcccactttttgatggttttttttttcttgtgaattcgtttgagttccttgtagattccagatgttagacctttgtcagatggatagattgcaaaaattttctcattctgtaggttgcctttcactctgatgatagcttcttttgctgtgcagaagctctttaattagatctcatttgtcaattttggtttttgttgcaattgcttttggtattttagttatgaagtctttgctcatacctatgtcctgaatggtattgcctaggttttcttctagggtttttatggtttggggttttacatttaagactttaatccatcttgagataatgtttaaggtgtaaggaaggggtgcagtttctgttttctgcatatggctagccagttttttcagcaccatttgttaaatagaaaatctttccccattgcttgtttttgtcaggcttgtcgaagatcagatggttgtagatgtgtggtgttatttctgaggtctttgttctgttccattggtctatatatctgttttggtaccagtatcgtggtgttttggttactgtagccttgaagtatagtttgaagtctggtagcatgatgcctccagctaccagttgtttttgcttaggattgtcttgggtggacaggcaaacaggctcgaatagttggggtcacatgcgcagagtatcacagctaattaagaagtgagctgagacttgaaatgcgcatgctctttcccttaccaggatc

SEQ ID NO: 205620 - DNA, 1000 bp, Homo Sapiens
ctttaaccattgaatatgatgttagctgtcagtttttaaaaaaatgccttaatgttgatgaagtttttctacatcaattgagatgatcctatgttgtcttttttcgtttattctattaatgtatattacattgattgatgttcttatgttgaattacacttgtatttcttggataaatctcgctttgtcatggttttatatgctgttggttacagtttgctaatattttgctgagggtttttacatctatattcttaaaggtatgatctgtagttatattttcttatggtgtctttggctttggcatcaggataattcttgtctcatagaatgaattatgaagtgttgcttcctcttctatttttttggtggagtgtgataaagattgattaattcttctttaaatatttggtagaatttaccagtgaagccatctggtcctgtacttttctttgttgggagattcttattgttgaatcaatctctttacttgttatagatcttttcagatttcctatttcttctgtgtaagtttagataattcatacgtttgtagaaatttgtctatttcatccaagttatctcatttgcaagataagttatttcacaaatttataatcatttttgtgcatttgttttttgaatcctgttgcagataaaaagtggaattaaaaaccaaataaaaagtggaattaaaaaccaaactcacttatgagtgagaacatgtggtgttttggttttctgttcctgtactagtttgctgaggataatggcttccaactccatccatgtccctgcaaaggacatgatctcatttttttttttgcacaatattccatggtatacatgtatcacatttttttaatccagtctatcattgatgggcatttaggttgattccatgtctttgccattgtgaatagtgctgcaataaatatatgcatgcatgtatctttataatagaatgatttatatcatggtttaatggtttttatatttg

SEQ ID NO: 205621 - DNA, 1000 bp, Homo Sapiens
gtaatgtattagtgtttaaagtataaaaacatactaggaaagattagggttaaaatggttcttttacaaaatgttttctaaacagttggagagtattggtttcttttcattagtaagaatgaaaatagaattttaagaaatgaacttgtacattgtaaatcacatttattttaagaagtattgggtctcatgtttcgttttcttaggctgtcagtatagtggtggttcttcaccttttagggagtcagagacctctttgagaatctatagaccatttctccagaaaactggacttatgtagataggcacaaaattttgcttataattctaaagcattccgtggacctctgaagttcttctgtggaacttctgagcctctgattaagaatccttgaggtaataaaaatgtattggtctcgtattcagacagctgtggtttgaatccttattctcctgtctaccactgctaagaaaagctatttttcttctttaatgtccagttttctcttctttaaaagaagctgtttaatgaggaaactagcagctatctcctcctctaggaaataaaataacataaaaaaaagaaagaaaacaaagtaagggaaacagtataaacttgtggttttggtcactggactcagatagaccaggatttgaatcctggccctcttacttccagtctttgtctttaggcaagttatttcacttcactatacctttatctccttttctgtgaaatggagataaaaatacatatataccttatagggttgttatgaagattaagtgagaaaatgaatataagatgttgaacctgcacataatgtagtagtaacatagtaatattagagggagaaataataagctagcaaaatatatttgataaaatgctgaaatatcatacaagaaaatagctagagaaatatactgattatacaagaagataactggaataataggaaagttataggatgtatatggaagatagagcatggaattc

SEQ ID NO: 205622 - DNA, 1000 bp, Homo Sapiens
ttttgcatctttctcactcccatacatttatattatatccccactaaatttcttgttcctcattcttcaaatgtgggccagttgtggctcaaatcctctatatttttagccaatggcaatcaaattctttcagctcctttgtttcatacggaactccagatcctgagtaatccttttagagcccgaagagtcaaaaccctcaatgttccctcctgctctcctgccccatgtcaacaaatttcaggctaaggatgccccagacccagggctctaaccttgtatgcgggcaggcccagggagcaggcagcagtgttcttcccctcagagtgacttggggagggagaaataggaggagacgtccagctctgtcctctcttcctcactcctcccttcagtgtcctgaggaacaggactttctccacattgttttgtattgcaacattttgcattaaaaggaaaatccactgctcctctcctgtgtttgtttggggtagccctcagatcaaacttccccctgaccatccagtttctccctcccaacccatccccactccttgagccatattaaagacttgggcggggctccctttgctgaggaagagtttactgtgaggcgcctgggggaggtggcagaatcccgccactttaggaggctggacgaaaggcctccttccacacccaccgccatccacagcagccaatccacagcagccatcctagaacctcagtggcaccgtgcctctggctgtgagacactggggcccagggcagagattccagttccgattctcagaggattttgaactacaaaatgcatgttagttgcattgcattctagtgtggaaaccagagccctgaatgcctgtgtttttagtaagaactgaagtctcccctctaaagtggactctgccccgcaccccagacctccactcccacctccagcgttgtgctcctgcagggccaggttgcacaatcattcttggtctggaccgctctgatt

SEQ ID NO: 205623 - DNA, 1000 bp, Homo Sapiens
atattgctcctaatatcacagtggctgtacaccctgtcctgtgatattaattgtaatatcctacagagatattactcctaataatacagtgggtgtacaccctatggtattattcataatatattacggagatatgactcctgatatcacagtgagtgtacaccatgtttgcacaccctgtgatcttatttgtaacaacttagaaaaatattacagctaatatcaaagtgggtgtacaccctgtgatgttatttgttatctactaggtagatattaatcctaatatcacagtgagtgtacaccatgtgtgtacagactgtgaaattattcataataccctaggaagatattactcctaatatcacagtgggtgtacaccctgtgatattattggtgatcccctagggtgatacgattcctactattacggtgggtgtacactctgtgaggttatttgtaatgtcctgggaagatattactcctaatatcaaagtggatgtacaccacgtgtgtacactctgtgatatcattcgtgatatcccagagagatatttctcctgatatcacagtgtgtgtacactctgtgatattacttgtactatcctagagagatattgctcccagtatcacagtgggtgtacactgggatattaccaataacatcacccatgtaatttctccctaggatgtcacgagtaacatctcagttcatacacacatggtgtacacccacggtgacattaagggtaatatctccctgggatattaccaataacatcagttacaatattgtattgtcagaactgcaaattattgctgagtgtggattgctctgaaatctgaaaacatgccttgtgaattgcttatatccaaaatgcagacacaatgctgggtgttggtttacttgtttccgatttctcaacctcttttctaggcaaaaggtgtccaatctctacagacccacagaatctaacagatgtctctgtattcctcctcctag

SEQ ID NO: 205624 - DNA, 1000 bp, Homo Sapiens
ttgattttaaagtaacagactacatttattttcacatgagtcctctaagtgttttttttgtagaactcttaatacactaaagctgtcgtttcaggttagccattgagtagagaaatacgtgggcattcttaaggaaatgttttacacacacattcctaggtagagtgtatatttgcacatatgtatgctgtgcatggctgtacatgacatttatcattcagttaacattacttcatttcttatttcattattaaatgctattatgtgacctgcattatacaatactgtgaagatcagagtggtgcacccccatcccaagctgcatcaaaagaaagcccgagtagtaatcacagagcaaattagcagaaaattgaaccagttatgtgtatgatatatggctccatgaatgtgaattacattttttcttctttgatttttgagagtttatttttatttgcaaggtttgtttagtttcttacagctaggttattgcaattaactaatgattacatacgatatttgttgtccagcagtctcatggtaccgtaggttatataaatacaggaagtgatggtatcattttgatgccacagttagtggcagtgtggctttaggtagtagcttttatacctaattatgcttcaggactttaaaaaaatcaattgattagctatttgtgaggaatatattggtgttgctaacctcagttctctgggtggaaagtttacttgaagctttattatctcactgtagtttggaaacacatcccagtattgttgtgtgtctataatgtgtgtgagagcattgatgtttggttgtctgaggtaatgaatggcaactatgaagcagccattagtttttgaacttaaaattttttaggctcttttttgggtattgggtctgccctttaaaattttatattaaattctagaaactaatgattgttttctccaaatccaaatttttgaggatctaagagtgttgagttctgagagaaatt

SEQ ID NO: 205625 - DNA, 1000 bp, Homo Sapiens
ttcaggtaacttaagtataactttactaaaaaagctggctttaaaattatcggtggaacaaaaccagaaatgccttcagaattgtcagcatacattttgtctgaattttatatttgtctttgctagacattttgagatgtcagtgtttggcatagaaagttataaaactataagcccagtcaaaacaaaatgatttgacttgtgtgccttttttgacaaatgagagtaatttaatgttagctaaatctcctgagttattggcaaaaatacctatgtatttaactttgagacatgtacttaggtttaggtgagcacctgatgttcactggctattagaaacatggttaacaagggaatcactaactttaaaatgatagtgtctaatatctcagtttacagaagtaatctagataaactgttaaaagtgaaagaatcgagtccagtgaatggggtaaatgttttacataaactttttgtgtaaattaaaatcttaaaattatttttgatcctcatttaatatctgggtcatttccaatgaagaaaggtttgtgatataaggaaatatggttctaaaaactgtggaattgttcttatctataagtgcccacatctgatagttcaggatttcttgctttttgggatttcactaaagttttaggttaccaagcataagaattctagtagacacataattctgtatacaaaatgtcccagaaagcgttatgttattagtgagaaaaagaataactttgtctgattcagaagttatctaagagaggtggagccaagatggccgaataggaacagctccagtctacagctcccagtgtgagtgatgcagaagatgggtgatttctgcattttcaactgaggtaccgggttcatctcactggggagtgtcagagagtgggttcaggacagtggatgcaacacactgagcatgagccaaagcagggtgagtcatcgcgtcacccaggaagtgcaaggggtcagggaattc

SEQ ID NO: 205626 - DNA, 1000 bp, Homo Sapiens
ccgaccaggcagtttctcaaaagaaatgatccgtacccaaattttttttagcagttttatgtataatagccaaaggctgaaataacctgaatgttcataaactggtgaatggggccgggtgcgatggctcacgcctataatcccagcactttggcagtctgaggcgggcggatcacctgaggtcaggagttttagaccagcctggccaacatggcaaagccccatctctactaaaagtatgaaaaaattagctgggcatggtggtatgtgtctgtaatcccagctgcttgggaggctgaggcatgaaaatcacttgaacccgggaggtagaggttgcaattagccgagatggtaccactgcactccagcctgagcgacagagcaagactccatcacaatacaatacagtacaatacagtacaatacatcacaataaatacaacacaacacaataaacaggtgaatggataaacaaatactgtcatacaagggaatactactgagcaataaaaacgaattaattaccaatgcattgcaataataagaacaaatctcagacaggcacggtggctcaagcctgtaattgcaacactttgggaggcaaaggcaggagggctacttgagctcaggagttcaggaccagtctgggcattagtgacaccttggctctactaaaaacttaaaaatcagccgggtgtggtggcgagcacctgtagtcccaggtatttaggaggctgaggcagaaggactgcttgagcccaggtgataaggctgccgtgagccattatcgtgccactgaactccagcctgggcaacagcagaagacactgttcccctccaccaaccctcccccacaaaaaaacaaacctcaaaatcattatgctgagcaaattagacaagagtatatcctgtatgatgactctacttatataaaattctggaaaaagcaaactaacacatagagacagaaagcaaatgaatggctgcctgaggacagagg

SEQ ID NO: 205627 - DNA, 1000 bp, Homo Sapiens
gggtctcactctgttgcccaggctggagtgcagtggcacgatcatggctcactgcagcctcaacctgccaggctcaggtgatcctcccacctcagtgtcctgggtggctaggactacaggcatatgccgccatgcctggctaattttctgtattttttaaatagagacagggtatcgccatgttgcccaggctggtctcgaactcctgggctcacgtgatccgctgaccttgtcctaccaaagtgctgggattagaagcgtgagccaccatgcccagcccactactatacattttataatgatgtttgatgtcatagacatgacatcaactatcatatcagcttccagaactgattttattgtgtagcaccacatgagaaggcctcagagagaactgtgtgaagggattctcacagtggtttgaagagagaaaagagatgggataagcaagtgaacacaaaagaccgcaccagagcaagcagtatgtgcctgtcacatcaccaagcaacaacctcacggccgaagcacaccgccgtgtctcctgttactgctgatcttcatggtagtgggtttaaggcaaagcaggaattattgggaaatgttttccttgtgaggggaactttagcactcatttgagaaaccccattctgttttgtttctctctaaactaccagtgaggagggagtttcagagactgactagacatttttctatctcacaaagctgtcttctaatttgatgtgttttgctaaaatttatatctttccttctttctggataaatagaactttctcaaacaaacaccctttggtttaactgcttattttgttgggcgattcataaaatgaccacatcacaatcttcacccaattagggaaatgaaagttaagaaaaatgaacaattgagggaaactctagatatgtttgaggagttcccctggttatcagatcttatgcttaacaggcactcaataaacacttctagaatttaattgaattc

SEQ ID NO: 205628 - DNA, 1000 bp, Homo Sapiens
gaaccaaagacttctttcatgtgggttccatccacagtttgcttagaattaaccatttttctacttaacaccccattagaagtgcacataattttaccatgtccctataagtctttcctttctgtcccatcactgttttccccaggacgtgtgagttactctactagcaggtaattcttcagatgacgtccctgtgttactctttttctttttttttttaaagacagggtctcgctctgtcgcccaggctggagtgcagtgatgtgatcacagctcaatgcagcctcagccagcctcctgagctcaagcaatcctcccacctcagcctctcaagcagctgagactacaggcacccatcaccaagcccggctaatttttgtattttttgtagacggggtctcactatgttgcccagcttggtctcaaactcctggactcaaatgattctcccaccacggcctccgaaagtgttgggaggcatgagcccccgcacccagcctcttgtattattcttgaagtctggccccaagaccagtgttcagaggggatctaatcaatgctaaggatagggggactattgcctctcaaagtacagacaatctagttctcagtaagatacagggtgttgtataaggggaatggtgaggaggaaacgcataaggtggccacatcattctgctgacacagaacaagcttaatattgacccataaatctttctcacaaattctactgggccacgtgggccacttcctagacttgtgcagtttttatttggatacaagtcatcttgactcattagaacatttttactcacaattctctcttaagatgtcaaggaggaatactgtacatttcaggataatttccataaaccattaaaatgctcttttttctaactaacccatcttaccttttcttctaatctttgaaagctggataacccaatcgtcaggcttcttaagagacatatggtatgcactcacagaacaactaagattt

SEQ ID NO: 205629 - DNA, 1000 bp, Homo Sapiens
tccagtccattaataaaccacacaactaattagtccttggtctatttggagtacgcaggccctggacaccatcatcctgcatcatggacaccaccgctcctctgctctgtgtctaattcatctttttcagagacttacccctattcatgcttcttaatgagccaaaggcactaaagatctgctttaaatggcctttcaggaaaattaccttctcgattacagctaggaaagtatcttagcagctgtgttttcactgaaacagccataatatcagaagatttgcaagctacttcacatttattatcccccattgatatttaataattctacttgcaagtaccacagcctaatttgtcccttgcaaattgccaagaataagatgttgtcctcatcccatggtgtccgcagggagctcgcctgatatttagcacaaatgtgactagcccaaaggacaacagagtgtgccaagaattcattcccccatcccccaaaaggaattggctactacagctagcttacaggaaagaaagacctcagaagatactttcctcaaaatgctctaaagtcagaagtctcaaaataacatgtcaatgtccacgcttccacatgtgagccataagcgccctgtgctgttggaggaaatctgatgtggaaatgttttatggcctgagattcttgctcaagtggcctagcagggcctaagagaagatgctgggggagaaatgaaagcaggagggaaagactgcctcacagattcaactccctggagaaaaccctcaaaaagagtgggagtggatgaggtatccactgggcagtgatgtccctgggccaacagacaacagaattaagtctatatcaagcagaatcccatggaaaaaataaaagaattttttttaaaaaaagaattctaaatctagcttgacaacctggttttttttttttttttttttttttttttagagagagacagggtctcactctgtcaccaaagctggaattc

SEQ ID NO: 205630 - DNA, 1000 bp, Homo Sapiens
aatgaccagcctggaggcattctgctattctcatgctatcatcaccacctatctgcatgtgctgatccctcagtttaggactacatctttcagctccccaaatctgcctggcaaactccttcaccgcttctggaaagctttccttaaaatccttctgactaagcatcgtctgtgtacttctttagcacagaaactgtaccactgttacagcacatgtgacactgcaccgtatatttttggctgtctcccaactagactgtgagcaacctgggattgggaattctatctttgtcacatcttttatctctaaggccttcatttattaagcacattgtaggcactcaataagggaactacaaaggaaacaagtacccagagaaatgaattatctggtttaagacattgttagaaaaaggtaaaggctaacatttcattttatttatttatttttatttatttttttgagacagtcttgctctgtcacccaggctggagtgcaggggtgcactcttgggtcactgcaacctccgcctccctagctcaagcaattttcctgcctcagcctcccgagtagctgggattacaggcacctgctaccacacctggctaatttttttgtattttcagtagagttggggtttcaccatgtcagccaggctggttctgaacttctgacctcaagtgatccgcccacctcggcctcccaaagtgttaggattacaggtgtgagccaccacgcccggccaacatttcattttaaatgcagttataaaaccaaatattatctatacagacattaaattggtcaactgaggcttcaggccctaggccaacagaatctatatacacttttgatgtgttctatttacttatacgatcacctcaactcaagctttcacccctaagaaaaaagaatatgcactttcaccaatatgtatcctctttatctactctgtttttattttgaagtaaaaaacttcattttttttttaaagaattc

SEQ ID NO: 205631 - DNA, 1000 bp, Homo Sapiens
ctgaatttacaggaaatacacttgtcattattttcatagagaaaccatcagatgggaaattcttcagcttctgaccaccaaacttactaagcagccctgattcactccatggatctattgaatcagtcagactgtgagagaagcctttggcaatgacttttgaaaacaaactctgcatatttaagtggatgatgaaccagtttggataaactaagggaacctggacctttgcctactgccaccaaaagaaccagggtggcttctggctgctttgcttgggatgggctcagcaatgaagtgcctatttgtttgctggttagaaattgttcatagtgtttgccttcctgggaatcttgttctccccttgggcatttaaagtgggttcaatattttcatgtggctttccccagaattctgttttaagggctgctactccatttttattccatttgcagggaatcagattgtaaaccaatctgcaccctatttagttgtctgagggaggagcagagtgtgcttttgaacagactctgcttttgaaaattacttggaacgtgctttttgcaatgccctggcctaatgtcgaagcatcatgccagggaggttgtttttaattactcatttacttctaagcttgggaagcaggagtggtatgaagggaggagaggttgggtggtggggaggaaaaagaacagcctgtgtacttgtttgctcatggtggtgagaatgttatgccctgtccttactctgcaagagaaattattcatagctttatacaagtaacctgacccctccttgcaaaaggcactgatatatatgtgaacaaaagagatgttcttgcatttgctgaaataaagaaaaaagagagaaagaaaaaagcaagcaagctgtggcttcttctaatgctctattcctaaaattcctttatgccttcatgattattatacataatttttatgtttatattgggttccagcacaagagggaggctaaagaattc

SEQ ID NO: 205632 - DNA, 1000 bp, Homo Sapiens
tttacttgcgaaacatgccctacttttcttgcatgctttgcatagagttgtttctagttattctattatttctagtagttttatttacatatattgattataattttaatacttagtaatcttttattttccagagaaaactaggaagtagacagttataaactgtcatatattagcattctatagtaggttagaaaatgtatgaatataccatctcccaacatctagagggatgtgtttcctcataatacaattcctcagtgtggcagaaaaaaacatgtttattaacgggccaaaatatctttagtctctctgtaaaaacaggaagccaaaagtatataaacttgaattatttatgttcagtaattaatgttttagtattgtatcttatttataaatggtctagatatttaatgcaaatcttttacttagcttaactttaaggttaaaaattaccaaaagtactttggaaactattcttaggcagatttactgtagacaaattatttttgaaataatgtttttcgcttttcacaagacggcaccgaaagcgaaggaagctcctgctcctcctaaagccgaagccaaagtgaaggttttaaaggccaagaaggcagtgttgaaaggtgtccgcagccacacgcaaaaaagaagatccgcatgtcacccaccttcaggcggcccaagacactgcgactccggaggcagcccagatatcctcggaagagcacccccaggagaaacaagcttggccactatgctatcatcaagtttccgctgaccactgagtcggccggaagaagatagaagaaaacaacacgcttgtgttcactgtggatgttaaagccaacaagcaccagatcagacaggctgtgaagaagctctatgacagtgatgtggccaaggtcaccaccctgatttgtcctgataaagagaacaaggcatatgttcgacttgctcctgattatgatgctttcgatgttgtaacaaaattgggatc

SEQ ID NO: 205633 - DNA, 1000 bp, Homo Sapiens
aggcatgaatgacatcacatgcccagcctgatacatttttagtatcactaatgaaacaaaattatcactacagcacctgaagatatcaaaaggataataaagaaatactatgaacaattctacaaacataaatttgacaacttagatgaaatgggtcaattctcggaaagtacacatccaacataaaataggtaatttgaatagtcctataactactaaatggaataatttttaaaactcccccaaaagataaagataattaggcgaagtggttagcatagtgagtggaacactagcttgtgctcaataaacgatagctataaccattttatttaaatcatcacaacctctcagggaaactaaggcttcacagataagaaattatttgctaatatgtaacagaatcagaatttgaacccagatctgaaatcagtgtcctttcctctagagttaaaaatccacaccaaagttattcccttgggcatgtatcaaccaatatttcttttataaacaggaaaactgtagagtgaaatttgtgctaaaaatcccagaaatcaataaatgcttgccaactagttttctccactattgtacagcaatgattctcaaatgttagggtgaatcaggatcacttgtttgttaaaatatagactgctgagtccaagtcctagcccaagaaattgcattttgaacaaattcccagttgatgaactgtactttaaaaaaggtcgttcctcctgtgttagctcacttaggaattaaaaaagaataatataaaaagaatgttcattccaatttttctgtaccaaaaaaagagaatgactggtgtacagtaatgatatgttagtccatccatccctcagtatcagaagctatcacactccgcagaaggggaaggaatcaagacaggataatgttctaaatcagtggttctcaagggtgggcccttcttacctactgaatcagaaatactgtagctagggcatccctaacttgtgtt

SEQ ID NO: 205634 - DNA, 1000 bp, Homo Sapiens
gattacaggtgtgagccactgcgcccagccaataagtcccattttgagttgttcccctgaccagcctacacttaccagggctccatccatcagttctgcagctattcacttcactaagagacatcaggcacacattcccgattgtggcttcaatgtatttaggtgattggcattaaaagaaaatatttgcaggatgatttttcaccttaacttgaactgcttctagatttaaatttaattttgtaaatttattttgattataaaaccaacacaaacttatttcagaaaatggaaagtttagaagcgtacaagaaagcaggtaaatgtttacttataatcccaccacccagatacctttgttattaaagtttccttctagccattttacgtatgccccaaatgccctcttcacagctcacctgggaagccagcagtgtcactgtgcagtactgtcacactacaagataactcgtacctcacgttgcctgtcgatggcagtctagccttctcatctccaccctccaatccctacacatgtagcatttccagaactgcgcaagagggattcccaggtctcccaagcccatctgggggccacccgtcctgctggccagccacactcacactggactgtggctgttccagaatgttccttttcctgtcacttcttccaccttcataatcagcttctctagcctactgttgcttagagtcactactgatttctgtgtaacacattaaactaacactgaagaaacatttgaaatgttttctaaaaagattttttaaaatgttggttatcttattgcttctgtggctaaggaattcaagagtggacgggtgtttccagatccgggtctcaggtgtggttgcagccggaatgttggtaggggctgcagtcttctgaaggttggactggggctgaaggatctgcttccaaaatggctcatgttaacttggaaatcacacaatttataaatttggaaaggagactttattt

SEQ ID NO: 205635 - DNA, 1000 bp, Homo Sapiens
cacatatatgtactctctctctctctctgtctatatataaaagagtaaaatgtttttgtttttttaagacatggtctcattctgtcgcccaggctggagtgcagtggcgtgatctcggctcactgcaacctccacctcccaaatggattttatgcatcagtgtgtttttcacagtgttatttgtaatgaagaaaaactgaaaagaactagaatctttcataaataggaaaacacttgaataaactatgatatttgatggacttttatatagccatctgaacgatgtttataaatggcttatactaacaagaatgaatgcttacgttgcaatgttaagggacaaaggcaggttaaaaacaacacacacagcagcacacatatacccacgtgccctcctgacatattaggaagagcgattttaagactggaagaaaatttacagtggttattcctgggtagtctgatgggtgatttccaccacccagttcagtagctggaacatggcagggactcaaaaaacatctgtggaactagtgaacatttgccagattttctgaaatgagaatgcattatgtatttgtacaataaatgcacttttccctcaatatctgaagttgtatgctgttcagtatgatcacatctacggaaaactggtgaaaaacaaacaaaatcatatatataggaaaaagacaagaaagaaatagtccaaaatgttaatagtagtaatctctgggataagattataggtagatttttccttccttttaaagtttacttttattttattttcttgagatggagtctcactctgtcacccaggctggagtgcagtggcgtaatcttggctcactgcaacctctgcctcctgggtttcagcaactctcctgtctcagcctcctgagtaagtgggattacaggtgcgtgccaccacatcaggctaatttttgtatttttagtagagacagggtttcaccatgttggccaggatggtcttgaattc

SEQ ID NO: 205636 - DNA, 1000 bp, Homo Sapiens
aaagttaaacaatggaaaaaggtatttaattcaaatggcaaccaactgagggcagtagtggccatactgatatccaacaaaatagactttaaatcgaaaactgtcacaagagacaaagaaggactgtatatagtaattaaagggttaattcaccaggaatgtataactgttatgattatgtatccatccaacatcagagtccccaaatatatgaagtaaacattgacagaattgtagggaaaaataatagtagtaaaagatttcaatacttcagtttcaatagtgggtagaacatctatacagaagatcaataaaaaataaatagaactttaacaatgttacaggccaaatggacatttaacatgtaacatttaacaatgttacaggtcatatacagaatgtttcacccaaaggtagtagaatacacattattctcaagcacacatgaaacattcttccatatagctcacattaggttataaaacatgttttaaattaagaacattgacatcatatcaagtatcttttctgaccacagtgaaataaaactggaaatcagtaacagaagaaaaactagaaaatttataattacatgaaaattgaacaacacactcttgaacaatcaataagtcaaacacaaaatcaaaaggcaaagtagaaaatatcttgagacaaaaaaccaaaacaaaacatataaaatattgtgggattcagcaaaagcatttctaaaaggagagcttatactagtaagtgcctacatttacaaagtttaaagatcttgaataaacaacctaactttacattttgaggaacaagaaaaacaaactaagcccaaagttaacaaaagcaaagaaataaataataaagattagatcagtataaattaaaaaaagaaaaacaacaaaacatcagcaaaactaaaagttggttttttgaaaatatcaacgaattgaaaaagctttagtttgattaagagaaaaagaaaacacaaatgaaataa

SEQ ID NO: 205637 - DNA, 1000 bp, Homo Sapiens
aatatgttcatacatagaatctctgttacaattaatttttcacaactgtttcacaacttgttcaaacctttagctttatcctaatttaaaacaatactttaaccctctaaactaggcaaaaatttacatttccatgccttgttataatcttttagtaaaagcacattttgctttcctcatacactttgcatgtacaactttttttagtagtcttaattacatgttacaatgttaattcttagcaatattaatttttggtgaaaaccctgttaagtaagtgattttaattacgtactaggtttggagcctaggacaccagacagaagtacagataaggtctgacccttttcagcatagctaggggagtggttaattccacatgtccttaggtctgacctagctgttaagcaggcaagttgaacaattttcaaaagccaaagaagcagtttatgaccttaaagcatttagtaaacctaatatctgacctacctaatttatttacttattttattttattattattttttttgagatggagtcttgctctgccgcccaggctggagtgcagtgttgcgatcctggctcactgcaacctccacctcccgggctcaagcaattctcctgcctcagcctcctgagtagctgggattacaagcatgtgccaccatgtccggctaatttttgtatttttagtagagatggggctttaccgcgttggccaggctggtcttgaactcctgactccagggatctgcctgccttggcttcccaaagtgctgtgattatgagcatgagccactgcacccagcctgacctacctaatttagaccaaatgtctttattttaccagtaatctttaaaactgtttttatttctcagagattactaaagtcacgtgaactacaaggcattacagttttttctttcaaaatattttatttaagccttatttttctttaagccaattacttagagttcatttatataaacatcacacact

SEQ ID NO: 205638 - DNA, 1000 bp, Homo Sapiens
ttcttcctcagagaaatctccattttactcttatggtctttcaactgattggatgaggcccactcacattattgaggatgatgtcctttacttaaagtcaaagtttactggagatgttcaccacacctccacaatgcctgcacagcaatacccagactagtgttagattggataactgggtgccacagcctagccaagttgacacaaaaactatcaccccagaaggcctcttcagacgtgaaattccaattattatcacttgaggaaacttttttctttaagacttagtctttcaaagaaataaggaattactaaaagataagatgcatttcttaaattatactacaaaagagatttttctagtttctttctaattcctacgtaaatctaagttaatcatagctccatgtcagactgacaatttttaaaagttaatgaaagatactgagtacatcagtggactagaaatgagatactcacattatctgatttttccctcatcttgtttcaaactgaaaatatctgggaccagtgggagaaaatttgatacagcaacaaaataaatatcattctgattttataaaatggaactggcttaatttttctttttattatatggaactaccaggatgctaaacatttggggagttattgacagagacagataggattgactttatgaagatcaaaatgagagaaagtataatttataataagttcaggagaaaattgctgaagaacactatggtttcttcattttctcaaagttgtaaggaagaattggtagaaaccaagattcttgagtaacagaaattttgttttgattactgaataataaaattgttactatgctaacaaaacatgtcattaattcaaaagaagatcaggaagaaaagagaacttagaaaatggagacaaacagaaagcacaaaataaaatagtactctatatctaaacccaactatattagttattatattaaatgtaatgagctgaattc

SEQ ID NO: 205639 - DNA, 1000 bp, Homo Sapiens
gtaggcaaggcaatcagtttattgaagaaatggatgaattttgctttttaatgtaaactttaactcctctttgaaaagtgattctgtatgaattgttaaagtgaatagtactctttttgtgaaagagcaactgctaaaactaaagaataaagcaaaataatacaaagaccttataaaaattatttcctgaatgtagccaccaaatggcattgtttaaatgtggtattttttaagtaaacaagatattcagattcacatataagcaggagcacttagatagcaattaaggcttggcttggccatttggcttggacttttgagtatgtcattgtgacttgtaaaattacaaataaaataaggtccatctgattagccgtcgctgtcttccaccctagacaataagttagatcataatgttcagatttacagggtttattgtcctgtatgtgcatcatactactttccccgtgagcaataatttgtacacaggtcatattggtttctacagacctcagaagaaggcaaagttactacatttgtagttacattagttggagggaagacttcccactggcttccaaaagctttggccaggcaatcctatggtggtggccaacagctatgtaagcccataggaactaaaactttgggggaggggaatatttctgtttggtagagttatggttttaaaagggtacagcaaccctgttgcttttttctctctgtacccccaccacatggagcagaatgcaggcccagccatgaaagtatgaaatagtatcagagtagagtaactagatgcccaattttctggccagaggctcaaccaagaaggggagcccagggaaccaggaagtggagagattatggagtgggaggaaaccacgaaagcaatctcataaagttgtttatgaaccccaaggatcatcctcaaatcactaatgcttggatctgattctatttagccttgagaatcttgagaactaaactatccaacaga

SEQ ID NO: 205640 - DNA, 1000 bp, Homo Sapiens
gaaccagaccaaaatacaagaaatactactttaaaaatttttcagccagagcattctagaaaacattttaaataacttgccgaattacaatcatgaaatatattggcacgctggtgccattctgttacagtgatgcctagcaaatcttcccacagtaaatttaggattaaaaaaattgctaccactcaatactgtactacctaaccagatttcctggtaagttattttaaaatatggctgctattaaggcaattaatcaagtgataaatttcctgtggaatgactccacttaagctaagaagtcaatctactacacacattttgcatatttaaatatttaaaagattcaatggcttgacctctacctaaacatgggaaaagcaaacaccaacattttataactaaaataagttttgcagtatggagcctgattttcagctggtatggaccaaagttgggtgtgtcaaggcactttggctggcctgctttagactgctcttgtgttggctgaaacacacacaccctgtctgtccacattattgtttccatattttgtcatttactacatttatttatttcttaaattaccaaggatatttcttgagaagtaagacagttcctgagcaataagattcaaagtgtagatatagaatcctttttgctcttggggcagaacaaaataattggccacaactagtttttaaggaatgactattaattcttccgaatgttgatgaatggtgacactgtgcaaagaagagacctctgggcatggctgcccatccatcccttgatgctacactggctcttaccttccagtttgcactgctctcccccagggcacccagaagccaggctgtgactagacccagtgtgtccccccagagtcccattccctattctatgcaaacaaggttttgcagatatcaccatgattcagtttgctaaggactattctattggaagaaaaatatagtggttcattgtgccctagaagctt

SEQ ID NO: 205641 - DNA, 1000 bp, Homo Sapiens
ttatggcacatctcagtttgaactagccacacttgcagtacttactgggcacgtatggctgtggttgctttttggatagtgccactctagggaaagaccctagaaacctgtaagtgtaaaagcatcccaggtgattcttatcaagtaagtctggcaagtgctttaaggaatggactctaaacaatgagcttttgtgccattttgatggcctcacggatacgtatgtaacactggagtgaaaggggcctgacaggtcacagttcctcccttttacagatgagaaaacagaaggaactgatttgccaaggttacgtgtctgctggaactagaatccaagtcgacaggtgcttcattttttattttttccactgcatttgtatgtgttcttcagactgtctgaataatgggaaaaagctatcagagtgacattttcccaatctggtgaacctacccccgtctcaatccacgcttgattttgaggtaataaaatagtgaaaactaaaaactgctactgactgggtgcctgctgtgttccaggcactgtactgtgtgctacttacatactatatgcgaactttcacaatgaacctgtaaatattatgcccattttgaggatgagaagagtaaggacatgttcaagtttgcaaatgggtcagtggcagggagagagtttgaaccggggtctagtgcctagaccacatccttctgcctatgcgtgctgctaaggcatgggctggagattctgagatggcaccaaaggtggtataaagctcatcccctggcatatggcccagtcaccactgccatggcccttcccgaggcttgggagcatttctctagcacagcccacctctttggaagggttgctggtccccttcaaccctctgctatggggcatgccctttcagttctccgagccatcatagcaaggatggaaaaagtcctctaccctaaccacatctccatccttagctctagggcctgaagctctggcagtgga

SEQ ID NO: 205642 - DNA, 1000 bp, Homo Sapiens
tcccaccactactatgaccaccaacactcactgacttaccaaaagttggatagataattgtcttacttgtttttattaatcttaagtgtaggtatagctcatgtttattttaatatttaatataagaagtgtttttggttttagtcagaagtttggtgatgtttttgtgaccagaaatacgccattaaggacttaattattgtttgtatcagttagcctgtggtaaaattgttttcagtatactttattttgcttaaaattgatgtgtcccagagcctatcaagggtgttaagtgagaatttattagaatggcaaatataaaaaaaaataatgccaaatgctgccaaggatccagaacagtaggaaccctcctccattgctgttgggaatgcaaaataataggatcactttgaaagacatttcaacagtttcctatacatctaaaatagtcttaaccttatgatccagcaattgcactcctaggtatttacactatacaattgaaaacttatgtccccacaaaaacctgtgcatgaatgtttatagcaactttattcataattggcaaaaattaaaagtaacctatgtccttcaatgggttaatagataaacagtggtacattcagactatggaatagtattcagtgctaaaaagaaattatctattaagccacagaaagacatagatggatggatcttaaataaattttgctgagtgaataaagcaattctgaaaaggctacataatgtatgattccaacaatatgacatggtaaaggcaatactataggaatagtaaaaagatcagtggttgtcagggaatcaaggggataagggagatttaaataggtgaagcacacaggagaatttttagggaggtgaaagtattctgtatgatacactaatgatgcatgcttgatttgtgcatttgttaaaacccatagaactgtacaaaacagagggaactctcatgtaaaagtaaattatgtgcttagctaat

SEQ ID NO: 205643 - DNA, 1000 bp, Homo Sapiens
atctctactaaaaatacaaaaaaattagccaggcatggtggcgcgtggctgtagtcccagctactcgggaggttgaggcaggagaatcgcttgaacccggggggcggaggttacagtgagccgagatcgcaccactggactccagcctaggtgacagagtgagactgcatctcaaaaaaataaataaataaataaatttcaaactattcattcaaagatggtgaattttattgcatataaattatacctcaaagctgtaaaaacattagctttggggtgatgaaaatattctaaaattagatcagatattatggagatggttgcataactctgcaagcatactaaaaaccactgaaatgcacactttaaaccagtaaactataaagctattttttaaagttaactttgtttgcaattgcttagtgggcatcagctgataacgagaagtactagttcagctgcttgatagataagagaggaggtttaaacatacagcctgagctgagaatgctttttacattttaaagtgttgttaaaaaaaaaaaaagaagaagaatatgtgacagagactgtacgtggcccacaaagcctaaaatatttactatatggttcttttttcttttttttttcccttcctttttttttctttttttgagatggagtctcactctgtcacccagggtggagtgcagtgctgcgatctcggctcactgcaacctccacctcccgggttcaagtgattctcatgcctcagcctcccaagtagctgggactacaggtgtgcgccaccacacccgactaatctttgtactttcagtagagacagggtttcaccacgttggccaggctggtcctgaacttctggcctcaaatgatctgcccgcctcagcctcccaaagggctaggattacaggcgtgagccactgcgcccggcccatgcccagctaatttttaaaattttttgtacagatgggactcaatatgttgccaggctggtctc

SEQ ID NO: 205644 - DNA, 1000 bp, Homo Sapiens
ttttaatgtagtctttctatttccttacattctccgggtctactcagatgtcccatgtgatcactgcatttgcacctttctctgtcccaatcctctctcgcctgctggtgcctttggtttggtctctactctagaatgtcgcatgctggacacctgtggacatcacaggactgcagatcctagtctgtaacttgggatagtatggtgtctcagacatgacccccaagtcccatccaccccccatacacaggtacagggacaaagacctggaggtgaggatgtggagggtgtgccgagtgcctcagttacctccacccacccaccttccatgtctgttcctggagaccctgtggcactgtgcatctgtgacctccctgagcaagcccctgatgcctgctttttccaactgagatccttctcactcctttcatctcctgagactgggaccacatgggatcaaccacctgttctctgacacaacgatgcgtatctgctagcatttcaatatttgtgttccctccaaaactcacagtgaaatgaatccccactgcaacagtgttgggaggtgtggaataacagcaggtgtttaggccatcacggcagagccctcgtgagtgaatgaatgctgctatgaaaagagcttgcagaagtgggtttgctctctcttttcctcttctgctatgtgaggacataacattctccccggcttgtccttccaccttttgccacgtgaggaaataccaggaagactcttgccagataccagatactggtacctttgttttggacttctcagcatccagggtcgcgagaaataaatttgtttccattacaaattgccagctgtcttggtccattttgctttgctataacagaatacctgagactcagtaatttctaaagaaaatgggaggccaggcacggtggctcatgcctgttaatcccagcattctgggaggccaaggtaggaggaacaccttcaggcctgaagttcgagatc

SEQ ID NO: 205645 - DNA, 1000 bp, Homo Sapiens
aatcagtacattacaaatggataacttgttttaagaagggacaagacaatgttgaaaatgaagtctaccacatagaccatccacatcaatttgtgaggaaaaaattcattttattcatgcccttgttgaagaactgacaattaacagcagaaaaaaaagttcaataccataagcatcacaattgattcagctcacacaattctgacagaaagattaaaattgagcaaactttctacttgatggatgtcaaaaccattgggactagatcagcggcacttaagaacaaagcttttagtgaaaattttgaagtggggtcaatatcctgaagcatttcttcaaagaattataacaggatataaagcatggcttttaccagtataatcctgaagacaaaacataatcaaagcgatagctaccaaaaggtggaagtgattcgttcaaacaaaagtggactggtcaagagcaaagattatgaaaacagtttttttggatgctcaaggcattttgcttgttgactttctgcagggcaaaacaataataacatctgcttattctgagaatgtttgagaatgctacattgcacctgagtcaattacttatgagtttacaacagcttgtgtatggaattctctaagtcaggatcctagtgataagaattatcaaaagtcactgtgaattggttgattaaaaaattgtggctccaaatcttgcctctttctagataagcataatcctagaaggttgaatgaacctacagtagtgttttgagtttctaggtcgagtgggggtgaggcaggatttattcatggacaattacaaaagaaagcaccttatatctcctggagaaattaaaattgaaaaacagataggccaaccagcgtgtgcatcaatgcatagaatgagatacagaggggatgcaagtatttcttcttttactcagtaaatatttatcacacttttctagttgcagaggatacagagttatataatacagatatag

SEQ ID NO: 205646 - DNA, 1000 bp, Homo Sapiens
cacctgagtagctgagattacaggcacgcactaccacgcccggctaatttttgtattcttggaagaggcatggtttcactatgttggccaggctggtgtcgaactcttgaccttgtgatccacccgcctcggcctcccaaagtgctgggattacaggcatgagccactgtgcctggccctatagttttcttgtagtgtctttgtctggcttttttagagtatggcagtactccctgatctgtgattttgctctctgtggttttgctttccatggtttcagttacccgaagtgggctgaggtttgataatcctaaatggaaaattccagaaataaaaattcataagttttaagttacacgtcacattctgagtagtgtgatgaaatattttgccatcttcatcttgctccattccttcgtccagcatttacactctatatgctgcccatctgttagtcagtcagccatcagttatcggatggactgcagtatcacagtgcttgtgttcaagtagcccttattttatttaataatgaccaaaagcacaagaggactgtgcctaattagaaattaaactcaatcataggtgtgtgtaggaaaaagcagtatatacagatggtcccaaatttgatggttgaacttaagatttttcaactttaccttgatgcaaaagcaatatgcattgagtatgcacctctacttatggttgggttgtctggataagcccatcgtaggttgaatatatcataagtctaaagcgactttcaagttagtatattttcaacttacagtcggtttattgagacttaacccctttgtaagtcgaggaacagctgtatagggtttggtacttttcgaggcatccactagggatcttggaatgtatcctccttggataagggggcaactactgtaatgctggcttcaaagagtgagttagaaagtgctctctcctcttcatgtcttgggaagaggtttaattcttaactctgctggaattc

SEQ ID NO: 205647 - DNA, 1000 bp, Homo Sapiens
aagcagccccatatctataactgaatagtgaactgtacaatatgcataattggaggcagaagccagcatggagtagagcaacgaaagattatagaactgtttgcttgataattgctgcttaagtaatttctgttttggatgacttgggcaatttcttatctactagaatttgcctatataggggcatggttgggaaaacttggcaattctacctaaagagagaaagaataaaaaatgaaaatgaaataggaaacgtatattttctgcaagatcccttttaaaagtgttttcagaaaaaaataatttctacaataataaaatatttaaggctgggcatggtggctcacacctgtaatcccagcactttgggaagccaaggcaggaggattgcttgagctcaggagttcgagaccagcctgatcaacatagccagacctcatctgtattgaaaataaaaaaggccgggcgcggtggctcacgcctgtaatcccagcactttgggaggccgaggcgggcggatcacgaggtcaggaggtggagaccattctggctaacacggtgaaaccccgtctctactaaaaatacaaaaaattagctgggcgcggtggcaggtgcctgtagtcccagctactcgggaggctgaggcaggagaatggcacgaacccgggaggcagagcttgcagtgagcccagatccagccattacactccagcctgggtgacagagtgagactccatctcaaaaaaaaaaaaaaaaaaaagaaagaaagaaaagaaaagaaaaattagctgggggtggtggttagtgcctgcactcccagctactcaggaggctgaaacagggggattgcttgagcccaggaggttgaagctgcagtgagctatgacaatgccactgtactctcccctgggcaaggaagtgagatccttctacctctgcctcccaaggtgccaggattacaggtatgagctactgtgcccagacgatttattgattcttg

SEQ ID NO: 205648 - DNA, 1000 bp, Homo Sapiens
tttttcttgtggaaataaatgacaagatggaatttctgggtgtttggtatctgaatatttaagtatagcaggtatggtcagtttttcaaaggcattttaccatcttacttgtccatcggtaactcataagatatgtggaacaacgtcctctccaacaacctctagtatcagtctttgtaaagtttgtcaattaaatgggtgtttttttgtttttgtttttctttttgagaccgtctcaccctgtcacccaggctgtagtgctgctgcgtgatcttagctcactgcagtctttgccttccaggttcaagtgattctcctgccttggcctctcaagtaactgggactacaggtgccccccaacacacccagctaatttttatatgtttagtaaagacagggtttcaccatattggccaagctgttctcaatcctgacctcagatggtccacctgtctcagcctcctaaagcgctgggattacagtcatgagccaccgcacttggctggttttctctctctctctctctctctctctactttaagttctgggataaatgtgcagaacatgcagttttgttacacaggtatacatgtgtcatggtggtttgctgcaacatgggtgtaggttttgcaggtaattattatattattaaaagataacagaatacctagctaaaaaaaaatgcgaggaggcattgatgggcacatgtttactgagcacatcctgactccagaattaaaaatccaatttatgcctctgcagtccaataaaatttttccttaagaatccagggatcagactttcatctcagcaaccactccaatatggtttctcacctactcattccaacgagctgctcatatcaaaatataagtgctatccatattgttaaattataaattgaaccataacttctcagccttcatcttaatttatatatcagcagcatttcacacagtctatctccaccttctctttgtaaaacttttttatagaattc

SEQ ID NO: 205649 - DNA, 1000 bp, Homo Sapiens
gtaatcccagcactttgggagggcgaggcgggtggatcacttgaggtcaggtgttcgagaccagcctagtcaacatggtgaaaccttgtctctacttaaaatacaaaaaattagccgggtgtggtggcatgcgcccgtaatctcaggtactggggaggctgatgcaggagaatcacttcaacccgggaggcggaagttgcagtgaactgagatcgtgccacagcactccagcctgcgagacagaattgagtctcaaaaacaaaaacaaaaacaaaaaccaaaacaacaacaacaacaaaaaacaagaaacaagtcattaagttcaggccacaccgaaggggaaaggattaaattccacctcttgaaggaaggagtagcaaagaatttgtgggcgtattttaaaaccaccacaggaaggcagacaataagcaataaacagaataaatcagcaagttatggagtatgttagaaggtggtacgttctatgaaaacaaaagaaaaagcagaggtaaggggaatcagagtatgtttgtgtggaagggatgtaggttgcagttttaaatagggtggtcagcatagtcctcattaaggttagatttgaacaaagacttggagacaaagaagttagccaagcagttatctggaagaagaaagtcccaaagcaagagaatagctaaaataaggccttgaagtaggagtcatccttgcatgcgtaacagccaggaggccagtatgactggcacagagaagggtttggtgagtggtagaagaggaggccaggtaaacttgagggggacaggcatgggaaatcatgtgggaccttgttggctgttgtaaggatttgaggcatttttgattagttcttaattcgtacttacaaatgttaaatgagattatgtatgggaaacattagtaatcaggaaagcactctatgaaagctagttacttgtattaaagtattgaaatttttatttttagttagcatatccatagaaacaac

SEQ ID NO: 205650 - DNA, 1000 bp, Homo Sapiens
ttgtatctgctctgatctttctttccttgctttgagtttagtttgctctcttctagtttcttacagtggaaagttaaattattgatttgagatcttttataaccacacatctacagctgtacacttcctgttaagcgctgctttaagctgcattcaactggtgtgttacattttcatttttgttcaaatgaaagttttgtaactttccttgtgatttcttttatctgttatttaggagtatgtttaaatattttaatattcatgaattttccaaattttcttaagttaatgatgtctaatttcattctgtgtggtcaagaacatagtttgtataaattaactccttttaaatttattcaaacttgttttacagtcttctcatgtgcacttgaggatttatatcttgttgggaagagtgttcaataaatgtctgttaggtttagttagtgttcagtgttactgaagtcttctatttcttgctgatcttctaattgttctatcagttactgaaaatgggtattgaagtctccagctattgttgatttgtgtatttgtgccttttatttttagagagtattgatgccggtaggtgaggacgatggcttttttttttcctaaacgagactggagtctcactttgtggcccaggctagagtgcagtggtgcagtcatagctcattgtagccttaaactcctgcactccagcgatcttcctgcctcagtctcctgaggaggtggtactacagacacatgtcaccatgcctggttaatttttaaattttttggagagatcgagtctcactgtgttgtctatactggtcttgaactcctagcctcaagtaaatctcccacctgccacctgagcctcacaaagtgccaggattactggcatgagctactgcactgggcctatttttttccccccctaagagatggggttcttgctgtgttgcccaggctggacttgaactcctaggctcaggtgatccttccaaatagc

SEQ ID NO: 205651 - DNA, 1000 bp, Homo Sapiens
ctttgaatgcactcgtttgaagtttgtatctgtaccagcagctgtggaatctgcatgccatgaaccagttggcaggtatagacaatgaacctggcattatgaatagcaaggttgggagcaggtggggaaattgggatttgagaggccagcaagcaggagtttgcaatgttctgaagggttttggtgattagaaaagaacaggtcagctgggtgcagtggcgcatgcctataatccctgcactctggagggccaaggaggcaggttgcttgagtccaggagctcgagaccagcctgggcaacatggcgaaacctccatctctactaaaaatacaaaaaaatatatatattcaggagtggtggtgcacacctgtagccccagctactcaggaggctgaggtgaggatcatctgagcccagggagttgagactgcagtgagctttgatggccccactgcattccagcctgggcaacaagagtgagaccctgtctcaaaaaaaaaaaccaaaaaaaaaaacccaaaatgtcaacatgtatgacctttacagaggaagaagcatgtcattttgattacatttaggcagtggttgatgtaaggggcggggggcaagatatcttggtcaccctgaggtttgtggctcaggaaaatcaaggagttctgtttccccaatttcaagtgggaaaaggataggtatatatgctaccagaagctgagatggaatggagtcacttgaagagaggtgatcgtttcccttgggaacatagtgggcttagaacacagctcagggtccagaggaagttcaggttagggcgtggtaaaggagacactaagcactcatcaacaaccaatcagagaaatgctaggtctctggatgctggggacatggagctgggaaagggtgatgggtgataatgaaccccaaagagaggtggaggaaggaatctggagccaggagccttagacttggccctacccacgtggttggtgggtttggtgagag

SEQ ID NO: 205652 - DNA, 1000 bp, Homo Sapiens
ccagccttctcagggggttcttgaactcctgggttcaagcgatccaccagcctcggcctcccagagtgttgggattacaagcgtgagccactgcgcccggccccctagtgaatcttttcaacatgcagatcctgtgctgttacctccctgagtaaaatccttcattagcttcctatttcccttagaattagattcagactcaggcagggcatgtgaggctccctcgtcctttttcattctcctcctctgtaatctgacccagcttccttttcaaccttgttacgggctgtcagtccagcctccatcatacccagagctccaggcacagggagtgctcagtccctgaacatagccgtgtggttcccactactaggcctctgcaggcactcttctttcgcccacagtgtgtctcccctgcccacctgggctgctctgtgtgtgcgtgttgctgcgttgttgcgtttctggaatataccaccatggctgaatgactgtgtctgtactctcaatgccctgtgaatgtgtgcaggcccacagtggcacacggtacctggttggggagttgagagagaatgagcaaaggagaagatctccaggttcctccctctgaccccagagagccagggagaatgccactttgagagaaatgtgttgtacacatggttctccctctctgggtctacataatccctacagtataagcctctttctcagtacctctggcttttctgcttgtacttgactctcctttggatctaggaaggaattcctggcatctttctgaggatgagctcggaggtatcctgctcttagttgacactcaatattcctggccagtgaatccatggggagctgctacagggcatggctcctaacggtgtttcttcctgctttgtctcagatcttgatgcccggccttgggacttccaggcagaggagtgtgcccttcgtgccaacattgaacgcttcaacgcccggcgctatgaccgggcccacagca

SEQ ID NO: 205653 - DNA, 1000 bp, Homo Sapiens
gaaactattgatgtatggtgatctctgaaatgggaacagagctgagtaataaggggatgttacatgttgttagtacatgtcttggaaatgagaaaatgtcaacttgtatttccttcatggaactgaaaaacaatcaaagcagggttttgtcttgtctgttagttggagaggaccatggagatccagcagccaagcacagatctgctggctcagagtttgaggaggtagagaaggagtggtagttgtccaagccaggttttgacacctattagttttctgcccttggtgtgattgatgagctcagtgatgagctcactaaatttatatatatagaaatttagtaataagttatgaattaggtaaaatgccctgaattacaagccacaatgaatacaagtaataaccaaaattagcacttaataacattttctgaaaactgcaacatttgagtattagaacttacagaaaaacacacaccgagcattatttgggattccaaaatggtttcagcaataaagttcaagaataaattattccattgctttactatttctctgaacatataaacatgtaatctcattacatcttccaaacaacctagtgaagtaaggtagcagaatccttgttttttagaagaaaccatggagcctaagagaagcaacttgtctgaagacaaaatacctacagagcgaggtattttggttacagagcaaggacttactctgagtgcaggacactttgcatgatatccagctaactagagttcatttactgagctgtgcttcctccatttatgagtacttcactttcttttcttctttaattataagcttaataagcttgtaaggtttacaaatttgaagtgtatgggacattaaaattctgatattaggtctgatattgcttgaaagtgttttggaatttaatatgtttggtgaatattttttatttcattataaaaatggcaattttatttattacttttgtatacatagaattc

SEQ ID NO: 205654 - DNA, 1000 bp, Homo Sapiens
ggagcagcaccccctccccacttgtaaccacccacactgtctccagacactgccaattgtctctgggggtccaaattgtcctgactgagaaccactggccttgacctacccaaccacccccagaagaacatcagtgcaaacacaagtatctgctcggtggggagcatcggaagaagggaaagagagaatgagagaagggagagaaaggaattaaggctcatgaaggggtagaaaactcagagacaggaggtggctggagaggaacagggtggaagagccatttgtgaagggtgagggggtgagaggaggggtagaaacgcaggagcgacagcacttgtcctgagtgggggagaggtggggacagacagggcttcacagagcactggcattaatcacgttgatgactgattatgtgatgtggacacatggaaattcacattctgacgaatctctaactgtacaagttgtagagacaggatgcacatttcacaaaataaaataaaagcactatcaattaaaagatcaatgtaaaagatctttggcgtagccactgctgtgcgggttccacctggacaattcttagcactgaaactagcctgaattaacagctgggaggcagtgcaagaggggcggactggaaagacatgagaccaaacgaaatggcaaagaaaggagatgaatggtagggtgaggaagaggagggactgaagtgacagcaaataaaatttaacctccagtcctcccacgctcgctctggcctgctccggccacccgcaggaccctgaagcccaatgagacagctcagatacttctgtgtgacaaccgcaccagccaggtcatctactaaacacaaagtaacagagagcatcttaaacatgacctgtcatatccaggggactgtatgacaaaggtaagatagttgatttctgctcttggaagcttaccatttattcaagagcagccaccaataaaccacacagccaagaaacccagagaaggt

SEQ ID NO: 205655 - DNA, 1000 bp, Homo Sapiens
cccagaagtaggaggggcgtcttcccctcgtgggccctgagcgggactgcagccagccccctggggcgccagctttggaggttctcgtttggggaagcgggggtgggctgcgagtgggtggagggggctgggcgcggagccggccggaggcagcggcgcgggcggctgggcggcctgggagcgcccaggcgggcttggcgggcgggttacctgggggaggccgggccgggcgctagcgcgcggggtgggcgtggcgggcgcggggcctggagctcggcgccgggcgtgggagccactgggactactgggtccgggagggggaagggagggctgcgagcccgaacgcgcggcgagaaggccgaggggagggaggggagcgaggagcgggaggaggaagggagggagccgaggcgagggggaggcggcgcctgggcccgagccgccccagccctggctcctctccccggaacaggcccccgacagctgctctcgggagccgcctcccgacacccgagccccgccggcgcctcccgctcccggctcccggctcctggctccctccgcctcccccgcccctcgccccgccgccgaagaggccccgctcccgggtcggacgcctgggtctgccgggaagagcgatgagaggtagggagagcggcggcggaacccgcgggcggaggcctggggctcttggggtgggggcgcgcggcggcgcctgcagggcgaggggcgggggaggcaggacgtcccgagccatgcttggtcgtccagctcttctaagcctccctgcccgcctccccgatgctctggcataccgtctgaaaaccgggggcggggactgggtggaggtgaagcccgtgacctcccagaaagagttttgagcctccagccttgaggcaagtcccctctcactcagtgcggaggaactgagccccgggaggaggtgctcctgtgcagccccactgagtcagctcatctatcgcctgccctccacctggcc

SEQ ID NO: 205656 - DNA, 1000 bp, Homo Sapiens
actaaaaataagttgatgttgctccccacccctaggatgaaacaagaagcccggcatttggttggtttgcttggattttggagaatgcatatacaacatctgggaatattgccagctcctatctataagaccatctgaaggaaagccctgtttgaatggggacctgaacaagggcaggtcatgactaaatgacaaaaagcagtagccctctcagcactttggggcccatataatcctcactgagatatgattttgtaagtgtctgccatccacactcatgtggactagagcttgtggcaaaagcccatgaacgcccctcagcctcaaccattgggattttggaccagaaaattttcagatgctcccaccaggtacatacataccttttgagaaacaactactagcttattattgggcatttattaagagtgcctcaatgactgaaggacataatcatgaaaactaatacctgtaatgttttgggtgataagagagacattcaaataaggaaggcagtgcccagaagagttccataataaaatgaaaatggtttatattggagcatgcgaccagagagatgcaaggaagcacccacagtatccgtgagctggtagcctcttttcttttaggaccgactttagaaccatctgaggagctactggaaccaattgccctatgggcagtgcccgatgaacagctctcaattgaccaacaaggagctgcttggtttacagatggcagttcccaggggaatggaaactgccttgtttggaaagctgctgcattaaaaccaggacacggaaagatggattgaagaaggtaagaataaatcagctcaatgggctgagttgcatgctgttttcctatcagttagcagtgataaaagccactgtgtttgagctgggtgcagtggctcatgcctgtattcccagaactttggaaggctgaggtgggaggattgcttgagcccgtgagtttgaggctgcagtgagctatgatc

SEQ ID NO: 205657 - DNA, 1000 bp, Homo Sapiens
tgtttctgcttttttcttatcctcgtctcatctgcaccactgtattaacgacatctgtagtattgtcccagcaatgttcctactccctgctgagagggaacttctccccattcaaaataaatagagctggccgggcacggtggctcatcccgcgttccacccactacactccagcctaggtgtaacagaatgagaccctgtttccaaaaaaaaaaagaaatagagctgaacactggatcttccagaagaattccttattgtcctcacagtttgtgacagttgagacgttccgtgtgatatattcagtaagaaatgtcattctctgtacctcccttagaaatggaagcaactgtcgagattgcagcggaatatgattctcttcctccttgcctttctgcttttctgtggactcctcttctacatcaacttggctgaccattggaaaggtatcagaaacacgtgtacttgaaaacgatatctgtgttgagggttgattgggcagaagcaatcttgcattctaccttaaacagctccaggaggcatatatggcaacgaattggcaagaaatcaagataaagagaaaggtagagctgtatgtaaccacctggctagaacacagatgttaatttgatgctgtctgactactttctaggtctctggtgtaagtactgatatgtccagcctcccttatagagtaagtcagctggtgggcttgaacactcagcctaaataaccacacaaatttcgtagcactcattagcgtgtgtttggaaaagaccaggcagagttctggtgaggatgtggagaatctcttctcacttggtctaagatgcttctctttggagcaaagctaaagggctcctgcccacctgccacatgctgaacgtccctgaatggaaaataggaaggcaaaagatgtggggttctgtgttatggacaaggacacaaactgccaagtgttttgaaaaagatttcattcccttgggacattgttgaattc

SEQ ID NO: 205658 - DNA, 1000 bp, Homo Sapiens
atgtatcaaaaagatatggaatacctacccactgcatacatgatactagaaatcctacagcttccctgcacagtggctgtggttttcatttatatgaaactgaggccagagaggtaaagaacttggcctgaagtcacatggggcactgggtattatttgaagcagtttttttcaaaaaagtcacggagaaacattactcagagcctctccctcacaccctgcagatagagctctgaatctcggcatctgtgagttgtttcttttgggctttttaaaaagtcttccagaattgtggaatgggatagtttcagttaaaatatctgtttttgaaaatcatgaccaataataaaaatcaagaatgtcctattacatatttcatacctttaagaattttgttttgctctaattggtcttattggattaaatgatttctaaagtcttctctgggacttcacttttgtgtttcaagtttcttatccatctgaaagccatatatttgggttaaaccaaattattagcaataggtatctttgtagaatttctagtagtttggaaggagttgaatgtactagaatcatagcacgtatttcagctgctttattagcagtctagctaaggggagtttattgttccagttttagtcattataatacagccctgtttaatattgcatgatctgtgggttgccataaacttggtacaaattggagtgctgatataacatgaaatgaagcgccttgtctgaatgttgcttttgttttgcatttaacaaattagtatgttgacatttgtcactgatggatttcattatttgctgaaagggttttagggggtttgacagcatgaatggtttgtcttacagacttttgagaattgataaaagcatctttgttctttgtacaaaagcacaacagatatcgtattgatggacacacaaaaagggatggcttgtgtagctgcaacataaaataaaccaagaaaataattttcgagttgctac

SEQ ID NO: 205659 - DNA, 1000 bp, Homo Sapiens
tcaggcttgttgttctcttaacagggcacgcatacatgaaggctttgcacatactattctcagtgtttagacagctcttcctccaggtatctgcatgacttaatccctcatttccttcaggcaacataagaacagagaccactctacctaaaatagcagccttcccctccattgttctctatccttcttccctgtttaaatttttgatagctcttaatgagagagagacagagtctgagtaagcgagagagagagatagaaagaatgtttttctggctagattataagttctactggaacaaggtggtatgttttgttcaccactgtgcctccagagcatacaacagtgacagctacatggcaggtacatcaagaaatatttgttgatgaatgaattaatgaagttgtattctctgagcaaggaagaaggtagggacaggcaattccttgctggtggacaatcaatagtgttaaccacaggaggagatgccaataagagcacctatgctgaacacagatcagctggtaagagaaggaaaatggagtgtttgtggggtgagtggggaaaacataaagctacagggccatgacccagctctaccaggtggcaacttcctgcaggggttggcaacctcccacagtgtctagcacaatctcaggcactaagtagatcatcattgcacagaatcagttattgtatgtggctttgtgaatggtcccctcagaagctctagaaaatggcgacatcagaatgtacttcctattgactaccctatcttggagactattccatccttcagatatatagactcagcaattcctgataatcctttctacttgcatgatggttgtattagtttcctagggttggcataacaaagtaccacaaactgagtggcttaaaacaatggaaatgtattctcttacggttctgttaactagaagtccaaaatcaggtgtcagcagggtggtttcttctggaagttctaagggagaattc

SEQ ID NO: 205660 - DNA, 1000 bp, Homo Sapiens
tgttgaatgatagaaacatggcctcatggctcccaggaaatcccacatgactgcagaacagtggggtctatgagttttcatcgtcaattcaaaggaagatgtcacagtttggaggatgccactgacagcttcatggcagagcttggctacaagttgggcagaaatgatgggtggggtctaggtcgttgtaggaaaaaggaggaaacatattggaaggagagagcagggggacaggaggaccacagactgacagagtggattaggcaggagataaggaaggcttagaagtaaaataatctcgaaagagtacaatatttactttaaatgtcttttttttcctaataaggtaacgattgttttaaagaattctgatgttgtagaaatatagaatgtaaactccttgagatcaatggctttggatattgtttacctcaaatccccagaatctagcacactgactcccagatggtaggtgatcaataaatatttgttgaaaaaaaaacaaataaatggaacaaaagtgaaaggaccacagaatctcacccatcagaagtaaatataatatagttaatggtttggtaaatattcctttagattttttcccctttcatatgttaatatatattattttacaaaaataggatcatactattcatatagctccacgacttgcttctcttttctttacaatgcatcttgaacacatgtgtatgttaaatgcctacaactaactcatgcttgcaaatagcactgtggtatattatggtattgtacggatgtgcaatattttattttataatctcttgatggaaatttggattgtttccaactttttgcttttatatacaatactgccataagcttccttgtatgcatatcttttgagcacttacgagtctatgtttgttggatagattcctagatgtggaattgcaaaatcaaaaagatgttaatattaacatttctaataaatgttgcctaattgctttccaaaaggtta

SEQ ID NO: 205661 - DNA, 1000 bp, Homo Sapiens
ttattccctggatgccgttattagtcttggaacccaagttaagggacatatgggtgaatgcagtcttaaaattgctcctttccacctgtccaaatttctacccattctaaagcttccagttccacctaacaactgcatttttactgccatttttcaaatgcctgctgtggatcagttcctttcacacaaaatgtgttgtctatttgtatgacaacctaatggagtgggcaaggatgatacaaccattttacagacaaagcaactgaggttcagagaagttaagaaagttatctatggcgacagagctatgaagcagaggttcaaacccgtctttatattccaagtccaggtcttttcaactagttattcaaataattcatttgttcatccatttactcaatagatagttattggccatgcactaagagccaggtgctggtctagttgttgaggatagagccctggacacaactgacaatgttcctgccatcacaaggcctatagtttaggaagcactagtctaacttccaataaccatcctctcttctaacctactttcacatgcacagtcagcatctgtaatttgatattttattttgctgttgagtattgcacattacctttgagtatggtgtgttacctttggctcccccagctagatgatgagcctggtgaaggcagggctgttgtctaatatttctctttttcacagtctacccagcacaacccattaaataagtgctttttttctcctgtagaacatctttattactgtgatcttaagatcatttggggttttatttagagcttagctattgcagcttctgttattgagctttgtcaaatgttatgtttatattgtctcattagtgctgacaccacccaactataagacccattttacagtttaggaaattgtggcttatgagggctgagaaacttgcccgagttcttagagtcagtaagaagaaaagctaggattctgccagtggctgaattc

SEQ ID NO: 205662 - DNA, 1000 bp, Homo Sapiens
ttcagctaatttttgtatttttagtagagactgggtttcaccatgttgctaagactgatcttgaactcctgacctcatgatctgcctgccttggcctcccaaagtgctgggactacaggcgtgagccatcacgcccagcctaagatggtaaattttatgttatgtacattttaacacaaacacacactcacgcacgcacacatctatgtgccaggtttaccattatcttttttacaagaatgactaacaggctgggtaccatggctcatgcctgtaatctcaccactttgggaggctaaggtgggaggactgcttgagcctaggagtttgagactagcctgggcaacacagcaagaccccatcgctataaaattttaaaaaatgaaaagtaaaacataactaacatttactggacatttacaatctgtcaggcacagagaagttaagtaaaagatcttacaactaactaaacggtggagcagaaatttgaacccaggactttttgacaccagaaacatactttttttttttttgagacggagtttcgctcgttgcccaggctggaatccaatgtcgcaatcttgcaacctccgcctcccgggttccagcgattctcctgcctcagccttcccagtagctgggattagaagcatgtgccaccacgcccagctaattttatgcttttagtagaaacagggattctccatattgatcaggctggtcttgaactcctgacctcaggtgatccgcccgcctggccctcccaaagtgctgggattacaggtgtgagccaccgcacctggcctagaaacatacttggaaaaaaaaaaaaaaaaaaaagaaagaaagaaagaaacaaggttgtgttttatccccaaggctggaacacagtggtgcaatcctaggtcactgcagcctctaactcctaagctcaagcaattctcctgcctcagcctcccaaagtgctctggaacacggattacatctcagcactttagga

SEQ ID NO: 205663 - DNA, 1000 bp, Homo Sapiens
ttccaggtgagaatctgacagcataaaacagcaccctgcacccccaggtgagcatctgacagcctgaaacagcaccctccaccttcaggtgagaatatgacagcctgaaacagcaccccgcacccaggcaaaaatctgacagcatggaacaagactactgcccccaggtgggcatttgacagcctgggaaagcaccctctacccacacgtgagcatctgacagcctggaaacccccccactgcttccaggtgaacatctgatagcctggaacagaaccccaggcctcccagtaagcatctgaaagcaaggaacagcactctcacccccaggggagcatctgacaacctagaacagcaccctcaccccgaggtgggcatctggcagcataaaacagcacccctactggcagatgagcatatgacagcctggaacagcacccacacccgctggcgagaatctgacagcctggagcaacacccacacccccaggtgagcatctgacagcctggagcagcgcccacacccccaggtgagcatcttacagcctggagcagcgcccacacccccaggtgagcatctgacagcctggagcagcacccacactcccaggtgagtatctgacagcctggagtagcacccacacccccaggtgagcatctgacagcctggaacagcatccactcccccaggtgagcatctgaccacattgaatggcatcctcacctccaggtgagcatctgacagcctggaaccgcacccacacccccaggcgagcatctgacagcctggagcagcacccacacccccaggtgagcatctgacagcctggagcagcacccacacccccaggggagtatctgaccgcatggaatgtcatcctcacttccaggtgagcatccgacagcctggagcagcacccacacccccaggtgagcatctgaccgcatggaatggcatcctcacctccaggtgagcatccgacagcctggaacagaattc

SEQ ID NO: 205664 - DNA, 1000 bp, Homo Sapiens
tccatgatgccaaggtccccggaggaaatgctccatgagccctgaggagctctttcttggatttctgtgtggctcaaaaggaaggaactttttagttgctttttttgtcttattagagtaatttttttttcctatttaccttcacggatgttaaatatcaggtttgtgggggaaagtgccgtgtccttttcaaacagaaacctcctgagttgattttgtcggggtcgcttctcagcttcgtctggcccttcagagaggggggtgtacttgcctcactgcacattgaggagagacgggggttatgcatgctttggggctgcagttcctggctcccggaggcttcatcggtggtgcagggactgtccttggtgctgcctcccagcgcatgtgtgctctgactgctgtctggaagctgatgctgctgctgctgatgctgatgccctggcgagaggcactggcccccatccctgggagcaggggcagaccccaggcagaggtgtggctgtggctgcgtgttcacagcttgacttctgaggtttaaaggactgttcagatgaaagcatcgaggaaacaaaaatttaaatagcaggattatgaagatggatgtaactaatgaaaattgtcacattatttaatgccttctctgtctctacaatctaaaaatgatccttttaatatgaacaaacaataagaaaatcacagccgggtgtggtggctcatgcctgtggtcccagcactttgggaggccgaggcgggcggatcacgaggtcaggagatcgagaccatcctggctaacacggtgaaaccccgtctcaactaaaaatgcaaaaaaattagccaggcgtggtggtgggcacctgtggtcccggctgctcgggaggctgaggcgggaggatggcgtgagcccgggaggcggagcttgcggtgagccgagatcgcgccactgcactccagcctgggcgacagagcgagactccatccaaaaaaaaaaaaaaaaaaa

SEQ ID NO: 205665 - DNA, 1000 bp, Homo Sapiens
tttgacatataaaaagacttcttcatttaaaaatatatcttttaaaaataattttacaagtgatggcatctcattttagaagaagaggcatcaatgacagcagttacagtaactcgatgctgaatatgtttttaaatacaagatgctgtgttcagcattgtacatacattatcaaattttattctgataatatgctgcatgatgtattaggctgggttctctcagacagaacctacacgtatacttatatatatatacacatgcatatacatacacatacagagagagagaaagagagagagagagagatctctacatttattagaggaattggatcatgcgattatgggggctgagaagttccaggataggttgtctgcaagctggagaaccagggaagagagtagagtagctttctccaagtcctgaagcttcagaactagggaaactgatggtataactctcagtcagaggccaatggactgagaactcagacagccactttgcaactcctggaatcccaaggccagagagcctggagtttggatgtccaaaagcaccagaaggagggtgtcttaggtccaggagagagtgagctttcctatgcatttttgttttatccatacccctgaccaattggatggtgcccacccgcattgagggtgggtgtccctctattaaatattttaactataattttaactgtgatataggcactgaattcttgttgctaataatctggtaagatccatctgaactatgaagtgagtacctggaggaactcctacattttaggctttcaaaggttacaggcttttcgtgtgtgtgtgtgtgtgtgtgtgtgtgtgtgtgtgcgttttgagaaaaatggaattcaaacactgtgattagaatgtatgtttacttatatagaattaatgaatgtatataataataattactgtatataattttaaaatataataaagtctctttatccatgtaaaaaaaaaaaaaaaaa

SEQ ID NO: 205666 - DNA, 1000 bp, Homo Sapiens
gacctttctggtataacagagatgatccccagtttgttcatttgttgaaggatgcctctgggaaactttaagccaaggagagggttaattatatcaaatactacaaagtggcaagaaatctatcttaatttgttataaagtcagtgtagtatccacaatttaaaattttaagaaggcaatcacgaatggaagttataggttgagacagacattcagtaaagaattcaaatattcttcaagcagtgccggaagaaactgtgtgtatgccggattggaacactcgattttaaaaaacttatttcagccagatcaatttgcaaacatgcgcatgcacgcacacacacagacacacacacacttgcctttggggtaaaaggaaacttgagttagtcgttatcaaaagatatcatttacctttctttttttaaatcattaattttttaaacagccttgatgtgtttttataaattgtagactgtgaatttttgtgctgtttgaaatctaagagagagttgcctttctttgtattcttggagcaaagtagaaagtgaacccatgactagaaagataatatcaagtaggatattgtaaacacacctcagggagataacatggggtggaggcagacaaacaggccaatccgggggaggaatggagttaaggaaagctctacaatgaggcagattttttaatacccactccttccaagtccttcagctcaaggctgcagccaaatatttgcataaagagctggtaaaggattccagcttcctggttcatgacattacagcatggatcgttttcaaaattaatactgcctcctgtttcagcagtggctgcctgcacagctctccctgtggctcagagtatgggagtgagtatgccctgtaacccaaaagaggtgtggtgagctcggcttcccagcacagaatcacagagcaatacgggtacctttaaactttaaagccacacctgaaattccaaaaaaaaaaaaaaaaaa

SEQ ID NO: 205667 - DNA, 1000 bp, Homo Sapiens
tcaaaggaacgtaattccctagtaacacactccaatgggaaaaaacttaatgaattgccagaaaaggaattcaaaattatgatcgtatggaaactcagagagatacaagaaaacgtgtagacaatcaatagagttggggaaacagttcacaatataaacaggaaattgaataaaagagaagtaagaatcaaatcctgcagctgaagaattcaatgaatgaaaaaacatacagtggagaatttcagcagcaaacttgatcatatgtaagaaagaatctctcaacttgaagataggttatttgaaattaacaagtcagagacaaaaaaaaagaaataagaatgaaaaataatgaagaacgcctacaaaacttatggaacattaggcaaacaaatatttgtattatgggtgttccagaaggagagaaggggaaaggcattaaaaaatctatgtgataaaatctgaaaacttcccaagtctacggagatatatggacaacagatccaggtagcccagtggttcctaaataagagtaaatctgaaaacatcctccccgtgtcacattacagtcaaattgtcgagagtgaaagagttcacaaaacagcaagagaacagcatcaagtcacataagagaatccctattagactaaaaacagatttttccagagaaatcttacagcctaggagagaatggaatgatagaattaaagtgcttaaagcagaaaattgccagccaagaaagaatactgtgtccatcaaagccatccttcagaaatgggggtgaaatagtctttcctagacaaaaattgagaaagttatacatcttgagagagttttacattttgaaaagacagtattcactaccaggaaaacatgcaggagtatgaaagtcactggtagagagcagatacacaaaggagaaagagaagggaatcaaatcttagcactacagtaaaccgccaaaccttaatgataaacaataggagaaaaaaaaaaaaaaaaa

SEQ ID NO: 205668 - DNA, 1000 bp, Homo Sapiens
aattttataaaattagcataatgggaaaagaataatagcatgtcagctgttaaactttgaggcaatagtggttgcttgtttgctattcagtgagtgtccttgagtagtttattttatcaatactatacagtattaggaaataactttttccttctagttagtggtatagctagttttttgtctcttaagtaaaattctagaaaagccaattgtatccttaaatgtttttgtattctatttaagaaacagtttctttcttgttgctttcaggacaaaagaaagaaaaataaataaagaagtagtctcttattataatataaaaaataagagtatagtgaacaaaaaagtatacatataattcctccactaatgggaataacccattcttaacattatggcactagtctttttatttaaatgcattttttccatagatgaaagcacatggtacatatatataaattatgttcttttttctacttaatattataacctaggcgttttgtttattatatataactttataaaaacatttttgttagctgcatggtgttctaccttgtggatgaatatcgttttacctaacaattcccttattaatgagtattatgtaattttcagtttttgtttatagtaaataatacgcagtgaatatttttgtgcctgtaactgagtgtgcattttacattttttttagggaggagaaattgctggtaaagtcctaaaaggaaatttcctaagtaacaaggtattatttttacattaaagagtagtgtatttttattaccaaatctgtcgtgtttattattgagaaatttaaaagtataaataggaggccaggctagatggctgacacctgtaatcccagcacagtgggaggccaatgcagatgggttgcttgaggccaggagttggagaccagcctggtcaatatagcaagacccagtctcattaaaaagaaaaaaaaaaaaaaaccttacaaataaaaaaaaaaaaaaaa

SEQ ID NO: 205669 - DNA, 1000 bp, Homo Sapiens
tcgctacattttgaaaattaaaattcatttcattcgcattacagattttaaatcctagctcctttttaagcttttaattccaacttgcatttcttattattctgtttacaaacctgacaaattttagcagtcgttttgaggagatctagaataatgtttcatctcatttttgaatttaggtacagaccttaaaaatattatgctacatttctaatattaatatcttgctttcttatttaggaacttttcctgacaaacttcccaagaatgtaattttgttatatccatatgataaaccttaagtattcttaagccaggtgcagtggaattcccctgtagtcccatctactaaggagactgaggcaggaggattgcttgaggcctggagatcaaggctgcaatgagctatgactatacctgtgactagccactgcactccagctgggcaacatggtgagaccctgtctctaaaaacaaacaaaccttaagttttcttaatgttctgacacttttataaatgtagtatttcaacttatggtcaccattctgtaatgattatcatttgtacatttaaaatagaaactgttaggccaatgtgttattctagaataggacttgacagacttttttttaaataaaatgccagatagtgtttctagctttgcagttcagatggtgtgtgttacaactgttcagctctaactttgtatgaaagtagccataggcaatacacaaatcaatgcaccatctgtgttccagtaaaactttatttataaaaacaggtcacgggccacatttggcccatcagccatagtttcccaacctctgctttggaaggcctaactcagttaaacattacaagttcatgcagcacggtgtgatggctcacgcctgtgatcctagcacttttggaggctcatgtgggtggatcgcttgagctgaggagtttgagactgggcaacatggtgaagccgtgtttctacaaaaaaaaaaaaaaaaa

SEQ ID NO: 205670 - DNA, 1000 bp, Homo Sapiens
cctcacccctaccctgaccattctaaatctggatctggatctgttttgtgttttcccatggagtctccattataacaatattccttctctctcactattttaatttccagtttgccagtttaagaccccttctcgttagtttgctagagaccctggctgatttctcattttaacaccattgcttacatactatctatctggcatattctgtgtgttcaaaaatcatttgttgaatgaatgacatttgagatctaatgttcacatatgacaaatgttttgaattttgtttactgctgtttctttagagttcgttttctagccaaggaaaatgtaacccaggacgctgaggacaacacagtctctttcctgcagcccaatggtgccatcttcgaaccttcactatcagttggaacagaggctgacaacttcacagttctcaatctggctgtggcagtgagtagacaaacaacaaagttatctattttaaaatactctagaactcatgtaattaatcctatcattagaattattaggttttacttgtttttccatttttatcaaaacgtattcctatatcattattttgaatggaggcatggtcatttggaaagtgacaaaatcataagaatcgactgcattagaagaccactttatttttttcattattttttgtcgaaacattctctatatttaatttcaattttataacagattacaggaagatgcttaagaaacaagtacaacatttgtttcagtatgtctttaaatgaaagacttttaagtatgtaagcaactatataataaaaggtttccaaacgcagcctgtaagaaatcaggcaaattttactataagcaataaaccattccgagctttccagacagtgtaccagtagctgtaccagtgggcaataacctttaaccaaacaaaaacaaacaaacaaacaaacaaaagcactttgcaatttgttgctgcaaaatggggaaaaaaaaaaaaaaaaaa

SEQ ID NO: 205671 - DNA, 1000 bp, Homo Sapiens
gaagagaatagaaaagatgacagtatgttacatgcagtaacggtaattacttgtttgttgcagttgttgtatgtattggttcatggtgtgaaatgtatttcttaactacatggtgtttactatgagcacttagcacagctcatagaacattcaagataataggcagtcaatgaatgttcaactgcactaaatttaatttaaacttatataggaaaaaattgcacaagtaatttcagaaaagttttctaacacaaaatggcattaggaaaattggtagaactttaactgttgtgctggaattatcttgttatatgcctgtgaccttcttgggtctgtggggacttagctttatatcagtgtgcatgatggaagagcctgatttttagagtcagaaagaactgcgttccaattttgtctcttgacccatataaacttctggacattgggcaatttttttcagcactctgagcttcaaattcctcatttaaaaaagacgacataatagcacttacctaacgattaagagagggatcaattctaaacatctaatactttgcctggaacatagtagatgcttaataaacagttaattaaaagggtatgaaacataattgaatactagtatatattttaaaacactgttttgagtatccaggaaaaagtatgaagtgtaagagtaattaaatcacatgcatgggtagaaattccttgtgaccttttgaaaaattgaaaaaaagcataattgtaaaagattgcttccttttttaaaaaaaaattgcccagttagcataatatgcaagatgtaaactagaaattaaatgagccaaaaccagagttagttgcttgtaaagattaaaagtgaactcacactgggtgtggtggctcacacctgtagtcctagcactttgggaggatgaggcttgagccaggagtttgagaacagcctggacaaaatagtgagactttatctctaccaaaaaaaaaaaaaaaaaaaaaaaaa

SEQ ID NO: 205672 - DNA, 1000 bp, Homo Sapiens
ttccatattgctgcatagtctttgtaaccatttttcttcttcttttttttgagatggagttttgctcttgttgcccaggctggagtgcaatggcgcgatcttggcccgctgcaacctctgcctcccgggttcaagctattctgctgccttagcctcccgagtagctgggattgcaggcacacgccaccacgcccggctggtttttgtgtttttggtagagacggggtttcaccatgtcagccaggcttttcttgaacttctgatctcaggtgatcctcactcctcggcctcccaaattgctgggattacaggcgtgagccaccacgcccacctgtaaccattatttttaagattgctaccattggatagttctgtcatggtccaacttttggatatttaaaattgatccctgtgtggctaacagaattaatgtttccaaaaatgttgaaaattatatagttctcttaattccccacctctaactatatttttgggttatttctttaggaacagatgcccaggagtcatattactgagaatctagaaatcttttgcaaagttcttgttatattgccaaattgcttcccaaaagggttgttctaaaccataatttcaccagcaatgtaggggagaaccatttttatgctgcccttgtgagaattgggtatgaaaacatttttaaaatgatttttgatgaggtgaaaataatatttgaatatattttaatttgcctttcccccacttatagtgagcttaaacattttttccttttcctagctgtatttctccctttgttattcgttctttcgtccatttatctactggggagatggggagtgttatctttttagtttatcagttatttgcattttaaatataaccatttgccatattttaacaacgatttttccattaaataattctttttataaaaaaactttaaaaaaaaaaaaaaaaaaaaaaaaaaaaaaaaaaaaaaagaaaaaaaaaaaaaaaaaaa

SEQ ID NO: 205673 - DNA, 1000 bp, Homo Sapiens
gatttactccatttgggtcactaggtcacgggggcctcacttcattctcttccacgtcatttggtggtagtggcatgggcaacttcaaatcgatatcaacttcaactaaaatggttaatggcagaaaaatcactacaaagagaattgtcgagaacggtcaagaaagagtagaagttgaagaagatggccagttaaagtccttaacaataaatggtaaggagcagctgctgcgcttggataacaagtaattcaacgcacgcacttaacagaaatgttaaactataacaagcaccatttgaggattaacaggaacatttttttgaagatttcaaacgaactcgactttcagtataattgtacctaaagtatttataaacagctcatcggagcctctatttgtcatagacttttgagttgattggtgggaccacataataggaccattttttttttgtctttaaaattgttgtaaatctctgtatgcactttgcttttttattaaacgtactccaaggtgagtcttgactctttagtgtaggacaagattgtacactaacaccagcatggacctgcttttcattgtgtctgaaatgtgagccacgtagtgtcggcctgctgtgaagttaacattgccaggacgattcttctacagaaataatttcaatttttttcagtatttagtagtgaaagatattaatacattaatggtaatacatttctggtttaatataaattaaggatgttttctagttgtgcatgaatgctggcaacttagtaagttttgacaattgtttaaatatgtaatattaagcttaggtttaaaaaagtaaagctggtaaactgggtctttgtcatttgctttaaaaaaaaaaaaaaaaaaaaaaaaaaaaaaaaaaaaaaaaaaaaaaaaaaaaaaaaaaaaaaaaaaaaaaaaaaaaaaaaaaaaaaaaaaaaaaaaaaaaaaaaaaaaaaaaaaaaaaagaaaaaaaaaaaaaaaaaa

SEQ ID NO: 205674 - DNA, 1000 bp, Homo Sapiens
gcgggcgcagggtcccaggtgggtggtggcggtggggtgaccgtctccctgctgggtggggtcgcccgtccggtcgaggccgtccaggggtgctaatgggggcacaggcaatggcaatgttggaggcccccttgggttcccggtacactcctcgggtttccggcctcttcccagcactcaggggctcctgagggcggaagagctattcccagcttggcggggcctgggagggggctctgggcagacgtaggcgccgggctgcaccttccctgcccgcctgtttgcacttctctgtgactgttggcttcaggtccttagccagcggagggctgactccggcctggctgccccctcccctttgcctcccgtccctccccctggacactccaacccccatcccttcgtgtccctccccctcctctctctctgctcctccctcgccagaccccccgctctccccggaacaatggaggggaatgtggctagggcagcctgacgctgctgcgtcaacctctggctcgttctcggcctctatcgcttccagggacccttctatctgggctcagctgacccgccccgcctctcggcccacgtgccggcagttctcccaggctggggctcagctgcgctggagactgggatgggtcagctcagtgtctctgtctgtttacaaaggaggaacccaggtgcactaaggtaacttcgctactctgctagagtctcaccccgatccctgcgccatttcccttccacctcctgcactgttaagccttgggctgtgagatgggccagtgtagcccggctactgccgtgttccctgggtcagggacagctgcctcactgggagcgccttagaaatgtagaatcttggccaggaatctggagcctgtaatcccagcactttgggaggccggggtgggagaatctcttgagcctgggaggtcgagaccagcctggacaacacagtgagaccttgtctctacaaaaaaaaaaaaaaaaa

SEQ ID NO: 205675 - DNA, 1000 bp, Homo Sapiens
taattaatgttaaaatagactttgttcttcatattctcccatctttttcgctactatatactctgtctggattctgctgtatgcctgttggcatatatggaacagtcaccacttgtcacacttaacaccagctttttgaattatgatcagtaatggcaagagcctttcattctcgaatgtttaaagcctaggagttctacaaaattggcttctttctacaagaatcccaaaatggaatgcctaaagaagtcttacttgggtaaatacttactaaaatatactggttatgtgcatatcaccacactggacactgaggagtgttcaaaaggaatctaagacatggtccccatcttccaactgtctgtaattcactgttttgtcattgagctcataaggtacttacattactacctataaatgtttcctgtacttgttagttgttgagaaacattttaggcagtaaataaaatagtaaatattatgtgtcctataatttgacctaagctgtgtgcctttggaatcagctctaagccagggccccccgggagccatgttaagtaacacgtatcataaagtgacatacatcaaggttatcttatatagtcataacagtattattgggtctttcaaaaacagctggcagattgagcttttaatggctatattgatacagtagatagagcacctctaaggagtaccaggtataatgtgccattcctctcagcaacaccatttttgtgtgcagctgaccctctaacatggtatcaattctagctgaccaaagcacattctatcaggcagccaggcttggaaattaggtccatttaaagtatgtggcttacagccaggtatggtggtgtgcgcctattgtcccatctacttgagaggctgaggcaggagggattgcttgggctcaggattttgaatccagcctgggcaacatagcaagaccccatctctaataaataaattatgttttgggcatcaaaaaaaaaaaaaa

SEQ ID NO: 205676 - DNA, 1000 bp, Homo Sapiens
tctaggagcaaaatggactattggactagaaaaataaaataaagccaagaataaagttaatatagaaatatgttccatcatgtgctgcacgttgctgcaggtggcctcagcttttcctctgaacttcctaaagagagaagtatcatgaaatcttaagagttttcccagtgacagaaatgacaaagccaggtgctctggagaagaatttttcctgaaacgagatgggagggaaatgtttctggggtaagtaggaaggtggaggtggtaccaagtctgcagcctgaacacatacatggtgagtttcatgaggtggcttcctatgagagacctccatgcagctatatagcatggtaccagagcacaattcagtaaaagagctttataaaagccaggactgtgatgctgcaaccttaccactttttgttggcctagcttaatccaagtataaaatgtagaataaccaagggataatactcttcacgctttgttatagttattgttttatatccatttacggccccccttatctcagtgatcagcttctcacaggaagggatcatattcacgttggtttgattaatggtagaaaatcagaaaggtaaggaatgaggaaaacaatttatgactgtgatttgtccaggaatcatcacagcgctccattttgaattataggtactcagaaagtgagattcaggccaggcacagtggctcacgcctataataccagcactttgggagggcaagacaggatgattgcttgagcccaggagttcaagatcaatctgggcaacataatgagaccctgtctctacaaaaaataaaaaattagctggatatggtggtgctgtgtgcctgtgatcccagctgagaggttgaggtgggatgatcacttgaccctggggggttgtggctgtagagagctgtgattatgccactgcaccccagcctgggtaacagagcgagagcctgtctcagacataaaaaaaaaaaaaaaaaaaaa

SEQ ID NO: 205677 - DNA, 1000 bp, Homo Sapiens
aatcgcttgagcccaggagttggaggttgcagtgagccgagatcatgccactgcactccagcctgggcgacagagcaagaatctgtctcaaaaaaaaaaataaaaacaagaagattatatatatagttttgtggcttatgtgtgttttgctaagggagaaacaacatacaggtcacgggataccaaattcaaagcaaataatctagacagaaattaagtagccccttttgagtaaggagtgagggaagtggtgcttgaaagttgttgatttgcggttagtccttcatgaccactctagggtttctgtgccctgcccaccctctggagaagacgaatactggtcagttaacagacgacatgttactagcagtcacttgatccccatggctttggtttaaaagacatatacttgtccacatgggtttagaggtaagagttagctggtcaacttgagcatgttactgacagagggaatattggggttattttctggtgggaataacatgtcactaaagcaggacttttgatatattaaatttttaaaaaacaaaatagaagtttagattttaatcaaatctgtagagtttctaagtaatttttgcagaattgcctgtttgctttaactgtctccttctgcctctgctcttgaaggatatggggacagggctagagtcaaaacacttgaaattttgtatcccaatgtcttttctcccagtgtgaaatattccattcttttgttaagactactgagcagttatttttttcttttgtaataagaaacaaaccccacctttatctctacatttccgctaccattctctggtttttgtgtttgcttcagggggccagctgtggttttctcttgccatgatgacttctaatcgccaagtacagtatgctcaaagtcagacaactccttactataaacaaattgtgtaactgcccagagcagcacttataaatcagcctaacataagatctccaaaaaaaaaaaaaaaaa

SEQ ID NO: 205678 - DNA, 1000 bp, Homo Sapiens
acggcgctgtctccccctgcagagcgcgcctgctgccgctaggggccgccagcatgcggacgcgcgtttgccatcttaagtcacgagctcggagaaagaaaactttacggaggaactgttgtggcacaaattctggcctatccacatgacccccaccccctcacacacacacacccggtttctcgccaggctactatgcagaggatgttaggaaggggaagagagcgatttcagaatcgaggctcgccctgcaagtctttggtgcaggccttaacccccctcttaacacgcaaacccccgagctccgagacccacacccttcagcaccatctgggcttttcgtgtcattaccgaaaatcttaggccatattttctttaaaaaaaatcctccaagactgctggggagcggtttccaatgaacactggcaacaaaggtgacctaagaggttaaactcatggttctggcagccgctcctttctcataaatacttctaaggagctgagataaacccgcctttggctttcagtcactgacatgaaattcagaagcttaaaatctggtcctggttaagtcactaactcaccactaacaagcctcctcgtcgggcctgtttcctcaactgcaaaacagagttgtacgtcccaaagcccctgagctcctaggtggcatccttccactaccgacttcccctaagaggggccacagggacaggaagatggtgtgttcgaagcgggttatttgtggtttttcttagtgcaaatagatgctcatcgctgagtgatgggcaagcagcgaggcctttctgattttcatccctcttgccaaaactttggaggttgtatgccatccccattggagggtgccctccttctgtcagtcctagcatctggtcagggtaccgccgcccgggaggtggaacggcgagcccaccgcccatggccgcgaactcgatctcagcccaccgctaggtggcaggccagcccgtccgagaatcgccgc

SEQ ID NO: 205679 - DNA, 1000 bp, Homo Sapiens
ggaaactcctgtttctgggaagatgaagtagacattcttttccctattcttctagttaagtgcatctaaaatctaaaatccttggacactatatgcaataacgtaagaacactctgaaaggtaaagagaacgcagaccacccaggacccagaaaatgacccagtagtgatttcttcaggttgtctttttgcctcatgtagcccagactatgagccgaagaaactggcagcccagaaacaccaacaggtacagacagaaccccctgccaaagccagctccttctgaccaaaggaccaggaaaggggcagcctagcacaaaacagagaatatttagacaactgctcagtgcaaaccaaacatgatagaaaggactgtggtcctacctctgtgcctgctaccagaggctaagtgagggccacttattcctccagagaaagttgaatagggaccatggacttttatccctgttgggcagtaacaaacccctaaggaaccttgtgtggttctggagtgttagtggagaccacattgggtggggcagtaatgaggccctcctattccttccaaccagggaagaatcagtggaagccacatggggaaccagaactcttatcatacccagcagtaacgaggaaggagccctccacgcaggaggccaagtagggaatctgacctttgacccctacttggtggtaaaggtggtgttgtcgagcgccgtggcccatgcctgtaatcccggtactttgggagactgaggcggacggatcacgaggtcaggagttcaagaccagcctgaccaacatggtgaaaccccatctctactagaaatacaaagattggccagttgtggtggcacacgcctgtaatctcaggaggctgaggcaggagtattgcttgactctggaagatggagattgcagtgagctgagatctcaccactgcactccggcctgggtagcagagcgagattccatctcaaaaaaaaaaaaaaaaaaaaaaa

SEQ ID NO: 205680 - DNA, 1000 bp, Homo Sapiens
ataaacataaaaataaaggaaccagtttgtagaaagcgggagagggtcccattgaacttcaagccttcgagcaacagctgtggctggacaggttggaccagcaggctggagcagtcgccatcttggcagggatcattgaccctgatctatcgtcgggaggaggaagagccgatcttacgcagggagggcaggtggactatgtgtggactctggtgacctgtttgggtgccaggtgttactcccagggccacccgtaactgtgaatgtgcaggaaccctgacttgagaagggcctggccacgggggtcttaggcccctggggaatgagagtttggttcccggtacccagggaaaccaccagcatcggcagaggtgatagctgaggaggagcggggatttggacgagagacacaggatgagtaccggggggcagccccgtgatcaacaactgctgcaagaggggccgtttgttcgactcgctagtcttctgcggctctatgcggtactaaagagcagaagacagaagatacaaaaaccacaaaaagtagccgggcgtggtgctgcccgtcaataatcccagctactcgggaggctgagacaggagaatcgcttgaacccgggaggcggaagtttcagcgagccgagatcacgccgttgcagtccaacctgagcgtccgagcgagactctatctcagaaaataaagacagaatgaaagagcccggcgcggtggcttacgcctgtaatcccagcgctttgggaggccgaggcgggcggatcgcctgaggtcaggagctcgagaccagcctggccgacatggcgaaaccccctaaaaatacaaaaattagccgggcgtggtggcctgcgcctgtaatcccagctacccaggaggctgaggcaggagaatcgctggaacccgggaggtagaggctgcagtgagccgagatcgcgccactgcactccagcctgggcgacagagcgagagtttgtctgaaaaaaaaaa

SEQ ID NO: 205681 - DNA, 1000 bp, Homo Sapiens
caaccccaactgtgtttcagctttggagtaatgaacacaccattttcttcctacttaaaagtccactcaggataatgattaagaaatacattgatgccgagtaataaatactttaaaaaaagttaaatgtgaacatttggctttcacagctcttgactgtctttggcgaaccttgacataaagctgccttttccatcttgggctgctgacaaaaaagcctaagaaagaaagagggtgtgtacagaaaattacatgccatagaaaaataccatacacaggccgggagcggtggcactttgggaggccagggcgggtggatcatttgaggtcaggagtttgagaccagcctggccaacatggtgaaacccccgtctctactaaaaatacaaaacttagccgggcatggtggtgcacacctgtagtcccagctacttgggaggttgaggcaggaggatcgcttgaacccaggaggcagagattgcggtgaactgagatagtgccactgtactctagcctgggcgacacagtaagactccatctccaaaagaaagaaagaaagaaagaaaaaaatgccatacagatgaatctttaaagattttaatttatatatacctcttctaccattcattggctggagtagttgaacagacatcagcaggcacaatgctaggcaggcactggagattcagtgatgaataaaacaaaactgacctggaacctggcctcctgaagcttctcttcatctgtctaaattccttcctttcaaggcccagtgcaagtgacaccttcatcaggaagggcttccacatgattctatctgcaaatctcccttttctgaactattatgcttatagtctgtaccaggccacatgacatatgttattttgtggcattctagaattattccaatcttttcattcttataattggtgtgttgtattcaataaataatgttgttattccagttttaaaaaaaaaaaaaaaaaaaaaaaaaaaaaca

SEQ ID NO: 205682 - DNA, 1000 bp, Homo Sapiens
gggaaaatagaaaaaaagattattttaaaatcatgtgaatatttaggtctaagagttgtccatgaatccttagctcagtgtccatagatccctacaaacaagatctatgaatagaattcttggaatccttaagttaggataggaaaaaattacatctttattttttctaacctctatttgaaatgtagtatttctttccatcacaagtgtatgtgacaagacacaatagtgttggtcattactaaggctttatcaccgacaaaaatcataggtatttttatatcacactgcagtgttgtaaaaatctcaagatatcatctatactcttcactgcttcgaaattatggtagttggtagacccaccttcaggtcttgttattggcggcattaataaggaagtgtatatgttatgtttcacaattttattttctaaatactttcagattgcaactgcatttccatataatttattttataattcgttgtgtttcaagttatgcatttacacatgtaattctaaaaagaagtccatagacttgaccacatttccaaaagagttcacagtaaacaaattattaaaaatctctgttaattcatagatactcattccagaaaatacagcaatggctgcatatcaggaatatctttttccagaaaaaaaaatatccgaagttactagatattctgtagtttctgtatgtggagtttctggggtaaatcctttgagttcaatatgttgactatgtgctatgtcatctcaaatatttgaccttattctgtttttcttctctgggtcattgtatgttttgtaactagatttcctatttggtatttgtctcccaaattttaagagcaaaacttgtcatctatcgccttattttaattctcactatgtaaacttgtaagaactaactcacaacttggtgtctcataactcacttctgaaatatccaataaaaaactgccaagttaaaaaaaaaaaaaaaaaaaaaaaaaaaaa

SEQ ID NO: 205683 - DNA, 1000 bp, Homo Sapiens
ttcttcagttagaaatatactgttttcagtcagtttaggctgccacaagatacacagactggttaggtgggacagtagaaacttattatctcatagttctggagactgtaagttctaggtcaaggtgccagcagagttggtgtctgttgaggcctttcctaacggttgtgtatggccactgtctcactgtgtctcctcacatggctttttctctgtgggggcacagagaaagagtgaaagctctggggtctgttcttctcatgaaagctctggggtctcttcttctcatgaggacatcagttctattgggtcagggtcccacccttatgacttcatttaaccttaattacctctttaaaggacctatctccaaatagtcacattgtgggttagggcttcaacatatgaataatggagggatacagttcggtccataacatacactaactgtctttgtatactaatcctcattttgacagattgtcatttaagaaaaaattattcttaagtagaatcattgacttggacccaattggaagcattgttgtcacctctcttttggtgcttcctttttacctttggatgacaggtatctgtctccatattctcttttctcaactacagtaaaagttctttgaatgtgagaattttagtatgccccaccatgtttggtactaaaagttactaattatatataattgcatatttttccaattctctaattttagggaagttgtttacagcgtggcacacactatctctaatggaatataagttcgatataaatatcaagacattaaaatatcaaaacattaatacctatattgaaagtaaagtgaaaccatacctaagtcacttgaaaggggaattgtactttgttggagtaatctaattgccaaaagttgacacttttttcttgatattttctgtttgttaattagtgaaagactttttttcattaaatgaacatttgttttttgaaaaaaaaaaaaaaaaaaaa

SEQ ID NO: 205684 - DNA, 1000 bp, Homo Sapiens
cttgtttacattattagcttcctactaatataaaaataatggaaatcttttttgataaaaatattaagactggaggatttttaaccccttgtacagtattgcagcaaactctttaaatttggttgaattcgtccagcaaactttctggggttcatatattgcactaaatttgttgaacctgtggtaggcacatctcttaggataaatgcaaccaatacagtccacagattaaactttttaaatgtgtttcattatgaaaagacaaaatgtcatcaaagtgacagataaaattgtcttatgtagcaatgtgcattgatctcaatgagatatttctattattctcttacatgagaatattacagcaggaagaattaagtttagtttgcttcaccatgttaatacatgatcacaaaatgtgcatgagtgttattgacttatcttgtacagtactaggattcctgtaaccactcttttttttcttcgctgtattgaaactggttcagtgttaaccaggcaagcatagttattcacaggttatttactttatgtttactaattctgcttagttattgttgaatatgttctgttccagattatttttattgttttgatgtttaaaacattttgcatactgtttatcataaaacttcatgaagtaaataattttgcatataattgcaataagcactgacttttgaactgaaaagaaggaaagtgtttttttgtgcagtgcttctgaggttcatataatagtcttgtactataatgtgctttactacacgataaatgacaaaaacaagccctgtttcatgtttcatttagtgcaaaaagtcagatttccccagtgttttgttgtctgttgtacctgctgaaactacagtagttgaatattgcggtagcatttcagttctctttttttattaaagtgctcaaaaattgttttttaaatgttttcaaaaacaattaaaaacattttatattaaaaaaaaaaaaaaaaaaa

SEQ ID NO: 205685 - DNA, 1000 bp, Homo Sapiens
cacccatgtcttccctcagtccctctgatgtcacttaaattccatctcacagtgactggtgctgtggaatttgtgaagaggctccattgggaagggcttatacccagacatggatggagacggggtgtgggccccatggtgtcactgctcttgggcagcaggaattgaaggattgtttaagggccaggtctggaggcactgccagctctgtagactggattatggaagctgctcgtggaagtcttaatgtgcacaactgcctgataaaatttggaagaagagattaggaagaggaaatcttttctgcctgattttatactccatttgtagtaaatgtttaacagcaagagattctttaaaccattctaagtacatccatcctatggagattgtggtattcctgcagagactcttgtgaaacagatgtttcaggtgaaaatggtaagacttgggtaatacttcttctaggatggggcatttcctattttcttagatctctcaaggttcccctgttatccccagctgcaggggtacctctcctatcaagaacatgtgaaattttgccctcattaaaaaaaaaaacaacaacttgctactatgtttatatatatatatatatatatatatattttgaaaatctgggaaaaatgacaaccctctgtattttcatttttcaatttattgtctacataggttttattattttggggacatgtatatacaaaatgacttttcatgctttgctcaattttctttccatgtattttagtatgtgttttaatttctgtggtttttatttctttcatatgccctgatgtcttttatttcaggttatacattttttaattgtaagacaaatctttcatttataccttctgatttttgttgtgcctttgtttgtttcatcttgatttggaaggccttgcatgattatgaagtactaagtttcatttaggaataaagttttgttgtttaaaattttaaaaaaaaaaaaaaaaaa

SEQ ID NO: 205686 - DNA, 1000 bp, Homo Sapiens
cttaatctccccagctcaaaaaacccaacctcagtctcgaagatggttacttcaccacaaaaaaattaaaatgtttaagtttctcattaaagagtagaagtgtacattcagaaacaattatgggaggtaattcattaatattaaatatgccaacggtattttaaaggttattggagaattagaagggggtggggtgcaggacgaaaaattaatgggtgcaatgtacaccattcaggtaatggctgcacaaaaagctcagactccaaactacttcatatacctatgcaacagaactgcacttataccccccaaatctatactgagggaagtgactaagatgttgctatacaggttttataccatttatcatataaaaattataaccttggtaaaaggaatttataagctagtactcaacaggagaaaagatttagctctaaaccttcacccagatataaattcagctttagaattcttgccaatttagtcctagacagactggtctgctcagtcatttctcttaacatagcatattgcttagttattacatgtactagtattaggatgacttttttgttcacaaagatgaaagcaaactgaataaaaaaggtgaaacctttatctgtaagggggaatttgattgctatttggtattaaagagttttaagattcaaccacctggtacaacagcaggctctgaaggggaagccaggcagggaacctagaggtacaagcaatgtctccccagctgtcagcctcaatgagaatcaccacccataaataagctaattattgacaagattataatctttcgaatatgttcaaaacaggtctgactagtgactatgagaatggagctatttagagttgatttaaaagaaaacactttattgttcagcaattaaaagttggccaaatatgtatttttctccataatttattgtgatgttatcaacatcaagtaaaatgctcattttcatcaaaaaaaaaaaaaaaaaaa

SEQ ID NO: 205687 - DNA, 1000 bp, Homo Sapiens
tgctggtgtttcccaggattaccctctggctaacatgtatgctataacccgagttttgcgtttagcagatggacctgacgaagttcatctttcagcaatcgcaacaatggagctgcgggaccaagccaaaagactgacagccaagatataaggagggtggcactgccacatcccactggcagaaactctcctttatacaaacttcattggctccaacatttgaatctcatatttttgtagcagtttgagcacagggttaattattcatttgtggtaaagattatagcatctattttgatcagtgggttttattatttcaagggtcacacagggttaagttcagtaagaaatgctgtagctgttgtcattcaatctagtgcctccttgaggccaggagttcaggaccagcctgggcaacatagcgagacccccattgctacaaaaaatttaaaaatgaaacaagtgtggtggcacatgcttgtagtcctagctacttgggaggctgaggcaggaggattgcttgagtctaggagtttgaggttacagtaagctgtgatcgtgacatggcctccagcctgggtgaccgagtgagactgtttctaaaaataaaaacaaaaaataaatttcttcttgaggtggggtggaggtggggagcaagaatttgacctggctctgatccctggtgtgttgtgtgggcctctttaacgtttgccactgagccttaacctcactgtacttcactgtacttcacacgcattggtgttaacattttaatcttagaagaccctgacccactgagggtttgttgtgagaattgctgaagccacgtagaagcaccttgaaatctgtaaaaccacaagaaagtactttataaaaggtatccttatttgaagtggataaatcttgtaactcgaaaagttgtgatttagaagacaggattgtttttgaacattaggaattaaaggctatatctggtccttaaaaaaaaaaaaaaaaaaaa

SEQ ID NO: 205688 - DNA, 1000 bp, Homo Sapiens
tgaaagctcttatgtttagcatcaatgtgtatggctctgttaaatgcagccatttctgagacgagattcttttatatatatatacatataaagtactattggcttttaggagtttcttttatatacatttatgaaatactgaagaccaatcagaccattaatggacacttagtgtaactttttataaagaaaataatgctaaagtaagaccaaaactgatgtcatcactgaaattaacaattttcaatatgttcatattttaattcacaatggaaaaatgtgttccaaaactggaaactcatagtactcgtgtaaactgtggaagatttcaaatgtgatgttattttgacaatgttttaaattttagagtcacattttattctgatcagaatttttattgagatgttgagcttttgtttttgaaactagtttgtcataacattgtgcataatcacagtatttattttctaggacaattgtgaatgtgtagacttatgtttactgctaagggaacaattatttataaaataatattaaatccagtattagctgcctatttcagacacttaatacttgcagagatctatgttacatttaccacactgaagttttttttgttgttttttgtttgtttttaaagaatcaccctcattgttgaaagtaaatgtactcttagggtgcgaatattagtgttccaataagcatgtgattatattaaggtggtggtagcgggaagataattctgattccattgggaatcttaggttttcgtaaatttattgggaaaatagtttttcctgtactgctgaagtttctttttggtaaacagtatctttctaaaagaaaaaagcatgaaggagaaattgaggtgtgtatacatttcctcaaatgaccagcattgtattcgtgaatactgtgtatcttgcagtgaacagtgtggaagctgttcatttttcaatctgaagtaaaatactttcaagaaaaaaaaaaaaaaaaaaaa

SEQ ID NO: 205689 - DNA, 1000 bp, Homo Sapiens
ttcaacctagagtgttgggggttttttggaaaccgcagtctattagtactcaatggttttatacaccttacttctgacagagcggggcgtatgctacgactacaacttttatagctgttttggtaatttaaactaattttttcatattatattgttgcatccctacttcttcagtcaggtttttttgtgcttacaatttgtgataactgtgaataactgcttaaaaatacacccaaatggaggctgaattttttcttcagcaaaagtagttttgattagaactttgtttcagccacagagaatcatgtaaacgtaataggatcatgtagcagaaacttaaatctaaccctttagccttctatttaacacaaaaatttgaaaaagttaaaaaaaaaaaggagatgtgattatgcttacagctgcaggactctggcaatagggtttttggaagatgtaattttaaaatgtgtttgtatgaactgtttgtttacatttctttaataaaaaaaacactgttttgtgtttgcttgtagaaacttaatcagcattttgaaccaggttagctttttattttgtacttaaaattctggtactgacacttcacaggctaagtataaaatgaagttttgtgtgcacaattcaagtggactgtaaactgttggtatattcagtgatgcagttctgaacttgtatatggcatgatgtatttttatcttacagaataaatcaattgtatatatttttctcttgataaatagctgtatgaaatttgtttcctgaatatttttcttctcttgtacaatatcctgacatcctaccagtatttgtcctaccgggtttttgttgttttctgttctgtataatagtatctaatgttggcaaaaattgaattttttgaagtatacagagtgttatgggttttggaatttgtggacacagatttagaagatcaccatttacaaataaaatattttacatctaaaaaaaaaaaaaaaaaaaa

SEQ ID NO: 205690 - DNA, 1000 bp, Homo Sapiens
caaaggaaaatggtctgttcttgagaaataaaagatcagttgcaattaggataattaaatagttaaatatgagtcaagtgtatgcaatatacatttatatgaaccaaagcttgctttatcaggaccatgccctacagttcaaaacataaacatagtgaatgtgttaatatcatataataaggtaataaatgccagtcttagtgtgaagcaagtgggtggcccccttggtagtataattggacaggattttcctccagaatatttcctgtcaccctccaagagtcactacagtaattgattgctggcatggaacacattgcccttgtcttgttagtatgaattgggttctccagtgactagaagaactggggtgtgtgaaagtattcgatgccaggagattcaaaaaggaagctctcaaagataagatcattttatggcacaattgagtctataaccagccctttaagcagtagtaaaaatgtcctttgtcatacttactagaaatactatgagttttttttttttttttcatttgagacggagtctcgctctgtcacccaggctggaatgcagtggcacgatcttggctcactgcaacctctgcttcccgggttcaagcagtttcctgcttcagacttccaagtagctgggattacagacatgccaccatgccaggctaatttttttaatatttttagtagagatggggtttcaccattttggccattctagtcttgaactcctgacctcaggtgatctgcccgccttggcctcccaaagtgctgacattacaggcctgagccactgcgcccagccaataccatgagttttaagcctcacatcgtcacttgctgtcactgccagtgcctgttttattcatattgctggacaacagacatatgccaccaattgtatgattaataaagtctttttctggccattttgtccattataaaggaaataaactaattgttaacttgcaaaaaaaaaaaaaaaaaaa

SEQ ID NO: 205691 - DNA, 1000 bp, Homo Sapiens
cagcttgggaagctgaggtggaaggatcagttgagcccaggagttcaataccagcctgggcaacatagaccttgtctcttgaaaaaagaggagcaggtccaatggacactgaataggcaaaggatgaaataataagcataaaaagatgacaatgtgcaacaaagaaaatcctatccttgaagccaaaatacagccagcaccactgtttcaacgttctattccatttcagccctaggaggcatgaagggaaaaccaggaatgaccagcaacccagacctcttgctccatctgtcattttgtgtggatattgttaatttcttccccaaagaattttgcctcctatgtagagcatagaggtcatctgacaggaacaaacagctttaatgttccttcatttggcactgaggacacacagtcctcagtgaggattgtgggagggggagcattaaataaattatttaatgcttacctccttcctaccctcacccgcaacaaagacacaatcttcccgtgaccccaatttctcttcaatctattaccctctctcctgcttttcctatactcccttcacacaatctattccaatgttaaacaacccaagttctcaggccaggcagctgggctaaatgattgacagaggaagaactagtgatggagatgtaaactgaacaggcttcttggccttgcttcataacctctggtctgtgcacattgttttccctacctaaggccatattcactcagctcattaaaatctaaacgaaatccaaaccaatatggctttcctgtggtcaccagggatttctcagccttcggttattgcacttggctgctttgcaacatttggtgctttggacaatgttctagtcctcaaaactcttcttccttggcttctgaggcaccgctgtcttctggttctccttccctgactgacctttctctgtgctgctggcttcttcctcgaacaccatttaaatgctgggttttcggccaggtgcga

SEQ ID NO: 205692 - DNA, 1000 bp, Homo Sapiens
gggagatagcatgtctcccttgaagaatacatcatatttcatggaggttaaccatcctaatttttttttttttttttttgagacggagtctcgctctgtcgcccagactggagtgcagtggcacaatctcggctcactgcaagctccgcctcccgggttcacgccattctcctgcgtcagcctcccgagtagctgggactacaggcgcctgccaccactcccggctaattgttttttgtatttttagtagagacggggtttcaccgtgttagccaggatgatctcaatctcctgaccttgtgatccgcctgcctcggcctcccaaagtgctgggattacaggcatgagccaccatgcccagcccctaaattatttttattgatcctaattacctacatttggaacctctttagtttggctttattaagtttaaaaaagaggatagttgtttctgctgtaatataatacatgtgtccagagaaacctgattctgcagaaacctaaactgctaataacatagcttatatgggaaaaaataaaataagggactggccactcagaatggatacagttgggtaatcggatgactaacaatcctaataaaaattacagcacagttaaaagagatgttaaattcctagttaatagaagctgaacagattgtgctgtgttctgaccataggacacagtggaactattgctgctgttaatctggactctgtcctatgaatactttctggaagtgtaaggaattgcattttaaaatgttgttaaaatgagtaaaggaagtctcagttaacaatattaaaaaatcatgtggataataggcacttaaatagtggaagaatgcacagagaaaaatgtcttcctgtgttatcccattcttacgataggtcccatctttcagactgaaaagcctgcattctcctgttttattctttggagatctcttacactgaagatgtttaagcagaatcttacttccttcaaggaacttcag

SEQ ID NO: 205693 - DNA, 1000 bp, Homo Sapiens
gtaaactgacaaaatatagtgtggatggtacaattaaatagagaaatgcaggatatagtggggaccctgtgactggtacaaagtctgccctgggaggaaagacttcccatagaaagagatgctgaagctggatctagatggatgagggtgaaggaggggaataaggcagagaaaagcgctcagtgcagagggactaccatttggaaagagaggaaggaaagggctgacctagttggggatctgcatatggtttgttgtggctagattttacattgccagaggtggtatcacaggattaagtttttgaggtagagacttgggcccatgttatgtgtgtgttccagtctaaaactttttctgtgagtctcagacctgagatgaatgtgtcacctgaacccaaggtatttcttcctgttgagataagagatttgataaaggatatctaggtttgttattattgttgctgttttatttatttatttattgaatgatggctatgagttcagtaaccttaaagatgaccaattgaatgagtcatctttatgatttttaatttcattaaaataaaattataaagaatttacaaaatagggacaagactttctgtgctgccagaataacattttatttctaatatcagtgaacactctattagtggtttaaaaggctgtttttaaaaaatctaacttttatgactttaattgttatcaatataacttactttatccacttgtactagtagctttccagaaactactataacaagctttgtaatgtgttttgttggccatattataatttggcttaactggattaatgtaccaaaatatctaaaatctcttgaatacttaactactccagaaaaaaattatttttaaggtagttgctgcctctttttctttttttaaactgcctccacaaagtggcaaggtctgttttcctctttttatttttggcagttaaaaaacaactgtcatcactttgaggccactagtaactc

SEQ ID NO: 205694 - DNA, 1000 bp, Homo Sapiens
atcttgaaacattcaaaataataaaataatatgaagcatcttctctaacaacaatagaataaaactacaagtcaataagaggaattttaactatacaaacacatggaaattaaacaatatacccctcaacgaccagtgggtcaatgaagaaattaagaaagaattgaaaaaatttttaaacaaataataacacaaacacagcataccaaaacctatgggacacactgaaagcagtactaagagggaaatttatagctgtaagtgcctacatcaaaaaagaagaaaaacttcatataaacaacttgatgatacatcttaaagaactagaaaagcaagaaaaaagcaaacctaaaattaggagaaaaaaagagaaataataagggtcagagcagaaataaatgaaattgaaacgaagaaagcaatacaaaaggtcaacaaaacaaaaaggctgtattttgtaaagataagcaacatcgacaaatctttagccagactaagaaaaaaagagaatatgcaaataaacaaatgaaaaaggagacattacaactgatactgcagaaattccaaggatcaatactagttactatgaataattagatgccaataaattggaaaatctggaagaaactgataaattcctagacacatatgacctatgaagattgaatcatgaagaaatttgaaacttgaatagaccaatagcaagtaataagatgaagccataataaaaagtcccccagtaaagaaaagcctgggacttgatagttcactgctgaattctaccaaacattaaaagaagaataccaatcctactaaaacttttgtgaaaaatagaggaggagggaatacttcccaactcattctacaaagcgattattaccctgatactaaaactagacaaagacacattaaaaaaaaaaaaaaaaagaatactgcaggacaataaccctgatgaatattcatgcaaaaattctcaacaaaataccggcaaaatgaattc

SEQ ID NO: 205695 - DNA, 1000 bp, Homo Sapiens
tctgtttggggtttcaatttctggttcaatcttgggaggttgtatgttcccaggaatttatccattcttctaggttttctagtttgtgtgcagaggtgttcataatagtctccaagcggtttttgtatttttgtgtggtcagtgacaacgtcccctttgtcattcctgattgtgtttatttagattatctcccccctcctttttttattagtctagttagtgcctatcaaccttatttattctttcaaagaaccaacttttgctttctttgattttttgtacggtttttctcatctccattttgttcagttcagctctgattttgggtattctcttctgctagctttggggttggtttgctcttgtttatttagttcctctagatgtgatgttaggttgagatctatctttttgatgtgggcatttagcactatagttttcccttaacactgctttagctgtgtcccagattctggtatgtttttatctttgttttcattagttgtaaacaatttcttgatttctgccttaatttctctttgtttacccaagtcattcaggagtagattaatttccacttaattatatggttttgagagatcttcttggtatttatttttatggcactgtggtccaagagtgtggttggtatttcagggtttttttgtttttttgagatgagtctcactctgtcaaccagactggagtgcaatggcgtgatctcagctcactgcaacctcctcctcccaggttcaagcaattctcgtgactcaacctccaaagtagctgggattacaggcgcatgccaccatgcacggctaatttttatattttttagaagagatgggtttttgccatgttggccaggctggtctcaaactcttgacctcaagtgatttgcccacctcagccttccaaagtgttgggattacaggtgtgagccactacacctggccggtatttcaggtttcttgaatttgttgagaattgctttctggcc

SEQ ID NO: 205696 - DNA, 1000 bp, Homo Sapiens
aacctcacctccaacaggggcaatctcaccctctccagcaggggggaacctgaccctctccaggagagggaatttcaccctctccagcagagggaaacctgaccctctccagcagggggaatctcaccctctccagcagagggaaacctgaccccgtccaggagaggggaatctcaccctctccaggaagaggaaaccttaccttctccagcaggggggaacctgaccttctccagcagtggggaacctgaccttctccagcaggggggaacctgaccttctccaggaaggaggaacctcaccctctccaggacgggggaacctgaccctctccagcaatggggggaatctcaccctctccagcaggggagcctcaccttctctagcagggccttcacctcccactcctggcgctgcttccggcttctgtatggattactctccaggccatcgaagttgggctcaccggcccctgaagggagggagggagaagcatggagccataaggaagaacctcagtccaacagctccagcccaactaagcccccagttcctggatgtctctggcccaaacttccacccagagttcattcacttcaagccccatcccctggcccactcaccagggaccagcatgctggtgatgcccccagtgtgccccacccccagcacatcttcaaaggggcagaactgaaggccatgcacagggcctgagagccggtgggtgaggtagggctgttcaagggagggtgggctggccttgccctgccctgcccagatgttgacaacgtcacccattcccgccaccagcagtcccctctgggagaaggccaggtgccctgctccatggggcagggtccgagtgctcagaggctggtacgtccctcgcaagtcaaagatcttcagctggtggtctaggccagaggtggccatgtacctggtgagagaagagggatcaattaatatgtcagtaaatgggtttaccaagcaagctgtggcc

SEQ ID NO: 205697 - DNA, 1000 bp, Homo Sapiens
ccctccatccatccatccatccatccatccgtctacctacatgcctgcctacctcagcctcccggatgtttgaggctgcagtgagctatgatcacaccactgcagtccaaactgagtgattcatgattgcaccactggactccagaccaagtgacagaacgagacagacccatctttaaaaaaaaaaatgattatgagaggtctcagtgcagaaatggcttcctcctgcccattgtgccagcttgcccaggcccagaggttgagtcatgatatgaatgtgctgtgtagtgtccagcaccagaagtgtgggtatagtggaggaaaaagatacagagccagaaccaggacatggaaacatttttaagctatatgtttttaaaaatcaccacccccatgctagagagaggactgaattaggtttctgttttctctctaaaattgatataacaaaattgttgtcatgtgaagagaaaatcaaagagtatgctgacaaaatatgtgggaaaatctaaagcacagggacaaacgaaaaaaatagatgacttgggactatatcaaaatggaaagctttttttgttgcaaatggtaccatccagaaaatgacaaaagcaacccacagaatgggagaaaatttttgcaaatcacatatttgataaagaacctgtacccagaatatatgaaagactcttgccactcaataataaaaagacaagtcaattataaaaatgagtaaaagatttgaatagacatttctccaaagaagatatacagatggccaataaacacatgaaaagataattcagcagcattagctatcagggaaacacaagtcaaaactacaatgagatacccctcatttatactcgcatggctagaataaaaaagataaacaatatgaagtgttgatgaggatgtggagaaattgaatccttatacattgctgttgaaaatgtgaaatgaggccggtcgcagtggctcacgcctgtaatcccagcacttt

SEQ ID NO: 205698 - DNA, 1000 bp, Homo Sapiens
acgacagctgtaaaaaaaaaaaaaaaaaaaaaaacaaacttagaaatatacctagcctaaggaggtgaaagacctctacaaggaaaactacaaaacactgctgaaagaaatcacagatgacacaagcaaatggaaacacatcccatgctcacggatgggtagaatcaatattgtgaaaattaccatactaccaaaagaaatctataaattcaatgcaattctcatcaaaataccatgaacattcttcacagaactagaaaaaaaaatcttaaaattcatataaaacccaaaaaaagcctgcatagcaaaagcgagactaagcaaaaagaacaaatcttgaggcatcacattacctgatttcaaactatactataaggccaaagtcaccaaaacagcatggtactggtatgaaaatgggcccatagaccaatggaacaaaatagagaacccagaaatgaacccaaatacttacagccaattgttcttcgacaaagcaaacaaaaacataaagtggggaaaggacaccttattgaacaaatggtgctgggataattggctagccacatgtaggagaatgaaactggatcctcaactctcaccttatacaaaaatcaaccaagatggatcaagcacttaaaactaagacctgaaactatacaaattctagaagataatattgaaaaaaacctcctagacattggcttaggcaaggatttcatgaccaagaacccaaaagcaaaatgcaacaaaaacaaagataaatagctgggacccaatgaaactaaagagtgtttgcacggcaaaagaacagtcagcagagtaaacagacaacccacagagtgggagaaaatcttcacaatctatgcatctgacaaaggactaatatccagaatctacaacaaactcatacaaattagcaagaaaaagaacaaacaatctcatcaaaaagtgggctaaggacatgagtagacaattctcaaaagaagatatacagctggcc

SEQ ID NO: 205699 - DNA, 1000 bp, Homo Sapiens
aaagtcttgcattattattgtgtgggagtctaagtctctttgtacgtctctaaggagttgctttgtgaatctgggtactcctgtattgggtgcatatatatttaggatagtcagctcttcttgttgaattgatgcctttaccattatgtaatggccttctttgtcccttttgatctttgttggtttaaagtctgttctatcagagactaggattgcaacccctgcttttttttttttttttttttgctttccatttgcttggtagatcttcctccttgcctttttttggagcctatgtgtgtcttatgtgtgtctttgcacgtgagatgggtctcctgaatacagcacactgacgggtcttgattctttatccaatttgccagtctgtgtcttttaattgaggcatttagcccatttacatttagggttaatattgttatgtgtgaatttgatcctgtcattatgatgttagctggttattttgcccattaattgatgcagtttattcatagcatcaatagtctttacaatttggcatgtttttgcagtggctggtactggttgtttctttccatgtttagtgcttcctttgggggcttttgtaaggcaggcctggtggtgacaaaatctctcagcatttgcttgtctgtaaaggattttatttctcctttagttatgaagcttagtttggctggatatgaaattctgggttgaaaattcttttctttaaaaagttgaatattggcccccactctcttctggcttgtagggtttctgccgagagatctgttgttagtctgatgggcttccctttgggggtaacccgacctttctctctagctgcccttaacactttttcctttatttcaaccttggtgaatcggacaattatgtgtctttgggttgctcttctcaaagagtatatttgtgttgttctctgtgtttcctgaatttgaatgttggcctgccttactaggttgggaaagttctcctggataat

SEQ ID NO: 205700 - DNA, 1000 bp, Homo Sapiens
agtgccctctacctctgccaccacatccctggcagtggaggtccaagtcctggctgtcccccctctcaccagtggggccagggatcctggctctacccgctatgacttggttcaatggcccatcgcctctgcaactgactctgagggcattggagcagacatcaagccccaccctgcccaggcccatgcctggcacctggtttccacgacgaggcgcagctgtggctccgactgtggcagggctgggaagcagggggcctttgtcaggctcacggcctgaggtttctggcctctgtgatctcccctgggaacaggacggggaccgggccgcactccagcctgcccttcgtgagtttcctgaggtgtcctgcaatggccagattcgacggagaagccagtcagctcccttgtcccctcactgattcctggtgagtacgtgagtcctgatgcgtgtccactacccgctggccctgtgctggggcctggtgcccaacccaggcagagacgtctggggacagccacactttggggagttagggcctgggaggagcagggaggcctcctcagatgggcttgggttggacttgggagctggcctcgagggaggcccgcaggtgcagcagcctggaggcagagagctgggtgtgtcagtgcctgagagggccgtggtgggcagctcaccagcaaagggagcagaaagggcccgggggagaagtgggcagctcagagggaagaggcggggctgggatgctgagcagggtgtggacggagatgcagctgggtgcaccagtgtggtttggctgggaagggaggcgtgtgtgtgggggagagaaattgggcagtggaggtcctgtcctgagaaaggggctgtctgcaggcactctgctccctctcgtggcctagtctgcctctacaccagcagagacctccctgccctgcggccaccaggaatccatgcagcgtgcatgccccaccatagctccaccgccaccaggaattc

SEQ ID NO: 205701 - DNA, 1000 bp, Homo Sapiens
gatttgtttctcctctagttcctcctgcaatgctccttactccatttttgtttttgttttactcataaacagcaagtcaacatatatacccaggtatgtttttaagttcatgcactcaaaatctatcacgttaataggtgaaaaatcttaccttccagaaaacttggtcatcaaaatatttagccacatgaggtgctttccatattttgagatttaggagcaaacctgtttaaatgcataatttaatgttaaaagatttggagcacaggatttttaatctcaagattaatcaaaatattgtgtgtgtcaaaacgacagtgtctcaacagaaatcctttttctcccacaattgaaagacaaataaatggacgccctgtcattcctggaccagcttaattctgtagactattttattttattttattttattttattttattttatttattttgagacagagtctcactctatcacccaggctggagtaccgtggcatgatctcggctcactgcagcctctgcctcccaggttcaagcgattctcctgcctcagcctcccaagtagctaagattataggcgcctgccaccacatccagctaatttttttttttttttttttttagtaggatggggtttcaccatgttggccaggctggtctcgaactcctgacctcaggtgatccacccacctcagccttccaaattgctagtattataggcataagccaccacacccggccgattctgtaaacaatttttttttttttgaaaaaaagaactgggaatggcagtgtactgagcagtacatgagagccacagatctgacgcccttccccagacggagtagaagggccccacgaaagctgatccatgtaagacatatgggctactatggagggcgactccagttgggtgctcctataggtctgtcttctctggctccagtcaactcctgggaacctcagcttaagattccacttgtgtagttaggaaagtagct

SEQ ID NO: 205702 - DNA, 1000 bp, Homo Sapiens
atggggcaccagggccttgtggatccctggacttggttcccaggggttctgaaggggagggatggagcagatagcatttcagagccgcctcactggccaggcataggtccaagtagaagagagtgaaggttgagggcagagcagcccccaaggcagggacagagaagcaggcacgcccaaaggcagaagagcccattccagattcccctcccttttaggggatatctgggtctgtgggcacccaagggagcacctggctggcaggcggctgggagggcatagcttcctggagctggagacaccaagcgagccctgttagtgccgtgggcacccagccaaccccagcaacaccgcctagcgacgcagtccagacaaacagtagcaacaaccgccccggtttccatgacaatgacttggaaacaaacacggcaggcaggcgtcatcctcaaaccggccccgcaggaaatggtcctgccccagccagacctggggtcgggggtgctgctgtccctggcggggtcaggggctgatctctggaggagaccccttacccacatcatccccgcaaccgaccctggaaggtcttctggcacacaaatcccccaccgccgcccaggttttagagaagggcacaccacccaccactctcctcacgacatagtttccactggaggctcccaagggaggggggtccagctgagccctccagtcccccccccgccccccgccccgccaagctgaaagcaggaatttcccatgcaaccctgggagcccgcagcaagggcggagacgggcactccggaaattctcagttctcccgaaacaaccccccaacacacacaaggaagcctgggcctggcaggaggggatgagaaggggaaccatcccagcctctcctgtgagcaggggtctggaacctgcctgatcctcccctctgcctggggttggggactggccgtcccttccgcaacgtcaggccccgggggttttggctgaattc

SEQ ID NO: 205703 - DNA, 1000 bp, Homo Sapiens
aattaaaacttccaatgtgttgaagcttaaaggattagcatttatccagaacgaagaatgtaaaaggactttgtagatgtcttccccaaatctcactttcctcaattatttttgaacacctctgtcaccactaaatcatttctggagggacacacaggagcttcctgaacgtgcctgtggcaggttttggttttagcacaggcgaggacaagctttttagtacatggcagcatctttcccattttattttccgaaaatttttcaggtgttctggagggacgtataaagttgcactgtgatgatttctttataatgttctctttgttctaacagggctgtatactttgcatgttactccaaagccaaagagcaatttaatggcattttcgtgcctaacagcaatattgtgcatattttctcagctggctctgcaggtatgttaccctagtgagtgaagagagggtctctctctcacttttctaaagcatgcattgtgccagtttttccaggaattagaaattagctccttgcttcctttgcacctaaaattgtttttctaaagctttatgttacaaccaataggagagtgagagcggtttgtagcttgattttattttccttgaccactaaagctctttatttgccctcaaaatgtacatgttctatgcatgctactggtattttgttcttctaaaggaatattcataggtttttcatgtcttctgtttgcccatcaaatgatatagatagatagatatagatagatagatagatatagtttttttttttttttttttttttgagacagagtctcactctgtcacccaggctggactggagtgcagtggtgcaatctcggctcactgcagcctcctcctcccaagttaaagtggttcttgtgcctcagcctcctgagtagctgagattacaagtatttgccaccatgcctggctaatttttgcatttttagtagagacgaggtttcaccacattgcccggg

SEQ ID NO: 205704 - DNA, 1000 bp, Homo Sapiens
gattgtggggatggccctgtctcctcccataggaaggaacagtgtgacatgatagatgtgtgctacagtgcctggcctcacataacgttttgaggagttaaactcaagccctcatacttggatcacaagtacttaacctacactgagttgtctctccagccttgaatattttagatcttttattatcattgttatgacacttgccataaatgtgtttgacagctactctaaaattgttgaattagaaatgatgagaattaaattgtgtcagtgttaatattatctgtcttttaaactgagttattttctatttagtaataagaaatacatttattgttttctaaatattttctttttagttagttagtttgtttgtttgtttatttattttggtttttcgagacagggtttctctgtgtagccctggctgtcctggaactcactttgtagaccaggctggcctcgaactcagaaatccacctgcgtctacctcccaagtgctgggactaaagacgtgcgccaccaccgcccattgtagtttatttttaaaatcttatttttgcagtatgagggaatcaaatccaaggccaggcaagtgctataccaatgatcttgcatctccagcaacttttgagtttgttagcattttttttcttttaaagacttttctatttctttgtacatgtatgtatccatgtgaatgcacactatgcaaatatgtgcaggtgcctacagggaccaggagagggtgttgggttccctagagctggagttccaggtagttgtgggctgtttaatgtgccttctggaaactgaagttcctgtcctctagtagagcagtgagtgctaactgctgagccatctttccattccttgttaggatgtttaattagaaggatattttctattagtatttatttcctctgtttacttcatttttttatatagaagtttttctcttttatcagtaaggaaaagggtagacgtggctagtgaattc

SEQ ID NO: 205705 - DNA, 1000 bp, Homo Sapiens
ccatttataggaaatatacagaatatgtaaatccgtggagaaagaaagccgatttccaggggctaaggggaggggagaatgggaagtggctgcttcatgggtacaaggtttcattttgagctgatgaaaatgttttggaactacatagagatagtgttggcacaacatggtgaatgtactgaatgccactgattgttcactttaaaatggccaaacttatatgaatttcacctccattaaaaaaaaaaaaaaaggaccagatgtggttgctcacacccataatcccaacactttggaaaaaggtgaaagtttttttttcttttttttttttatatacttaagttctagggtacatgtgcataatgtgcaggttggatacatagatatgcgtgtgccatgttggtttgctgcacccatcaacttgtcatttacattaggtatttcttctaatgctatccctcccccagccccccacccactgacaggccccagtgtatgatgttctctgccccatgtccaagcgttctcattgttcaattcccacctgtgagtgagaacatgcagtgtttggttttctgtctttgtgatagtttgctcagaatgatggtttccagcttcatccatgtccctgcaaaggacatgaactcatcctttttaatggctgcatagtatcccatggtatatatgtgccacattctcttaatccagtctgtcattgatggacatttgggttggttcaaagtctttgctattgtgaatactgccacaataaacatacatgtgcatgtgtctttatagtagcacgatttataatcctttgggtatataccctaagacctgggacgcatttaaagcagtgtgtaaagagacatttatagcactaaatgcccacaagagacctctgcctgagaacgtgggtttcagcctaagagttgtaatatgtgtgcccattcacaggtgctgcatcagagtcccaggtgggaagaaggcaagcatacac

SEQ ID NO: 205706 - DNA, 1000 bp, Homo Sapiens
tacagactagtctgctggttaaaacataaaggctggagttagacctgaatggtactctcaactcccctgcaacccaatgacaggatttaagacctctcagggtcttagtttcctcatctgtaaaatcaggataataatgctttcctctaacagcagtgtggccttgccctagttagttacatttcctcagcaataacatggggtatgaaataacatttgcctcatgggatcaaatgatgaaacacatatcaagcatttagtgcacagtgagtgcttaataaatattactcattattcctttttttttttttgagacagagtttcactcttgttgcccaggctggagtgtagtggtgtgatctcggctcactgcaacctctgcctcccaggttcaagaaatactcctgcctcagcctccggagtagctgggattacaggtgcgcaccaccacgcccggctaattttttgtatttttagtagagacagggtttcgtcctgttggccagggtggtcttgaactcctgacctctggtgatccgcccacttaggcctcccaaagtgctgggattacaggcgtgagccaccccgcctgacctcattattcctttattaacattaataaatgttattaatgcaattataatctcacaggactgtggtcatgatcaagtgagataatttaagtgtaaacctttaaaatgtcaaagcgccatctctgaacaccagtcctacttggagtaaaagccttcaactgagaacactttttttcttttttttttttttgagacggagtctcactctgtctcccaggctggagtgcagtggctcaatctctgctcactataacctccgcctcccaggttctagcaattctcctgcctcagcctcctgagtagctgggattacaggcacgcaccaccatgcctggctaatttttttttttttttgtatttttagtagagacggggtttcagcatggtggtcaggctggtctcgaact

SEQ ID NO: 205707 - DNA, 1000 bp, Homo Sapiens
atacgctttagcagtcaccctccattgccccccagttttctaaccccaggccctaacaaccactaacctactttctgtctctatgaatttgcctcttctggccatttcatataaatggaattacacattttgtaaccttttgtgactggcttttttcacttagcataatgttttttaaggtctacctatattagagtatgtatcagtactttattcctttttatggccaaataatattccattttctggatataccagattttgtttatccattcatctgttgatggacatttgagttgtttccactttgtgctattattatgaataatgctgctatgaacattcatgtttacatcatgtatacattttaatgtggacatatgtttttagttatcttgagtatatacctaggagtggaatcatatatatatgtttttaaaccaaaatcaaattttaatgttgcagaatccctgaagcacttttaggaactgttcacttccatagaacagtttgcaaatcagtgttaaagtggagagagtgttgatttttttgtgcatgtatttggtagacatcgtttgaatcttgattttataggctgtgtgaattttgtcaagttacctgtgaacatctttcttctagtatagaatgttagtacctctggatgtttcacgagttgatagactgtattattgcttgaaaaattcactgtccatttattaccatcaactttggccacggatttgctttggctagtggcctgtgaggggaagtgatgtgtgccttcttccaggcagaagctggtggtttgcctcatctcttttcctttctgccatgatgaccattgatgttccagttggacacaggctccatcagcttgtgtatcagaatgaaaatgatgtggggcagagccctcatagattttgttgcatgagtatggaaaaagtgtcattttaagccgtcaagatttggtgactatttgatactttagcacagtggtcct

SEQ ID NO: 205708 - DNA, 1000 bp, Homo Sapiens
atgtaatttaaaaacaggtgaaggatttgaatagatatttctccaaagaagatattcagatgacaaataagcatatgaaaagatgtgcaacatgatatgtcattagggaattaccagttaaaacaactactacacctattagaatagcttaaaatctgccgggtgtggtggctcacacctgtaatcccagcactttggcaggccgaggcaggtggatcacctgaggttgggagtttgagaccagcctggccaacatggcaaaagcccgtctctactaaaaatacaaaaattagccggacatggtggtgcatgcatctgataccagctacttgggaggctgaagcaggagaatcgcttgaacctgggaggtggaggttgccatgagccgagatcgtgccactggactccagcctgggcaacagactgaaactctcatttcaaaaaaaaaaaaaaaaaggtaaaaatccagaacactgacaacactgaatgcttgtgaggatgtcgcccaggctggagtgcagtggcgcagtctcagctcactgcaccctctacctcaggggttcaagcgattcttgtgcctcagcctactgagtagctgatactataggcatgcgccaccactcctggctaatttttgtatttttagtagagatgaggtttcatcgtgttggccaggctggctcatgcctgtaatcccagcacttttagaggccaaggcgggtagggtcacttggtcaggagttcaaaaccagtctggccaacatggtgaaatcccatctccactaaaaatacaaaaattagcccggtgtgttgtccggcacctgtagtcccagctacttgggaggctgtgggaggggaatagcttgaacacaggaggcagaggttgcagtgagccgagattgcatcactgcactccagcctgggtaacagagcaacacagtctgtcaaaaaaaaaaaaaaaaaaaaacccaaaaaaacaaaatggtgcataaatgaattc

SEQ ID NO: 205709 - DNA, 1000 bp, Homo Sapiens
gctccatcaatgtcaagacacttttgtaagtcatgataccagctttttaacccgtgcctaaagaactgagggtcctgggaatttagccatgtcaatgcagtcttttgtacattactagctgaagaaaatgggtgctctttaaagatttttttaaaatcaggaaacaaaatgaagtcagaaagagccaaatcaaggctgtaaggtggatgtctaatgatttcccatcaaaactcttgcaaaattgccctggattgttgagaggaatgagcaggagtatcattgtggtagagaagaacgctccggtgaagttttctcaggtatttttctgctaaagctttggctaattttctcaaaacactcttgtaataagcagacgttatcattttcggtcctccagaaagtcaacaagcaaaatgccttgagaattaaaaaacaaaaaactgttgctatgacctttgctcttgatcaggctacttttgctttgactggaccacttccacctcttggtgcccattgctttgattgtgctttgtcttcaggattctactagtaaagccatgtttcatcacctgttacaaatcttcaaatgcttcaggatcttgatcccacttcaaaatttcaattgaaagctctgctcttgtctgcagctgacctaggcacaacagttttggtacccatcaagtggaaagtttgttcaatgttattttttcagtcagaactgtgtaaactaaaccaattgagatagctacagtgttggctgttgtttgtgctgttaatcgtctgttctcttcaattaaggcactaacaaggttaattttttcctcacaaattggtatggatggtctgccattacaggcttcatcttcgatagcatctcatctcttctttaaaagagttatcaatttgtaagagaaacacatcccatgctcatggatgggtagaatcattatcgtgaaaatgaccctactgccaaaagcaatctccaaattcaatggaattc

SEQ ID NO: 205710 - DNA, 1000 bp, Homo Sapiens
acatcccaagaagagcatactacagaacaatatcttttataaatgtagaagaaaatgccctcaacaaaaccaaaaggagagattggcagaacagatttgtttaaatgctccagttacatgctatcttgaagaggtgtgctttactttcaaagacataaattgcttaaaataaaagcgtggaaaagtatagtgtggaaacaatcatgaaaagagagttggagtggctctactaatattctctgagacaaaaatatactttaagacaacaattcgatttagatacagagaaggacgttttatcacggtagagtgctcaatccatcaagaagatataaagatttttataaaaatatatagacacatagcaatagtgccccacaatacacgaagcaaaaatggacacaactgaagggagaaagatgcacacaagatcccagccttgtaggatgtggctaaattagctcttagatgcaaatgtatagctataaacacctatattgaaaaaagagtagtgctctcaaaaaattcttctaaatttttatgttaagacacaggagcaagaaaattaaactaaccccaaacaggcagaaggaaggaaataaggactgttagagtgatataaataaaaagaatataggaaataatagagaaaattaaccaaaccaaaagttggttcattaacaaagatcaacgaaattgacatgcttttgctagactaagaaagaatagaaaagatgcatattacaaaaatcaaaactagaatataggatattaatacaatcttacagaaataaaaaggttatgggaaatactgtgaacaacagcatggcaacaaattagataatcttgtgacaaggacaaatgtccagaaacacacaaattactgaaactgcctaaaggagaagtagaagatttgaattgatttacaacaagtaaagggattgaattactaacaaatatattcccccaaagaaaagtccagggttaactggtggaattc

SEQ ID NO: 205711 - DNA, 1000 bp, Homo Sapiens
agccagtacattgtccatgaacacatgaatattcaagagaagtcttctaaatgggacaagcttagcaatgtcattcttgaatccctccagtgtacaccttacaaaactaatcacagctctgatgctcttcaattctcgaaccaaaaaagacttaagcccaggaacactaaagaagtttgcaaatacaatgactctgtaaacagtttaagtttgttttctaccattagtctcaatcaaggaattaacatgcagaagaaaaaacacaaccgaaatgcagaattagagaaggtttttgtttctaaacataaagtcatggtgaaaaaagacaatattgcagggaacccttacaaatgtagtgaatttcacaaatatcttacccagagagaaaaactacaaagtcagcagagaatttatcatggaaagaaaccttacgaaagtagtaaaagtgacaaatgctttacccatcagatccatcttagtattcatcaggaaattcatacagaagagaaaatttacaaatgtagtgaatgtgacaaatgttttaaaaacaaattcaatcttactatgcatcagagaattcatacaggagagaaaccttacaaatgcagtgaatgtgacaaatgctttaccaaacaatccaatcttagtattcatcagagaattcatacaggagagaaaccttacaaatgcagtgaatgtgacaaatgctttacccaacaatcctgtcttagtattcatcagagaattcatacaggagagaaaccttacaaatgcagtgaatgtggcaaatgctttactgaaaaaggcagtctgagaattcatcagagaattcatacaggagagaaaccttacaaatgcagtgaatgtgacaaatgctttacccaacaatccaatcttactattcatcagagaattcatacaggagagaaaccttacaaatgccctgaatgtggcaaatgctttactgaaaaaagcagtctgagaattcatcagagaattc

SEQ ID NO: 205712 - DNA, 1000 bp, Homo Sapiens
aagtagctgggactacaggtgctcaccaccacacttcgctaattttttgtatttttagaagagatggggtttcaccatgttggccaggatggtctcgatctcttgacctcatgatccgcctgcctcagcttcccaaagtgctgggattacaggcgtgagccaccacacctgcccgaaattttcaattttcagtagaaaattcttcttgaactttagctcagataaattcttaactaacaggccaggcgtggtggctcacacctggaatcccaacactttgggaggccaaagtgagcagatcgccttaggtcaggagttcgaaaccagcctgaccaacatggtgaaaccccgtctctactaaaaatacaaaaattagccaagcatggtggcaggtgcgtgtaatcccagctgctcgggaggctgaggccggagaatctcttgaactggggaagcggaggttggaatgacccaagattgcgccattgcactccagcctaggcgacaggagtgagacttcgtctcaaaaaaaaaaaaaggtgactagacttctgatacacagctttttaaaaaggttgtagaccccacattagattctccaaggttaagaatttcactcttactgactgaattgtgcccagctttcttgatatgatgttgtagaaacgcctgcaattcttaatctatgctcatattaaaggattcatttaaatacagaattaacactctttaactgtagctttctgtaaaccatgtttgtcatttgctataaagttccttgagactatatagcacacataattgtacacaaatctgtgaacattagcatctttttatttgcatgtttagaatttctactcatatagtacacctgaagactaattttacaaagcctgacatttaaaaattcaatctagaaatctgctaaaatttctcaaatttatcctccactgaacattgtaacatttttcctcctcagacgttcggctactacttaataatg

SEQ ID NO: 205713 - DNA, 1000 bp, Homo Sapiens
ccgcctcgatcggacgccatgcccccacagggcgcgtccctagtgcgtcacttccggtcgacggcggaaggcggaaggcggagcggtccctgcaacccggccggcgggaactgccttctagtttttagtctcagaccagaccaccgggcgcaccccgatgccgagcccgcagcttctggtgctcttcggcagccagacaggcacggctcaggatgtgtcggagagactgggtcgcgaggcccggcgccggcggcttggctgccgggtgcaggccctggactcctacccggtggtgagggctcgctagggcctcggcgtgggggacgagcaggcctggcgtgcccgcctcgcggggtcatcgacccaaaaggcgtcgcattttctctgagagcgggtctttcccttatggcggatttagggaaggaggtttgggaaggggagttcagtttagcacctggaggaggttggaacctgaaagagaagacggtctggctgctcacataaatccctctgccctgtcagcctgagtaaaggagaagggggtcaagttttgggaaggacgcccggtccttacagccggaggtcttacgtgtgtgtgtctttttgttgaggtgaatctgattaacgagcccctggtgatatttgtttgtgcaactacaggccaaggagacccccctgacaacatgaaggtaaggctggcctgatgtggctcctcagatccctgccctcgaccctcaccccgttttcattgcctggcgtctaggtgcagtaaatagctctcctttatctcatgcaccttcagaggtggatttgagagaacgtccgtgagtggggctgggggctccggttgccctctctaataaactcgtcgtagccaccaaatagccttattatccgttttaacctttcttatttttccagggctatctatatgtgcatctagtctgggtcttgtgtgtatttctagactgtatgaccctcagggaacgttgctgaattc

SEQ ID NO: 205714 - DNA, 1000 bp, Homo Sapiens
gaacatgtgagaagtgtggacaaacgagtgagaaagggcatccaggagaaaaacaggcaaaatccagcaagtgacagaagaaacccatctggacagcacagacgagagaggggctgagcctgccgggaaccagagagcacacagaacacgcgtggggatgccactttgcagccaacagcctgggcatgctgaagacaggcagggcccacggcggggcaagggcacccagcacctctgctgcaggaggctggctggaaacacgctctcggaagcagagcaggaaggctcagaccacgtggaaggccgcagctgacacccttgaaaggccagttaaagcagcacacagctcttcacctgttaggttagggaatgtgaaccccactggatgtgaccatttagcataccttgaaaggaggtttcggggctgttggggaaatctgaacggggactggagactggatgatgctggggaatgattgaacgttttcttagatataatgataaaactgaagttacataggaaaatgttactattcttaggagatgcctgtgaaggcatttgggagtcacgggtcatagttcagcaagcacacatatgtacacagacacacatgtggacacatagacatgcacaggcacacagacacgtgcacacacacactcccaattgtgcaatctaggttgccaggatatacaagtgatacatcttttctgcagctgtgaaaacttttattaaaaatattaggaaaaattgacggggcgtggtggctcatgcctgtaataccagcactttgggaggccaaggcgggtggatcacctcaggtcaggagttcaagaccagcctgaccaacatggagaaaccccatctctactaaaaatacaaaattagccagacgtggtggcacatgcctgtaatccagctactcgggaggctgaggcaggagaatcgcttgaacccaggagatggaggttgcagtgagccgagatcgcatcactgtac

SEQ ID NO: 205715 - DNA, 1000 bp, Homo Sapiens
gctttgtttttgtttttgagatgggagtcttgctctgttgcccaggctggagtgcagtggcatgatctcagctcactgcaacctacgcctcccaggttcaagcgatgctcctgactcagcctcctgagtagctgggattacaggtggtgccaccacgtctggataatttttgtatttttagtagagacaaggtttcaccgtgttggtcaggttggtcttgaactcctgaccttgtgattcacctgcctcgccctcccaaagtgctgggattacaggcgtgagccactgcacccagcctactttgtttgttacatggatttgttacctgcagccagaacagccacagagccatcatgagctctgctgcccaatggcgtacaggggtacctggtttttagcatctcaggcccatctgttagtttgttgattgtagtactttcttttcattagcattctactttcccatgactttttttgggggggagtggggtggacagggtctcactgtgttgtccaggctgtagtgcactggagccatcttggctcactgcagcctctgcctcctgagccaccaagcctggctgttttttttttttttttttttaattcttgtgttattttccaaagactatataaagaaacaaattatcctaagggttaaagtacctgctgactcttgaaatgttaaactttattgcctccagtcaggtgaacctcaggtggaagtgggtcacattctaggctggctgttgcctgtcttaaattctaaagaatgtagtgaagataaaggtgtcagctgataatccccagttatttactgatggcagataataaactgggaagggggagccttcttcaaagggccttgcagcattagctggtaccaccttgaaacagggagcaagtcccatctcctagtgccacccagggaatacctgtgctccacactgggttgattgcctctaaaagaggcagaggaactgttataaaacaaaaaaaa

SEQ ID NO: 205716 - DNA, 1000 bp, Homo Sapiens
tctggtgcttgagtgtcaacctaaggcctgatgtctatgttggacctagggttcacctgaggcctgatatccacctggggcctcaatgtccaaatgtggcctgatgcccatctgggcgctgggtgtccacctgcaacatggatgtccactggtactttatgtccaccaggggcctaatgtccacctaagacctggtgttcacctggggtctaatgttcagctgaagaccggatgtccacctggagccgaggaatccacccagggactggtgttgaactggggcctgatgactacccggggacaaggtacacaccaagcttgatgtccacctgtcaccagatgtccacctgagtcctgatgtccatcttgatcctgggtgtccactttaggcctgatgtccagctggggcctaggtgcccactgggggcttcctgttaacctggggactggtgtcattctggggcctaatgaccacgtgggttgtgttattcacctagggcctggtgtccacttggggcttgagtgtaaccctggacctggcacccacataggacttgggtatcaaactggccccttggtgtccagttaagacatcatgtgaacctggcgcctgagtgtccacttggggccaaatgactactgggggcctgaatgtgaacctagaatctgaggtttactaggggcctaggtatccacctggggcccaatgtccacctgagcctgggtgtcaacctggggcctggtgtaaacctctagttcagtgtccaccttgggcttgatgtcaacctggagcctgatgtccacctgagtactgatgttcacctttgacctgatgtccacctgtggactgtttatccacccatggcctgatgttcacctggggctgaatgtccaactgtgacctgttgtgcacctggaacctaggcatccacctgcagcctgatgttcagctgggctgggacccggagttcacctgaggcatgatgtccacctgaagctt

SEQ ID NO: 205717 - DNA, 1000 bp, Homo Sapiens
tctgatagaattcggctgtgaatctgtctggtcctggactttttggttggtaagctattaattattgcctcaatttcagagcctgttattggtctattcagagattcaacttcttcctggtttagtcttgggagagtgtatgtgtcgaggaatttatccatttcttctagattttcaagtttatttgcgtagaggtgtttatagtattctctgatggtagtttgtatttctgtgggatcggtggtgatacccctttatcattttttattgcatctatttgattcttctctcttttcttctttattagtcttattagcggtctatcaattttgttgatcttttcaaaaaacaagctcctggattcattgacttttttgaagggttttttgtgtctctatttccttcagttctgctccgatcttagttatttcttgccttctgctagcttttgaatgtgatcgctcttgcttctctagttattttaattttgatgttaggttgtcagttttagatctttcctgctttctcttgtgggcatttagtgctataaatttccctctactttaaagctagaattagtttctaaaactgaacatgaattgactctccttgtaaccatccagtagtgtctcacatctatttaaataaaattcaggctgggtacggagactaatgactgtaatcccagcagtttgggaagccaaggcaggcagattaccggaggtcaggagttcgagaccagcgtggccaacatggtaaaaccctgtctctactaaaaatactaaaaaattagcctggcatggtggcaggcgcctgtagtcccagctactcgggaggctgaggcaggaaaatcacgtgagcccaggaggcagaggttgtagtgagccgaggccacgccattgcatccagcctgggcaacaagaacgaaactccatctcaaaaaataaataatgaaataaaaaaatgaaaataaataaaataaaattcaaatttcttacca

SEQ ID NO: 205718 - DNA, 1000 bp, Homo Sapiens
tgaaaaacataatctacaatacttttatgtatatctaatcattttatatttcttttttattatactacttgaaatacatacataaaggataaagagtttcaacaaatctcaaaaaggaaacctaattatgtataatattctgactgattttgtttgctcaccaaattgaaattgaaaagaaaaaatacagcactctattaaaaaaaaagatttcaaaatataattattgtctccctttgaaaatataaatgtttaaataatggtgaaatagagaatataaacattcacaaatattacatatccattcaacattttcaggtattattttgttttgttcaaacctccccttctgtcatttttctctcctttctttatctttagcataactgagctgctttccaaacatctatagttataccagacatagcattttccaacatcaaacatggtttttcttaaacaccagctccaaatattaattcccagggaaaatgacattttccatatatgagaaatattggaaccgatataacaaaactcattaacatttataacatttgaaaataatttcacaaaagttttatttaaaaaattatattgtaaatttatgtaagaaattctctatccattatatgacttgtataacatccacagtatactaagaaaatatttttaaaatataggataagttgtctaaataataaatttttaagactgcttagagccactattaaaagtctgagaataaagcatgaatattttttgatctatagagattatatatcagcatgctggcattggcttttattacagaataagcattttaatcttcattcactctcatcaattcactacagaaagcagcttaaaaaaaaagaccatcacttgtagaaaacagttagtatttcgatggtttacctggaagtttactgggcataaatttataaaatacatttattgatggaaataaactgttttactaaacaatattacagaattc

SEQ ID NO: 205719 - DNA, 1000 bp, Homo Sapiens
acgttgatgctttacttctggaccataatagaaacactaagttctacgatcggtcattatttttctctaaaacgtgtgctttttgttttttcaaacctcccttgaaaaatcagagcaaatgccaaggcttttgagtgtaagtttatcattcaaaattgttggcaagttttcacagaaatttccctgctgtcccagttctcttccctctgaatgtaacactccggccaacgtgctcacaattacttgttcagcgcactgcctggttcagcacttccacagcccttgtgagtgacgaggctccatggcagaaccatctccttccttaaaccttccatgacaacccctaactcttgtctttgccatctgtgcttggctctttctccacatattcctttttaacatgtcaaatgtcttgctggccccactgtgttactttatgcaaaatgtgaggctctttgttcctaaaactgctatcatttttacgcaggcacgagcacccgcacttccttaccctctggcacaaatctgcctgcaaggcaggttgtagcaagtccccgttaagactggtctttgatttccactggcctcaagggacacctccttgggtacacagaaatccatttcattggttggacagatactcacagtgcagagctagaaatgtctgtgctgtccttagaaggactacatgtcactcagctaggagacacccccagaaattccccatcaaactctattccacagagcccccatcaatgacagtaaaccatgccagtactgccctagatcaatcccacacagttgcagcgtgagtctcttctctctttcccttcttatcccaacttacccaaatttaatgaaaatgctgaaatcgaaactgactgaaatagaaattgctgctcccatatttaaacactgttcagtgcatcttgctcccccacattctggattcttctcccactgcctcattgaaattgctctctagcttcaccaggagctc

SEQ ID NO: 205720 - DNA, 1000 bp, Homo Sapiens
tgctggcgccacactaaggaaattcacagcagtgtctttctgttggagcccaatatccagtccacactcaggctcccagctgagccagcgtgtcacacgcggtgtttttccaaaccagcgccaagactcacgctctccttggccgcgggtttcttgtccctgttgtggcagaagcccccagccctccccacttttcctcctccgtgacagtttgaggacactgactcggaagagaaggcacacccagggcacagccctccccagtgctcctgaaacaggcagtgctgtctacagcaggcgtctcggcagcgtggagacagaagtcacctggctgccggcttccatctcggatttggtgctgctttgggtgatggacgtggagagggaaccccagtgtcggcggtgcctgtgaccctcaggcaacgtgaaacgcagctgcttccacatgccaggaaggctgttagaaaatcctgcatgtctgccgggcgtggtggctcacacctgtaattccagcactttgggaggctgaggcgggcagatcacaaggtcaggagatcgagaccatcctggctaacacagtgaaaccttgtctctactaaaaacacaaaaaattagccgggcgtggtcgtgggcgcctgtagtactggctactcgggaggctgaggcaggagaatggtgtgaacccgggaggcggagcttgcagtgagccgagatggcgccactgcactccaggctgggcgacggagcgagactctgtctcaaaaaaaagaaagaaagaaagaaagaaaaccccgcttgtcactgccctcgccgccaggagtcactcagtggtcattggactgtgccccagcggcgggatcggcttcccatgggtggccgccggcaccaggctggttggtcaccgcaaacccacactgccttcccacgccagctcaggagccgacgttgcttctcggtgtcctcagccacagcccttgttcatcagacacgaagggagctc

SEQ ID NO: 205721 - DNA, 1000 bp, Homo Sapiens
tttgtagaagggaggagctcaggccctgatgccaccaggtgttctgtggctgcacaatctccatgacccagactagagagaatccttagctatcgcctacccaaagcacaagttccagtgttcccctcccttgcctcgcccttttccgtgaaacaatttccagcgttccccctcctcgcctcacccttttctttgtcacatgtgcatggcgatggacacctgagtagtcgcccctgggacaactggagctgcagctctgcagtggggtctgggagctcctggccaggggcagctcccgcacacttggtagagacagggtcctggcccccacaccgactgagtgagagtctgcattcggcatttcctttctgagtggcgcttggtgtttttttgtgccatcccacaaccccatcgctcccaccagctgatgctccctggctggccgctccccaggagctgagaagcctgaagagggccaggcacggaggagcaggaacgaggacagtcaaatgtgccaagcttgtctttggttgtaactggtaatgtcccatgtctgttattctagttccccactatcttgcgaggattggcagtaaagtcctagtgatggacaacgcggcagtggggaaagtgacagccgtggctagatcatcagatgtgtctgtagaatccagtgtgtccctgtgaacatccgccagcagtaaccattcacattatttcaaaaacctgaattattaggttgaaaatgggtaaatcggggaaaaagccagcacttatccagctattcctctgtgaactaacccatgcataacaaatagatttttttaatggaagaattccagctaggacccgagcagctgggatcttcacactgaccgtccatgctgtgaacgtaaaaaacaaaaacaaaaaaacaaacccaaacagcgcccgggaatggtggctcacgcctgtaatcccagcactttgggagtccgaggcgggcagatcacctgagctc

SEQ ID NO: 205722 - DNA, 1000 bp, Homo Sapiens
cagctttagccttggcaacattttgcaaagtggagcactcccttcattgaaacacgcttccactgacaacatattttcttgatttccctcccgctgttctgaatgtttctgcacaaattccttttctagttttcctttctcctctccccaatattatatggtagtcttatacaggaatctgtccatctcatctacttctaaggattcatttactatttatatgccagcaggtttacacctatctatataacatcttcacttaaagggcttacagccatctcaatctaagcatattaaaatctgaacccaccatctccacctctgcctgaaaaattggcactgttcccatacgtggcactatcaataaatggcaccacgtgtccttactcactcctggcagaacctcaaggacattctgagcccactctgtctttctgctccacatcagtctctcatggtgtctttctaaattacatttcatgtctcttgaattcttccactttgctttaattctaccatcaccatccttttgtctcacctggactgctccaaagaacttttgaatggtttccttgcctccacttttaccattctttagtttattctctacaaaactaccagagtgatctttaacaaacatgaataagatcactcttgcttaaaactctccagtggcttctccttgactttggcataactcaaaaccttttaacatgatttacaggaccatccaaaatctgacccctgccttcatctatagcttcatctcctatatgctttcccttcattttatccagtcatcttggacttctttaggtcctttaaatgtatcatgttgtctttacttaaggccttcagatatgcatttccttcagtctggaaccttcctcatcaactttctttacccagccaactccttgtcaaccttcagctagttccataagtttccatagtagttttgtcttcctcttcctgtctcccatgatcaccgatgtttctc

SEQ ID NO: 205723 - DNA, 1000 bp, Homo Sapiens
ggtgaagacctgtttcctggttcatggatgggggcttctcactatgtcctcacatagtggaaggggcaaagcagctctctggagcctctttcattcataagggtactaatcccattcacgaggactctgccattacaacccaatcacctcccaaaggcctcacctcataaccttatcacatgggtgattaggtttcaatatgtggatctgagggggacaaaacattcagatcacagcagtttctttcaagacttttacacacaggttgcctccagatcacaaggctcttacccctcttttgttcttggctactttataacatccacttagacctcacttccttcaggacacctaggttagacctttgcctgtgtgcttccctagcaccttccactcccttcacatagcacctaacacactctgttgggtttctctgaggtatgtaagctctgtaaccgcagggttcctgtctttcttgttcatccttgcatcttcaaagcctgccgcattacctggcccagagcaagtacttaatgatcatttgttaatgaatgaataaatagatttttccattaatcatctaatcagtgaatttacaattctatgcaattctttgatgctctaagaaattgaagttttattttctgaagttatatattagttttatttcctaaggaatttgatttatccttactttaaatcataactacccagtggttattatagctatgctgccatatggtaaaacacatgaagcatctaatattgccttaagaaagctgtttcacagtaaaaactcttcaggcccttctctcggcacttttcattttatgttgaaattattggtgtttgtatctctcttacctgtaagacattaggtgcctcaaaggcagtgaccatgtgttattcaactttgtatcctcacaaccttgtatctagtgcagtgttggaagtcagtaaatgtttatataaatgcttaagataggccagaatccacatc

SEQ ID NO: 205724 - DNA, 1000 bp, Homo Sapiens
taaacataaagaatgaaggagatagccaggcgccattgttcacgcctgtaatcccagcactttgggaggccgaggcaggtgggtcacctgaggtcaggagttcgagaccagcctggtctaacatggtgaaacccactctctactaaatatacaaaaattagcctggcatggtggcatgcatctgtaaccccagctactcgggaggctgaggtgggagaattgcttgaacgtggggggtggaagttgcagtgagtagagatcacgcgactgcactccagcttgggcgacagagcaagactccgtgtcagaaaaaaaaacccaaaaaacaagaaagaaaaaaacgaggaaatagtacacgaaaaagcagaattaaagcaactgggtatatatttaaaaatgcaaaagctcactttttcagaaaaatattaaaatattaaatctaacaaatatctaggtagactgatggagaaaaatacagaaaatgcacaaaaaagcaattacctggaatgcgaacgttacaaaacgtcagcagttgtagattttaaataaacaatgatttttgagttcaaccatgatggggcatattgaaaagaatctctcagaaaaaaagaaaaagaaaactgttataaagctatgtacaaaatgttaagcactattaaagtcttccaaatctaccagttacggagttattggtcttggactaacactcctgaaaagaaaaaaaacaaacaaaataagacaatacctaaaaacctggataaaatggcctaccgtgggcaccggcaatgcatccaagcaggtaggacctgggtgctacattctctttgtcagaacacaaagcattcatacactcttctcaccctcactttcaccttttaatctttgatctactattaaatgtattcaacattactatcaatcctttgctcaaaatttctttactcacattttgcttgatgcacttggatagactgttcaagaaagtgtgagtagtgaattc

SEQ ID NO: 205725 - DNA, 1000 bp, Homo Sapiens
aagcagtgtcatttataactctgagctgtgggcttcctcattcctgattgcagaattagaactgctcacccagtgggaagcagcagtgggtcacagcgggcccccaggaagcaccccctgccgcagagagacttgctgcactcagggcagaactgaaagaaagacagcgtctccaccaagggaaacactgggaggaagggaactttgccataacagttcctgggccactgaccatccactccacatccattgtccatctcctgtcatggcttcttcctcttcttcggttgacttcctgtggtaaattacactctgttaaaacagcttcctgagatggagttcgtgggtggtgatgtttagggcatcgggcctgcgtgtttgagaccctctgattagaagttcagactgggcattaccccctgggctttgggagcctccgtgttgtcctctagtctcacaagtctgatgtagcaagctcctggctcacgtgtgtcacctgttttctctcctctctgagggcatttaggttcttttctaagccctattgtttctcaatttcccagtaatgtggaattattccatgggtcaggacaggggatccccaaagagcatcattgagccaagagagtttcatagtcagagcttgggcgaatttagtaataggtaagtacaaaatcaagcaaacagaaaaatattgactctaagggaaaagttgtataagtaagcaaagatatcccgagtagacaaatgaggtcaacagtggatatccatttctttcatttgttgttctgggctccctgaacccttttagtctgtacatttgtgacattagctgagggaaatttctcatattgtttctttgatattttccctcttttctctttctgggacttctaatgaggtgttagattactcaaattaatgctttccttatttttgcttttaatgttttgtactttgcctttttggcctacatctgagagacttcttcatcttttaa

SEQ ID NO: 205726 - DNA, 340 bp, Homo Sapiens
gggtccctgagactctcctgtgcagcttctggattcacctttggtgattatgctatgagctggttccgccaggctccagggaaggggctggagtgggtaggtttcattagaagcaaagcttatggtgggacaacagaatacgccgcgtctgtgaaaggcagattcaccatctcaagagatgattccaaaagcatcgcctatctgcaaatgaacagcctgaaaaccgaggacacagccgtgtattactgtactagagccttgagatggggactaggatattgtagtggtggtagctgcttcgaactggttcgacccctggggccaaggaaccctggtcaca

SEQ ID NO: 205727 - DNA, 1000 bp, Homo Sapiens
tctcaaaaggtttgttattggctgagaggtcttgacttcccctagaatcccagggttgctgactttgtttctcccgtcagagcctgccacagactccttattggatccgagttggccagagacccttcagacctcattgaatcagctgggtcacaagtgccaagttgctcgcagtgcagcctggaccggctctggaacttctcattgtcaaagctaagagtcaattgagtcacccactgagtcagatggcatactcaaatgtattgcacaagtctaaaatcctgtgtaggcccacaaacattgcacctgagtcctagtgatagggcataccaggcacagcaacttgcttttcattttggagaaagagccctagtcccccagatcattgaacaccttcccccacctctgctccaaatccactgtcccaaatcttctgtagctttgggagatttctcttctacccattgttgtgaatttttttacccaggcatccttggtgtctgctacttcagctccctagattctatcaacttgatgtcccttgagatggttcaggttcccacagaccaaacttaagcccagcaccagagaggtaacaatactgaggtaagtaaggaaaagatgtactattgtccttgccaggtacaacaaacaaatgaacgaacaaatgaatgaacaactaacctgcttctgcttctagtgtgtgtcataatagagaaatatttggcaaatccacggatgcataccaagtgccagagtctctgtatatctgttttggtcaaatgaagccacctggaacagcacatgtaactgattaagtttatgataatgcactgtcattccccaagccccatctggttttcttcactagtcaaactagagagttaaaagggaatgtgatagcaatcatcacctctggatctttcatgtctattaatctctgaaattctccgagggatatggtatcacttgtgatgtgccattttgtacatgaagagcc

SEQ ID NO: 205728 - DNA, 1000 bp, Homo Sapiens
cacacggtgaaaccccatctctactaaaaatacaatattagccaggtatggcggcacacgcttgtagtcccacctactcgggaggctgaggcaggagtattgcttgaacccgggaggcagaggctgcagtgagccaaggttgcaccactgcactccagcctgggcaagacagagcgagactccgtctcaaaaaagaaaagtgggtctggggagatggccgtggtgagggagagagtgcagtcaggggtttatggctgtgcttgggctgatgtgctcgctgtacacccagaaagaagaggagaagcggccacaatggaaggatgtttagaaggcagatggacagcacaatgcgaccgggcagtcgtgggctatgagagggtctgaaggacgtctccctggcttccctctgttttgtcccttagcccctcactgttaaatcagaagattttggtcctaatctgatctctttaagaattttggaatcttgcgagaaaactgaattgctcagttatctttctctctggaccccacacttttctaagagctttgtaggtcaaataccttaactctgaggcactataacaactcataggacggaaaagtgggaaaaggaatatatgtttcaaagagggatgaacagtgtaaaatcaatctggggtctggagagaaataatcttttccaccgaggcagttttccttaaatgctttctactatgatggaatttgaataataaaaacagtcatagccacttggtatttcaacacagttatgggagctggaattaaagtgaatgatgactggtgtgccaaataataaagtgtttccaaaatattaatactcacaacaaccctttgagataggtactaactaggctaactacgtcatttacttgcccagtgcaaaacgaaaatgtggggcccctcgttcaaggattattaagaattccaggatgataatagcagagcattaaaccaagcatagtttaatgctttgaacaca

SEQ ID NO: 205729 - DNA, 1000 bp, Homo Sapiens
actttgcagagaagctatttggggaaagcatcactgtcactggtagtgaaaggagcacttgattcagagtccaacaactctgttcatcctgctgcattcttggccttgagcatgttatacaacttctctgagttttgatttctgtattagtccattctcctgctgctataaagacatacccaagactaggtaatttgtaaaggaaagaggtttaattgactcacagttccacagggttgcggaggcctcaggaaacttaccatcatggtggaaggggaagcagacacgtccttctgcatgtagtggcaggaagtagaagaatgagcaaaagtggggaaagccccttaaaaaaccatcggatctcatgagaactcactcactatgatgagaacagcagcactagggtaaccgcccccatgattcaattacctcccagtgggcccctcccatcacacatgaggattatggggactacaattcaaggtgagatttgggtgggaacacagcaaaaccatatcaatttctttacctgaacaatggggatagtgttcttatgttggtgcaaaagttattgcagtttttgccagttttaatgtcaaaacctgcagttacttttgcaccaacctaatgcttcacagataattgaaaagattaaacataataatttgggcttgtggaaaccctttgctaactctagaatcttaggtaagatggtagagccaaggttcagccccctgcttttctgggactgtgttcattaagcaagtgagcctttgtacttgaggaaaaaagatctcaaagggtccatttaacctgtcgaaatcactagactaaataaactttggcaaattgtttctaaaatgctttaacatgtgctaagctttttgcaagagcagtttccatctatttctaggaatgtatccagttttaacatgccatgattctgatttttttttttcagaatttattattatctgggggattccattaaaagtaagta

SEQ ID NO: 205730 - DNA, 1000 bp, Homo Sapiens; identical to SEQ ID NO: 114862

SEQ ID NO: 205731 - DNA, 1000 bp, Homo Sapiens; identical to SEQ ID NO: 114863

SEQ ID NO: 205732 - DNA, 1000 bp, Homo Sapiens
gtcaggattacttttcaagtataaggataaaaaataggccgggagcggtggctcatgcctgtaatcccagcactttgggaggccaaaggtcaagagatcaagaccatcctggccaacatgatgaaactgtgtctctactaaaaatacaaaaattagctgggcatggtggctcatgcctgtagtcccagctactcgagaggctgagggaggagaatctcttgaacccggaagacggaggttgcagtgagctgagattgcgccattgcactccagcctggtgacagagcgagactccatctcaaaaaaaaccacaaaaaacaaaaaacataaagaaaaacagtgagtctggaaatagacctgcagtggtttactggacaacatacagacccatgatcaattgatttttgacaaaaatgccaaagcaatttaatgtgagaaagaaaataaatcacatgtcagtaaatggtagggaaaaatggtagaaaaatgagatattggcatagaaaaaaattaaccttgggtcctacatcataccacacatataaattaatttgaaattaaaaattaaagacaggctgggcaccgtggctcacatctgtaaccccatcactttgggaggctgaggtgggtggatcacttgaggtcaggagtttgagaccaggctggccaacatggtgaaaccctgtctctactaaaaatacaaaaattagttggacatagtggtgggtgtctgtaattccagctactcaggaggctgaggcaggagaatcattggaacccaagaggtagaggttgcagtgagctgagatcgcaccactgcactccagcctgggcaacacagcgagacacaatctaaataaaataaaataaaataaaataaaataaaataaaataaaataaaataaataaaataaaataaaataaaatggagaatatcttcactattggagacaggtaaaaatgtcttagaaagtaaaaaaaaaaggtattaacaataaaa

SEQ ID NO: 205733 - DNA, 1000 bp, Homo Sapiens
acagtcaccgcagcattttgacaggtatgaaatgagactcatagttagccactgtgtgctcacctgctctgaatatggtgccctgaaagtccctggactgtgagaattgacagacacagatgaccagtcacctcttgactcacatgaggtccagaaacccatctgtacagctcccttcttgcaagggatcttaactggaggaagagaaaactcagccccttttgacgaatgtctcatgaatgcagatgctggctggcgatagaaagggtggcagaatttgtagactgtaagaacattctccacctaattaccccttggcccaacctctatcattcacttgcttctccagtgcccaggagcgatgggactaagcaggcagtgctgaaagaactgtggggactctgtctgaaagacctggcaaaagagccggagcagtcagcagcagtgtcagcagcacagagaaggcatagccaacagcaacatagcagagaaggcagggcacagccaacagtagggctgcttgcagcaggtgcatttctgaggatatgtgtgagccctgctttgctgcctaggcttcccatctgctcttctctccccacccaggagccctttgaagaaatggcggaagagaaggagcctttcaaaagccaaagcctggacttccagcaacatagctaagggacaactggattgttgagatttgagattctctataaaggcgatacagtatacacacacgctgtgtggagcctgggacattccagagatgttggtatatggcaaagcaatttatttgcatacatttgacatgtatccagtcactttcccaagctcatggatactggcaaagctgtcttgtttatttgtttgttttgagacaaagtcgtgctctgttgcccaggctggagtgcagtagcaccatcctggctcactgcaacctgtgcctcccagattcaagcgatttagagcctcagcctcctgagtagctgtaattacaggt

SEQ ID NO: 205734 - DNA, 1000 bp, Homo Sapiens; identical to SEQ ID NO: 114865

SEQ ID NO: 205735 - DNA, 1000 bp, Homo Sapiens; identical to SEQ ID NO: 114866

SEQ ID NO: 205736 - DNA, 1000 bp, Homo Sapiens
agggagcagaggaccaggcagttagagcagggaactcctgaacagagaagcagattgttacctagagtgaaggtaaagtcaagaccaggcttttggccgggcgcggtggctcacgcctgtaatcccagcactttgggaggccgaggcgggtggatcatgaggtcaggagatcgagaccatcctggctaacaaggtgaaaccccgtctctactaaaaatacaaaaaaaattagccgggcgcggtggcgggcgcctgtagtcccagctactcgggaggctgaggcaggagaatggcatgaacccgggaagcggagcttgcagtgagccgagattgcgccactgcagtccgcagtcccacctgggcgacagagcgagactccgtctcaaaaaaaaaaaaagaccaggcttttagaataggacagaagcccaagtaggagaactacagcgcaacatcagagctggacagcagaagagagaatttaaaaaaaatatctggcctggcacggtggctcacgcctgtaatcccagaactttgggaggcctaggcgggcagatcacctgaggtcaggagttcgagaccagcctggccaatatggtgaaaccccatgtctactaaaaatacagaaattagccaggcgtggtggtgggcacctgtaatcccagctactcaggaggctgaggcaggagaattgcttgaacccaggaggcagaggttgcagtgagctgagattgtgccagtgtactctagcctgggtgacaagagtgagactccatctcaaaaaaaaaaaaaagctaacacttttagtatgccaggcattggtgtaaatatttgtcagtcctcacagtgagcattataataagacaggtatttttattatccccattttacagatgaagaaacaggtgccacgagattaaacttgcccaaagtcaaccagttaatagattgtagaactagctcctaaattgagacggtctaactgcagagccctattcttgat

SEQ ID NO: 205737 - DNA, 1000 bp, Homo Sapiens
cctgtagttccagctacttgggaggctaaggaggggaggattgcttgaacccaggaggtcaaggtggcagtgagctgtgattgtgccactgcactccagtctgagcaacagagtgagaccctgtctgaaaaaaaaaaaagagatacagagattttcaaaaagtatttaatgacataaaaagtacttaatgacatgaggaaaaattacaaaccacactgtgtgtttttctacacagtgaaaaatgctcactacactatagtagtgagcatatgtcactactataatcagaaaaaaaaggatgacacgatcctgtcacttattaatgactatggcccttaaaggggagatacatcctctgtggtttctgataacacagcttctgatatgaaaggcaattgcctcaagttaaggagatccatgaaagactgaggaattggatcagattacctcttaaattccttccaaagcttagctttaacgtagactcctccaacctgggggaattttctttagctctgcagaatgcagataaggatggtatttgttcagagcaaaggatagtaataacaatttccctgtgcatttctttttttgagtcagggtcttgctgtgtccctcgggctggagtgcagtggcaccatcacagttcacttgcagcctcgacctccctgggttcaagccatcctcctgcctcagcctccagaggagctggactacagatgtgagccaccatgtctggcccctatacattttgtcacaccagaaggacctgagaaatgtttgcattgttcaagtatttatttatcttggagtgaattctgcttcaattttgtctttctgttcttttcttttctgagttcattttaaaaaactgcatgaatcctttctagcagaccagagccacttgttgtcttggggtgatgggcttttacatgtagctggtctttctgtttaaacccaaaggatgggaaagtgcccttgacagctttcagcaaggatc

SEQ ID NO: 205738 - DNA, 1000 bp, Homo Sapiens; identical to SEQ ID NO: 114868

SEQ ID NO: 205739 - DNA, 1000 bp, Homo Sapiens
tactattactctcttgcttatcaagttgttcatttacttctcaggctagctaggtgcctggaatttccctttaagaaactcaagattttttaattcctctgtttggtgctggggagaccaggcccctaagaggggtccctgctccatctcatttgtaagagcttatgagacagccgctccagggctggccagtagctcaggaggaggaagagtcagtggcagggaaagggaggtccagctcgcctgggagataggagctcttccagcactgggctgggaaaccattctctggcagccctgccactcagtggaccctcaacttctccttaatttcctaggcagtataagggtaagtacaagtaaaaagaaattgaattttccctggtgccaaaaggcaaagagaagtccctccctcccttttcttagagtatttcctttataatcctttctctgtctctttgggaggtatataaacctttctgaaagctaaacaagccctttgccactttggcttcccaggaatgtgcttctcgggggcctcggagccatctctttgaaatgtgaacattaagatggatggtgccctgtctcctgtctctctgggagctttgcctaggagtctggctacaagttgtagcatatgagagttttcttcttcctttggatgagtgcaattaacacatatgtaatagattctatctgcctggctatgtaagagggtgatacattttttctgtctttgcaatttctttagtggattgcttttgatgtgtgttgcaatctggtttaatgcatatgtaataataacactttttttcatttcgtatatttttggacaggttttctagattggcagattttattttaaatttccgcaacagcagcaagtcctagcatacctcaacatcatcccaggaacaccccacccttggggaggaaatatgccagagataggaagggccacttctaaatacaagagagtcatcaggcacctgtcagg

SEQ ID NO: 205740 - DNA, 1000 bp, Homo Sapiens; identical to SEQ ID NO: 114869

SEQ ID NO: 205741 - DNA, 1000 bp, Homo Sapiens
cagtcgtggtgagacccactcttaggaagacgttgtcagtgctcagcacaaccccacaggtgcgtgttgacattggagaagcccaggtgaactggtgttcgaaggtacttggatgaagaatgatgtttttcctttggggattgggaggtgcgtgcagaacaacaccagagatggcttccacggtctgtgtttcaaaccacgtgccttgtatctcactaccattcggagtattattgtttattattatgtcttgctcattctcattgcaagtccactttcttatatagaaggtgctctaacaagtgtctcgtttggtgagttaagggatctgaagctttttttttttttcctgagaatcttctggggctggatggacttggtgtccactgatactgcttgacacagctccaggggcactaaactccccagtgcaggctggaatacaaatgcgccctgagacgctgtgcaatgtcaggctggggccttctctggggactgcggctgctgaagatttttcttttcaatccactttcttaggtttggcagaagctttcggacaactccatgtctttgttggctctctgatgtttccttgaacgctttatcatttttgattcaccccaacacagcgtgaaattatgcttcttgctccacactgtcttatccaaacagattcttctcttttccttttaggagccattctgactctagctctctagtcttgaggctagacaagtttcttctcctttattcttggaaaagactttcattattttctgagtctgtttcccatagttggatcacaggaacttgtttggagcttccggcaggaatgtccagacccttgtatattccctgacaaaggacagacctcttgatgggtgagggtggggtgagtggggatctttctctggtccggctcacagctcagagagggtgagggcacagcgctgcctggatatccagcggtgcaggatcagcctcgaggccagtgctgtca

SEQ ID NO: 205742 - DNA, 1000 bp, Homo Sapiens
ctgccctgctcaggctgggcacgacgaatgctcccaggagaggggaggcggcccacccgactgtgtaccgtggactgtggacagtgcagtgcctgctctcctgtgctatctagaaacaccttggagagagggttctgggatattctctcatgtcatctggctgaagacaccagcttgacagttcccctttaagaagcattccatacgtttgtaccagggagaaagaagcccacgcacgaattttcaggatgttttgtgaccaaacccaataactgccacacaaatagaccctaggtgggggctggcttaaataggaccacatttcccgttgctttttcagtagatgtgttataccgtcatttcaatttgaaagtttatttttttccattgatttttatacatccagaataacacaaataaccaacagttctttttctttttttgcacattcatttcccctagaacaaaaaaagtgaacttaaaaaaaattggaaccatgctattagctgtttacaaaagtgaataagaagtagctcattttaaagtctaaaataaacaaagtagaaagaagcatttttttccctacagtatttagcaaacctaagaaaaagtccttagaaacacacacaaaaaaattgaaaaaaagttataggcattaacaatattttataatgaagcttaaaatctatttacatacataaatacaattaactttgttgatgcaactcttctggaaggaaaaaaagagccaaatgatcagcctcatcaatactgacctggctaaaaacaaaattcccaacaaacacacaaaaatcccaaaacaaatgtatacgctacggtaaacaaaaaggcattttgttcagatgtaaaatatgttttgtgagattattgtcaaacaaattttcatgtataaaagacccaaacatgtcattccccccaaaaataaaaaccaacaaaaataaaaatcatcaggacggaatgtcccaaagaaacaggtatt

SEQ ID NO: 205743 - DNA, 1000 bp, Homo Sapiens
tctgtcaaagccaaacagggaaataacaaaattaatatatatattagaaaaataagtctgtcaacaacagctcggtgagttggagggagtagagatgaggagtggggagctatagcagttgtcagacaaggggtcatgaggatctggattaagcaatggagatggaagaggggattgaggtgagggagggggaggagtctccccagcatctgtcctttaatagtagtagagaagaccagaaacagcgggtttacagagagacatcgtgatgtctctctgagctttggatgcccagaacagaataggaggtgctggtggggaaaacaggaattctggggagaggtttcatgtagaaataatgagctgaacatccttagaatatctattgtagtttcagattgtatctagggtacaatcaaactctatgctagtttcagagactgtttccagtgagaagagaccattctcaggttctgggattatcaacattccagggtgagcagaagagggagcaaccaaggagatggagctaggaaaagaaagaggagagaataagtaataagagtaaaggaaaatgcagccgggcatggtggctaacgcctgtaatcccagcactttgggaggccaaggcaggtggatcacctaaggtcaggagttcgagaccagcctgaccaacatggtaaaaccctgtctctactaaaaatacaaaaattagccagacatggtggtgggcacctgtaatcccagctattcaggaggctgaggcaggagaatcactagaacccaggaggcggaggttgcagtgagccaagattgtgccattgcactccagcctaggagacaggatgagactctgtctcataaaaagaaaagaaaagaataaaggaaaatgccagctttggaggaaaaccatggcccaaaggccacaaaggggccatgaaaacaaggactgaaaatatgaaaatattccactggatttgtctacagagagtgccatgta

SEQ ID NO: 205744 - DNA, 1000 bp, Homo Sapiens
gttgttgttgttgttttgttgttttttaagagacgggcttgctctatcatccaggctcgagtgcaatggcacagtcacagctcactgcagccttgaactcgtgggctcaagccatcctcctgtgtcagcctccccagtacctgggactgtgggcatgagcactgcgcctggcagctgtatcagtgttgactccacattttaatagttgcttcttgaaattaaaatgctttgattcagccttcaagccatcaggaaagtttgcccctctgagtcacacctggtggtctccagggttcctgcccctccctcctgagccagctcctcagagcggatagaggcaggacccccacccaggtcttgagacccccctgccccgcactcccccggagacgggctacccctgcagatgcagatagtcaaagctcaggtttcttccaaagcttttaaaaagatattgtaccttgagcactttaaaaatgtcttaaaattgccatacaggctcttaaaagcttatacgtttaaactgttgatagatgggcctttactaaaatgcattcatttattttcctaatcccttggttgttaaataattctggggaagggccccgagcacgacagccgcagtctccacccagaaccagagagtcccccccaacccgggatgtaccctctggccacaccagggaccctgccagaggccgcagactggcagcagcagcctccccacacagtgggggaaggtcagtgtgatgccttcaggccccgtctcctgccagggctctccctccagcctacatagggcctcagagaaatgcatttttagttctggctttggcccagcccagggcaaggcaggaaactctccagcgtgagtccgtgagggccaagaagtcccgccctgttctgggggaggacctggcttttctggtgtctctggtgcccgagagcccggtgctgccatctttagtgaaagagtaaatggtggccgagggctcctttt

SEQ ID NO: 205745 - DNA, 1000 bp, Homo Sapiens
aaacatcaatacaaataacacaccaatacagtatagcagctacttacataacactgacattgtattaggtagaagtaatctagagatgatttaaagtctgtcggaggatgtgtgtagcctgtatgtaaaaaccacgttattttatatgggggactttagcatccaaggatttgaatatccacgggggtcctggaacaagttccccatagacaccaagaaacaactgtattcctgaaacagtcttgagttatcattttctttcttctccctctatgtatgtacatagagtgtacatacatagagtgagaagcaaagaaggtccatgaaatggaccaattcttttgaaaactgcaaattaccacagttcatctaacatgaaatagataacctgaatggtccaataactagtaaagatattgaattaatagtttaaaaaccttctgaaaggtaaatctctaccctaaatgatttcactggtgaattctatcaacacatttaatgaagaaaaaactccagttctaaacaactttcagaaaagaagagggaacacttcctcactcattatatgaggtaagcattgccctaataccaaaaccaatgttaacacaaaatatgaaacctacagaccaataaccctcatgaacataaatgtaaaaatcctcaagaaaacattagcaaatttaaaccagcaggatataaaaggaataataatacaccataacaaaaaaagaaactatccttggaatgcaaggctggttcaatatttgaaaatcaatcagtgtaatctaccatattaacagtctgaagaagaaaaatcatgattatatcaatacagaaaaaaattgacaaaattcaacatcagttcatgataaaattctcagcaaactagaaagggaaggaaatttaacatgacataggacatctacaaaaaaacctacagaaaatcctaaggagtctatgagaaaatttcctaaaactagtaagtgagtttaacaagatc

SEQ ID NO: 205746 - DNA, 1000 bp, Homo Sapiens
gaaatttatcgctcagttaggagacagtgtacaacgttcaatggtgcaaaccgaagggggccgttgggcagctagcgctcgtcagaaaagtgtcgaagatttatgtgctttaatcagacgatattttaaagaatcagaaaataaatttatcaatcatgcttggcaaacactgataagaactctacttaataactcaagaacagaacaaccaaattatgattttaaacagggaggtgatgctgccaacttactgatttagtgtatgatggtgtttttgaggtgctccagtggcttctgtttctatcagctgtccctcctgttcagctactgacggggtggtgcgtaacggcaaaagcaccgccggacatcagcgctatctctgctctcactgccgtaaaacatggcaactgcagttcacttacaccgcttctcaacccggtacgcaccagaaaatcattgatatggccatgaatggcgttggatgccgggcaaccgcccgcattatgggcgttggcctcaacacgattttccgccatttaaaaaactcaggccgcagtcggtaacctcgcgcatacagccgggcagtgacgtcatcgtctgcgcggaaatggacgaacagtggggatacgtcggggctaaatcgcgccagcgctggctgttttacgcgtatgacaggctccggaagacggttgttgcgcacgtattcggtgaacgcactatggcgacgctggggcgtcttatgagcctgctgtcaccctttgacgtggtgatatggatgacggatggctggccgctgtatgaatcccgcctgaagggaaagctgcacgtaatcagcaagcgatatacgcagcgaattgagcggcataacctgaatctgaggcagcacctggcacggctgggacggaagtcgctgtcgttctcaaaatcggtggagctgcatgacaaagtcatcgggcattatctgaacataaaacactatcaataagttggagtcattacc

SEQ ID NO: 205747 - DNA, 1000 bp, Homo Sapiens
tagcgatcttttcctgatttgggagcactgtagtagtgccttctgggccttctccaccacccaagtggtaagctccttgcaagcaaagcttcgtctgacacattttagtgtcctgactccaagccctctcctgtcttcccccacagaagccctagaactgggctgcagctgaccactgggaagacaggaaagactgtgagaccaactgtatgccatgtggtcctgaaaaatgcgaaaatggagtggcaagtcctgagagccaccagctagtgtctgaggcctggcatccctttctgggaggcctcgtgtgaaagccagtggcattctgcagatgtgaggtcgtacttctgaatacgcagcaaaatcctggggccaaatgctttgacagatgaattgaggctagaaagagagttggagaagtggtttgacagcagggctgtaaccacaatacctaacatgggtaagtcaccaggtggcaggctctgagctaaaattcatctcattgcatcttcatgacagtactgtttatacataaagaaacagaagctggccgggcatggtggctcacgcctgtaatcccagcactttgggaggccgaggcgggtggatcacctgaggtagggagtttgagaccagcctgaccaacacggagaaaccccgtctctaataaaaatacaaaataagctgggcatggtggcgcatgcctataaccccagctacttgggaggctgaggcaagagaatcgcttgaacccgggaggcagaggttgtggtgagccgagatcttgccattgtactccagcctgggcaacaagagcaaaactctgtctccaaaaaaacaaaagaaaaaaagaaaaaaaaaaaaaacagaagctgcaaagggttaggggttagaggacatgcacacaggcacccaggtagaaggggacactcagtctggctgcccagatgacagaagagagattgtcagtccaggtttctttgcagcaaacagcaagctt

SEQ ID NO: 205748 - DNA, 1000 bp, Homo Sapiens
ccgcgaacactgcgcgtttcggctttcgcgcgctcgggtcccgtccccagaggtagcccggccggctccaacttcgggcaaaacttttcatgtccccctcagcgcgtgaacgtgacggtacggccgggcctggccatggcgctgagcgggtccaccgagccctgcgcgcagctgtccatctcctccatcggcgtagtgggcaccgccgaggacaaccgcagccacagcgcccacttctttgagtttctcaccaaggagctagccctgggccaggaccggtgcgtaggggtagtaggggatccatgtgggactgccgcagactggagccactgatcctgcctcagggggaaaaacccatttcttgccctgcccagtaaggacacatcagggtctggagctttggggccccctgaccccttaggttcctgctgttaggaccatcttcaaagtgcgagcaggattgaatgaatttctggctctgctcctcagtgtgtaagtctgtgaaccgggaaggctctcttttaacacccccggggcagtgcaagggtcatgtgggattgtctgtgtgctgtacctgccttggcacctgacagggtaggtacacgtggctgaagtgtgattttctagaacttttccaggctggtcagaaggaattctgggtatgttctgaagttacgtattttggacctgtgtcccagccaggttccaggtgaagttcacgggagactcacagagtagtgaaagaccattggcctggatgtctagacatctgctttctgggtcctgcatagctgggggaccccagacaaacttggaaatgaaccatctccagttggcaacctcctcttctgtgaatacaggggaaaagacctccctcccccacaagaagcgtctgcaacccaaacctggcgttctgtgaccgagttaaagtttcctcttgggtaaaagatattcttgagccacatccatgtctaggaggaagtaagggcatgagaagctt

SEQ ID NO: 205749 - DNA, 1000 bp, Homo Sapiens
ttgcctcctgctcagctgggagctgagccccttcacctcctgctacttctgctgcaaggggttcaaggcagagggggttggttataagatgttccctggagccaataatcttgaatgaaaacaaagctggaggactcatacttcccagtttcaaaacatactacaaatctataatatactaatcaaaacagtatggaatattagccttaaaaaggggggaaattcggtcacatcagacagcatgggaaacctagaggacataatgctaagtgaaatagccagtcacaaaagacaaatactggatgattccactcagatgaggtatgaggagtagcagcctggcagcgctagcccaatcagaccccatttctttggcccggtacctatatgggatgagcccaggcccagggtttggttagagacagactcctgccaggggggccccacaggggtgctgtgtgctcagctgaaggatcaccagggaatctgctgacttttgacttcagggtcagctggtgctctggtgtgagcctgggtaaaggacaggtcagctgggtgtgaacccccaccccttgcccccctgttgtgagtacagtatccccacctgcctgtgctgctggctcatgtgggggacccgtagaagccaggactatcgtgcaggttaaacgagagggcctctgaagtgggccctgcaccattagactggagcaggtgtgagggcctgctgttgagaccctgctttttgctcacaggcaagtgttcggggggagctggtgagctttgagttgacactgactgagccaggaccacacagatagtagaaccaggcatcaggagggcatgctggccacaaagcagggtgttcgcctgcctttaacctttgctccctttctgtggacataaaagtggccccttccacaaaatggtggtgtgccctgcatcctcacatggatgtcctaggctgctgcagctcccaaccagccaggttcttgtcaagctt

SEQ ID NO: 205750 - DNA, 1000 bp, Homo Sapiens
ataaaagaatggaaaataaggggctaatagaagataagtagaatattaatacttgattcatccaaaataaggcaggaaaggagagaaaaggaacaaagaactaaaggtatagtaatagatgtaaatccatatatgtaaaaatcacattataggtaaataggctgaatattccagttaaaagacaaagattttcatgttaaaaacaatagactcaaccatgatttgtgtataagagacccactttaaatggaaagactgaaagtaaaagagttggaaaagatgtcctatgcgagcactaaccaaaggactgctggaagagctatactaatttcaaagcatcatttctcagtaagaaatattactagagattgagattgtccgtaatgataaagaattaaaacaataacaatagccaaggcactcttagaaaacaacattggaagacttcatgctgcccagtaagactttagaggcactgagagcatatcataaattcatatgcatcaggtaacatagccccagagaatataaaggaaaactgatagaactaaaaggcgaaataggcatatttggagattttaacacgcttctctcattaacgaatagaaaaagcaaatgaaatttagtagagctatagaagatgtaagtaatgctattaactactttgtcctgactgagctataaaacactgcaccagacaatagtggattgcacattccttctaattggccacagtatattcatcagaattggccacatgcactgtcaaaagatttcaatgaattaaagtccttcagagtaagttatcaaaatggaggggaaaatgtgatctaatcaaagtagatgaacaaaagcatttgataaaatttaactcctgtttattagtttcaaaaaaaaaaaagccccacagaacaaatttctaacaaactgggaataaagggacttttaaaaagatgataaagggcatctacaaaaaatatttatagtggacattaagctt

SEQ ID NO: 205751 - DNA, 1000 bp, Homo Sapiens
aaaatttaattttttaaaataaaaactaaaaataaaatgaagaatttcaagttggtaaccgcgatcattacaggagcatgggttctctgagcccagagcccaacgcaactgtgcaggccacatgcccacccagctggagccaatggcaggcaggttgcttgttggctcaggggcaagaaggctatgctagagtgagatttaaggatcacgtgtgactttaagttatcagggatatcctttctaggctcatgatgacagtgtgtcagctgcaaattcagagatggattgttacaatggagatagaattccttttctctctctaaactcctctactttttacattttattgttatcgtggtaaaatatatacaacgtaacttgtcattttaactattcacaaaattcagagtcattatatacattcacaatgttggataatcatcactgctatttagagctcaaacttttttttatcatcccccaacaaaaacttgtacccatcaaacaataacaacttcttctccaccccccacagcccctggtaatctctgttctactttctgtctctatgaatgtgcctgttttaggtgtggaggtagaattactaactgccacataatttgtttagtggctccaagccaacatggcctatgatctacggtgctgtctgagctcttggtgaccctcacctgcatgtagagcaaatctaccgccaccctgcagtccatcagcacggagtcgagggatggagccatatacctgcaaaattcaggagtgtgaaattcattcctgtgacatggcccatgggcacacctggcaagtgctttggaaagtggtggccctctaccctatgaaccagggcccccttttccaacaaagccacacctccacttgcccagctttcactctgcccctccacctctttcgtttcctaatttctttacaccgtaagctcttgcctggagggctctaagagtaaagaggcacaaaaataaagctt

SEQ ID NO: 205752 - DNA, 1000 bp, Homo Sapiens
actggctaaattccaaaagtttagcaggaagcaccaagctgaaggatcagagccaagtctcgatttacactaagatgtgtcctgattcactggagggatttttccctaaatcttccttcttgaaatccctactccctcctgctgagtctcttagcttgctgatttcatctttcctagcacaaagctttgctcataaatttaagagcgccatcagcctttcccctaaaatgaaattgttgatgaatccttacgtgatcagtggaaaaagtattttgggaaatcacaacattattagctgtttcttttcacattcttggcagccacaggggccttttatgctcttccctttaactatgcaatgaatttggttttctcttcacaaattataatctctctggtacacagcactgttgaatgaagtttaatttaataaaaacagaataatctctctggtacactgagcaaaaatgtagacttgtaaagaaaggaaagtttcacagaacaactttcaccacagttaggaacactctgaagctgttttatcattgctcttttggaagggcaattctaattctgctctggtccgcttcttaaatatcctttgtgaagctttaggtgggctatgtcctgggtagcctcaaacacagaacggtaaacagcaactgtaaactcgatcccaaggtcctgctttggaggaaaattttggggatcgccagagcaatcacagcaaggctaaggccatgtcacacagacaactttttttttttcttgttcgttttctttaatccatgacttctctgtgtggatgctgggagatggctgagagatgagtcatcagctgaagtgatgaaagggaccatgcagctgtgccactgagaccaagaccagccagtctccaaggctccagatcattctgcctggacagccccctccatgctcccctgagtataatagcagtcaaatgcaggaatgctttgctggggagaagcagaggaagctt

SEQ ID NO: 205753 - DNA, 1000 bp, Homo Sapiens
ccaggatctccaggtccaggtcctggggggccagtgagttggcttttttggggatggcaaagtggccgaggatgatccccagccccaagagggcagcagcccccagccccagccccaacaccttcgtccactgcatcctgcggactcttggccagctggggtaggactggtctataggttattccctatagagggggtgttgtgcctggttaaacattaccccatgggtggcactgccctttgacccccagctggcagggagagtgagggaacatcccgcagtgagagccaggagccatccacatccaccacatcctgcaccatttgcctggaatggctctccaagggcagcaaggtcacccagggacactgaagccgagagggaaggggctcatccagggtgtcccaggaaaacagaggccaagccagggctggaactcagagctcctgtgttcacagcagggccgtgcccactgcccaccctcactgcctctgcctccctccaaggcagccgatctacagcatacccagccctacctgcctgagcagattttgagttgagatcccccttcttgctggacgtaagctgtgtgaccttgggcaatccactcagcttctctacacctgttttcttttttttttttctagactgtgtcttccactgacacccaggctggagtccagtggtgtgatctcggctcactgcaacctccacctcccgggctcaagtgattctcctgcatcggcctcccgagtagctgggattacgggtgtgcaccaccatgtccagctaatttttgtatttttagtagagatggggtttcaccatgttggccaggctggtctcaaactcctgatctcaggtgatcacccgcctcagcctcccaaagtgctgggatgacaggagtgagccaccgtgccggctatggtgtcattttcattaaacaatatggcatctgtagaaatagctagtgcagtgtctgacatgtagtgggagctc

SEQ ID NO: 205754 - DNA, 1000 bp, Homo Sapiens
ctatgttggtctggggaggtctccaggaggcccttggggttggctggggaaactgccaccagtgaatggtcccagtagttcaacgagacaggacagaacctggggtctcttgggctccaagggtctagggcgaaaggtcgctgctcacctccagagcccgtcccagggccagggcaccccatcccaggaagacatccagcccatgaccttcacccagctctcagagaataacactcaccgcttgtccttgcagccaaccacaaccgcttcaaccctgaggattcttccacctaccagtccaccagcgagacagtctccatcacctacggcaccggcagcatgacaggcatcctcggatacgacactgtccaggtgggcacctgcaggctgccgctgcatccccccatcaggcacccccaaaataagcttattccagcaagatgagtcttggtgatcacagaagtaacctgattgggggtgcggggtgggggagaagcagcagagatgtcacagacattgctagctcgggtggcagtgagtaaaagggtggggtgccaggagccataacccagactcagctccacccaagcagaatgttatggagtgtggggagagtcagtaaaggctcacttctctactagcacctcctcctcttccttcttctcccgacatgcagcaccccaagtcacgaaatctccacaagccctccctgccactttcggggcatggcaggggtcaaaggcctggggtctggggtctgctttgcgtttgttcatcagaaacacaaacacacagtgaccatctgttctccagcaaaatctcaccctgagtcatagactgtagccatctggagatcagctgccatggttacctccagcagaggaaccagcattccagcagacagtccctctgccctcctcccgggctgataccctggaagccaagtcctgcatgagatgaaccagggtggctctgggcctgaggctggcatccagagctc

SEQ ID NO: 205755 - DNA, 1000 bp, Homo Sapiens
acaagatggggagactggtgtcccgtgtggagactgggactgagtcaaggctgggggcatctggttcctaaggatgatccctagtgtggggttactgcttctcacagcaggtctgctgaccttcctgccctcttctctggcctctttcacccattgtgtctcctcctgccccagccagccttttgtctcagtctgtctgtctttctgggcctaccacagcatggagaggcagaggaagaggtggcggagggtggggcagcgcagcagctccatggccgatgcctggcctttgcccatggtcagctccttctgcagactggcccggagtacctgctgggaccggcagagctcagggcccgggatcctcccaaggagctcctcccagcctaatcccttacttagaggagttccctgggccctgggtcctgggtttggggtttgggggtgaagccctgggaggttatcatgggaagtctcaggggatctcacctccatactcaatttggctccttcttcccgcttcccattgatccgggcgactctctgcagggccctcagggtgaggtccagcctcccggaggaggagtgccagcgggccgactcaatgaagaacctgggagcgggggtgggggtgggtgtcagcatggcttcagttccagtcagctgggtggggggctggggctgggctttctaggggtctgcgatgggattttatttaaggttgggaacccaggggccttgccaaatccctctctctaggaccacgaggcagtgcccagcttggtaatgacatattccccaatccagaagctcagctcttggttgcgggtagggggagcagagcaggcaggctggagaacggagtgggggaagccagagaattggatatcctggggcaaagccttctccccacagccttggtttccctatctgtcacacagaggcattggactgggtttgaccttctctacatttgtgggatgggatgtgtgctgagctc

SEQ ID NO: 205756 - DNA, 1000 bp, Homo Sapiens
atctattatgtaaaatggtgagaagtgatatctatattatagcctactgtgcaatagcattatgtctttaaaaacgcaatgtacataccttaattaaaaaatgctttattgctaaaaatgctaatgatcatctaagcctttagcgaattttaatctttttcctgatggagggtcttgcctcgatgttgatagctgcttactgataaaggcagtggttgctgaaggttggggtggctatggtaatttcttaaaataagacaaggaagtaagccacctcgattgacttttcctttcatgacggaaaagtttctctgtagcatgcagcgctgtttggcattttacccatgaattagaactttcaaaattggaggcaattctctcaaacactgctttatcaactaagcttgtgtaatactctaaatcctttattatcatttcagcaatgttcacagcatcttcaccgggagaagattctatcttaaggaaactcttttctcatgcataagaagcacctccttacctgttaaaagtttaatcatgagattgcaggaattcagtcacatcttcaggctccacttctaattctagttctcttggtattccaccgcacctgcagtgacttcctccaccgaagtcttgaacctctcaaagtcatccatgagggttggaatcaacttcttccaaagtcctgttaatgtttgtagtgttatgaaatatatatacatataggttttcatacacaggaaacagaatctctttgaccttctcttgccttccttttacctgccttcctttcacctaccccaaagcaggactctaatcttctgcttttataattgtggatcataagactcatttcagagagggtcccaacccatggcctgggggaaggaatgctgatataatgaagcttccataaaaatccaagaggacagcttcctgatagctgaacaagtggaggtttctggggaatggctacctggggagggcatgggagctc

SEQ ID NO: 205757 - DNA, 1000 bp, Homo Sapiens
gcagtatttcaaaacagctaaactttatagttccaaacattctagagagttcaacagtctcattatatattatagtgacatacacatgtgcacacacatcccttaagtatgcattttgctagattttatttttcattttatgccagggaaaacacaattatgccatatctctttataggaaataaaacctttccaagaaaaacaaacctggccattttttttttcattcattcattccattcattcactcatggaataactcctcactctaaaaacctgctaaaaacgctgaatggaaaaaaagctgctttcacccctccctatgtctttccatacaacatgagaatcaggcatagtgattctgtttgacccagcaagttcaaccaccaaaaataaggtcctttgccttaaggaggggtgtgacaggtgctagtttcaagaaataactttcagccttcagtggaagatactgacaagagcaccgatcataaaatactggtccgcacaggcccatctttctgtttccttcacttgcatccaaatccaagtttccaggcccagtcactcctacttatctttctacttccaggcctcccacagtttttaacttcattcatagcctttattcctagttctaaaactgtgcttctatcctagtaatatggtaggaggaaacctgctaaatgcatccttgatgctgatgtgatctttccagttattgaacgtttcattgaattttacactatacaacttcaaatgcggaaagcagccaattcattttgttaactgttgttcagtatagatagccagctccataactatacactttgatttggtacatgagaaaacgtatttttcattacatcccttatcctcctaatgacatttccaaacaggattttaagaactgtgaagcagaaataaaattatgctcaagttccaaagtgatctcatggaatggaaaatggctatcattgccagtgagtattaacaggattca

SEQ ID NO: 205758 - DNA, 1000 bp, Homo Sapiens
ggattgaggtctgctgacccggccgctaaagggcctcgccgtgggctcccagacagcgaggggacggcaggccggcgacagggcctccaaaggaccatgtgcgaggcaagaggcaaggctgaccgggggtttgtttttgtttttaacagggtggtggggaaggcctcaacatccacccatgctcccttcctttcctttcctttccttccagaagggaggatgggagggagaggaggcaacgaggaggaagtgggagaggaaatgaagggaaagtgccagaggcagggtccacacccatcagggaagcaaaccaagggcgaggagagggcagcggggcagcgggacagggccagggccagacggcaatgggaggggcagcggagaggaggagacagaggcgccgacactcacacacacaggtggctcgtgccgcctgcacctgttcgtgccgcccgagtgagccccgcagagaagggctccccggaggtgggggacccgtcaggcccaggtaaggaagaaggggagtggggggaccgcccagaggggctcgggacacccactgcccatttccgcttctcgggggcagaggcctgtgttcaataaaaaggaacttcataaaatatttaagggtgaacactcagctgagagcagaaactgtcggctaaaaatactctgtgatgaggcaggctctgaagagccagggcttggaagtggggatggagggaggcagagaagtcaggggccgccgggcagcactcagcctggggctgccgccacctacagactcttccagaaacagaaggcaggtggccagctccctgctgaagccacaggctctgctgcttccagaatccagagagctctggtccctacccccagcctccccagcctcccttgtctcagaagcccagagcctggcccaaactcatgtttgctcccctcaccgccccacacaagcccgggggcctctgccttggactctggagcaaagctggagctc

SEQ ID NO: 205759 - DNA, 1000 bp, Homo Sapiens
atgggatgtcacgcagttaagtgctacggaagaaaaacgggacagcaggagctggcagggtgctggtttttattaagagcagatcttttaacccagtggttctcaaactttagcaagcatcagaatcatttaaagggcttattaaagaaaagaaattcacaggctaccaaaaaaagacaggcacaaactcaagtaattgcaacagagcgctacagaaggccataaaagtggtatgtacatgagccagaggatggaagagcaactcattctatgcaggaaaaggagagactaagggactgcatcccagaggcccaacaaggtcatctccacaggcaggtaaggggtggaagggaagcattccaggaagaaaacagaacatgcaagagtgaagatgagagtggcaggggagccacagaaagtgagactgcaaaggcaggcagtggtctgatccctgagagctttttattccatgttactctgaaatttatcttcagaatatgaagagtcaggggtagggggcgctgatgtggtaaggttttgttttacagaaatctttctggatgcacagtaccttcctttgaggcactgcttccttcaaacctagcacagggactcaaaacatgtgcttagtaaatgtatattgaattgaactgaacaagctttttaccaaatgccctgttatggatgaggcaggtcaccttccctgcaggactcactttggccaagagaagacttgtaaaacaggtccagcagcctcaattattgcacactactacctgtacaactggagtcccccagagattagggcagaccttcattgtttacttgtctacctcacccattagactttgagctctttgaagacagggaatatcttaatagactgaatccccatagccttagcaagaggcctgaaacatagtagctctccgaactccagtaatgttggataaacgaattgactgaataagcaaatttaccaaggtagacccatgagctc

SEQ ID NO: 205760 - DNA, 1000 bp, Homo Sapiens
tttagtgatgagcccccatcttgcatgaaaatagcacttatttccaaactgctttcttattttttccatctttacagcctcctgataagcagggcattgaaaagatagaaccggaggcagcaagtccttacctagcttccccgaggcctggatgtggggactggagcccatattgcccagctgtgccatgtgttatgttgtgtctcagcagctgccaggcctccgcctcacccccagctctgagtgccatgagggggtcctggtctagttttagtccttgaggtctggcccagaacaggggtgcgataaataattgttgactgaagtgttgatggataatatatccttttcccagatcagaaagttaagtgacttgaccgagttacagagccagacctgggagtggggcaggcagcctgaggctccgcggcagttccaccaggaatccaggtcttcaggccaggaggttcgcagctaagatcaagaaggtgcccacctcttgggaagagagattaaccctgtgatatgcttttgccaaaagggcctcatgtccaaaatggggaggaagattctgacttgagatttgcctgttgatgggcaaggacgaggcactcccattcatccttgcccaacgcccgcaagtaccagccccgatggacgcacatcctgactagtgctcccagccacccacagtcgcattcactgatgtcacattcacttttccatcagggcctggaaaccctcaaaccacctagtggtcctgagatgctgaaaacaccgtgaggcagcttctagtaccaagtcagttttgaagcagtctgtgctctgggaccagctgggcagagataactttttaacaacccaaagttatttgaaaatcaagaggctgtcaggataatactgcagagagcccagtagggactggaggccttgggaaggggaggcaggtaccgtgaggcagcaggcgcaggggcctcgggaggaaaactcgcctgagctc

SEQ ID NO: 205761 - DNA, 1000 bp, Homo Sapiens
  misc_feature (677)..(677): n is a, c, g, or t
  misc_feature (954)..(954): n is a, c, g, or t
  misc_feature (977)..(977): n is a, c, g, or t
gatttgaagtgaagagaatttgttgggatgaagtgaggtggccacaataaaggcgctggggccatggggcttytgaaatgagattaatatggggaacacctgagtctagggtggtgcccggggctaacaacaagaacccacctgtgtttcctggggtaaggctgtccttagcatagtgtgaggctaactgctgggagctctggagactctgccatgctgacattgtgcctgtgctcctggccagggactgccacctagatatgagtcacagtggggggcccctgggctccagttgactttgaggagtgatactgtaccctgtgaggacgctatgagtgtcctcaatagtgatgtggtagtgctggtcagacccacaatccctattttccttgtttttttgtgtgtttttttttgttttttttttttaaacacgaaaaaacaaacaaacaaaaacctcagaaagtgaaaatccctaaagggagggactggacgtgtcatgtaaattcttgattggttaacagaagaaattaaaagtggattgagggcacctttgtgctctgtgcccaagggaaagttcaaacagctgcattcacagataccagagacgccagtgttttcaccatcaccagcgacgtgtgggtgctgcctcaacaggtattgggaacttgcttttgttnacagcttggctcctcatggtagctgtaggaggcaggatttgggtggatgggacctgggattcattcttagaataggtccccaaatggtcatccattttgcttgccgagggctctgtggggcagacgtaggaggcctgaggggctgcctgggaggtgatctgaggaagcctcttatggcactttcatggctttcctagccagagaccagagacacctcctttcccacttttgagcgctccatttaccaattttgcatccgaaataggtcccaagcttntcattttttaatatccccattantggtccaagccaccctcatctct

SEQ ID NO: 205762 - DNA, 1000 bp, Homo Sapiens
cccagaatgaattctggctgtggcagaaaatggcccacatagagagatgtctggcatttggtagtacctgggtgagagctttccaagctcttaggaagtatacaatgcataaggtccatttctaaatactagaaacatcttgctgtgaaagcacataaagtccatagttaagatgatgatgccatgcagaaaaacacgtggcaatgtaaccaccagtctttactttttcaatggccttgcacatggctgttactgtactgctgaagtccagcgtcagcagtttatgtttccccattgtgtcatcagcccaatgcaaagtaccatcaaaataacacctggaggtgctgacaggaaaataatctgagtaaatccacatttgctgtctcaacttccaaagactggtcatcaaacagtgtgtttctgtctttctatcttggctgccacctttactacactgtaggggtctgaggtttgtagagtggatatcgcagagttctggttgtccttgtgaggtttgatatgataaactttttaaaagaaagtaggcctgattacagaaatgagtattgtcccgacaatccacatagaattctggggcattcttctctttacattcaataatagcttccgctaaacttgtaatgttctgtgggaatgtatcacttcttcaccttcttgctcacttcccaccttcttgctcagagctccaatgggctcagagcaatgtttggagtgccaatcaccctgagctcaaccttgctctgagcatcatcttctctgagctccatcttacactgagaagcacctgctgcaagctccatcttgcttggagctccttcttgctccaagctctatctactccaagctccatcttgctcagagctccatctgctccaagctccatcttgctcgaagtgccaatcgctccaagcactatcttgctgtgagcaacatctgcatagacattcatcttactcagagctccatctagtcagagatc

SEQ ID NO: 205763 - DNA, 1000 bp, Homo Sapiens
tcttattgagacataaaataatggggcatcatacaatctctggtgccttacattaagtagaatatgttataatgtaacaggtctggggcggttccagtcagatgaccagcatttaaattttagttcttaaaagtactatggaataagagagctgaagtgaaaacaaaaacaaatttctaaaataaaccaattcttactttggttttcaataaactttaagccaaacaaaacttggaattgaaatgaatagcatgggctcatttttttcaatacttagatttatacaatgtatgtacatcagatatttccaatcattcatattaggatttaagactgttataaattttctctttttaaaatggatttatgaaactatttgtggagcttttttcaacttttacattcaggggtacatgtgcgggatgtgcaggtttgttacataggtaaacgtgcaccaatggggttggttgtacagattatttcattacccaggtgttaagcccagtacccgttcattctatttcctgcttctttccctcctcccaccctccaccctctgataggccccagtgtgtgttgcttccctctaggtatctgtgtgttgacatcatttagctcccacctataagtgagaacatacagtatttggttttctcttcctatgttagtttgctaaggataatggctttcaacaccatccatgttcctgcaaaggacaggctctcgttccttcttttatggctgcatagtattccatgctgtttatgtaccacattttagttcttaaaacaactaaaacagtctttatccaagacttatacattttcaaaagggcagttaagggttgtcttttactattttctaccttcagaaatgcttctgtttgaaaggagggaggagaagcttcaattgagattaagtcctaatgccccaattttaaatctctcagcttgctcaagcccagcaggcaaacataaatgttttcaaagatggaaggatc

SEQ ID NO: 205764 - DNA, 1000 bp, Homo Sapiens
tgaggtcatcctgggggggacaagacaatgagagccgggcgccttgggggcggcgcgggagcctccgcaggaccaggcgggcgccccctttacctgcggctccggcgcctcggccgtttcctcgcgcggcggcggccgggactgagctgacaccactcagccggcggggtttgaatgaggaggagcgggcgcggaggggagggggcggggagggagggagggaggcgtcgcggagtttctctcggccttttgtgccatccgccgaggcgccttgagtataaatccagatagtgcagtttttgttgtgcttgtgctgatcaactttatggtgtgattaaatacgattttttttattacgctcttgaaattgtactcttgaggttgcagaatggcaattagatggcagtcgctgatagccatgtagaagttttgatgaacatgcaagttaattttaatttctgatcagttacggttagtgactgtggccaaacatgtgcgtactgattctacatgtgtgctaattccgtgacgtttattcaccagctatgtgtcccgtgcctaatcctgtgtcaggcaccttgttccaggcattgggggcagcagtggacaaggcaacagagtctccatcctgaggtgttacttttagaaaaagatagttacaagcaaataaacaggatggttttagatctggacagaggttttcagaggaagtcatccttgagctgtcacaatgctttgggggtagggtgtgctgggtaatcagggatggcacatttggggtgcctaaggattgctgtggccctgggagcctaggacagttggtcacaattgacttattagagtcagtctcagaagctttcctggagaaagaattgctgctgttttgccaggagggtttccttccccatctgaccacacaagaagaccccttggcctagaatgcctaccctcatctccaggtctcccaggctgttcaccctcccaggcaaagtggaagctt

SEQ ID NO: 205765 - DNA, 1000 bp, Homo Sapiens
tttttatgactttattgttataaaaatgctagctttttaaaaaaatcaatcaatataacaaagaacatagaagatgatcaacaagcattcccacctccatgatctggaaataactgtcattaatccaaaagcttacacatggtggatcccttcacaccagttcccagtacaaagtaactccttgcttgtagaaaacattattattatcattagtattttcgagacggaatttgagtcttgtagcccaggctggagagcaatggtccaatctcagctcactgcaacctctgcctcccaggatcaaagtattctcctgcctcagcctcccaagcagctgggattacaggcatgcaccaccatggcctgctaattttttgtatttttagtagagacagggtttcaccatgttggccaggctggtcttgaactcctgaccctcaggtgatccacttgcctcaaccttccaaagtgttgggattacaggcatgaaccaccacacctggaccagaaaacactattcaatagcaaacagtagcagtatgcttggcggttttaggattgattattttcaaatctctagaaaagttcaatgcattaccttaggctataatcccagggcagagtctcatctgttagtagggggctggtctaagggtccttccagctctcagattaatggtttcccatgttgaactgctccctgccacccacccatccttggttttgtttgtttgtttgtttttacagagacaaggtctcactatattgcccaggctggtcttcagctcctggcctcaagcgatcctcccgccttggcctcccaaagtgttggagttacagacgtgagcctctgtgctcagcccatccttggctgttcaaatgtggaggtaaattgtagatgccaagtttacctccaggtcagaaggggcagatgccccagggcagaatcataaccctaaccaggcctcccactgcatgaagcccttattttctgaagctt

SEQ ID NO: 205766 - DNA, 1000 bp, Homo Sapiens
aggcaagtaatattgcttccactttacagctgacagtctgaagcagaggaagaaagcagagacgcagaatgactggcccacagccagccgcagttataagcagggggtagttctgaacccagctggatgggtccaaggcctgtgctctttccataacaccacatccaaaacattttccagtatctttgttttgtaaataagtcattacataatgcccaatattgataagaaccaaatgtccaagaaatcctatctttatgacttcttgctctgaaaaaaggggttgcccaggatgtctgcccagcagtggggttgcagaagttcaggaggatgaggagatgggcgtgggcaccgcctacccccccccccacaggtgaaggtctgaagaaccacctggagaaccctaggagcactgacatccccattcaactcgaggaacagctcacagccctaacacaagttaccacatgcagagcaaatctggaagacatctggggaacataacgaaggactagacaatttcacgttttcacagatgaaactgcaattaaactatacatgcacggtgctgtgttattttggtaatacagggacacaatttaatgattctaaggatttttttgtagttttttttttttacaagtcaggtgccataaacattcaaataatccatcttttaaaaagtacgtttacaacatcaaaagaattaagatgaaatataaacctttctacttacaatttttatacagattaaccaaatcacaaataccacaaataaatgttaatgttaaattgtaacaatataatgaataaacattcagattcttaataaaatcttcctttaacattttttaacttaccattatactaaataatctatgcagaattttggggtacaataccaagaaggcaccaacagtacaaagcagatacaaagcagtttcagaactttcttgagtgctctacacgcataaacagcacaagaaaaggcaacaagctt

SEQ ID NO: 205767 - DNA, 1000 bp, Homo Sapiens
ttggcccatgcgggctgcagccaagaacacagacacctgtgtgtgcttctcttgtgcaagctctgatctctgtgctccacatgcactgggacactcaatccttaccccaaacctccagggacccctgtgtgatggacttggaagcggtggagccgggaccaggcaaggccatctgtccatgctctgccacgacgccatactgcaggactcaggcagtgtttgaacagagcccccactgggctttaatggggtgctgaatgctgagcctgtaggtgtgcaggcagcaggtgggagtgggcccagcacgaatcctgacttggccacatttcatctgactgcatatcctggggaggagagcccactagggagcaggtgccaaattcccccacggtggtggaggcaggggagtggcagagactatctgtgactttggcggtgtgctctgggcaagtgactgagcctcagttttctcctctgtacaatggggagaggacgtacagggggcccataccagaccgtgagccgcagtgaaaggccaaggaatgtagctgcccctgactgttacaatcatcaagtcctggtgtctctatgtgctttccaaaccagaagccacaaaaagactactcaactacagaaaaacacaaagcctccatgtggcaaaagcccataaacaaaaataaaagatgcatggaaaaacatttgcaaatcatcacagacaaggaaccaacctccttcacatatacaaggaacctataaactgataagaaaaacaggcaaaggaaaaaaacagtgtttgcaggaaaggctgtgtaaatgatcttcagcttttgaaaacacgctcaaactcactctgtaacagaaaagcaaacttaacaattgccccaagacaggcttcttacctgacaggaagaatcctgcagcctggtgagactgtggggaaatggaccttcttgggaatgtagtgccagcccaggctggcatggcctgaggtgggaagctt

SEQ ID NO: 205768 - DNA, 1000 bp, Homo Sapiens
cacatatctgggccactgggacagtgttctggactcaggtccccttggccaacattcccacatagccccagtcctgtgtttgggtcttcccagagccatttgggccagaaagccacaccaatctcagtctttgcaagacttgcagcaagcctgggtttagaccatcgctcagtgctgagatgccagtagtggtcccaagctcaggaaatgtaacagtcagtctgcctagaatccctggaagtccctctgaagaaggacaggcacacacaaagccagactacaaaggcaaaaataaatacctaatatttcaaggcacggatatcatcacacttctacaaacatcaggaatattcagggaaatatgacgtcaccaaacagacaaaataagatgccagagatcaaacataaagtaatagagatgtgtgatctctcagacaaagaattcaaaagaacatttttttgggtttttttattttttttgttttgttttgtgctttttttggagacaggctctcattctgtcacccaggttggagtacagtgacatgaacattgcttactgcagcctcaacctcctgggctcaagcaatcctcccacctcagcctcccatgtagctgggaccacaggcatgcaccaccatgcctggttaatgtttttatttttttgtagacatgggagactcactttgttgcccaggctggtcttgaactcctgggctcaagcaatcttcctacttcagcctcccaaagtgctgggattataggcatgagtcactatgcccagccaaaacagatgttttaaggaagcacagtgaacttcaagaaaacacagagaatcagttcagaaatttaccagaaaaatttaacaaggagattgaaataattaaaaaaaaaaaaaaatcaaagaaatcctggaattgaaaaatataatgaatgaaatgaaaaagtcaacagagagtatcaacagcagaattaatcaaacagaggaatcagtgagctc

SEQ ID NO: 205769 - DNA, 1000 bp, Homo Sapiens
tcgtgagcctgcttggaggcctcccgcttcagacatggggctgggtgtggagttttgtggcaaataaaacagacgtccctgccctcaccactgtctggtgggggagcaaggaataaacaagtaagcaaacaaatacttaatcacagccctctgccagcagggcagaggagaagggctgtggagaaggaaatcccatgacctactttagcttcattacctcctttaaaccccatgactggctgggcacagcggctcacacctggaatcccagtactttgggaggccaaggcgagaggatcgcttgagcccaagagttggagaccagccagggcaacataatgagaccccgtctctacagaaaataaatttaaaaatttagccaggcatggtggggcatgcctgcagtcctagttactcaggaggctgaagcaggaggatcacttaaaagttcaaagttgcagtgagctgtgatcgtgctactgcagtccatcctggatggcagagtgagacactgtctcagaaaaaacaaaacagaaattccccaaaaacttcgcgacagccatgccagcaagatgaacgtccccatctctgtagatgagaaaactgagacccagtgatgtgaaggtcccaaagggagttggtggcagtggagactgggccccaggctaggagacatgggaggagtggcctctaagccaagttccttctctgctacccccctggggcccctcctccccatccagtgtggctgggtgtggctctcctctgtcaggcatcggaggctctggggcctcactgactgcccagcctttaggatgaggcagagacggatatgggaccttcagatatcccctcccagccgagggggcttccatctaactgtttttttggtcacggttccagggccgttttagacagtggaggccttgtggggcagggtgtgaggggtgctgagcagcaggtgtggacatgtgtgtgcaccaggcctttctacctgacc

SEQ ID NO: 205770 - DNA, 1000 bp, Homo Sapiens
gcaggcgtttgatgagagtaaatgcaagcagagggttagccacaggggttgttgaatcctcatgcaaagaaagtaccttgtcgtagaatctgaaagaaaggagtagaatgatctcacctcctgatacaaccactacacctagggaaggctggcatggtgtgtgtacattaagagtagctaacactgacatgctgaacctcttgagattcacataatagtccaaccaaaaagccatgcaagcccaaagaatatgaaaactatagatacaacaaaagtaggtccactcttttgttcactgaatgagtcagtctatattaatcaattactgtatttcaggcaccatgctagagatataaaggcaagacagggtccagctctcaaagggatcacaaagtctttttctcctgtcatcactgtatatgcaatacttagtatctggtagaaactcaaaaacactattgaattaattataaccactgtgatatgtgctatatagtggtccccaacctttttggcaccagggactagtttcatggaaaacaattttttccacggaccggggggttgggggatggtttcgggatgaaactgttccacctcagatcatcaggtaccagttagattcctataaggagcacacaacctagatccctcacatgtgcagttcacaataaggttcacgctcctatgagaatctaatgccgtggctgatctgacaggaggtggagctcaaagagtaatgctcccttgcccaccactcacctcctgctggggggcccgcctcctaacaggccatggactggtaccggtccctggcccaggggttggggacctctctgctatgagagaagtgagcatataatgctgcagctgtgcaggcagggcagctcatccaggtgggagttagaagggggaaggaaaggcttccaagaagagatggcatgtgatctgaatcttgaatgatttgttaaaatactgaaagctattacttattgagctc

SEQ ID NO: 205771 - DNA, 1000 bp, Homo Sapiens
acacctgaggtcagaagttcgagaccagcctggccaacatagtgaaacaccatctctactaaaaatacaaaaattagccgggtgtggtggcacacacccgtcgtccctgctacgcaggaggctgaggcaggagaatcacttgaacccaggaggcagaggttgcagtgagctgagatggggccactgcacttcagcctgggtgacagagcgaaactcgtctcaaaaaaaatcgaattgggaatttgaaatttgcccctggccccgcccccctcagaaaagaaaaaaagctcagattcagatggcttcatggtcagttctaccaaaagttgaaataggaatcaataccaatgcttcacaaattcataccaaaaactagaagagagggaacacttcccaacttattctgtgaggacagattttccttagtagcaagatagagaaaaatatcacaaggaaagcccaatacctcatgtgaatctagcaaacacagcaatcctcaattaaatactagcaaaccagttccaaccacatataaaaaggattatacaccataaacaagtgggattcatcccaactatgcaatattggcttaaaatctaaaaatcaatatattgtaatatatttacagaataaaagaaacaacatagtcatctcaatagatgcagaaaactcatttgacaaaattcaatattctttcatgttaaaaataataaactaggaagagaagggaactttttcagcctgattaagagcattatgaaaaacccatgcctaatatatggaatgctgaaaactaattcctccctcctaaggtcaggaacaagacaaggatgtttgctatatccacttacatttaatattatactggaggttgtagccagtgcaatgtgtcaagaaaaaaataaaaggcatccagattggcatggaagaagtaaaacaagctctatcttaaattactgatcttgtatgtaggaaatcctaaagaatccacaaataaagc

SEQ ID NO: 205772 - DNA, 1000 bp, Homo Sapiens
gagcaaggggcttacactctctagcctcggtttccttatctgtaaaaagggataacaaccatatcaacccatgcagataagagtgagcatagcaggcctgtggctgctgccctgagaaagtcctgcccgcagggctggcccctagctggcatctgggagctgaaatgtcccctacatggagaggccgggacacccagccctgcggcagcagctcccatggcgtgttgagccaacactgtggtgtatgcaagcaaaaccccagctttccttccagaagtcgggaattgtggcacgtgccaggctgagggtgcctacgtgacaggattcccaagggagaaatatttcacacatgtggctgcattttttcctagtgggtggggaatgtgctgtgtcccctcaaggagagagggagggggcttcagtctgctcatggatgcctgcagactccgcctaagctgtggcactgttataaaccttagacaacaggatgactctatatcgagtcctgcgagtccttccagaggaccccagaatgtgtgggtggggtcccccgacacaccatcccataggcctgcatgaatgtcccagggttgctacaacaaatgaccccagaccaggaggcctggacaacagatgttcattctctcagttctggaggctggaagtctgagatcacggtgtctgtaggatgggctccttctggaggtgagagacagaactagatggatttcctaggcagactaagaatccctaagcccagctgggaaggtgaccgcatccacctttaaacacggggcttgcaacttagctgacacccaaccaatcagatagtaaagagagctcactaaaatgctaattaggcaaaaacaggaggtaaagaaatagccaatcatctattgcctgaaagcacgggggagggacaatgatcgggatgtaaacccaggcattccagccggcaatggctacccgctttgggtcccctcccgttgtatgggagctc

SEQ ID NO: 205773 - DNA, 1000 bp, Homo Sapiens
tcacctcccactggctgtctggggctggggcaaacacctggagcaccccaggcagtgtggtacaggacccctcccctcctctccctctccagattagtgtgtcccagcttataatatttgataaatagcagactggcttcctggcagcactgctgcggctgcgcctgcccgctacagctgtggaaggtcactcattggggaaatatgtttctgtcagtggtattgaaaaaagtttagtggagtgacaggcctcaatttttcaaattttattaactccatcctcttaaccatttgtcttgaattccttcagattctgggggatctgtcaatagggcctaggccaggaaagtagtgtgggggggtgggtggtcgtggggctgatgctgattggtgccactatggctggtttggacctcatcacccagggcaaggtaaagcagtggcaatggtgttggtgggagtgaaggcctggctcactggtgctgagggagcccactcctcttctctggttcagtacctgcttttgatttgacgcaattattgactctccaagtggaaaaatggtgagttcttccaattccctaagaagatactcccttctactacatctcaaacgggtggtcactcgggctcctctgaatgtccccagtacccagccccaagctcatggctctcccaggggtgtcccccatttaactgagggcagatttttcatatatgagtcccagattctctcaccaaccccacttccatcttggttctgaaaacacctgttcatcttttaagactcagtcctagcttctcctccaggaaggtttccttgtttcccttccaccccaggttgggtaccatcctctctgctcccataggtctttcggcttccatcttactgcattggccaccctgcattaaagtctgtctcatctaagactgagagttcttagaagccagacactgtgtttgatacactgctatatatccttgcatgggatgggagctc

SEQ ID NO: 205774 - DNA, 1000 bp, Homo Sapiens
taaaatttttttttctgtacttttatcttctttcattgaggcctaaagatgaaataatgcttttgtggcaattctgttttaaacattaactggaataagtaggacactggctggagcttaaacatttttgctattgaaacctgttataatacttgattgagccatatgaaatcaccatttttataggtcaaaatgttcaaatgttaacaatttcatatggtttaatgaaacttaactacttctattgttttgtaaatcacatactaaatcttgtttcaacttaaagtataattatatataagttaattgcttcctatctattcatctaatacatatatttatattattattattactttttttgggggggggtaccaaatttcttcatctgaaggaatggcacaaatcaaagaacttaggtggatgttttggtacaacttatagaaaaggtaaaggaaaccccaacatgcatgcactgccttggtgaccagggaagtcaccccacggctacggggaaattagccgaggcttagctttcattatcactgtctcccagggtgtgcttgtcaaagagatattctgccaagccagattcgagtgctcccatcttgtgcaagttggtcacatggtcatccaattctttgatggctttcacctgctcattcaggtaatgtgtctcaatgaagtcacacaaatgggggtcatttttgtcagtggccaatttgtgcagttccagtagtgactgattcacatttttttccaaatgtaatgcacactccatcacattcagcccgctctcccagtcatcacagtctggttttttgatatcctgaaggaagattcggccacctcgttggttctgcagcttcatcagtttctcagcatgctccctctcctcatgagattggtgaagaaagtatttggcaaagttcttcaaagccacatcatcacggtcaaagcagtaagacatggacaggtaaacgtaggaggcacagagctc

SEQ ID NO: 205775 - DNA, 1000 bp, Homo Sapiens
gatctcgtggttacggtgggctgatcactcactccttcctggagacaactttcttcccttggcttttcaggcagctgctcgcctggtgttcctcttccctcactaactgttccttctcagtttctcttgccgctcactctcagctcccagagttggaacacgtcatatcattgtctgcctttccctttctagaatgtaagggcctgcaggttagggtgtttgcgtcctgcactataatatctgcggtaaccagaacagtgcctggcactgcgtaggcccggcttatgtgtttggtgaatgagtacgtgcttaagtatccgcagccgtgggtcagtgtcggtactcgctccctgggagatctcatccaggttcacagctttcaatgacgtgtgtgctcataatgcccaccttggctgctccttcctggttccatcctcttttccagttgcccaggtggcgtctctacatgggtgtctaaaagatctcaaacattgtgccaccgcactccagcctggcgacagagcgagactccatctcaaaaaaaaaaaaaatctcaaactcgccacattgaaactgaacccccagtctcaccaatgcaccctacccctagactccacaatcttccctttcccagtgaacaggcagccccaggcttcagtttgctgtgaccacacccacacagtcatcctcttctttctccagcccagcatctgtccagcagccgatcctccaaaacaagttcagagctcacactgctgtcaccacatccactgctgctaccctagtcagggccggctctcgcctggttcctgtaacaaacctaagccaggtctcctggctgctgagctttgcccgctatgctctgctctcctgtagcagccagagtgtccctgctgagaacacaagtcagatccagtcactcctctactcatggcctttctgtgctgctcctgttgcactccagataaaagccagagccttcatggtgactagtgagctc

SEQ ID NO: 205776 - DNA, 1000 bp, Homo Sapiens
aaattccttctgctgtattctcccattaggaaaccaaagccaccaaaatagaaaaaaaaaaaattatggtaaacctcattaatgtcttgcaaaaaagaataagtaaaataacagagatgtgaagaaaaaaaatcccatctaaagatatgatattctctgtcttactggttttcttccttccatcttagatagaagagaagaagaaaaacaagtggaagtaaacatcaaaggagatcaaggagaatagtaaggctgaattgctttacttcaaattcagggtccataattatattattctctaacataatggctttcaaatgccactactatttaggctgagatacaagggaaataaatgatatcatcatgcagcttaactttattacatgttcgttttattaaatctatgcacattagaagcataggaaattgccagcctttaacattcacacacacgcaaagaattatacaaaaaatacatcatcttgaatcctggtcttcaatttctttccacaattccacagagctggtaaggggtaaagaaaaaaaaatgttcctatcattgagatttataaactgatttctttcatcctcggaatcactagttactcacaccacagcctgtggctgccggcagcaacacatcagcacttgcatgtatttaatgcggtatcttcttatttgggtattatttctcattaaaccaatcagaagaggcttcaaggtagagagggagaagtgggaggtgagaaaggggaaatttgagccaagagaaatgccacacccattccacatggaaaccacaaccatgtatggtcgctgagtgaaaaggacttgagtgcccagctaagagctggaaggcaaaacaccaatgaggtcccctctgtggaattcagtctttcacctcaggataaaggtttttgtaattctaaacaaaactaaaatgaaaagacattaactaaataccaaaatggataggacagagtttcaggatgagctc

SEQ ID NO: 205777 - DNA, 1000 bp, Homo Sapiens
tcccaatactttgggaggccgaggtgggcagatcacttgaggtcaaaagtttgagaccagcctggccaacatggcaaaaccccatctttactaaaaatacaaaaattagccaggcatggtggtgggcacctgtaatcccagctactggggaggctgaggcaggagaattgcttgaacccgggaggcagaagttgaacccaggagctgagatcgcgccactgccctccagcatgggcaataagagtgagactccatctaaaaaaataaataaataaaaaagtggactttcccaagacctaacattaagtaagtagtcaaacgatggaattattactatgtgccacctaaaaaggtaggaactattattatccccagtttatagatgaagaaattggactttaaggaggttaaataattcacccaagatcactatatagcagaactcaaggtagatatcaaatacagatatgactgactccagaactgtgctcgttcttattacacaatcctggcttcttttaaaaattattctggagacttttcccaaatgcaatatctggaggaaggtacatcgcaggtggggactgggttcttgaggcaatgtttggtagcagcttgggatggtagagaattatagtcaaatgccaactctgcccaagatgtgaaatgggaaatgggaaatgaccagaaggggtcaaaaaaacagtcaggaaaaaaacaaaacaaaacaaaaaaaaaaaacagaagcatgaacgtcccagcaaaaaagccaggactatctcaggagggaaatttcacagtgaatgtgagggaatagatgagaagattcagcaaatattccctgtgagcacatggaacacccctttacggaagcactttaaaaagtcaaatagtcctgatgcccactgtgaaagaatattataactgtcccaggaatcacattcaattccacacataataattactgtgcacctacgttatttctgtcttcgaggagctc

SEQ ID NO: 205778 - DNA, 1000 bp, Homo Sapiens
aggttgcagtgagctgagatagtgccaccgcaccccagcctaggtgacagagtgagactccatctccaatcaatcaatcaatcaatgttttatttaaataaataaataaagtttttttttttttttttttgagatggagttttgctcttgttgcctaggctggagtgcaatggctcagtctcggctcaccacaacctcagcctcctgagtagctgggattacaggcatgtgccaccatgcccagctaattttgtatttttagtagacatggggtttttccatgttggtcaggctgttctcaagctcccaatctcaggtgatccaccagcctcggcctcccaaagtgctgggattacaggtataagccactgtgcctggtctaaaatgttttttaaataaagccaatttacttagcgacttaagccaataagccttcttcatggaaagtctcagaggtaattttctaggttcagaataccagatgatataaccctcacattcccccaaaatatttactttcaaaaataggctaagatagcgaaagactcttgttttcatagacagttaaggatggtgtttatgtgtgtgtttcctgtagtatcccaccaatacgtggggggctgctaatcatagacctattaatttgagacaccagctaggccctccctggattggacttgcccaggactaaccaggcaataagagttgagatttcttccttctcactgaagtaattttatttatttattttttaaattaattttaaaaattgaggggggagacagggtcttgttctcttacccacgctacagtgcagtggcatggtcgcagttcactacagcctcaacctgctgcacttaagccatcctcccacctgagcctgtcaagcagatgggagtacaggcacgtgccaacatacatgcccagctaatttttaaaaatcatttgtggagaggaggtctcactgtgttgcccaggctggtctcgaactcctgagctc

SEQ ID NO: 205779 - DNA, 1000 bp, Homo Sapiens
aatttcttctacagtctctgtgtctgatggagacccaccacatagtttactaggctgacgtttggatagtgacaaacatcatgtttaacataattagatgattacttaaatcctctctttagaagaaatgtcccaattaaaataaaaacatccctgtctctactaaaaacacaaacacacaaaattagcctggtgaggtggcgggcgcctgtagtcccacctactcgggaggctgaggcaggagaacagcgtgaacccagggggcggagcctgcagtgagccgagattgcgccattgcactccagcctgggtgacagagcgagactccatctcaaaaataaaaaataaaaaataaataaataaataaataaaaataaaaaaataaaaacatcagtaaagtacttttttcatctctaacttggaaagaaatcaatattttaatcaaccatacaatgatgattaaagtctcatttgcacatttctcacgggaacagaattatatccaggccttgaaaatgtatttaaatcaacatggcaaaactattaaatcatttggtataaatattcatgcaatcttaacaatttcccctctttgcacaaattacctatttgctgccaattccaatcaagaatgcatggaatgcagtgtattagaaagacacttaaaaataatagaattgattttcaaaatacattgtagaggctaatatataaaggttttgaaaagttgaaaaatcataccagggaacttaaaaaatactttactttctagaatttaagcaagctcaggagtctgatttattttcatctttagacttgaaagaactttaaaaaaataaaaccagacgaacgtgttgtggctcttttatccacttaattggaataaggagtacacaatgatcctgaggaggatacacacccccaaagtcctttttctgaacaaggtctgcatgtactatttactatcccttgatcaacggtgtctgttcaggataagctt

SEQ ID NO: 205780 - DNA, 1000 bp, Homo Sapiens
cacacatatcatgggtattatcagagcggctgaaggcacaggccaaagacagggagcaaggtgaggaaggggaccactcggtgtagactctggtattcagtcggcgccccatacatgcttttctgcttgaaccatgcaggtgagggcgtgtggctgaagcctgttcctgcttgggggttggccacacagcatcccaactccaggtccagagccgagcctgacagccctcctccactgcctcctggagctgccggagagaggtccgggtccgttctccccaattcacagacatgaagactgaggccgtggttccagtggctgctcggtggtggggctggagcttggcagcatcctgcagccctctggactcccggctctcgagtgccgcgttctacctgctgtgttctaaatggacatgccatccccacagctgtgtcaataaagcagccatttacagagcgggcgccggatcccgtgacaggttgaaaagtgtgtgagctgcagcgtcctgggctggggcagaggggccgtggcgagaacagatggggctgtgcccatctccccaggccctcctgtggctgcgcctggagcctcccgggagggaggccagagccaggagcaggccagagccaggagcaggcgcgaaacatcccttaaatattggtgctctcggcagcactgggcccctgcttagcagaggatggctgagcctggggggtggagaaaatcttgcctcctgctctgagcagccagcagagacgctgggtggaggatgatccggggggactgtggaaggcaggacgggggccaggagcatggctggagtgattgatggctgggagggagcctgaagtgggggcgtcctaaggtgaggggcaggcaggtgaggggcttgagggcagggctgagggactgagggccaggctggggccaagagctggtcccagggggtgaaacaaggctcggtgcctaacggtggtggccgtgggagtcagagctc

SEQ ID NO: 205781 - DNA, 1000 bp, Homo Sapiens
ctggcctgaaatggcattattgattacatttgaagtgatttactgggttaaataaaatatattattaaaattaatttcccgccgggtgcagtggctcacacctgttacaccagcatcttgggaggccgaggcaggcagatcacttgagcccaggagttgaagaaccgcctggtcaacatagtgaaaccctgtgtctattaaaaataccaaaaagccaggcgtggtggtgtgcacctgtgcttccagctacttgggaggctgaggtgggaggatcacttgagcccaggaggcggaggttgcagtgagccgagattgcaccactgcactccagcctgggtgatggagtgagaccctgtctcaacaaaaaattaatttccctgggttgggtgcagtggctcacacttgttattccaagtattttgcgaggctgaggttggagggtcgtttgagaccagcctggacaacagagcaagagacctcatctctacaaaaaataaaataaaaattagctgggcatggtggtgcacatctgtagtccttgctacttgggaggccgaggtgggaggatcgcttgagcctgggaggtcaaggctgcagtgatctgtgatcatgccactgcactctagcttcagtgacagagtaagaccctgttacaaaaaaaaaaaatcccttaaaaattggctaccggaaaaatttaaattacatatgtagcttacattttgtttcttttgagctccactggcctggaacaacccataccagggataagtacttcttttatcttgctgtagaatttcatatggatcattccatagcagatgtttaatgatttcagttcagtaagaatatttaagttatttaacttttgtagaatcagattttttttttgctagcaaaacaaaagcatttttaattttatatatcagtgagactataggattacagtgccagagtgtgtgtgtgtgtgtgtgtgtgtgtgtgtgtgtgttttcaggaattc

SEQ ID NO: 205782 - DNA, 1000 bp, Homo Sapiens
gctgaggcatgagagtggcttgaacccaggaggctagggttgtggtgagctgagatcatgccactgcactccatccagcctgggcaatggagtgagactgtgtctcaaaaaaaaagaaacaaaaaaaaccagaaaaaataaatgaaaccatgattttctctcacactgtattgtgtttaattttcatttgtttattctataaacatgacaggcttttgaactttgtattacctatatattttataatagatcatgcataatttctcaggagaataaaatgagaattccaaataaataaataaataaataaacaaataaataaatcttcatggaatctcaaggctctgaggggcctagttagacaactgctggtttaaaatattagagaaatagtgggccagttccaaaaaggtagagccctgatgacatccagccagttaacatgttttagtaaccaagcaaaccaacccagaaagacatggatcaggagaaacctccatatgtggcagggcacaggtctgagaggtgagtgctggaggaaccaaggccagagtgggacaagctgtttagcaaagaagggcagtgtcattcctcttctcacccagtgtggggctgggacgtgtgggaactcagggcctgtagatgggttgggggtgaggtggagtagggagatggagacaatgacacagagacagtccgtccccagcccaaagaggactgcgctagcttgggagggaatgagactcagttggcatttctgcacatggtctgggtggacctgcgcaactctgattgtgtccatgtagaaacctgtgctgtgttcagtcactgtaatgcttttgtagttctatggctttttccccttttgcttccccttagttttcagagaaattccaatcaggctttactgctgtctaccggaagagacaagaaggtaatttgaccagatcaagaccacccagcccagcagagcgcaattcatgaccagtccacagagctc

SEQ ID NO: 205783 - DNA, 1000 bp, Homo Sapiens
cctgttctaagctgtgtggcttttggaggtcactttacctctccaagactgtctccccatccaccatatgaggataccggctcccagccactggcaccatggcggacccagggaaggggaggcaccattctgccactttcccattcattcctgagaatggttcctcctcagattatagggtcagaactgaaacctagacccagcgcacttgtccccaccctcctgctggcaattcagagacaacacacatcaagatggcagctttaatcacattggccaagggccctaggttccctctgttcaggcccacttagccacacacccaccctggccatatccagaacacttctaccaggtgggccctgccctgtggccactgatgtgggaacctgaggtcacatcagtctgtggactcctgggttaggtgacccttctgccttgaggtctgctggacacctgggcatgggatccagtagtcctgagctcactcttttggccatctccagctgctcctaggggacgtggctcaggcccgctcctggggcagggggttggcggtggcatgaggtgggttggggaggaggacgtgtctccacattgcagctggcttcctcctgggctgaacctccttgtgctttgagactgacaggaagagcagagttgcttcaggtagaggctcggcccaggcccttggggcaggataacagcagagaactcaggtgcctcctggcacagacaggaggacagatggcacaggtgagcatccacacactccattgccacagggggtatggcatggcccatgacccatcaaagcttccaggtcgggatacaggagagggcctcagaagagggggaccaagccctaggccccatacttcccagaaggagccccaggcctgcaggggcatctgaaaggatggagtcctggcccagctgggcctcaggggacagggagtccccctcaagagaggctgcggctgacaaggggctggagccc

SEQ ID NO: 205784 - DNA, 1000 bp, Homo Sapiens
acccatctgtacatcaccatcatcaaagaccaaaagtagataaaaccacaaagatggggaaaaaacagaacagaaaaactggaaactctaaaaagcagagcgcctctcctcctccaaaggaacgcagttcctcaccagcaatggaacaaagctggatggagaatgactttgacgagctcagagaagaaggcttcagacgatcaaattactctgagctatgggaggacattcaaaccaaaggcaaagaagttgaaaactttgaaaaaaatttagaagaatgtataactagaataaccaatacagagaagtgcttaaaggagctgatggagctgaaaaccaaggctcgagaactacatgaaaaatgcagaagactcgggagccaatgcgatcaactggaagaaagggtatcagcaatggaagatgaaatgaatgaaatgaagcgagaagggaagtttagagaaaaaagaataaaaagaaatgagcaaagcctccaagaaatatgggactatgtgaaaacatcaaatctacgtctgattggtgtacctgaaagtgacggggagaatggaaccaagttggaaaacactctgcaggatattatccaggagaatttccccaatctagcaaggcaggccaacattcagattcaggaaatacagagaacgccacaaagatactcctcgagaagagcaactccaagacacataattgtcagattcaccaaagttgaaatgaaggaaaaaatgttaagggcagccagagagaaaggtcgggttaccctcaaagggaagcccatcagactaacagcggatctctcggcagaaactctacaagccattagagagtgggcgccaatattcaacattcttaaagaaaagaattttcaacccagaatttcatatccagccaaactaagcttcataagtgaaggagaaataaaatactttacagacaagcaaatgctgagagattttgtcaccacaggcaggccctaaaagagctc

SEQ ID NO: 205785 - DNA, 1000 bp, Homo Sapiens
tgcaattataaactttcaagatctgaagagaagaaagagctataaacataaagacaatgaatctgtaaatctaagagaaatttctaagattagagtgaaaaagagaaggtatgtcactgcagaatgtcccagaattggtacatattaaaaagcaacaaccaagttggccaattgacagtatgaataacctactgatttatactagagctgcccagcatacaactgatgatctattattgacacattttactaagttttcttacttgttttctcttcagaacatattccaaccttatattgaaaataaaggattcatttcccataaacacgtttagaatcaaatgtgctaatttttacctatgtaaaaagcaagatgtttataaaatgataaagaataagaactgagacataggaactttattttaactgcctgtagcagatagaacataggattgtttagaggttaatatgattgttttttttttctttaaatggcattcaatcagtccatcaaaatgtaaaaccttatactagccaaagagagaacagcaacccaagataaaaaacataagcatgtaagtcaagccaggatgctattatagttcttttgctacacaacttagttaatggaaactaatgttttcctcctgatggtatctaacatgggttgaattcaaccagaagcagaaggcaagcaaaactggtagatgtgatatgtagaggccagtctccaaagacacagaacagaggcaggacaaaactgggcaggagagctgtgccaagtagaggaccataaacacagaaagaagattctggtgtggactggcaaggtgcagctgggctggtttcctttgaaccacccctatcttccatactccaggcctcctggtcaatcaatacaatcctgaaacatctcactcatacacctcatacaagcagggtcacaaactgagttagtatcacatctttttttccttcttctgcctgagtaatggaattc

SEQ ID NO: 205786 - DNA, 1000 bp, Homo Sapiens
ccctctcaggttgccacggcatctgatggagaaactcctcagcaaacaggagttccttcacacttgccctgaagcagctggagtgtgggcgtcccgcagactcacctcggaggctggagcctcctcggctgagcgggacctggggcttgggtgattttgcctccacccccagcaacgtcatgctcagcagaggggcccccgcccacaagcccaggggaggtaccgtgttgctggacacagtttgcctggatttttctcaccgatgctcttatgtttccaggtactgtctgttcagtttcccaaaaagcttccactagaaaatgggaattcccacgtcaccgtgcccagaactgaggctaggaaggcaatggtgggggtgcggcttagagcccagggctagaatctggtctgcctcctgggggccttggacgtgtccctgcccctcgctgggcctccgttttctgtctgaactgaccgttggccccgttgaggctcctcatagtccttccctgactctgtgcctgctcccctcccctctgtgcccacaggtgtcctccctgggcagcggcagtgaccacgtcatggacgccatctcccagtgcgagcagtacgccaaggagcagggcgcccaggagcgcaacgccccctggaggctcttcttccgcaaagaggtcttcacgccctggcacagcccctccgaggacaacgtggccaccaacctcatctaccagcaggtggtgcgaggagtcaagtttggggagtacaggtgtgagaaggtgagtgggagggaatcttccgccaggctggcttggctcacagcctcctgctttccacgtttgggctgagtgctcctctgtgagccatcattagctcaggctggggtgagcctgactgcaaccaggcactcttcaggctcctggatggacaccgcctacttcagggggctcgtgaggagaggcgagatggcgggagcaagggcttctgaggatgtcctgaattc

SEQ ID NO: 205787 - DNA, 1000 bp, Homo Sapiens
cctgtaattccactactcgggaggttgaggcatgagaatcacttgaacccaggaggtgaaggttgtagtgagccaagatggtgcccactgcactccagcctgggtgacaaagtgagacttcacctcaaaaaaaaaaaaaaaaaagaaagaaagaaagaaagaaagaaaaaagaaaaaacatggggtaagtaatttgcccaagaccacatagctgacaagtgctggaaatggggttagcatcccaaatccgtctgacttctgaaactgcttttaatgttgctctgtgctctctatccaatctcccaactcaacatcaccttcagatgtggaaatgtttttgttattctgtcctccagagaattcatgaagctttcaataaggtctatccacacagagattcttggagagggttactggacgatgctttgtgtagacaagcttccaattttctctatggttggttttctgttagaaacagctccctttctttaaggcaatataacatcatagttcagagtgtagaccagattacggcttttttaaaagctgtagagtgtacaggttcctctactttctgttggaattctgattacattcctgacaagcttactatctgaatctcagtctctttatccacaaaacagggagaatgacatctatctcaggttgtaaagattaaatgagataacatcaatgaaaatgatagtgtatggcattatacgactttattatacaatttttctcttaatcgtaattttttcaatagccttgggtgttggacttttttaacatattaagaaagtctaaaacaaatgttgcaaactcgctgctgtcaagctggattaacagatgtatttcattccatttggacagtattattatctgaattaattgccaaaatttaaaaatccaaagaagtctggtctgcctgctaacattgaccagtactttgcctataccatgcactcaataaatacttactaattgattgatagaattc

SEQ ID NO: 205788 - DNA, 1000 bp, Homo Sapiens
atctcaggagaatctaacttacctctttcatcaccaaaacattaacaaaaattattttggccactttaatgaaatatttctatccaaatggatataagaaaagtatgcaggccttccaaaacaacatgcacagaacatggtttgatcattttttcattactcagggtcattattataaacaccagctactacctgtgcactaatagacacttctggggcaagtaggtgattctgttttcccacacaccaagtggcccaagactgctgacttcttgagttctttatcacctttttatgttttcctcttcattttgtcagttgcctcttacttttgccagcatgcctgcctcttctgtgttctgcgtttaatgcatattaactgtatctgcattacaccagcagcgagaggagacaggcctattagagggaggcctgagagggaggcctgagagggtctctctggtttgttttgaggtcttctggtttccttctgtatctcaggagaaagttgagtccctagcagtgacattcctgtactccttgtgttggtgtggcattgttttgaatatatgcccagttttccaagcagatttttttttttgagacagtctcactctattgcccaggctggagtgcagtgttgcgatcttggatcactgcaacctccacctccgggttcaagggattctcatgcctcagcctcccaagtagctgggattgtaggtgtgtgccaccacgcccggctaatttttttggtatttttagtagagatggtgtttcaccatgttggccaggctggtctcaaactcccgacctcaggtgatccacctgccttggcctcccaaagtgctaggattacaggagtgagccactgtgcctggcctccaagcagattttaaggtcatgatagacaggggacctagccccgcatttgttatgctggccacacagcagtgctctgggtgtagcagggagcctacacagtgtccccgttgaattc

SEQ ID NO: 205789 - DNA, 1000 bp, Homo Sapiens
acacccagctaatttttgtatttttggtagagatggggtttcaccatgttggccaggatggtcttgaaatcctgacctcgtgatctgtccgcctcagcctcctgaagtgctaggattacaggcgtgagcccccgtgcctggccaaaaaattttttaaattagccagctgtggtggtgtgcacccgtagtcccagttactcaggaggctgagggggaaggaccacttgagcctggaaggtagaggctgcagtgagctgtgacggtgccatagcccttcggcccaggtgacagagtgagacattgtcttaaattaaaaaaaaaaaaaaaaaagagagagcaagaagggaggttggaccctaggcaggaaggcaggaagagactggaaactaaggaaaggagttgcagaggctggggagaggggtgggggttgaggccaaggcctttggatacttttcctgcccctgtggctcctcatgccaactgagcatttgggacacatgccccttccctacctgggagctgcagaaaggcaggggatgctgtggcccctcagcagaagtggggatggagtctttgggtggtccttcagccatctagcagagttctgtgggcaagcgctagccctgaggcagggagcagtaacctactggctgtggcagcagaggcttgagtacaacccagggagagacgaaggaaggggctagtagctcagggaaagcacagcaccccaactagcccttttggggttctcctgatcctagaaggaaggaactggggactcccaagcctcctgggtttgggctttgcattatggtgtgtcgggggccttgaggagattctcccttgacaagcagagaaaagacctgcagctcctcactgtagggccaggcctggcccttcactgggtcccagagcccaactaggcccaggctacagtcataggcgagggggtcgacaggcctccgacccttacctgggctggttgcacaggtgatcttgg

SEQ ID NO: 205790 - DNA, 1000 bp, Homo Sapiens
ctcagtatctactctgttttcaacccgatactgttattttggataatagctttgatctcttgaaattgtgtcaatgcaaatgtttcatagacctaagaggtataatgtggtttaaaaaggaacaactgagttgttaataattactctaaagtagttatttgagtacaaagagtgacatttaagtgatttaaaaaattgaccaaggtttaaagtaaaaatatgcaaggtaacataggttaattgaaagctcttatgagttaacacctcagacacatgcaggatatatgctttcgggggacataggcaaggattattaaccagagctgacactatacctgttcctccctctataaatataaactgatccttgatttcatctgtttttattgttgttatgattttagtaggagtaaacttaattaagtgtagggtgcatttcattcttctatttgtgatgagatggttaggttaagatattttatttttgcagagaggcagtctggattaggagtgattcaaattagataggtcaaacttttttcgggggcggggagcatgttcttctgtttgtcctgattcagagactacagtgctgtttttgatggcggaaatggtggtccttagaggaagcaaattatttttctactaaggctaagcacataattttgctctctttaattccctcaatggtaaacacaatctgcactttataaaccctctgtgtctacgcaagcttttaaaatttttagcactgtcttctgacaattggatgattcctgcatttacaaatttgtggccttatgtcttcagtacttttggctaaattttatcatgaacatgatttattaacagatttgacttggcacatgggcaatggcatcctgactcaaagcaacccctttggtgacaattttctgttgtttcctcaaaatactctttgctgataaattgtttgagagacacaagcacaaaatgtgatcttttatgaaaataagaattc

SEQ ID NO: 205791 - DNA, 1000 bp, Homo Sapiens
ctcaaagaaattctcaatgtggtgagaattaagataataaatgaggaaaaggttttattatttttaccctctacctatgactctgtggaagaaactgctaatagtatccattttcccttgcttccttttaatacagacactcccctaccacaaccctctgccaaaataactgagcacatgcaaccgagttggaaactacatttccaaatgttatttataacttgatatgtcttgtttctaaagataatgaatgagatgctgggaaaattgacatatagctcactttttttttaaggcaactatgtgtcctctactctctcttctcccttctcatggacttatttcaaggtagatgtgttaataagctatcattgagaatgcagatgagggcatcacccccggacaacaagatagaaggagcctggatctctagatgatttcatggagcagaacctctgcccactgtggtcataagagacttacccctgaactgttttataagagataaatgtccatcttgtttgagccactgaatgtttgggtctctttcagcagctaccctgtactctaactactcacctttcaagcttgtaaaatctgtaaggaaactgagcaagacaaattttagggccctagaaatctactagacgttggcggtaccttttagattggagagaggaacatccatgagtatatatgcacatgcacaactaacagacataaaatgagaataagagttggattgatgtgtgccaagcaacaaagcaggcccaggactgtagccaactaatcaaggctgaaaattccaatttcttatctcatatggcttccacattaaaacaattaattcttaaaagatcctgtaatatgtaaattactacctgatactcaaatctacaatctggaacaacggaatcaattatgacactcttaggtgaggggttaatttacctgaatataacaatctcagactaaaataagaaaagaagcttaggaattc

SEQ ID NO: 205792 - DNA, 1000 bp, Homo Sapiens
gctatattctccttatgcctctaacatcatcttccctttatactctctgtgtttttgtatcccaattgctagtcctataaggatgtcagtcatactgcactagggtccagcctaatgacctcttttaaacttgattatctctgtaaagaccctgtcttcaattaaggtcacctttttttttttttagatggagtttcactcttcttgcccagactggaatgcagtggcccagactggaatgcagtggcacaatcttggctcactgcaacctccgccttctgggttcaagcgattctcctgcctcagcgtcctgagtagctgggattacaggcatgcaccgccatgcccggctaattttgtatttttactagagatgggggtttctccatgttggtcaggatggtctcgaactcccaacctgaggtgattcatctgcctcggcctcccaaagtgctgggattacaggcatgagccaccacacccggcctttaaggtcacattttgaggtactaagggctagggcttcagaaacatatcttttttaggaggacacaattaagcccataacactaagcctcaaagataacagatgagaaacacaatatagaaaagaagaacttaaatgaaatctcaagtgtcattatcatgaaatgcattggccatgcctggtgtaggacctgattgtctccctccttatgtccaacctgctaccatgtttctggggccagctcatctccttggatggaaatctgatcatgcacattccttccttcctgtgatagttaattttatatgtcaaattgactgtgccactgggtgcccagatatttggccaaacatttttccaggtgtttctgtaaggatatttgtggagaagattaatatttaaatctcatcttggtaaagcagattgccttccattatatgcatggggcttatcctatcaattgaaggcctgaatagaacaaaagctgatccttctttgagtaagagagaattc

SEQ ID NO: 205793 - DNA, 1000 bp, Homo Sapiens
ccacgcagtagcggtgctggggatgtgaccggtagccggggttgcagtggcaggagtagtcaggggggcccggcacgcactctccgtggccacagatgttctggttcagtcggcactcatcagtctctgcgggcatggccaggtcaagcggcagagcagggagcgctcaccttctgccatatccccagggcagacctcaacaccccagtcacaccatgacctcaggttcctgtacgcccatactccaactccaggatgtcctatttctctcttttagataaccccaatatcaagaccccagaaagctccaaactaggactccaggcccctgacagccgtatcaccccacacccaggcccggatacttccattcccggttcactccaagaccctgaccccactcacctcaaaccaaaccacatcccctcagggcccctcagtcgtcccagtactcccacccaagggactaaaactcctttctccccagtcgcctcaataccttaaactctatagcctcggtcacaccagtgtcctctagcccagtgactccataagcccttgccccagggacccgaccccctattccagaagggttgattaccccctcccaagactagcaggagctggtttcctgggaatcctaactagtgccaaagctgtgcacaggcagtcagatccaggaaccacccccctcactctctttgtcaccaagcccaggactccctgcctccagcctctcccctcctttggatcctcactgctcaccagtttcatttcccacaccccttccccctcactcctgccatgcagcctgggccataacagtgaactctgctctgccccaaactcacctggccagtgggctttgcaggctgttctctttgcctggagtacctctccttaggcttccttaacagcccctcctttgaggggccttgtccacattcccaaagcccccaagaacagccatctcccacctgagccctaaccctaggagctc

SEQ ID NO: 205794 - DNA, 1000 bp, Homo Sapiens
tgttgcctaggccggagagcagtggcaccatctcctggctcattgcaacttctgcctcctggttccaagcaattctcctgcctcagcctcccaagtagctgggattataggcgtgcaccaccacccctgacaaatttttgaacttttagcagagatggggtttcgccatgttggccaggctggtctcaaactcctgacctcagataatctgcctgccttggcctcccaaagtgctgggattacaggcatgagccaccatgcccagaccatctctgatatctttgagcagtggtgtgtagttctccttgtagagatctttcacttccctagttagctgtattcccaggcattttaatctttttgtggcagttgtgaataggagtttgtttctgattttgctcttggcttgactgtcattcgtatatagaaatgcataaattttgcacaatgattttgtatcctgagactttgctgaagatgcttatcagtgtaagaagcttttgggctgaacctatggggttttctagatataggaccatgtcatctgcaaataaggatagttagacttcttttcttcctatttgaacgccctttatttctttctcttgtcttattttcctggccagaacttccaacactattttgaataggagtgttaagagagggtatccctatcttgtgctggttttcaagaagaatgcttccagcttttgcccatttagtataatgtcagctgtggatttgtcatagatggctcttattattttgaggtatgttcccttaatacctaacttatggagagtctttaatatgaatggatgttgaaattatcaaaagccttttctgcatttattgagataatatggtttttgtctttagttctgtttatgtgatgaatcacatttattgatttgagtatgatgaaccaaaccttgcatcctggggatgaagcctagttgattgtggtggttaagctttttgatgtgctgctgctgaattc

SEQ ID NO: 205795 - DNA, 1000 bp, Homo Sapiens
tagcaccctctggacctatgaaaaattgacattctccatgacagaccaagtttgggatgtggctcataaagaagctcccaacgagacttccatgcttattttctcctttagatccagagcaaacatcagcaaactatgactcaagggccaaatctggcctgcaggctgtttttgtaaataaagttttattggaacatagacacactcttttgtttatgtattgtctatggctgcttttgggctccaaggacagagctgagtagttgagtagctgccaatagtcatatggtccacaaagcctaaaatatgtaccctctggctcttaatagaacaagtttgctgacccctgatctagaggaatgatttccctcttctattattcttttgaactgaaagtcaggagaccttgattttagactcactccatcctgccagtaaacttctatgtgactttgggccagtaattactttcctcaggtttggtttcttatttgtaaagtaaggagggctggccctggtgatcatctattccttattaattctctttaaatgtctgtgttctaaggggattgagacctctcaatttttaaaaggagtttatttttaaaaggaatccaaatcaattaaaaaaggcatctttctttttgtaagatgtacactttctttttcaatgtaaaccagggttttacactgaaacacttcacattatttcaagcattcagtaccgagtaaaaccccttgctgctgtatcacagtcataccagaaagctgcgggttagagctggagagagaactataaacagcagtaaaatctgttttagacaaggcagcacatctgcccactgcacccccttcccaagaaatgcattgcatcacttgtgccagagatgaatgctcttttctgtcatgttttggtaagtgagtgctctacctcctctgtcgctctgggaccctgagggaaatgacaggagtcatcccactgaaggagcactttgaattc

SEQ ID NO: 205796 - DNA, 1000 bp, Homo Sapiens
gagccatctgggtgtcctctcctttggacagtgctggatttttctggatcctatgaagatcttacctttctggctgcatttatcatgattgtggaaggctttttgtttccttgtttgcttagattaatttctgcgtatttaatagaactgaaaggcaatttcccattgagacccactgaagaggaataatcaatacatactagttgtgttgccctttgcagagaattcacttctgtgttgtcactgtatcctcatgcttccttataatggagggacagagatggtaaaaacatggacttggaagccagaccgtctgggtttgaatcctggctctgttacttataagctctgcaacctcgggcagattacctaagtcagtttccccttctctgaattggggataataatagcacccacctcaacatctgtcaagaggattcaatgagggaatacacataaagtgctcagaacagtgtctgccatctggtaagcagtcaatacttgttagcgatgattaataattcatttcatagatgaaaaaactgaagcctagagagataaaaagtcaactaagatcatacagccagtaagtggtgaagatatcattgaaaatcaaactggcatcctttaagcactaaagtctttccacagactagtttcttacccattcgctttcataacaagctgaaggagagcttgtttaaaaatcaggtatatccacccaccggaatgggtaaaatttaaaagaatgaaaatatcaaggtggagcttggacgcagaacaactggagggagtaagcagtaagaaccactttggaaaagtgtctggcagtttcgaaataagttaaacaaacacttaatgaatcagccaagttcaaccagggatgtggaaccactctctctgtggattgctacagggatttggccttactcaattgtaggaggtagttaagcaatcttgtaaggctattatctttgcatgtcatgttgcagttgaattc

SEQ ID NO: 205797 - DNA, 1000 bp, Homo Sapiens
agaggcagaactagaactcaagatttctgactcttactccagggctttccttctactccagactctttctgtgagctagaagatcctatcaatcaatcacacctgcagacttttttttttttttttccatcacataaatgtgctgggtacagtggaaaaagcatggactttagactccaacctcgatttgatcacttgcttcttactagaaagtctgacctcctgaaggactgctgtgtttctccgccacttcctggaataaagtccaacatccttgcttggtctgcaaggctggcgctggtggctgaggctgtactaatctcaccagcttcaccttatgatagttccacctctggcctctgctctacctgtcctggcatgttttcccttctttgaaaggccatgcttccttctgctgttggggctccgtggtgctggtgtggggagtgctcatttgcccccctcctgagtaattcctcgggtctcaacttcaatctcgcttcctccgggaggtcttcttggatctccagattgggttggctccctctgctacttgttctcacagcattttcactttccctaccataattaattaattacttgtgtggttgttgaattgacactcccctacaaggatgcaagctttgtgaggcagggacagggtctttattgtacattttagtgtccccagtactgaggtccctaggaggcacttaaatatatgaatgaaggaacccacctcgaacctcagtttttttcttctataaagtagatataacaagcactggggattgtcagtgttaaaaggcatatttatttaaggtatcctgttcagcactagcagcagcatagaacttgataaatgtgatttccattttatgcaccttcttccttccaagacagtgctctgaggcaccatgactgctgaaacatcttaaaaaaaaaaagaaaaggaattaccttctgcatagtttaggtacaaagtgtattttatgaattc

SEQ ID NO: 205798 - DNA, 1000 bp, Homo Sapiens
cgattatttctagtgaataacggatagaatttgaaagaggagctggcctttgagctgaactttggaggacgagtaggagtttccccagatgcagcaggaggggaagcacagtctgggcatcagcaaagggtggaaatgtgaaagatcacagaatagtttgatgtgaataccatacggatggagaaaggtgtggaaaagaaggctggaaaggccctagaaatcctgacaatgggagtccctgaatgccaccacactgaggtataagggcttaatatttagtcaatgggatttggcttatgtgttgagctgtaatttgagctttttcaaagcaaaaacaaggtccatgtgtcaatcatccctgaattccctgtactttgtacagcatctggaacacagtaggtatacacaggatggatgggtggatggatggatacatggatggatggatggggcatattcaatacaaaccttagaagtaccaatgacagtccaggcatggtgattcatgcctgtaatcccagcactttggaaggctgaggcaggatcacttgtggccaggagtttgagaccagcctggacaacacagtgagacctccatctctacaaaaaattaaaaattaacaaaaaattactaatgacagaatttcatgaataattggatatttgaacaaccagaaagagtcaaagatgacttgaagcttcctagcacagattttaaggaatacaaaaggatgagctggtttgaggaggtgagagatattttaataaatttatatcctgcacctaaaaatgtggagaggggacgatcacatggcacagaggaaacaggaaggcatcaagggggctgaatgcagcctggagggccctgtctctgtgggtgggagtcgggggtactcatcactctcctggaccctgacaagctactactagggtttgctcggggataccagaggggtgccgtgcccttggacttaggaagaagttgggaaaggttgaattc

SEQ ID NO: 205799 - DNA, 1000 bp, Homo Sapiens
agcaaagagggatattctaaatatctctctgaacattaaaaggctagaatagaagggtgatgatagtgaaaggggttaactagtgtttttcatacattagataattcacgctgcttcatttttcatacattagataattcacttcaatgaacaatattgaatattctttggaaatgtgtttagtggaaattcccatttatgcttgtttaagtgggttgatgaggcttaggtaatcaagttgcaacactggggaaaaaaagagaccagacaagtaccaacaaggaaattcaactgaagtgttgttggtgtgccacatagccatgggaaaatgagggcaggatcaaaacttgctggaaactagcttctctatttgttttcctgtctttctttaactgaagtataggggaaattttggtaggcatagatttcctttggatatcatctctttagctacagatttgcctctgatcatttctgattatccttatgccagtcttgtgttcaaatgcttctgagcaccaactaaaagagatcatactctatacaatgtagagattcagtgtgctgtgacaaaagagtgcaatagccagtctggaaacatctgtgggagttttaattagaggagagccacaggctaaatgactgacagaaaaaaacaaagaaagtagatgacccatctctgagccaatgacaacaggagtactcatggattttctctgcttttaaacactgtggttggattaagtgtctgaactcattccctgcatgccctatattattgaatccttttcttttggtttaaatttcctaatttatgagtctttctcaagggtaatcatctttgaatagtagatttctgatatctgaattagaagaatcagggtaaagccatcactcaatgagggctggtagtgtggtagtatgatttcaaggacaccagaaaagcctttactcacatttctttccaattgaagttccttggtccgaacgcgaagaattc

SEQ ID NO: 205800 - DNA, 1000 bp, Homo Sapiens
aacaggagttctcattctacattcatgtattcatttactcctttatttacatgctcaacaaacatgcattgggcatttactgtgtgccaggcactagggacacaaggatgacttaggcatggtccctgcactaaaagattgcagaatctagtggaactcacagtctagtcttgcaatatttattcaacaaatatttaacatttagtagaacaaacagctggcctgattgagcacagttcttaagcagctgtttcatgtcccatagttgtcctcgctattgttttagaagtgagtgggtggcatcccgttccccttactcaacaggcagtgctaactatggtccatgcccaggaaggccttgtctctgattcattaggtcatgagccttagacattgtattttttagaagctctacagatggagtcattaccagctgaaaacccaagctttggggtttcacaaacccaagctttggggaggcacactcctttggggatgtaagtgtaattttgcttccctgattttcatcttttatttggggcctggaaaattaataaagcagactttcccccatgtttcattatttcttggattatcatattaagcagaccctcagtcctacactagacattagtgggctaatgttgcacatttgtcagtggttgagaatcactcctttgaaactaccattatttaattggctgaatattcatcatagctccttccctaccccatttccccttctgaagacaccctctaaagcagtgatccccgaccttttaggcatcgggggctggtttgtcagtctgagacaaaccagtggaagacaatttttccatggatccaggtggcagggggtggttttggggtgaaactgtttcacctcagatcatcaggcattagttaggttctcataaggagtgtgtaacctagatccctcacatgcacagttcacaatggaatttgtgctcctatgagaatctgacaggaggcagagctc

SEQ ID NO: 205801 - DNA, 1000 bp, Homo Sapiens
acaccccactgtcaacattagacagatcaacgagacagaaagtcaacaaggatacccaggaattgaactcagctctgcaccaagttgacctaatagacatctgcagaactctccaccccaaatcaacagaatatacatttttttcagcaccacaccacacctattccaaaattgaccacatagttgaagtaaagctctcctcagtaaatgtaaaagaacagaagttataacaaactatctctcagaccacagtgcaatcaaactagaactcaggattaaggaactcactcaaaaccactcaactacatggaaactgaacaacctgctcctgaatgactactgggtacataacgaaatgaaggcagaaataaagatgttctttgaaaccaacgagaacaaagacacaacataccagaatctctgggacacattcaaagcagtgtgtagagggaaatttatagcactaaatgcccacaagagaaagcaggaaagatccaaaattgacaccctaacatcacaattaaaagaactagagaagcaagagcgaacacattcaaaagctagcagaaggcaagaaataactaaaatcagagcagaactgaaggaaatagagacacaataaacccttcaaaaaattaatgaatccaggagctggttttttgaaaggatcaacaaaattgatagaccgctagcaagactaataaagaaaaaaagagagaagaatcaaatagacacaataaaaaatgataaaggggatatcaccaccgatcccacggaaatacaaactaccatcagagattactacaaacacctctacgcaaataaactagaaaatctagaagaaacggataaattcctcgacacatacactctcccaagactaaaccaggaagaagttgcatctctgaatagaccaataacaggatctgaaattgtggcaataatcaatagcttaccaaccaaaaagagtccaggaccagatggattcacagccgaattc

SEQ ID NO: 205802 - DNA, 1000 bp, Homo Sapiens
ccttccttccttccctctctctctttctccctttatctccctcttcctctttctccctctccctctttctcccatgctggaacccttaactcaaacttccaggctccagacacagtctggagaaataaatgcttgttgtttaagccacccagtctatagtatttgttatagcagcctgagctaagacattggtctggattatcttaaattttaaactttaaacttttggggacttactgaatgactcctttgagaatgtgaaaccactccccagaaatgtgcacatatattctgaatattgcgtccaagctttgtagggataaaaggccccacaccaaaaaccttggcatcatctgtgacccctctctttctctcatagtaactgtccactatctctgctgctgctattccagcctgagtccctcatctcttctctgtattactgcaagagcctcttaacagaggctcttgtcttcccttgtcctcttatggtctcttctcaacctagcagccagggtgagtcttttaaaatatcactcagatcccatcgatcctctattgagaacccttccatgagtgattttctcttcaaatagaaatttggctctaagatccacagctgacttcgtcacttctatgagtctttgtttacacaaagtcagcttctagaggaaaaatatgaattgacctatatcaagtaaagagattggactaataaaaatcttcccataaagaaagccctagacccagatggcatcattggtgaattctatcaaataatatcaatcctttgtgaaatcttctagaaaatagaggaggaataaacacttccctactcatcctacaaaaccagtgttacctgatactaaagccagacagacataataagaaaagagaactatagactattgtccatcatgaatttagataaaaaccctttaagatattagcaaactgaatccagcaacatataaaaaaagattatatgccatgaccacat

SEQ ID NO: 205803 - DNA, 1000 bp, Homo Sapiens
caaggctgacctgccgttgctgccttctacaagctgaggccacacacagctggctgggctggggtcatgctcttgatgactgcttctttgactaggaaaagtgcacactttggagctagtcagacctgggtttgtgtcccatttctgctagcatgtttactagctctggtcttcagtagtaagtcatttgaactctcagaattttagtttttttccatctgcaaaatgagaacaaaaccttgaaggtatgaagtatcttgtatctaaaagcatgaagcccagagtctggcagtatggtaggcacctaataattggtagctgctgttaaaaattatgtttccacctttatataaagttgcagtgtccagacagttaatgtgattgtggaatagctaggagagattgaagattgtttttcataaggagctataaagaccattctctgttgagcttttattcctgagcagtctcagtagtctatgaatctactttaatttttcttgcacgttaggttgcatactgtaaaacatttacaaaagaaagaacttcctgaaggttaacagtttattgctgctagcctgaagctgttgagatagccctgaatacttcagggttatatacagtctgatcaaagtttgctagggaaggaagattgacgataatagctaaaactttaaaaaaacgggcttttgaaagatttttttgtgactaagttgccaatctgtctttcattatagaatttgatagctcttaatctgaagactgcttctttttgaccatttgccaaaagcatctcagtgtgctcctgaatttctacttgattaggaaaggccattttctttgggtaccttgtctgtaagatatttgaataataaatgaccattgtcacttacctcaagttgggtgagttataaatggcacataactgggtttcacttaatacaaaccacactgacttggattttccaagctttgccttcaccacgttagtatagaattc

SEQ ID NO: 205804 - DNA, 1000 bp, Homo Sapiens
gtaggggtgggggtgcagagtcgggggtgcgggagccagcagggtggccaggaggagggggtgatgagaaggctcccctcctaccctgggccaactttctcagggtccaggaagcccgagggaattctgaactttccctgcaggagtgtagtgcccagactgggagagatgtgcctctgtgggcatcttgaagggaaatgagaagcggagctgcccctgcacctgcgctgggagctgcctgcctcctgcttgtcctggccatgtgcgaacctcagcgtggaagagggactctcgcactgctccctgcgcggctcagctggcctcctggggtccgtttttcagggatggggtgaggagggactctgggatcctggaggctcacgggccatgcctgaggctgagagagaggctggaggcagcaggcagggtggtgacccgtcccctcctctccagggcagccagctggggcccagctggaacgcttgtttacatggggaggccgggggaggctgaatcccggcgagttccaagtgtaattgcgtttggacacttaaaaggaattgtgtgaagtgggcagaggctctgaagtccaccgccttatttggtatggaaatctgtttctctcaaaataagcgagaggcgcttgtaaacgggaaggtcgtcctggcctgagtttgtggagtccccttcccgtgggcttggtgtgtccggctgctctgttgcagtaccgcagaccaggggcttatcggagcaggcgtttgtttcccgtggctccgggggctggaaggccaagatcaaggcctccacagattcagcgtctggtgaggacccagcctctcactgagtccccatgtggtgacccctttcaggcaggcgaaggagctcaatggggcctcttttactcgggcattaatgccattatgaggccccaccctcataacctgctcatctcccaaacaccccacctcacacaggagattagatgtcaacacatgaattc

SEQ ID NO: 205805 - DNA, 1000 bp, Homo Sapiens
tatttgttgagtgctgactatgtaccacatattgtagtaagcatattccatataatttgttattcctcacaacatcatatgaggtaagcattattactatatccatttaaagatgagaaaactggaagtaacagggattttaagtacctgttaaagaacatgcctataagaccataaatgataaggcagggattcaaattcaggctgtacagctccaaagaccacatccttaaacaatactacctctcattgtacgttttgattaaattcagtttgaggttaacaagtaagccctgtctgagatctcaagagaaataaatgcaagtcatttgagacaaggtaagggagttagacaagcgcacccagagacaagccaagtaggcatatgtcatttcgccttagaatgcaggcctccggaagggtgaagaggaaggtgccaagatcctccttgatgcacgtgtttaaactcaagtagggtgcccttttgctggggaagcaatgagtacctagtagatggtagtggtggttgggtgacagtcctatgtcacatgaagccagtttatcataatgcttaacagcaggtgttgtaaaggcagacagcttggcttagcatgttgcctgacacatgataaatgctcaatgcatgacagctatccattactaccatttgagagtatttcaagtattcagagcaaacactctgaatgtccatgaagatcaggacactagtgcttatgcattctcatggagctgaagttctacagaggcaggagcccaaccagaagagtggttttgtctcagagctaactgctccccacaacctaggacgtatagttgccacgcttgtggaaatatctggactccaaaaaagaggagtgtagcctgcacagcactgaatccttcccatactgcttgtggccatttctgtgaagaagttatgtctgttttcatttctcctatccattaactcacacaaggcattttccagttaattgaattc

SEQ ID NO: 205806 - DNA, 1000 bp, Homo Sapiens
cagagagtaattagtcaaatccttacatacccttggtcttacaacaggaattagttttactacgttagcagaaagctcatgtgacctatgtatttgagagacagggaaaaatttggccatagtgatcatatgtcctggattgcttggtctatggtttgcacttgttgtcctgatacaattattaatagttttcctttcactctcaacagtgtcctggtttgggtgataaattatatgatctaatattggtcaactcagtggataatggaaagtataataaggctgttagaaactatggagaaggtgtgagtgaaaagcatcaagaaaggaagtggagaagatgactaattaaaatatcagattttatatgggtttttcttgtgatgacatctattgaatatttgtgttttattgttatagacagttcagtgtcaaattggttttaaccactcaaaatttcatagatttttttttcttgctgccttttggtatatgctgaggaaatgcaaactaatgtgatactagtctaagaatataaaattataatggtaaatttacaactttaaagttaacttctccacataggaaaaagtttttcaatccttacataagtaataacaataatcaatacttgcgtattacttaccatgttgtgcatatattactgtttaagaataaataggtaaggcacttaaacacataactcatgtaattctcaaatcaacccaatctgttagattcatgtgttatcccttttatagataaggacattgaggcacagaagagttaattcacttgtctaaggtcacatggctatcaagtggtagagccaggattcaaacccaggccacctagctcctgtctatacacttctcataggagtgtgtgtgtgtgtgtgtgtgtgtgtgtgtgtaaccttatttattttatattcttgttaatgtaactctccttagtgaatcaagagttaggctttagttttatttataaaatgtttttg

SEQ ID NO: 205807 - DNA, 1000 bp, Homo Sapiens
cttaagagtaacttaattcaaaacgaattgcattaaaacctacttagaaactaatcagagagcctgaaacctcatattttcttcctatttcttaaatctcatcagccttaccatattttcaacctcttaaaattttctttgaccttcaagtctcagttttccatggactttcacagatattcctggacaaatttaacctctcctttctccttaatccctccacacactggctgtatttccttgaatccagtttcactctaccatatctctgtgggtttattcttatgtattttcccccagaaatcccaatgtttctttaatctgaggacagtgtcctttcatcagttctggaaaattgaacgttgccatgtccctttctctatattcttctcctgtgcaactccctgtaaaggtaatttggatcctctcattttatcctctatgcctttttggcttctcctccacattttttctctctcctgtttccatgctacatttgttgtaatttcctctgatctatctttcagttcattaattctctgctcagcttcatctaatctgctgtctgacacatctattgagcttttaattcaatgactatattttttatttctagaaagttcttgttttttaacaaatttgcctgtttcttccaaaatatcctatattttctttatgtttctatgttttcacctttttaatcattttaaacatagttattttaaagtctctttcagattgttacattgttttatttattggaatgctaaactagtttgatatgtttgctgactttctctaatagtatatcatttcctgatgtgggtttgtaatttttttattgtttgggcaacttcaaaggggatcagattttgctgtgaaatgctgttgctctggggcacattcctcctgaatagctgtgtatttccttctcttgatacaccatgagttttactggtctgggatctatttttatattaatttctcagcttgggaattc

SEQ ID NO: 205808 - DNA, 1000 bp, Homo Sapiens
ccatttttttctttttcagctcctagcacagagctaagtacagagaatatgtacagtaaaaggctgatggaggtctttctgggaacactctatcagcggtactctgtccttcctgctggtggcaatgggaatgttctctgcaagggctcacgagggcttgcatgcctatgaagtggaagagaaatggcttgaggtgcagggaatgaggggacaggccaggaactctcggcctaattataatagctattgcctcgctgcttttattggactgctcttattggaaggaaattgatcccaaagagagtcaaagacaggctaaaacactgaactcataaaaatatgaaaagtaagcggtgagagcagatcaagggaccaagattcgttgttttgttattgttttattaatgatggtctaggacttccaaatggagttttaaaagttgaaaataaatgacctgttactaatatattttcagaatgcctatgtagagaggaagattatttctcagctgagtaacgtgggatcctcctttaaaagtcctttggactctaatcatctttgtaatactctgttttactttgaaggcagactcaacttcttagagttccagcacattgagccctgtttgtctcatccatcttttcactgaccttccaaaggtggactggctggagaaccccagctgtccattgtgtttgaaatccctttaagtagggactcggctagaggtgttcttctgcctgatccccagatgaaaaggacgggaggggagtgacagaggagtcttcagccagctgccatatccccatgccggaccatggaacctgacttccagcgcactgtagcagagaggtagctagagagcagaaagtagagatttggctctcctagggatcttggagagaactttgttatttcagcttttgagatatcttctcttccttcataaggatgagacccagggtttcctgatagggcactgccctttaaaatggactt

SEQ ID NO: 205809 - DNA, 1000 bp, Homo Sapiens
ggtaggatcttgtccaagaattttctttctcaacttcttccctgctgatttctttttcaaaatactggtacattttgtactttgttttaggaaggtaggttatttacctatgtctatctcagaagatagcaagtttttgactcttggaggtgtgtaagcagacttgggaacaacttgacaagagataacatgaagagggttggttggattagagaggcaattccccaagatggccttaggacaggctgactctatgttatctggagagttctatttgaaaataaataaaatacagaatccagggaccccctccttagaaattctcatacagaatccaacagagtctgtcagaatctgtatatctgaaaggcagctcaagtgattttgaggtgcagccaagtttgggaaccactgaaaatataaccctcagcattctagcagccctgaggttccaggattgcttgtgtgagtacaggataaacgctactctgccttacatattagcttcagaccattcacagagatagatgcctattgaaagaaccacttcaaactaacagcatctctcccccaagaacatttgcttcatgactgctttccaaacccactcctagcccgggtgagcacccacagctttaatcctgttaccttcacagtatagagtgtgtatgggtggaatccagtgccactgtgctctcgggctgtaatggtgccagtgatacgaaggttctggatgataactggaccatcgggactgcttaggggctcaaagctgaaggtggctgagctgagaggaccaggtggagaggaggaaagcagaactggtggcagagtaggatcaagggagctcacatcattggtgagatccttctctaagcatgacggccgtgaggggcaggtcttttctggcccctccagcaaagctgtaacagaggcggtaacatctccttgttctatctccttgtctgctgtgtcaatatggatctctgggcaggaattc

SEQ ID NO: 205810 - DNA, 1000 bp, Homo Sapiens
gaaacagaaaaccctattaacaaaacctaaaaacaagctgggcttaatagcttgcatttcaaaactgaggccatggaattatactggtgaaaacaaagtaaataacaaatatgaatgccaagtcaaaataatttgccataaaagatgaacaacaaaaaaaaaccctgttaatgttcaaatagataatttaaaagtacctgactgctaaaaacaaaatttacagagtacatacccatatatcctaaaagggacaccagccctcataaatgagcttttaagagtttacttggccgggcgcggtggctcacgcctgtaatcccagcactttgggaggccgaggcgggcggatcacgaggtcaggagatcgagaccatcccggctaaaacggtgaaaccccgtctctactaaaaaaaaaaaatacaaaaaattagccgggcgtagtggcgggcgcctgtagtcccagctacttgggaagctgaggcaggagaatggcgtgaacccgggaggcggagcttgcagtgagccgagatcccgccactgcactccagcctgggcgacagagcgagactccgtctcaaaaaaaaaaaaataaataaataaaaaaaataaaaaaaaaaaagtttacttactgtgagtatacgcatgacataaattttcaggctgaggaataactgattaaaaaaaaaaaaaaaattgggagttcggagaggggaaataactcaaagtccctttaaaatatttgcaagaactctttaagtttctctacactttgatggttgaataattttctgaagaaaattcttaattaaatccttgcataaaatataaattagaataaagtaaaatcattacagtcctttgccagtatagttacaccaagaagttacatcttcaacctataaacatttgttgattcctaatcatatcttaattgtttataaattactggcttaaattattaccaaaaaagtaggacaagtcttaagaccttgaagaattc

SEQ ID NO: 205811 - DNA, 1000 bp, Homo Sapiens
ggcagacacattctgagttttctgacattggttacccacttccccacctcattctcccactgatcattgccatcgacacttgccctgccatcctttcaatggagttaaaagaggacgggcttgtgccaggagggacactgtagcatcccacgtggagctgggagccattgcattggcctgggacgtgcatgtgcaggacacacagacttcagaagaggaacacaagaaccagtaggggaattaggttctttgaaggccagggcctgaagtagatggtgcggcaaaaagaggaggttctggtagcgggatggggacatgcccctccccgtggaacatcttctggggttaatcacatgtcttcccagcaagccatttcatagctgtttttactgatattgttgtagctggtccacctcactccctgtctcctggccacccctagaggacaccatgccttatattttttgggcaagctggccagtgcctctgcttctccctggggtcaggtcccatgcacggtgtctttcttcccttctctgggcctcagtttcctcatttgctactatgtaggcatggcaccaggtgatcgctaaggcccgacccctctggatccatcattgtgctgtccaggccgaccctcctaggtgcagtccggccccagcacttccctcccaatgagtttgtgctaccgcccagcttccgctctgtagtgacagcctgtggccaccagagggagcgaggggccgttctgccgctctcccacctgccctgagggcgctatgcagcaggtgcggcaaagcgcgcctcctcccgccctgctgcacacctccccaccgcggtgcgggcatcgcgctggcgctgtggcactgacccttctttgactttccttttttttttttttcaaatctaatttttgtggttttctttccagtatgacagacttaacctgatcaaagtaagaattgttttttatttctaactcctactaaatgtagagctc

SEQ ID NO: 205812 - DNA, 1000 bp, Homo Sapiens
caccacacccagctaatttttgtatttttggtagagatggggtttcgccatattgcccaagatagtgttggactcctgggctcaagtattctgccctcctcagcctcccaaagtgtgagttaccatgcctggcctgacattttctcatcagtactctgtcttagttactattactggatactacacacagatataggctagattcttccattctcctgatttccagttttttcctccatgttatgaagaagggagaataatttctatattgtacaacgaggttgggggtgaggttccgaagaatattccatgcgaaatgctctatgccacccagaaaaatggcctaattcagcagtccattataaaaatgaaacttgttctggctagggtatagatagttctagatactccctatttcaatttcacaaatagatctttccttcaggtatcagttagaccagaaaaatggcttcatttgaaaaaaattaaaaactaacatcttaccaagtacattaaccatgtaagtcacatattttacatctccagacttgtttcccgccatgcaggaatagtttccggagtccgccgggtcaacgctatcagtggcaagatgagaatacaaccttctccagttgcttcctggtgcaatgtcctgcccgtcctttagccaatacacttgaggagccgggaccccactcaccacacactccaaggttacagggctacgagaaagaacagctaatgcctgtgaatgggtggggtgaagaatgtgaacatcatctgaagaaggacctggaaaaggaaaggagatgagagattattagtaagtcttcgattctaatctcttgcttagcaaacctgtgggcatcaccattttcccatgtattctttatactacaaggtcctatttggtggttaaatcctttttagttgaggattaaaagatttttgtggtcctttagggctacttctgaattggcagtttggaaatgcagaattc

SEQ ID NO: 205813 - DNA, 1000 bp, Homo Sapiens
agatgtactccaccctgttcattccagaagagtgatagataataacattttccggcaagaaacagcaggaaatctaacagacaggaattaaggcaccaaatgggaaagtcaattgcttattcgctccaagttttgtatttgaagggaatgttatttgatttggggattccctcattctccctttcttttttctagggggcaagtggaatagtagaatcaattatctcttcacaaacgtattttccaggctcactgtgtgtgtgtgtgtgtgtgtgtgtgtgtgtaaatgctcatttaaccttttagtaatgtttcacaaacatatatttctcaattatgtcaaagctccccataagtaaaagaaggaatccctggatttttttttctcatggtgtctcttgtcactctaaaatggacctaaactaagaggtagaataacaataatgaaacaacaacaacaaaatactgcttttgtagtgctacccatcttgtttgtacagtgtttgatagctttccactgcattttccttgcatttcatcaacctcactagttgctgtggtataccgatcacaacaaaaatgatgagcatctcagccctgggcatgcatgattcagcataatgcttgcaatggccttatcagggggtagctgtcattgtcctcctttaccaatgaagacacaggcttagagagattgagtaatgtgtccaaggtcacccacctgacaagtgatggagatgagatttgatccgaggcttacccgatgccagggcctgaccaggtaaaatggtcattctttcggtgacagaattgaggcagaggacttgtgaggtcacccatagatgaagaacggatccaggcacagaactctggtcttgttaattctcacagctgctcttcttacctcaccaaggctaggagaaaagagcatctagtcaccaaacaaactcatgctacagagactctctagtctctttcataatgcaaaggaaaagaattc

SEQ ID NO: 205814 - DNA, 1000 bp, Homo Sapiens
ctaccccagggttttccaaatttggatgaggtataaattttgttttaaaggaagacatttccacagaccccttctgttgactaaaattattttatgtttcttaaataaacaagcataaaactagatgtaaacatctcatgcctatggcatttataaaaccacagaactaaatctaagtatacaaattaaatgggaacaaagcatcaataaaattcaaaattcaaattaacgttactaatgggcaatgaatatcattttgttgaaatgaaatggaggctcgcaatatattagattgatgcaaaagtaattgcggttttcgccatcacttttaatgtttaaagtttaaagctgttctctacggcttggcatttctatctgctgtgggatgattccattttgacgttattattttctctttgaactactgtgaaaaatccaagatttttacagcacatcgtgataaaatttagcctctgctggactcagatgattattttattatgaaatccattgttaaagcaaactaaatatggcctgagaaggactccatacttctatatttgagtccttgtggatgaactgcaacctaacctaacgtaattaattagtagacaagattaaaaacctaatttaggagtatgtgcctgtaacaatagatgagtctcggccaatcccagcggctgtgcttcaaccagtcatacgctgctgagtgttcaaactgtgttcaaacaaagtaaacgccaacctgtaaccaatccagctttttctgtacctcactgccgattcctgtatgtcactttacttttttgtgtctataaatctgttctgaccatgaggcacccctggtctgagtctgttgtgattctgggggctgcctgattggcgaatcattcattgttcaatgaaactcctttaaatttaatttggctgaagtttttcttttaacaccacctctggtcttgtttcattagtgcatggtaataaaaatagaattatgtta

SEQ ID NO: 205815 - DNA, 1000 bp, Homo Sapiens
gaattaccaactggcatcttaaggtagttttaattatatacccttacatgcagaataagcattttcccatatatttgttaacttttatagttttctcttacgtgactggcaatattgatgttctttgcttttagttcatgctttcagtttattgtttttttaaatatttgaataactattttatatagaatctttactgcttcacaggaatgtcagagctctagaagtgattttcttactccactttcctcttcagaattagctatagacagcaaagaccatgaaggtacagcaatgtatttgatatacataacagaacatggtccctaatgtacgaaatcacttttgctaggattccagatatcttatgtcataaaaagtcatagatcagtttttaaacaatggggaaatttgcatatgactattaaatatacatatatattcatatttttatagtaacatatcaaacaaaacattacagaccaattctgaattcattatccccataaaaaccttctaagtcattcttgcaacccagatctctcagagggatctggtcaactactgctcgataatactgagaaatcactatccagtttaatagaagaatttagataaatattatatttccatcttaataattgactgggaggattcagagacaactttgggtctctacctctctaaatatacacctcctccatggatatgtagacttaccagaaaaagcgctcagtatttcttgcatttataaatataattttcacatttgtaaatgcagcaatcttataaagtaagattgaaaaaataaatagaagttgtcagcatctgtgctttttatcatttcacattatactgctatgctcttgtctaaaaaacacttactcttcagttttttctattcatacagaattaatagcatcttaactatgtggtgattgctctagactctgacatacttctaacagagtctagttgaagcacagtgttttttgaattc

SEQ ID NO: 205816 - DNA, 1000 bp, Homo Sapiens
gagaacgctttctacaagatgttgaagttgcagaataaaattattctgtgacaaaataactgatcaagtatagctaaccaaaatatcaaggaaataaaaatttctacaaaatcagatcttattcaaacataacatcaagaatggcattgtatggtaacattacatttaaaaagtcacattattccttcatctcacatatttggaatattggcctaaatagccctacattccagaggagaaaacagagagaggtttgacggcttgctcagtatcactcagtgagtaggagtgttgtctggatttcaagcttggtctgtcttattttaacatcctcctccatttgtttgcacttttaattattatagaggacacacaacgtaacttgaacatggaaaagcaaagacatcctcactatcagttggtttctggctaccctgacttcttgcccaaccttgaacttgcagtgagccactgagggacatcctgccatcattccccagtctagcacttaaacttccaccaagacatatgtaccggtccttgatcctggattgtctccagtctctgctttccattctggctttcaggatgtaaaacagaaagccatagacaagaccagtcacacggctgggtgaacactgtaggtctaggaatagccactccaatgagaccatcctgtcttcctcttggatccactcccaatcacagttgacttagactttttctcctgttcacaggcacctgttcccaagccatttctcttacttccaatacattttttttttctgttatcttaacgttgcacaattccagcaagagagaagactatttcttctgtttcatgtctacctgaatttgaatctcagcccttctatgcattgtcaggtgactggataagtcacttaatctctataatgtcacacttccattctttaacatgagaactatgacatgatagtgtaggtacttctgcctttcttcattcaagttatcctttact

SEQ ID NO: 205817 - DNA, 1000 bp, Homo Sapiens
tggaatgtgataaacactcaataatttcttaatatattaatggctgaaggcacgtggtgcagcctgccagctcctctgaaggctgttggcatcactttacagctaggagaaaagatttgtggtacaatccatcaactcacctgagcaatagttttactatgcatccacatgttttcaactcctggtctttgccaccctgagttcactagataagcaattatatgtcccaaaacatcatatcgtcacagtctccagaatcttgatgtggtggaaaatgtataggctttgtagttaggcagacttggatttgaatcctggctccatcacttatttggctaccagcaaaacttcaaatttctctgagactaagtttcttcctttataagttgaggattataatgcctaacttaaagggttctaggtattaaataatggtatgaaaactgacttaaatttaatggagtagacattgttgaatgccatagcagtatttcagaaaagatatataaatatgagcatatcctcaggagagtataatgacagcaaagaattgttagtattaggcattattattacaaatattatctgaacactgcatctagaaaaaattaacctgagtgttatcttaaaacgtaaaccctctctttatagttaaagttaaaatgtggtgggtttttttgcacttacttgaagttcatctattccttacaaaagcagaaaagcagtttagaaaagtaactttaattcagttcaaagaatatgagaatcttaaaattaacctaaatgtaggggtgggaagagacagtttctaaaataagacacatttaccttattttttattacagattgtacatctctgtatgaatacataatagatcttaaaatatcaaacaataatatgggtcatgtctgagtatgtggcatattggaaataatctggttaatgagtcaacccaggttctcagacagcaaacatacatgaaacaaaacctctgagctc

SEQ ID NO: 205818 - DNA, 1000 bp, Homo Sapiens
gcagcaccgagtcactgggacccggctgaggggctccctggggccgaccccgagagatgccgagaggcgctttctcgcggaccggagccttcgacggccttcccgtgggggactctgctctagctgggtcacctcgtggggggtgcgcggtcttcagaaaataatgaagacctggaatcgggtggatgggtggacgccgccaacgcagaccctctttccaggtctctgctcctgcggtcgggcggctgcgaccgtgccggggctcggaggtaccgtgtgaagtcgctgtcgcgcgtggccgcggggctggccacggtgaagcccgtgcggcgcccgccccgccccgccccggccccagcagcagcctctcccgtggcgtgacggctgccgtctctcctttcagcccgccggcctccatgccgagtgctgtgcttgctgccggctgcagcctcggcctgcccttcccctgccgcggggccccgtgctgaagaaagaccccttcccaggtctggctgaggcggaggggagcttttcccagccacctggacgcaggcgccctcgagagagaaatgccgaggacctgcgaaggggcgaggaagccgatctctctgcggcccggagcctccaggctccagaatgtctttgtctttccaggctggactggagcaccctggtccctctgcggctccgccatcgacagctggggctgcaggccaagggctggaacttcatgctggaggattccaccttctggatcttcgggggctccatccactatttccgtgtgcccagggagtactggagggaccgcctgctgaagatgaaggcctgtggcttgaacaccctcaccacgtaggtgctgcccctgtccccccggagcctggttcctaagcagggcgcctggtgtctgcatgcgaaaaaatataagaggaaccggcccaggtcctctgcccagggcgagagagccagggtctccctcctcctccccaccacagagctc

SEQ ID NO: 205819 - DNA, 1000 bp, Homo Sapiens
gaaaagccagatttttgagttgaaactgacctacactcaccagatgtacaagctaaaaggttgcacggctagaccccggcacaagaggttcagaaagcctgttgtccaagaagacttgcatcataaagacatctcaatggaaccgagtcttaatttgattcttgacttgatttgggtcatctttttacccaaaaggtaacccagcaaggggtaccaccaggggaagaaaataagagcagttaacttttaggtattctctcaggatgactcactatcattaatttcccttgataggggaaattgaattagcttcatggggattagatggcttctgcaaggtaaagtttaaaaaaaaaaaaaagaagaagaaaaagaaaaaggcttggcagggtataatgtcagaattcgaatattcctggctcggtttgttggctttggaacgcgacaacctggactgcagtccaggatctcacttccttgacagtgggaccttggccctcagccactccaagccatagttcctcctctgtaaaatggggaacatagtatatgcactcaaaattgatgtgacatatatataaggtcatgttggcaaataatttagtacatcccctggccataggaagcacctataatattagtagttatcattactatttttttgcctgtgtgcgaaagtcattaggaaaatcatgcctatctacggcccattctgggtcttcagaaatgttgacacagacatccacttttgccgttgtgtgctaatggcaggagcttgcctggcttcctgctgtgccacatgctgctcttgaggaatgatgataacaggtaccaatagcattgagctgggctctcttgctccctttggccaccttcaccccaaagcaattctggagctcattccgcaatgattaatattatcctggttgaatagagcactgttttgattactctgatgcaaatatgcataaatcattaaggcttaaattttattgaattc

SEQ ID NO: 205820 - DNA, 1000 bp, Homo Sapiens
gaagtcaagaacaaactgttggctccagtgcacggtttatggtctttcactgagcaaggacgatccgtgaaccagtgcaggtggagatggaaaccactgggcaggaggcgagggagcggtctactcgccaagcgtggttcagccactcccgcttaaacttggcaggagaggagacggaggtctctaggtggtccagaaagccggcctagaagtttgtgtcccgatccctctactaaccggcctgtctgtaggcatcttcctttgagacgaggaacgcggaacgtctgccaataaggacatattggatcctgcagagggagagggtaggcaggtggggactgagctccgcagagaagcataggagatggaacgaccagaggattctctttccctctggagcctcaatctctccccacaatttccctgtctgaacgctctgcgccaccccctgtccccagggtcaagggtaggaccggaggacgctatgccccgcatcgtggagcagccgccagatctgctggtctcccgaggcgagcccgccacgttgccctgccgcgctgaaggccgaccccgacccaacattgagtggtacaagaacggggcgcgtgtggccactgtgcgggaggatccgcgtgcgcaccgcctgctgctgcccagcggcgccctcttcttcccgcgcatcgtgcacgggcgccgcgcgcggccggacgaaggtgtctacacttgcgtggctcgcaactacctgggggcagcagcgagcagaaacgcctcgctggaagtggcaggtgagagtcagttgaccgtcagctggttgcttccagagcctggggtaggcgggagggcactgggcaatcagacccagaaccagccccaaaggacttcagcccactcagcatccttctttgggaccgcgacctttgatctctaatggccacaccacggccagagaaggaagtggatctgactccaggctgatattttctcacctgggaacgaattc

SEQ ID NO: 205821 - DNA, 1000 bp, Homo Sapiens
tttgtcagcaaaatgttctagtttcaaaactatgaatggtagactacctctgtcagactaatgcttttctttttacctcagatactgtaagatacgagttaccttcaaattaaaggtaatacctataccaaatagacttagatgatagcagctctgagcaacttgggacattctgaatacacaggacaattctagcccctggatttgaacaggtgaactctgcttacatcagaaggccctgaggaggacaggtagaaacagagcaaaggcccaggaagattttttccttcctttccttctctttccaccctctctccttctctctctcccttccttcctccccaaattatttgtaaagtatcttctaagtgtcagagtctgtttaggaaaagatatggtggagaaatggaatctaggtatcacctccaaaacctgtgccctccagatcacccaggaagttgacagaggctttccttcagaggcctacactaaagctctctcaaaatgtttagttggcagaatcatagtccctactttccaacaataagtttgttagaattgactcttgagtaagagcttagcccaagactagatcaggaccttacaatgagaagactgtatttttaagttgaggctatcaataaatagacagaaacaaaattttgcctttggtaccttctatcttctttttacatgtctaagtttgcttgtgttgttcctggccactcagtttccaactgacaggagtatagtgtccacatagatgttgtttactcctgcttcccctagtgcctggcatagggctggcacttaatagctaattaaatagttgttcaatgaataaatgagtgctttcccttcaaatgcccctattctaaatttcctttcactttcttgttgctcaactaactcacctcccaacccaaactccaagcagttttatctcaaatccttgttctgtcattttataataaaaaaccttgggcaaattactgaattc

SEQ ID NO: 205822 - DNA, 1000 bp, Homo Sapiens
ctccactccacttatctctttcttacccatcctaagtcttggctcagctttacttcccttacaaagccctctgtacctgctccaacccacctgccttacttttccaaaagttttccacctagtaaccagccccacacaatttaatatcaacttactcacctttttttaaaaaaatggattttaaatttgggctctctaatgagcttgcaaactccttggttttataataagccctttaaagacaggttcataccaaggactcggctcaaggctcactttgtgcaagaagcttttcccaacccttccccttatgattcacccctgcctgatgacaccctccctcaagcctcctctcctcatacaggtttttttcagagcacctagaactctttatattactttttgtttatataccttttcccactagctaagcaaaaactctaaagcaggaaccatatcttaattacaatctggtccaggttcaattttgtcataccacttacagatttttttaaaatttgtaaaccattgagaacatttctatttaccttttcagactacaaagatcgtaaatgatggacttttcattgtgaccactaagagtcatcaaaccaagactcaagacaaataggaggtctaaaaatctctgtctcaggaagttctttgaaataggaatccgagaacaaacagaagtacatcagctgttccaggcaatagactgatacaacataaacataaaaatcactaatgaaaatatcactagctaacatatgttaggaaaagagacaagagctttgtttctctttcagcttttcactcacatgccttgaaaagctgaaataactgaaagacagaaagaattctagagtacaatactgggagtacacaatattaacatcaagaataagaattatttttcaaactgacttaggcctatgtttattaaatgtcttattatttttagtgtggggtgaatatggagtcaactagaaaagaattc

SEQ ID NO: 205823 - DNA, 1000 bp, Homo Sapiens
cagctgggcagaatgagccctggggcaggagggacattcaggatccagggctgcaggagtaggaccttgtagctcctcaatgtgttgctgcaccactaagtttctcttggaagtctttggatcattctagggacctgcaggacacagatggcattccttggctgggatttttgaagcaactttttaatgcagggactatttgcaaaggtgttggcagagacacaacactaggagccattatcactctgaggcctggggagatggtggtcttggaccctggttagaagttggagctgtttaaaggctgcctgacaggaactgtggccacagaggaaggcagacatggtgggatggagtgggtgggggaataaataccatgacctttccctcctgtagtcttcagcctcctgccagttgcccattggctggaagctagagggtaagggaccctgggaatgcactcatagagatcagccccacagtagaggagaggagaatggagaatggatcaggggccaaggggccaagggcaagcagagaataaccggcaaggtattcttgagtcctctctctcccagatgtctgactttccttcctctccagccaagttcctgagggaatcagatggactgactcagttaactaccattgtccctggggagaggcaggaggtgctgcttataggcttgtgctggtagcttgtctgctgcatgtggggctccccatctgtctagaccatcttgccacacaactcaccctcaccgggaaaactctgctgtctgcctcttagaagaagcaaggggtgcagtaggacccacagactcaaatactgctattgaagtgctttaattgagcagggtcctttctgtcccttatatattttgactccaagcttggtccttctctggaactatccccagtaatctcatcatattttgggctatgattatataatcaatatgatctcacttgtttttttttttttatctttcaggaattc

SEQ ID NO: 205824 - DNA, 1000 bp, Homo Sapiens
gtggtcaccaggttggagtggacaggattgggtttggcagtgacggtgtgtagaagccagctggcaaagctggagcagagattccccaggcaggaggggtgctgggggtctgcagcagagcagggaagtgggagcagagaatgaggaaggtcagaagattaccccagtctttttttttttttttttttttttgagatggagtcttgctctgtcacctaggctggagtgcagtggtgcaatcatggctaactgcaacctctgcctcctgggttcaagcaattctcctgcctcagcctcccgaatagctgggattacagccaccaccacgcccagctaatttttgtatttttagtagagacagggtttcactgtgttggccaggctggtctcgaactcctgactttgtgattcacccgccttggcctcccaaagtgctgggattacaggtgtgagccaccgcgcctggcctccccccaaatttctaccagaaaaattcttaccttcctgaaaagttgaaagaccagtaccacaaacacattttcttctacctagagtcaacaatcattgatatctccagctttgctctctcaagacacagcaaagtgggtggattttctttttctgtaccatttgaaagtcagtttcagacatggtgatgcttcaccctgagctgcatctcctgagaatgaaggcatttttctcctgaatcgcagaaccagtatcgcacctcggaaacacaacaggagtgacgtctgctgcccagtttgtgtccagatggatggcctttcatggttgggtttttgttttgagagccggggtcccatcaagatgccagcgtcgcatttggttgtctctttagtctccaagaaagactctggaggtggaatgtgtagggcttgatgagtcactgggtttcaggggtggagggcagggaggatccgggcgatgaccgggttctggtttgggcagccagtggtgcaatccttggcatgaggaattc

SEQ ID NO: 205825 - DNA, 1000 bp, Homo Sapiens
gacccagcccagaatcacaatcacccaagaccataaagaacctgtggccatgattttgacaatgagaaccatggttcatgaaactcagggcttccatttttggcttcttgacactcaaggtagtttttcatcaaaaagcccttcaaaagagagactggtttccttattaggaaggaaaatctatactctgccaactccagaaattgagtcttagaaggaactagttcgctccctctctccatcgtctccagcctcagacatttaacacagtggcctttctctttctccttggggtttctacgtgtccacagggggccagctgtgttccttaaggcattctgtggtaaatgttagattactgcctttctcctattatgggaatattttccttccaagaatataacattacctagtaataaggacaagaacgagaaatagaagggggaaggagaagtaggaggaggaaaaggaggaggaggaaaaggaggaggaggaagaagagaagaagggggctttatttgtattttttaaatgttctgcttggagataattacagataagcacacaattttaagaacttatgcagagataccctcacccagtttcccccaaaggtaacatcttatgtcactatagcacaacattacaaccaggaaatcagtgatacaatccatagtccttacacaggtgccgtcagttttacatgcactcatttgtgtgtgtgtgtgcatctgtgtgtgcatttaatttgatggaattttgtcacatgcattgattcatgtggccaccaccacagttaagatacagaatagtttcatcacaaggttcctttgcactaaccttttacagctacacccacctgcctctcccccaatctcacctctgacaaccactaatctgttctccatctctataattttgtcattttaagaatgcaatataaatggagtcatacagtatgtaaccttttatgattggctttgttcactcaatagaattc

SEQ ID NO: 205826 - DNA, 1000 bp, Homo Sapiens
atcaaactcttgactactttttttttttttttttaatcatagcactgtacgatgctttgggaaagaccacagaaaagagtttatgggccaggcgtggtgactcatgcctgtaatcccaatactttgggaggccgaggcagatggatcatgaggtcaggagttcgagaccatccttgccaacatggtgaaaacccgtctctactaaaaatacaaaaattagccaggcatggtggcaggcacctgtagtaccagctactcaggaggctgaggcaggagaatcgcttgaaactgggaggcagaggttgcagtgagctgagattgtgccactgtactccagcctaggcaacaagagcaaaactccgtctcaaaaaaaaaaaaagaaaaaaaaaagaaaaaaaaagagtttatggccattagaaaagagtggcaaagagaagagaaagctgagattaatcttgaaaaaccacaggtaaaccccctctgtcattcaagttcaatggtccctttgtgattgattgcgcctaccctacaaaggcttggaggatttccacagcatcacaaggcataagttttggaatcagctttactaggaaaatttctaaagcaagagtcagcaacagaagaaggttcaagtacttcccatgctcacaaggcacaccagggcctcgtggtgtgggtctgagttcagctggagagagtcctgccccctgttgttctttcttttagggaaagcctgaaagcaaccttggccaaggggtgaagatctgatcagaccacattgcagccaggcaggctggcttggctgccagcggtttgggagctgagtggaagcaccagctccctgcacctggaggccctaaggtctgtgggatgttgccctgggggaggaaatctctggttttaagggaagctaagctgggatgcaacctctttgctggaagagagaggagctttcagttgcagctggtttgtcaaaacagagccagcccagagagagctc

SEQ ID NO: 205827 - DNA, 1000 bp, Homo Sapiens
ttaaagggtccttatttttcagagagacatacttagatatttatgaatgaaatgataatgggggaatcagaaggcatatgaattaaataagtttgatgataagttgagaattattgaatgtggatgatgggtacagtggagttcattactttatttagttttgcatatgtttaagtttttctaaaataaaaaagttttttaagtgttaatatgaggcaataaatactagatgccaaattaatgacatagccatagccagtggatccagattagaacaatcagtacaagctctcagaccaagagagcatcagcatggaaaagtgtgagcctgggatgctgaccacatacacgcaggcaagagccactcattctggatgattttaagagaatatcgctctcctggataagagttcccccttccttctgcccagaggtagacaatgttggggagaatggcttaaacctcatttggttcagcaggcatgcattgctggttaaaccaggaatttcttggatctgactatccagcagaaccacaaaaggagcaaacgtctttaaatagactaagaaataaggtaaaaactacatctcatgtaagtctttttgcagaaatcaattaaaacaggtcgttgtctgaaccaacactgaaatgcttattattaggtttgttctagagcttgttattcaaatggttggtgccttgttattaaaaaaaaattgtgttggtctaatgtttgcaggcaggatgtgcaggcccagcagggacacacattgcttagccatcagagctttcacacattaggagaggtggggaagcaagctgaggaaagggaggtggaaaggtaagaacaagtaggtgtttggagcaaaataggaataaggagctaccgcatccaggattttgaactacatctgagacctagaaaaaatgggatgaaggcagaggatccagacacctggcacatctataggagcaaggggcaggtgtgcattagagctc

SEQ ID NO: 205828 - DNA, 1000 bp, Homo Sapiens
gcctggctaattttttttatttcttgtagaaacagagtctcactgtgttgcccaggcttattttttggatttttgataatagccatgcttatgttgtgaagtagcatttcataatagttttgatttgcattttcccagtgtttagtgatgtgggacatcttttcatgtgcttatgggtcatttgcatatcttctatcactgtccttttttaccccgatatttttttatttctgctcattttctcatttatctatttttcattttctcttttgtttgaattgagattcagcttgtcagatttcataaggagcttgattgaaattgtattggatttatatattaattttgggattattggcatctttacagacttgagtctttctattctggaatactgaatgcctctccagtgggtttttttctttttctttttttttctgacttttcagtaaaactctataaagattttgcacattttaggtttatgtgtgaatataaaatattttgcattactcttttcctgttagctgtcctaatagattgttgttaatggtggatgagatgagtggtttattttggacttgtccatgttgaaaaacagattcttgaaatatacctcctgcattattttcttctaccatcatccacactagcttggattattacttcttttttttgtttgtttttttgagatggagtttcgctcttattgcccaggctggagtgcaatggcacaatcttggctcactgcaacctccgactcccaggttcaagcgattctcctgcctcagcctcctgagtagctgggattacaggcatgcaccaccaccccggctaattttgtatttttagtagagacagggtttctccatgttggtcaggctggccttgaactcccgacctcggcctcccaaagtgctgggattacaggtgtgagccactgctcccggcaggattattacttcttatgagtttagagtcttctgtaaaaccagagctc

SEQ ID NO: 205829 - DNA, 1000 bp, Homo Sapiens
atcactgtactgcagcctgggcaacaaagcgagactctgtctcttaacagcttttgagtccctgtgtggttcaaactagctaggtgctcaccaaacctattttgttttcttcctgggcaaacaggcctttctcagttgttactgggtcacaactaaattatggggtcacaaactaaattataatcaatagattgaggacagaagtgatataagccactttcagacctggcccatggaatccttccatgtgagatccttccatctccttctccatctgcaggttaaaaggagaaagctctaagaacagaggagtcacaagatggaaggagcctgggtgcccgaaacattaaaggcagcttagccaggaataaccatgttgaactgctgtacacacaagaaataaacttcatttttattgagccactgaaatttgggggctggtagggaagttacctgctctaaaacctcctggttccggctgtacctgttcttttcatggttacataaaatacctcagtatccttcccacacattctctctttaccccaattagagttgggttgcttccgtccataacttaaagagttctaacacagccaggaagaatgaagagctatcatttgaagcggcaagaaggtggaagtaagcaacgatccctaagtgtcttgggaacacctagaaaatttgtcagaacagggtaataattccaacaaactgatgacagtccacgaaagacccttttcactttccaagggcttctagctttaaactcataaagcacttacagttaaaaaaaaaaaacaaaaaccctcttccccaccctcatttcattctcagaagcatgtatgaagttgtaatagccctgacgtatggtttacctactaagataccctcaggagttctcatctagcaagtgagatacaccttatttatcatacatagccagctctgctgtcccagaatctattggaaaatgaatcacacatagctctaagaattc

SEQ ID NO: 205830 - DNA, 1000 bp, Homo Sapiens
taaaataataattttgtcaataaatatttattaagtgtgctagaagacagacaaatttttgtgacagagacacgcaattaattgttaagtattattggctacttaataaatatttattgacaaaattatcattttatagatgaagcattgaactaaattcgtactgaaccaaggatgccccttggaagttattatttaaaataaatccatgaacagggtctgttaccctgtaatttgtttctgccaatcctatgactatatactactgtgctgaggcaaaattatctgaagatcatagccagagttaatgttagttgaacacttactatgtgttggactcctttctaagcactttacatgttttaacacacacagtctttgcaagagtggcttgttactattattattctcattttacagagagggaaatgaggcacagagaaattaagtaacatgcataggggcacccagctaatacataaatgatagaaatggatttcaaatgtaattagtctggtttgagagcctagactctgaattatagactcctagtgtgtaatgtttcctgaaatgaattttaataatataatatccatacagacacacctttttgttggtagtaagggagcaaactctctaattctttcttctctactttgaactgatctcaatcactcacatcagcagcaccaccaccaatattaaaagaaacctactaagctagcctgttaagtgtaggatacagtggtaggtacaggaacaagaggttcatgacatagcctttgccttcaaagagcttaaggctgagcatggtggctcatgcctgtaatcccagcaatttgggaggccgaggcaggcggatcacctgaggtcaggagtttgagacaagcctggccaacatggtgaaatcctgtctctactaaaaatacaaattattagctgggcgtggtggcgggtgcctgtaatcacagctactggggaggctgaggcaggagaattc

SEQ ID NO: 205831 - DNA, 1000 bp, Homo Sapiens
catatgtatacatgtgccatgttggtgtgctgcacccattaactcgtcatttaacattaggtatgtctcctaatgctatccctccccgcttccccccaccccacaacagtccccagagtgtgatgttccccagaattcttaatgccaaaaaacgtttgtcagagggcaaactgaaacctggcagtgacaagagggccacgtctcatgctccctcatggatgccacgttgccgtatgtcctgccactgctgaacccatacagggaggcgcttcatttatgagtgaggtgaaactgcgttgagagtggcggaagtgtgctgtgcagtacatctgtgtgaaaggattccgtgtttttctaggctgagatgaaaagtaggaaagaactacagtgaaagagattagtcaaatgcagaagcagtgtactagaagctgtctaaggaaagctggttttagaactagccctactggtcctacagctgatatagtacctgtgctgcatatatttagtgttcttgtaaaggtaaatgagggaataagtatgagcaaaaaaattttaaagataaaaacgtttacacaaatgaatgatggcattatataagtattgcaataaagaactccttttcttctctctctcttttttgttttttggtctggcctctagttagagttccaatagtttacattcagtgctgttaattcccacaatttcaaagatctgcatttcctgtaaatacctaattgtattttgaaattgaaatgatttttggataatctgccatttggactatctgcatcatttttatcttaaatgatggaaacctgaatatagatgatgataacagtgatataattgtgacatatttatatggttcaaagcacttctgttgagaggaataaacaaaacaacatacataaatgttagagacatttttgtgcacaatattttcaggaaacttgtatctatgtacataataattacatatttgctttccttagaattc

SEQ ID NO: 205832 - DNA, 1000 bp, Homo Sapiens
ctctacaaatgtaatgaatgtgacaaggttttcggtcacaattcacaacttgcaagacattggagaattcacactggagaagacccttacaagtgtaatgagtgtggcaaagccttcagtgtgcagtcagcacttaccatcaggtggtccatactggagagaagccttccaaatgaaatgagtgtggcaaggtcttcatgcacaattcacttctcccacaacatccaataattcgttcttgggagaatccttacaaatgcaatgattatggcaaacccttcatcgtgagttcaagcattaattgacatcagagagtccatactaaagaaaaatcatagaaccgtaatgtatgtaggagaggctttatccacatttcacactcacaagacatcgaaataagcatttttgatgaaaccacagaaatgtaatgtgcctgctgaggctgtcgcccaaagatcgaaactgtagaccatcagaggagtcagatgaggaatgactcagtctttagttctccaagattaactttcgacatttcatactgcagaacaattacaagtcaaaatatgttaaaactcatgacatgatatctatcaaaggtaccaggatgttgggcagtggccagttaacttcaggttatgaaatattttattcaattatttgaagattcttgaaaaggctactttactatttatgactttcaacttgaactttgaaataaaagggacgaaaatccagaatatacaagcaactcaaacaactcaacagcaaagaaaacccaaataaaatgatttaaattgggcaaggaatctgagtagacatctctaaaaagaagacatacagatggccaacaagtttgtggaaaaatgctcaacatcactatcatcagggaaatgcaaattaaaaaccacaggaagatatcatctctctccagttagaatggctatcatcaaaaatacaaaaaataacaagtgctggcaagggtgaagagaaaagggaattc

SEQ ID NO: 205833 - DNA, 1000 bp, Homo Sapiens
tgtgaccttgagcaattaatgttctgttcaaaatgaagacgataatacctctaccataggattattgcgagattaagtaagctaatagagaggctgggacacttctctacgtcttcagataaatctccttagcctcttctcccattggagaggtgtcccacagcatctttagaatgaggaaaagaggtttagattcttcaattactgtgtaagggttatgctaaacgggaaacttaactaacggataatcattccataggtctgcaaacccacctcttctctcagttctaacgggtaatcattctataggttggcaaacccacctcttctctcagttccttgacaaaccgcgacgcctgttaccagggtaaccagcctgggtacaacatctaattgggtccggggaacttcagggagaaaagtctcttcatatctagttccggaatgtcccccttctggtgccaggcttgcttttcagttgggcctgacccacttctcttccaggaaagcgcccgccttccttctgcacccgtcaacctctggagtgtcctgaaaaccctcccttgtgggagtctctgggctgcctgttggtgggacgatttctcaggagcacgacttccggcctgaaaaggaagtctcctcctttttctcccaaaccacttcttcccccctaccccccgccacgcgaggctgcggcgcacggtatgggtgtgtttgtgtgtatttgtgtggggagggcgtttggagggaaggttaccgggagctccgaggccgctggggaacagggatcccggtgacaaagatggggatatttcctctgtcttccacttggaaacctcaacccccgcttcaggctccctagatactttctggggcccaaccgaaggccgtagccatccaaagcgttcccagcctttctggggagtgaaacttacccccggggttcgtcctagaggagcgtgagcggggaatgcccaggtcaaccgggctgtccgaattc

SEQ ID NO: 205834 - DNA, 1000 bp, Homo Sapiens
aactgcatttgcaaaatgtctgaaaattatgggagagatgtttctgcttttagacttggtacgtatgtggtcaggttttcagaggttttctattcaccatctgtgacgggccttgtctcctcctgcaactggtggcagatgtagccagagattttgtgagcttctcaacagcatctttttcctgctcttcttcccttcctctttgtttggtttttattcacatgaaaatttaaagacccataaggaaattcaaagtgaaaatctatgcccaaataagtcaggatctcaagatgaaaatataagttctggaaatggaagtttcctctgcccccgtggtggtatcatagccagcagcctcgttctgtgcttttgaaggtttaatggcctgcatgtgaaggtaggggcgcactatatatatagtaccaggcgtgtgggcgcactggcacggatctgaaaaagcgtaagtttggcatttctaggtttattttaaacttacaacctttaacgccagacacagagcttctttcccacttaatgtaactatacattgattgcttttaattagtgttggatcttttttggtgttttgcagcttgggatatataaaaagtctgacttaaattaaaaaaaaaaaaaaagctaactcctgacattctcacgagtcttgcaaaaaccagcacgggagccttagaaattctaacctcctcgtcctctttatttttatcttgagtcaggtgggccaagaagcaagggaagagtccaatataacatacttaatggatggaggtaatttccttggactgttttggcagaaattaagcatctgtatttagataaaggtagtggtgggttggattttcatagcataagcatagttgctgaagatcaataatatcaaataatgggttcttggtgaggggaaaaggaaatgggggaggggtcttttcactcaacagtttggaaatgctaatgattatttgtggttttcagcccagaattc

SEQ ID NO: 205835 - DNA, 1000 bp, Homo Sapiens
gaggtgggagaatcgcttgaactctggaagcagaggttgcagtgagccgagatagcgccactgtgctccatcctgggcaacagggtgagacttcatatcaaaaaaaataaaataaagtaaaagttaaaaaaaagaaaatctgaatagtcaaatattgactaaggaaattgaatccattactaaaattccacacaaagaaaatcccaagactaggtggtttcacctgtaaattctgccaaatatttaatgaagaaataataccaatactgcacaaactcttacaagaggaggcagataaagaagaaatacttcctaactcttttggcatggccagcataacctgccaaagacctgataaaaaaggaaaattaaatcaagttctttcttctttttaaatagaaatgtaaaaatccttaacaaaatattagcaaactgaaaccagtaaaaaatttaaaaggtaatatatctgaactaagtgagatttatttcacagatgcaagagtaatttaacattcaaaaattgatcaatatatctcatcaaaataatacacataaagataaaaatcatatgagcatctcaaagtatgcagaaaaaatatttttaaaaattgaatattcattcatatcaaacacacttagcaagctaggaataaaggagaacttctttaatgtgaaaaagaattcctaccaataaaaaaaaaggaaaaaaacctacaatgaacatcctgctcaataataacactgaaaactttccgcctgagagaaggaacaagacagagatacccattatcactactcatattcaatattatactggatggcctaaccagtgtaataaggcaagaaaataaataaaaggcataacgatagaaagaaagaaagaaagaaagaaagaaagaaagaaagaaagaaagctgtgatttttcataaatgatatggttgtatagatttttaaaaatctgaattaatctacaaactattagaatcaataaatgaattc

SEQ ID NO: 205836 - DNA, 1000 bp, Homo Sapiens
tcctcattcctcccaaatttccaggcataagcacccatagatgaacaaagagatacactaaatacatatatcaagtatataaaagatactgtggaactgactcaggttatctattatatccaccaaaacatggaaacaaagctcaaggacaatgtcacatgaccccataggggcactcacactcatcgaaacaggtctaagacaacactgaagctgtcaagtctggacctgggatctggcagagacggtacatctgtcacccactgctgcctggcacacaaggggatacacacatatacctctacctgaagcctcaccaggaagtcacttgctcattcctgctgtcctatctgacctgccctgagctcaccctctcctagcactgtagcagcagcagtgagagtacaagcagtaagccttcctttcacccaaaccagaaatccaggccctctctctccctatggcaaagctagtgtttcccacacctaagaatcctctactgtctcactgtagatctcctcttctatgtcacctcaaaaagccaagtagccatttctcccacccaggcctttcatctgattccaatctccatacaacctagtgtatagctgctgaagacaccaattacaggatggtcaaaaagaggatcttcagataagggaggagtaagtagatatataaaagagatggtctgaagataatgtaatagattgagtaagaaaataatgcaaataaattgtttaatggagaaaataaaatcgaagatacaaaaaattggtagaaacgtcaaatttatattcagaagattaaactttaattagagcctttcttcattcctacaatattaaggcaaaatatctggtcagactgagattcctttctaaaaggaaatgtatgaaaatcatggatatatgggctttcaataatctgtttttatctactcaccatggtccacgagccaagccatacataaagaattcagcttttcatcaaagaattc

SEQ ID NO: 205837 - DNA, 1000 bp, Homo Sapiens
agggcacggcagtttttcacacttcttttgccagcaagatagcactttaatttgagcctgatttttttctcaccctggaggggagatggggttactcgttggggctctggggcctccattctgcctgcttctttggtgggtattagcatgagaaaacacaagagtagtttgacttcctatatttttccaatgttgcctgagaatctggggctcaaattgcagcatcagggagtaaaattatatgccagggtctcaaagcctttgtccatcactttctctcatccttattctttattaaaagtcttgctaattaaaaaaaaatctaagttcaaaagttcagataaactcccttaagtctgtgacctgattttcttcagcttgaatcgtgttaggtcctggatatggagtttttagttcttctttatgattttgttagaggcatttgaaccagagcaacttcattgtggatagcggctgggtaaaatgaggctgagacttcctgggctgcattcctaggaggttaggcattcttagtcacaggatgagataggaggtcagcacaagatacaggtcataaagaccttgatgataaagtgggttgcagtaatgaaagccagccaagacccaaaaccaagatggccatgagagagacctctggccatcttcactgctcattatacgctaattataatgcattagcatgctaaaagacactcccaccaacgccatgacagtttatagatgccatggtaacatccggaagttaccctatgtggtctaaaaaggggaggaaccctcagcttcaggaattgctcacccctttcccagaaaactcgtgaataatccactccttgtttagcatataatcaagaaataactataagtatccttatagcttaagcttaagctgctgctctgcttatggagtagccactgttttattcctttattttcttaataaacttgcttttgctttgcactgtggacttgccccgaattc

SEQ ID NO: 205838 - DNA, 1000 bp, Homo Sapiens
gactcccacacaagtatagtaggagacttcaataccacactaacagtattagacagatgatcaaggcagcaaattaatgatattcaggacccaaactcagtactggattaaatggtcctgatagactctactcagaaacagcagaatatacattcttctcatcgccacatggcacatactctaaaattggtcacataatcggaaggaaaattctcctcagctaatgcaaaggaactgaaatcataaccaccactctttcagaccacatggcaataaaattagatatcaagactaagaaaatcactcaaaaccaataaagtacatggaaattgaataacctgctcttgagagacttctgggtaaataataaagttagggcagaaatcaagaagttaatcagaacaaagatacaacatactagagtctctgggaaacaactaaggcagtgttaagagggaaatttagtgcccacatcaaaaagatagaaagacctcaagttaacaacctaacatcacgactaaaagaagtagagaaccaagaccaaaccaaccacaaaggtattaatagcagaagacaagaaataaccaaatcagaactaaactgaaacagattgagacatgaacttcaattcaaaagatcaataaatacagaaggtggttttttgaaaaaactaataaaaatagatagaacactatctaggctaataaagaagaaaagagagaatattaagaaaaacacaatcagaaacaacaagggggatattactactgacacagcaagaatagaaataactatcagataatatgaacatctctatgcacataaattagacaatctagaagaaatagatcaattcctggagacatacacccttgcaaaattgaaccagaaagaaattgaatccctgaacagaccaataatgagctttgacactgaggcagtaataaatagcctaccaaccaaaaaaagcccaggatcagatgaattcacagctgaattc

SEQ ID NO: 205839 - DNA, 1000 bp, Homo Sapiens
cagttctgatgcttacatctggaatctgaggcatcctctgactccactcaaagagggtgagggccttcttaagatacaaatggcggaggattgctgccagagaagtctggtcagagccacagggtctgcctccagccaaacgggagcttttggtgagaaggtgttggacaggggattggcgccccctttgggttggcctccatcctctttttttttccccttaacactatccgcctggaaatgggctgcctctctttttttttttttttttttttgagacatagtctcgatctgtcccccaggctggagtgcagtggcgtgatcttgggcaagcttttgtgttctgtgtcatttttttttttttttttgagatggagtctcactctgtcgcccaggctggagtgcagtggcgtgatctcggcttactgcaagctccgcctcccgggttcgtgccattctcctgcctcagcctccagagtagctgggactacaggcacccgccacaacgcctggctaattttttgtattttttagtagagacggggtttcaccgtgttagccaggacagtctcaatctcctcttgatctgacctcttgatctgcccaccttggcctcccaaagtgctggaattacttgcgtgagccactgcgcccgggcgcctctttttttttgaggtgaagtttcgctcttcttgcttaggctggagagcaatggtggatctcggctcactgcaacttttgccttccaggttcaaacgattctcctgcctcaacctccgaagtagctgggattacaggcatgtgccaccacgcccagctaatgttgtatttttagaacagacgtagtttctccatgttggtcaggctggtctcaaactctggacctcaggtgatccgccagccttggcctcccaaagtgctgggattacaggtgtgagccaccgctcctggctgggctgcctctttaataccatcatttgagttctctaaacgtgaattc

SEQ ID NO: 205840 - DNA, 1000 bp, Homo Sapiens
tgtaattttttatgcttatgtttgtctagactttctgttaagtcgctatcaacagctggactcacttgtgcacttggacacaactgagtttgtcctgagcaattgtgatcgaattgacctcgaggtgcccaatctataatagttccgaattcattgttttgtaatatcaccgcactattggccacacattcttcccaaactaaaacttctgtattttttgattctttgggaatttccttggggcaaggttttcctttaggtctaaattttaatgatctttgataagaaaagtcctgtaaataatttactcgtggcctgagtgacatcccgcttaccatgtgataagtgaatctaccgttaggactgacagtaggtacttctaccaaccaattttggactgcatgtattaaacatcctggtgctctccctaggcaaataggataacgatacccagtggaaatatttatcattatcccttcttcctcaggtttgatagggcagcgatcatctgtggggccaggtacccgtacactatcattaacatatacttctataggattatccatccatgtgactggtgttaccatctctgtggaggcccttttctttgcatctccgatgggttcattgtagaacttcaaatgtctagtgggtatccaaacaggaagctgattttctcctggtgaaacacaagcaaacctctcccccacgttatcaccttccctatttcccatgtcttatttttattatctttccaccaaattagttttccttcatgtgggctgttctttttaccagtaagatgttgttctgcagaagtagtagtctgatttctataaatgtttaaaaaaatttaaagtatagagtgctagattaagttgcatctgaggagtggtacactccttactgtctcccccttctttttgtttaactaattgagttttgagtgttctattagttctttcaactatggcctgtccttgggaattataaggaattc

SEQ ID NO: 205841 - DNA, 1000 bp, Homo Sapiens
caggcgggcagatcacccgagtcaggaattcgagaccagcctggccaacatggtgaaaccttgtctctactcaaaatataaaaattagctgggcatggtggcgggcgtctgtaatccgggaggctgaggcaggagaattgcttgaacctgggaggcagaggttgcagtgagccgagatcacgctactgctccccagcctgggtgacagagcaagactccgtcacaaacaaacaaacaaactagataaatctagattcaaaaaaaaaaaaaatctaagagaaaactgagcttaaaaaaagtcacatcatgataaagaactgtacattttctgaaaatgttttataaattcctgaatttttaaactcaaaaactaaaatttaaaaagggaaaaacaattgtatatgatcacagaaaagtaacaactagggattccaataagttacagtatatctgcagtaaatttactaccacattttagttaaactatcattcattccactaatatctatgaacataaataggatgtttgtttcctctggcaataaatgaaagaggcacttccagttaaagtgataatgacctgtcttaaggacgatgagaactaacaaccgagacatagttcaggtctgtgtaaggaaacatagcctgaaaggtgatcctgttcattcccagaactggaattgaactgcaaagaagctgagcagagagggtgagaaaagcagcctggcttcctaggggatgagactaccagatgggcaaagttgacggggcactgtagacagtgtccaggcttccttacgcttttcccataggtcttgcccattccattccgtttccacagactcaatccacaataacccctgttagttacaaaaaaaaaaaaaaagcatgaatcacagccacaagagcatcaggctagactgatattttccctctgttcctgctcaaaactccccaagcctctcatcctggcatccttgctctccagggagcagaattc

SEQ ID NO: 205842 - DNA, 1000 bp, Homo Sapiens
ctggggagtccaaggggttccaggacgggaaggggagtttgagaccagcctgggcaacctggccagacccggtctctattaaaaatacgcaaaacacacacaccacacaccccaccccacacagcccacacaccccacacggccagcagccctttctgtcaccgactccgttcccctggccagtgagctctccgtccccttttcctcccttttcgcacacgtgcctttcctgcctgctcccacctggtgcctgaggcgtctctgcgcctcagcactggctgttcggtttgcactacggagggcagtgtaggtttgaaaaggaaagtttcattatatagaacactaccaaggcagggcgcggtggctcacgcctgcaatcccagcactttgggagaccgaggcgggtggatcacttggggacagtagttcaagaccagcctggccaacatggtgaaaccctgtctctactaaaaatacaaaaattagctgggagtggtgacacttgcctgtagtcccagctacttgggaggctgaggcaggagaatcgcttgaacccaggaggcagaggttgcagtgagccgagatccggccactgcactccagcctgggagacagagtgaggcaagactccgtctcaaaaaaaataataataataattaataaaaaaataaaaataattaaaagaaaaagaaaaagcactacagaagagtgcagaggggcgcctcagctagaggacttagggattttccttaggggcatttatggaccttaaagagggagcttaagggtaacttggaccacactagccacataggtcatgataaatgattacatttgtagacattttggtgcctaatgccagtcagcaagggttgttgcacaatgagtttggacaggcatgcatttgcagagatgtatagaaattctaattacttggaaattttgttggaccggagctaggaaccaaatggtatagggaagtctcattacttctgaattc

SEQ ID NO: 205843 - DNA, 1000 bp, Homo Sapiens
acccttttctcctttgggttccaggacctcactgcaacttaactacttcactgaccatttcttctcatttttcattcactgctctttgcctagacccatcccttaattatcacatttagcagagttctgatctcaacccttttctctcactcctttttggggtcatctcacttaacactatggcttcaaataaccatctatttgttaataattttcatatctatatttgataaatttcataatattgtacaccaaaaaaaatgagtgtatgtacaaacggaaatgaataaagtctctagcttagttaataacattgtactaatgtcactttcctggatttgataatgtactatggttatgtggaatcttatcactggggaaagtaaggtgaatagtagattggaactctctgctctgttttggcaacttcctttcttgttttttcatttgtttgtttgagacagtctcactccgtcacccaggctggagtgcagtggcgcgatctctgctcattacaatctccacctcccagtttcgagggattctcgtgcctcagccacccaaatagctgggattacaggcatgcgccaccacacccaactaatttgtgtactttttgtagagacagggtttcaccgtgttggccaggctggtctcaaactcttgacctcaagtgatccatttgcctcagcttcccaaaatgttgggattacaggggtgagccaccacacccagcctcttttcttgttcttatgagtcttaaaaagttaaaagggtaagcatgacatgactttatatgaaaacaaaatcaatcttttttttgtagcttatttactgaatatcctttttccatttttataatgtgataattattcttaccttaaatagtaattatttacctcactttgtaggataaacatatttttagcacattagtgatacagctaactaaatttcgtttctgtatattactcaaaataatttttgagacattgaattc

SEQ ID NO: 205844 - DNA, 1000 bp, Homo Sapiens
accagagagaaataagtcctgaggcacagcatctagttgcttttgaaaacactgtggaagacatagcactattttaaagtggaagtcctccaccatttcgtactctctctacatctataggatcggagctcagtcctcaccttccttccctccaacatccactgctaggcaccacagactacagacagccttcttgcagagcagcaggaactcagcagaggagtaagcattgatattctacaactagtagtgaaaaatttcataacatgtgacaaagggttgatgaggacttgcttgtttctgcaagaatgcaaaatataaatcagaaggtaacacatagatttgtatgggaaagcccctttcctactgccataggctggttagtctcaactttgtgcggtcatagggatctaagtagctatatttatgacatgatgcctgatttctccctataccacatgaagccattctctaaagggctgcttaaaacattattggtatctagccattatttgattcagagaaaggcagggaagtaagtgtaagtaatgtcctaccgggcagacaaaatgatctcttcacaggctgaactgaaagcattatgaaatcattcccgaaactgctccctttccttgagaattatctagagaaatacaccatggatgaaagcaagacacaaaagagcccataatataggttcatgttatacccaaagtcgcaaatgctttatgacaagtatgaacaagagcaatgggaaaactgagggtccatttatatctttcaagactcagctcaggcatcatttccactgggaagcctcctctaaactcccaaaagtgcttattctcctttgaactttcatggtacgtgacatatactctatatttatgtggtttttttaagtttacttacctgtttcctatttgtgttctacctgcacctagcacagtgcttgatatatagtctgcattggataaatatttgttgaatgaatgaattc

SEQ ID NO: 205845 - DNA, 1000 bp, Homo Sapiens
gtccttcttgcattgtaataggattaggaagtgtatacctgtgacaggttagagactatatttcccagacttgcacgtagccaggcatggtcacataactgttttcaccagtgaaatgtgaatgggagtgatctggggacatccctcacattcctcttgcttaaaatgaaattgctgccttgtaccctttttgtcttctatttcttcttcttaggggctgaaacttggatcctgcaacccatcttcaaccaagtaaaagacaagccccttcacagcttattactcaagtagtaagtacttgagactgagtattattgtttcctgagagcttgttagtatcttagactccactcaagacctaggaaatcagaatctgcattttaacaagatcccaggtgatacatgttcacattcaccttcaagaagcactgctctagcgggtagcagaggagctttacagatggaatgttggtccataaacaacctcataatgcaagtacttgcacttccgtggctcctgcataactttctatcttcaataagcaactgaatctggctgggcacagtggctaacccctgtaatcccagcattttgggaggccaaggtgggcagatcacttgaggtgaggagtttgagagcagtctgaccaacatggagaaaccccatctctactaaaaatacaaaattagccaggagtggtgtcacatgcctgtaatcccagctactcaggagactgaggcaggagaatcacttgaacccgggagacagagtttgcggagagccgagatcacaccattgcactccagcctgggcaacaagagcgaaaactctgtctcataaataaataaataaataaataaataaataaataaataaataagcaacttaatcttgaggcacctttgccatagcagcatagcattcacctaatataatttgcatcatctgttgacccaaaactaggttatgaattcatttaggaaatacttttaaaaaaat

SEQ ID NO: 205846 - DNA, 1000 bp, Homo Sapiens
aagaccagcctggccaacatggtgaaacccagtctctaataaaagtacaaaaattagccgggcgtggtggcaggcacctgtaatcccagatatttgagaagctgaggcaggagaatcgcttgaacccggtggcagaggttgcagcgaaccgagattgtaccattgcgctccagcctgggcgacaagagtgaagctacctctcaaaacaaaacaaaacaaaaaacataggtgttggcaggtacaatggctcacgcctataatcccagcactttgggaggctcagtcgggagggctgcttgagctcagaagttcaagactagtctgggcaacataatgagaccctgccatctcttaaaacacaaagaaaaagaaagaagaaaaagaaaagaaaaatacttagccgggagtaagtggcatgtgcctgtagtcccagctacttgggaggctgatgcaggaggactgctcgagtctaggagttcgaggctgcagggagctgtgattgcacgactgcactccagcctgggaaacagcaagatcctgtctcaaacgaaacaaaacaaaatgcataggtgtgttgtataacaaaactttgaaagagctgtctgctctatctctaatttctctcctaaactcacgttaagcaagctttcacccatacctcttcaccaaaactgctttcaaagtcacagtgacctctacaaaactaaatccagttgtcaatttggaaccagcccctgaaccactggaaccatcccacacagctttcaccttcccttcacttggctccaggccctcaacttgctgggcttccttctagttcatggcggcttctcatttttgccaattcctcccctttcacccacctctgaacgtggtgtgacaacattcgatccctggacctcttattttctctacctatctcactctctggtctttagtgccaactatacatggatgattcttaactttaatctccagactgaacttttcccctgaattc

SEQ ID NO: 205847 - DNA, 1000 bp, Homo Sapiens
ccctgtcttgcccgaggaggaaattcgagtcgagcccccactcctctccccgcgggactgataaacatgtccctcattcgccccgggaggctggcacccaggcacgacgcgaggacggccagactcgccgacggcggccgcgtcccggggggccgggagcgagcctgtcggaaggtgggaggcggagtcgctcggcatctgggaagagaccaaaggaatgagtcattggaaatgctgtaacgtagacccttatcccaaaccctttcgcccctccaccccgagccccctgccgagaagcgaagggactggagacggggagacttggtggggggagagtcacgtttcggagagggaagtgaaataaagagggcggcacccggggggacctgtgcgtcattgagggaccggggagaagcgcagggcgcacggggctgcagaaggagaagtaggaacgagaagccggagggggcggccgcggagcactggttggagcgccgcgaagcgcccgagcctcttgccttcgcgggcggcgccctggccgccggcagccttgtggccggtgccccgatccgccgcgctccggacccgggcaggcggggcgcgcccgctgcgcgcgggatgtggcagcccagacggccctggccccgcgtgccctggcgctgggcgctggcgctgctggccctggttggcgcggggctgtgccacgccggcccgcagcccgggtatcccgcgcggcccagcgccaggaacaagtaagtgcgcgccccttggctggccccaaaccgcctacccctccccggcccccagttgagccccagagctgccctgccaaagacgacgagcggcagccgggggcctcccttggacttccccgggcggctccctctgcgggggaccgcgcgctccgcagccggcgcctcaggcagagctgactccgggggcgtgggcgcagagagcgtcccgcagacccgggcgatccgaaaacgactcccaggaattc

SEQ ID NO: 205848 - DNA, 1000 bp, Homo Sapiens
gtagttcaataaagcacttctaaacaactgttaaaaattacttctttataatcttcaaattgcttaaaaatgataaacatctttttaacaaactttaaaaattttgtcaggaatcaaaggcaactttcagtgtctgcatttattaacgttcaccttttaagacatcatctaatcattcttctaagatatctacctgtctccatgatttctctcttactggtagggccctggaagtatcagaaatacctttcagaaccttgagatataattcttctagacctagagacatgaactcatgtaaagctacatgcctctattttcttattatttatttgtttttaataatataaacttcacactatgatctcttaggacaaaaaatgacaggggaaagcacgaacacagtccctcactactacaaattctgcatttggggaaatcacaggggtcagcacaaccaaagtgcaatggatgagcctcactctgagaaccaccttcatgatcatggtatctccccagccagataagtgtattgtctattttctttttgtttgttctagtttttctaatttacagagcaacttcttgtttcagaaatgagaagataaaaaggagataaactatgtgttctgtgtcacctattatttcaagtttcctgaactacagattcatgacttcttactctagctataaatttatctctaagaatcatcaatattgtttttccttttctgaaacatcggtcattgtaaaaatcctattcatcttctgacaacatcctaagagcttcacaaccctcttttctacttgacatttgttatgagtttctccttctgacttacagtgcatgcattaaaacaaaaacaatacaaaaactaagacccaagttggagtgactgatggggtagggtgggggaaaaggggaaatggtgagaagatgcataggggagccgctttagctccaccctaatttctacctgctactaccaccatggaattc

SEQ ID NO: 205849 - DNA, 1000 bp, Homo Sapiens
actccagttctgcatatacatccgggaataggagaaagagtatcagatgagtagttagaagacatttaatttaaaatcagctctaccacttatgagttgtgcagtgatgggaagacactatctgtccaaggctcgcttttttaattcataaaatagaaataataaaacttacatcacagggctgctctgtgtattaaataatatatgtgaaaacattctgttagtggttaaattatacacaaatataacatattattatgattgttattattaacttgtacaatagacactttccaaaggaaaaaacatcaacattcaaactttgaatcaaattttgcccaattgtctgcactacaagtaacttccaaaaataagttgtactatcaacttgatatgatttggctgtgtccccacccaaatctcatcttgaattcccacatgttgtgggagggacccagttggaggtaactgaatcctgggagcaggtctttgccatgatgttctcatgagagtgaataagtctcacaatatctgatggtaatataagagggagtttctctgcacaagctctctttttgcctgccaccatccatgtaagacatgacttgctcttccttgccttccaccatgattgtgaggcctccccagccatgtggaactgtaagtcaaattaaaccctccttcttttgtaaattgcgcagtcttgggtatgtctttatcagcagcatgaaaatggactaatacacaaccttaccctcattcataaaaggaagattggccaaggccgtattatctctttgaattatagccattatctttaaagaatggtgtttatccaaaaatttaagaaaacagaatctccatgagaattatatatttaaatctaactcatatataaggaagaaactatagaaagtgacaaacttcctaaacttaggaatgttatttcttagaaaaaataatccattttaatgcacattacagagttttccatgaattc

SEQ ID NO: 205850 - DNA, 1000 bp, Homo Sapiens
gtcattggaatgtggctagtacaaccaaataactgaattttaattttattaattttaattaactttaatttaaaaactgatatttgattcaagttactagatacttctatttggaaaatttgggttatgtgtatactttttcaattgtaaactttttgaaatctaaatatagatcaagtatttctgatttaaaaatagtgtctgaattgagatgtgctgtaagtgtaaaatatatgcaggattccaagatttagcatgaaaaaaataaatatctcactaataatttttgtgttgactataagttgaaattataatttttgcataattaggttaagaaaaatatattattaaaattaattttacctgtttttaaattgtttccagctttattgaggtatgattgacaaataaaaattatatatattcatgatgatttgatatacatatacattgtgaaatgattaccacaatcaatacatccatcaccacacatagttaccattatttggtgggggggggtgggggggggaggtgagggcacttaagatgcactttcttagaaaatttcaagtaaacaatataatattaactatagtcaccatgctttatgacagattcccataacttactcattttataactggaggtttcttcacaacccccagccctggcagtaccattctgccctctacttctttgagttctactttttttttttttccttttagagacagagtctcactctgttgtccaggctgaagtgcaatggaatggtcatacctcactgcagcttagaactcctcggcaaacgtgatcttcccaccttgctaggaccccaggcatcgctgccacatctggcaattttttttttttttttttggttgagacagggtctcactgtgttgcctaggctgactagaacttccagcctcaagcagtccttccacctcagccttgcaaagtgcttacaggtgtgagccactgcatctgagtagaattc

SEQ ID NO: 205851 - DNA, 1000 bp, Homo Sapiens
atcactgcagccttgacctgctgggctcaagcgatcctcccacctctcagcctcccaggtagctgagactgcaggctaatttttacatttttttgtagagacagtggtctccctgtgttgcccaggctgatctcgaactcctaggctccagggatccgctcacctgggcctcccaaagtgctgggattatagacgtgagccaccacgctgggctgaacagtccttatcaatgaacacccaggaacacagagaagaatctgagtaaactggccttgctaagttccctctagtttattactattacatcacactccctttgtctcatcacacttctcctccactgtcccctcttcatcaagtttaacataaaaacacgtttccctgtttctttgagccttggtttccaaaggctcttgtgttacatgaaatttaaataaattggtatgctcttgttaatctgtcttttgctataggtgcctcagccatggacctagcaatgggtaaggaaaagaatattttctcccctacagcacccctggtggcaagctctgttttagagagtatcgccttctgtgctatttgagtcaaggcagctgttcctccagctgcctgcctactgcccatggttcattctatagataaagccccagactttccccacatggacacccaaaacggggcaggataactgacactagcggctcagtggtggaggaagcaaagccccagctcccgaactagggcggcatggctcagtggctatgtgcagtgtgaggggtacttaggaagatgttgggagaatcaaataagataaacatgtaggggtgctttaaaatttctaaagtattggcaatataactacatgtaggattttcctggattataaacctctcacccaaattcaacttgaggcaaattgctccagagagcatgtagtaacatttcagatacggaaaagttggctttctggcttctgatatttctattatcccatgaattc

SEQ ID NO: 205852 - DNA, 1000 bp, Homo Sapiens
gcgcggtggctcacgcctgtaatcccaggaatttgggaggccgaggcaggcagatcatgaggtcagaagtacgagaccagcctggccaatatggtgaaactccatctctactataaatacaaaagttggctgggcatggtggtgcacgcctgtagtcccagctactcgggaggctgagggagtagatcgcttgaacctgggaggtggaggttgcagtgagccaagatcgtgccattgcactccagcctgggcgacaatacaaacaaacaaacaaacaaaaaaaaaaattctttaggctgggtgtggtagctccctcctataatcccagcactttgggaggccgaggctggcagatcacctgaggtcaggagtttgagaccagcctggccaacatggcaaaacctcatctctaccaaaaatacaaaaattagctgggcatggtggtgcatgcctgtaatcccagctacacgggaggctgaggcaggagaatggcttgaacccgggaggtggaggttgcggtaagccgagattgcaacactgcactccagcctgggccacagagtaagactccgtctcaaataaaaaataaattaaaaagaagttatttagagagaaagaaaataatatgggtcaaaaattcagatctacgtaaagaaaggaggagcactgaagtaaaaataagtgatggtaaaataaaaacttttattttgcttattcttaattggtctaatagctaacagtttgtccaaaataataatagcaacaatgtattcaattatgtatgcttatgtatatatcttattcgggattatttcattagtacagggcactcacattacctatcaagaggtagagtgttatttgaactgggcttggattagctgtaaatgtatactagaaattctagggaaaccaataaagaaactcaataaaagaataaataattaataaccttccaaaacagaaagcaccaggaccagataggttcactggtgaattc

SEQ ID NO: 205853 - DNA, 1000 bp, Homo Sapiens
aatactttactattctgcttgctctgtgggccttcagatgccaaccaactttataagaatgatctaaaggttgcaaggagttgcagaaggatcaaggtagggaaaaacctttctcagctctcccacaggatactgttagaattgagagccacaaactgtgctgccatggcaaaatccaccttatttcagagtccatgttttggcagcctcgtgcctgggggatctagagaggggaagaactcaagaggacagcctgagtgacttaagaaaggagctggggcattcggaaggtaggatgagtttcaaggacagatacaacgtttgaccaggaaagctgtgcttttgctgaaggtgtccacacagcagctagtcatgtggacagtcagagagagtgaagctgagctggaaggggaggcatccaagcccaaggctccaggagacattgcagacaacatggcgcatccggccccatggggctgctccagacctggcaggcactgagctcagtaagccaggcagacatgccattagcgccattagctggtgggtgttagccattacagctctttgacctttgagctttaactaaccagtaaaaagtaaatgtgggccaggcgcagtggctcacgcctgtaatcccaacactttgggaggcggaggcgggcagatcacctgaggttaggagttcgagaccagcctggccaacgtggtgaaaccccgtctctactaaaaaatacaaaaattagccaggtgtggtggcacgtgcctgtaatcccagctactcaggaggctgaggcaggagactcgcttgaagccgggaagcggaggttgcagtgagccgagaatgcgccgctgccctccagcctgggccacaagagtgaaactccgtctcaattaaaaaaaaaaaaaaaaagtatgttctacctccttttattttaaagtctgcttgaagtgtggagtcagcaacaactccaaggtttggcttttgagatgagaattc

SEQ ID NO: 205854 - DNA, 1000 bp, Homo Sapiens
tctacctgaaggagaactacctccagaaccgacagttccagcaaaagcagcggcccgagcagaagatcgaggacatcagcaataagtatgggggctccggtgggcctgggggcgggaagcctctgggggacctcctgcaggtccacaggcaccatgagtacatgtcccacctggggaggcccagcaatgcctcaccggtgagggagcgctgtatcccgtggcccctgcaatgctgcaggcatccgggcctgtgcccacagctgacccaggaccctctgtggtccttaggaaggctgggccccacagggcgcagggtcagaggctgggagggaagccttggcggctgggggaggggcaggttggcccgcaggatccggcttggaggcctgggggcatgtgcacacggggtccaggctggtttgggggtggtttgctctgtgagcttgttggtgcacagccttattatagcttctgcaggacctcggcagcccagccctcggggtcagccatgctcagcaccgtcctccctctcagctcctcccatcttgcttctttccaaggtgcgaggtcagtgttgggggaacatctgctcccttctctccactgccaggccttccgccctgctaggtgtcagcagggcctaatggcccagcagcgggcagcaggaagggctgcccccagtgtcctgctctcagtgtgcgtctcaccatggcatgagaggaggagggggaaatggacacggtgccacctagttatggccgtgtggaggctcctgcagccacaaacaggagcatcctggagctggcaagggatggccaagaccaggccaagtgccctcccccttagagacatgtatgtactcctgcctttccatacctccctcaccttgtctgtaagatggagacacgatagtccctgtctcttggagttgtttccagaatacagtggggtcctgactgtaaagaattgagcacatatgctggaactataaccagggatc

SEQ ID NO: 205855 - DNA, 1000 bp, Homo Sapiens
tggcagtagcataaactcacaatctcttggaaagataatatatgacataaacaaaggaaaaacaaatcagtaaatggaactgagctattattaatacacgctatttggtaaaaaaaaaaaaaaaaaattccacttagctccttagctgtatttgaaacttaaacacacatgtgcattgcctacattaagaccacacaccacctttttccaaagtagtctaatttttggaacattatgaaatggtccattctgatcaatggccttatagcttatctccatgcccaaagattttaaattgtaaacatacctactttccttttttttttttgagacagagtcttgctctgttgccaggctagggtgcagtggtgcaatctcggctcactgcaacctcagcctccagggttaaatcgattctcctgcctcagcctcccgagtagctgggaccacaaatgcccgccaccacgcccggctaatttttttttgtatttttagtagagacggggtttcaccgtgttagccaggatggtctcgatctcctgacctcgtgatctgcccgcctcagcctcccaaagtgctgggattacaggcataagccaccgcgcctggcctgaacatacctactttcaatgtgtttactttctcctattatttcacctcctaatattttcacataataacatttaatccctcttgaaatttgctttgagatatatatgcatggcttaaaataaggaactaaattgattctactatagaaataattttgctgggttcaaataatgctgggttgaaatgtaagagtaagattttttatattcatctagctactcttcatttcataagcagtaactgtgcctaaatggtactgtttaaatacagggactctcaaaagtctcaggacttctgcttaagaaattccaaaagtatacttcacataaagtcatcattatactttgtttttcattgcaacaagcctttcaagagaatcacagaattc

SEQ ID NO: 205856 - DNA, 1000 bp, Homo Sapiens
gtggtggtggcacacgcctgtagccttagctacttgggagactgagatgaaaggattacttgagcccaagagttttaggcttcagtgggccatgatcatgccactgcactccagcctgggtcacagagtgagaccctgtctaaaaaacaaaaaacaaaaagccaaaagaacttgttcaaattaattagaaaaaaattttcaaaagacttaaacaggtgcttcatatttattggccaatgttaatgtccaataaatagattataagcacttaacctcaatagtcatgagggaaatgtaaattaaaaccaccacgaaatatatccacatagttaccagattaacaaatattttatttatttatttattttatttttgagacagagtctggctctgttgcccaggctggaatgtagtagcacaatctgggctatctggaacctctgcctcctgggttcaagatattctcctgcttcagcctcctgagtagctgggatcagattaacaagtattttaaaagattgtctcctaatcttaaatactggctaaaatgctgagcaacaggaactctcatacactactgggtagaagtataagagaatcaatttattaaactgtttggtaataacttccaaaggcaaacataggcagaccctatgaccaagcaatttcacttctaggtgtatacccaacagaaatgcatataaaaacatcattattggaaatagctcaaaagtggaaacaccccagatgtccatcaacagaagaacagataaataagtttgtagagtatttctaaaacaaaatacttagcaatgaaaactaatgaaccacagctgtacatgaaaatatggctaaatctctgatatggttaggctttgtgtccacccaaatctcatcttgaattataatccccaggtgttgagggagagatccggtgggaggtaattggatcttgggggcggttttcccccatgcctttctcgtgatagtgagtgaattc

SEQ ID NO: 205857 - DNA, 1000 bp, Homo Sapiens
aacccagagtaaacattcttatagttaaagtgttgtaactggccaggcatggtggcttatacctgtaataccagcacctcaggaggccgagacaggaggattgctggagtccaggagttcaagaccagcctagcaacatatgaagaccctgtctctacaaaaaagaaatcggtgtatcttcctaattatatatttgtgatgaattcccagaaattagaattgaaattactagttcaaacaaaatccacatttgacgctttttgatctgggtcgccaaagggccagtagaaaggattttagagtggatacagcttgggtggatgaaagctacggccagcgttaaatgtgttggattaatatccaatatatcctaagaggtccttgtctcttaatgggagagaaaatgatatctcactcttcatttgtagaaaggtggacttttttctattttctagtaacaatttgtatttctttacaggaaaatttgcagctatgcagcctgccttttttttttggctggaatgttcattttattacagatttgtaggagctatttgttaagaatatcagacttctgtcaagtatgctacaaatggcattctgagtttatagttctccttttattttttgacacatagtgttaaacaattttatgtagtaaactctattagggtttttctatgtattttgacccttaggatgagcttataaaggtcttcctcattcaaaatattatgtattttttatttcttcttgaaatttatggcatcaaattttaagttaaaattcatctgaaatttattttgatatttggcatgatttttatgcatagaaaagtacacaggtaatataaatatattgttaaaagaataataataaaacaaacactcacgttctcaccagccagcctcagaaatagaacataataattcatctgtatatcttcatgctatgacattcccttgatttttattagagtttttcaaatgcatatgaattc

SEQ ID NO: 205858 - DNA, 1000 bp, Homo Sapiens
atggttcagatgtttattataattctttttatagatgctgaaaagttcaacaccaattcctcactttaaaaagcacactcctgctgctgcttctacttttatatttcacactactccctaaatctattctggctctaggtaggtttaaagcctttcatcagcacgtggaacattctctaagataggccatatgatagaccacaaaacaagtctcaataaatttaagaaaattgaaatcatatcaattatcttctcagaccacagtggaataaaactggaaattaacttcaaaaggaaccctcaaaactatacaaataaatggagattaaataataactgaatgatctttgggttaataacgaactcaaggtggaaattaaaaaattatttgaattcaacaataatagtgacacaacttatcaaaacctctgggatacagcaaaagcggtgctaagaggaaagttcatagcattaaatgtctacatcaaaaagtctgaaagagcacaaatagataacctaatgtcacacctcaaagaactagagaaacaagaacaaactaaacccaaacccaacagaaggaaagaaacagcaaagaccagagcagaactaaataaaattgaaaccaaaaaaatacaaaagataaatgaaacaaaaagctggttatttgaaaagataaccaaaattgatatatcattagcgagattaaccaagaaaagaagatgatgcaaataagctcaattagaaaggaaacaggaaatatgacaaccgatatcacagaaatgcaaaagatcattcaaggctactatgaatacctttatgtgcacaaactataaaatctagaggaggtggataaattcctggaaatatacaaccctcctagaataaaccaggaagaaatagaaactctgaatagaccaataacaagcagtgagagtaaatcagtaataaaaaaattaccaagaaaaaatgtctaagaccatgtggattcacagctgaattc

SEQ ID NO: 205859 - DNA, 1000 bp, Homo Sapiens
gaatgtgagctgtctttagaagctggagaagtgaggaaacactttctctcagggcatctcagtgagacctgtgttagacttgtaatttacaaaatgctgagagataatacatttttattgttaaaattacatttgggctaatttgttgcagcagcaatagcaatacaccttcttttttcagaaatgatgaccctatcagggaggatgatttatccattaggcattgttgatagtgctttggtagtagggattcatgagaagctactgggggagtattcactgtgtgtgtcaaaaaatggttattggggataataatgaatgagactgagattgtgagcatgtagggaagtccctaaatacctgcagtattatcagtgaacatttctttaaaaatacttaacatgtttatctatatttatactttcaaatgaagaaaactcaaaggcatttgtccaatactttttgtaagtaacttaacctttctggatatgtttacttgcctataaagtagaaatactatgcctctccataacctatctcaaaattcttggcatcaactcagttaaggtatgtataagatctttgaaagaacagatcctatccaggtggctccatgtttactcagtgtgtgccatgcttcagaaatagtggtgccgtgtatgagcatgtcaggtttaatcatccacccgattgctgtcccaaggctgagtgttgtgatcgcaatgctgctattggcacttgttcttatgaaatctctgtgtctcccacgtgaaaaattgttttgttaaatacgcaattctggattgatctgtctgtccgtctatctatctatctatctatctatctatctatctatctatctatctatctatgtatcttcagtgctcagatggtatttaattatctgatggcttccataggataaagttagctctaaggctaagttcctcctttgcagatcatcagtactttctctggctgattttaagatctttctgac

SEQ ID NO: 205860 - DNA, 1000 bp, Homo Sapiens
tcccagctacttgggaggctgaggtgggaggatggctggaacccaggagccctgggctatagtgcactatgctgattgggtgtccacactaaatgtggcatcaatatggtgacatactagaagcaaagaccaccaggtcacctacggaggagtgaaccagcccaggtcagatgcagggcaggtcaaaactcctgtgctgatcagtagtgagattgtgcctgtgaatagccactgcactccaacctgggcaacatagcaagaccccatcactaaaaaaagaaagattcttagaagggactgttctgatatatcaggaaatcttctattctgtttttcacattaaaatttcatgtattttttttctgattactaaagccacacagctctccatagaaaattgggaaattgggccaggcacggtggctcacacctgtaatcctaacaatttaggaggcctcagcaggcagatcacttgaggtcaggagttcaagaccagccttgccaacatggtgaaaccccatctatactaaaaatacaaaattatccaagcgtgatggtgcgtgcctgtaatcccagctactcgagaggctgagacaggagaatcacttgaaccagggaggcagaggtagtagtgagctgagattgcaccatttcactctaggctgggcaaaaagatggaaactccatttcaaaaaaaaaacgaagaagaagaagaaagaaagaaagaaagaaaagaaaattgggaaattggccttcattttagaatagatgatatttgtactgggagtttgcccaaatggagctatttcagtggtggaataagtaggaaagataagaggctggtgccagttagctgctaccatccaggggggcaagaatgagctggtaaatttggggtactttttttgaggatggggttacatactgatttttttctacagcctttgctgacaaaaatcatgtcaggccatttaaacctcctttcttcatcagggaattc

SEQ ID NO: 205861 - DNA, 1000 bp, Homo Sapiens
cagggctggctcagccataaacatacacacacacacacgcgcgcgcacacacacacacacacacacactgaataggcaactcactgaaatagaactagttgattaattaaagcacctatgggatttttcacaaaccaaattagtatttttattaaaaaacttttagtgctattgagcctacataggaagaggcctacttatgtaattggtaagagtgtgatctgattaactctgtgaaaaataatgtcagtattttttaaattataattaaatttatcgtagctcaattataccattttgagattcgtatactacataaaaacaaaaaaacaaaaacattggggggatctatgtatattgatgattactggaaagtcattagtggtgggaattttaaaaaataagcttaatatccatctaacagagaataaagaaatcagaacgtatctatgaattactacacaactgaaaagaatacatttaatctacattaattggaactagtaatgtctaccacgtgttataaagggaacaagtaaatcactatataatgtaggatttgagcatgttctttaaaacaaaacaaatcaataaagccctagaaggaccaactattgaaagcctgtcacaaaatccagaaatggtaaggaaaatattgaaaatttgactatgtaaaaagaaaaccttcttcaaaacaaaaacaatataaacaaagtaaaagttatgacacagaccttaaaaaaaactcagtaattatatggaaataataaatgtgcagaacatataaagaatatcactaaatgaattagaaaactaggaaaacgtatcattatgaaaatcacagggagaaatacaaacggccaacacacatacacaaatatgcacaatctccctaataagtggagaaatccaaattaaaagtaaaaatattttaaaatcataaaattggcaaacattgataatttcctatgtaattaagggtgtggggaaataggaattc

SEQ ID NO: 205862 - DNA, 1000 bp, Homo Sapiens
aacaaatgttcctttagggaaagatctggagctctctctcttactacctactttttttttttttttttttttttcaatacttgatcttgctctgtcacccaggaggctggagtgcagtggcacaatcttggtaactacaacctctgcttcctgggttcaagtgattctcctgcctcagtagcttgtattacaggcatgcaccaccataccccgctaatttttgtacttttagtagagacggggtttcaccatgttggctaggccagtctcgaactgctgatctcaagtgatccaaccacctcagcctcccaaagtgctgggattacaggcgtgagccaccatgccccggccttactacccacttctgttccgaagagaaatctctgagccagggctctggcgctggcaggaacaatagcttgccactctctgagtgacacccccacgttaggagctgagtgcttggaggagggcaagtgcagcagccccaggtctcctcagctcccctcctccaccctctgaatggaacccccactccacaagtggggtaagagtgaattgtgccccagtgttctcagcagtgccatgcccagtgttgggtatccatcttaccagtgggggctgggtggaagaggggcacctccacatctcagatacactcacctagaactcagcctcaataacaggtagctggggcaggatgaaaaatgctgatgtccagtccctcctgaaaagatagccccctgacctggagcaggggagggagggaggcctatatttttggttttttgtttttgtgagacaggctctcactttgtcgctcaggctgaagtggagtggtgcaatcatggctcactgcagccttgacctccctggctcaagtgatcctcctgcctcagctttccaagtaactgggactataggcacgcaccaccatgcccaactaactttttgtattttttgtagacagagtttcgccatgttgccctggctggaattc

SEQ ID NO: 205863 - DNA, 1000 bp, Homo Sapiens
ataagatcttaccccggttctcaccaccttccggacactgcccaagttcctcagcatcacatactaggtccttcatcgtggcaccctgcagcttccctcacccctcccctggccacccaccctcagccacaccagcctggtattccctgtgtaagtcatgctctctctcattcttgcatatttttgtaaatgccatttccttgttctagaatgttcttccccctgcctccagtaggccccttcctgcccacccagcgcatttaggatcatgcttccatgaggtcctctgtaggaaaagtatgatgtacttttctgtgcaggcagcgatgatactatgagctacatttctgtgtcacagtccccactcatcaggtatctctcccattagcgtgtgagagcctgtttccatgcacatagcccctagcccaagtacctgccctctagagcaaagcatttcccaagccattcagtggtttcccaggacctagcatccaaaacacaatgagttctaattacaagcttgttgaaaggcaaatgaagaaaaaaacctgtatgtataataataatagtcatgagaaagacaagaatgaagagaagaaagacaatagtcatcactggcatcttaaattatggagccaaggggagaaacatttgggtcaccctcaggatcaaactgccaggccagaagcaattccactgagagggcaccaggaagccttcaatgcatggaaaccctggagcaagtaaaaggcaaagcatgtgagtcacagctgaatccctggacaatcactgagctgtgacaaggtgcagggtagactcataacctagcacagaaaaacacattactgaggaaaggaaaagaacgtgaatggggaattttgagacttagctcttcacagaaaagcatgcttggcaattacaaacttcttatattaaaaaaaatcaggcaaaccaaaagtcattaaagcattaaagattaagacccactcacaaggaattc

SEQ ID NO: 205864 - DNA, 1000 bp, Homo Sapiens
gttgcgtaatattgttgttttaatttgcaattccctagtgagatatgatgttaagcatattttcatatgctcatttactatctgtatatctttttctattcagattttttggccaatttttctggcctttatttatttatttatttttttattttactttaagttctgggatacatgaaagaaagtgcagcatgcaggtttgttacataggtatacatgtgccatggtggtttgctgcacccatcaacccgtcatctagggtgcagtcagccttataaggacagaaacaccagggttagtgtgtatccaaggaaaatgtgccaccttggccacaggtgtgctccaacatcaatgctactcagtttctcttcctatctgtttctgtgtcttccttcttctcttcccaccactgttacccatatatgctacctttctcacactttctgcaaactcataacttcctcttacacagggcactctgttacttgaacactacctcatggtatctatttacatcctattatcttcaactactacaccacctgccacattatcagcattttgtttgctcagtcccatgagaagaacctgactagccatccttaaaaaaacactctgttcccaatccaatcacctagttcaaccatgtgcccaaggctgcctggccagccagggcaatgataattcaagccaattccacccacagcaagttatttctcagatcttagtttttaccagttgaaatgccccctgaagttttctttgatgctcatccctatgtctgttcagtttttttttttctgccctgaggttcccccaagagctctatcagagaaagacttggcccatgctgccaacacactgggaagctggggttagccctctccagaacccacgggcagaaaaggacagtgccagaaagtgtcagggctaatccaaagagaattccaacggagaggagtgtgtgtgtagatgaggatagaggatagtcacagaattc

SEQ ID NO: 205865 - DNA, 1000 bp, Homo Sapiens
cgtgatccgcccgcctaggcctcccaaagtgctgggattacaggcgtgagccactgcgcccagccttgaccattatttttattgtaattatgtaaaatgttttttgtggtttctgggtcaaaaagcaaagtgcatataataaagttgtatattaacacacatctgtattatatgcacttttattttttcccttatagtacatggttataaaaaccataattaaatgtaaagtattcctcattcattcattttcagagctatgatttttgtaggtgtagcgtattttattaaactgtatttttgtagacagcaattttggttgttattagatttcgagggatctccctctatcttatagaatgtcacaattattagccctggtcatacatctttataaaaatatttttgccgttgtccatttttgttatattcaaagaagttatactgcttggtcgaagggtaatgattaagttatttggtcacacataccaagttactgttcatcgggattttaacatttttttgtctcactgcaaaggtgtgaaggttcctatttagccaacccctgcttagcagactatgtggttaggcttttgggtttttttccattggaagatgtgagaaaatggtatttttgtttctttattattttcatttcattttatatgaagtgtgtgtcaacgcatctatttttatagggttattgaaaattttatctattttaggtgttctttattaaacatattaactctgattcttcagttttgatttgttttagcttgactgtttacttgtggtgtcctttgccctgtgaatttttaatgtaatcaaatgtacctaatttctcattgcgtctggattttgagttacagttttaaaaggttttccctctcccacttgtagaaaagttgaccagattttcctctgtgtatagttttatactttcacatttcagtctggtccttttggaatttaccctgatgcacaatatgatgaattc

SEQ ID NO: 205866 - DNA, 1000 bp, Homo Sapiens
caatccttacaacaattcagtgccataaacgggtgttggaaatacttagcaaggaattggcataggctgcaaccaaccataacagatgctggccttataaaaaaaccctgaccattctggtggtactagctgatgagcagttgtggctgttaaaactgttaagtccattttacagataaggaaaggaaggtaccgagaatttcagccacttgtccaaagccacaaagcaggaaaatggggattcagacctaggcttgtcttggtgaaatgtctgattgttaagcattggactcacagggggtgctaatagcctgacataacacacaggagcctttatgggcgtctggcctggagatttagcaggattggtggacaatgcaggtccagggaaggctggccaggtggaggaagctgcagagctgatgagccagtggggctttcctggctccagccatgctgtgtggtcagcttgcaggtggaggccagggacccacggaaactgggtcagcagcaccctggacctggccccttgtgtggctctccttccttcccctgtccccagtgtgaccattcccactgcctttccccttctaggcctttctttcctccctaagagcagagatgcttctctggtcccagctgaaacaacaaaagtcacctgagcctctgccttttccaaaattcctgagaggctgccagcaatgagtcagtgcattggcagctctgatcaccaaggaccagcctgggcctgggccaaggctttatgtgggtctgagctggggtgggaggcagagatgatgagaagccctggggagctctcttcccttcaagtgctcgggcttcagaggcccagccccttggggtcagtgattctgagcacatggtacagtgggactggttgggagacagtcaaataatgtgccctgggctcctgctctgcaccaggcatggccctgccctctgggagatcagtagagtggggctcccgaggattgaattc

SEQ ID NO: 205867 - DNA, 1000 bp, Homo Sapiens
gcatatgatgtaccatttttggtgcaagcatataagtattgcagtgttatatatttatgtactgacatgtaggtgttttacataagctactacatttaatcctcataacaacctagtcacgaaattattgtcattcttgttatcctatgcacattagtccaaacaagcaaacaaaaattgtcattctcttttatagatgagaaaatttacattttgagagattaagtgatttaccataagtaacaaagccatgaagtgatgaagcctgggtcagtcagactctaaagctctttccactgtttgtatatgagtagattaaagcattttatcatgattatttgacatcacaaatagtgatgccatgagtgaaaaggagatagggatcctaatctttaatctatgccaagaactgagtgattgagcaaatcatttaacatcgtctgtaaagtgtgagggttggactaggcaaccttggttcatgattctattcagtgtaagagattttcacatatggtctatggaaacaattctcattactttagtgtttttattatatttagtttccattactcatccttcataatgtgctgtacatgttggattgtgtgtggtggggggggagggtgatagagtgcatatcatcttctaacatattacatacaatatacatttatttattaagattattactgtctgtcatcttccttcttcccttcccccaaatatgtcacgaggacctagactagagcctggctacatagtatgcagttataaactaattttttgaatgaatgaataggaataatagacttgtatagtacattggcaaaatatataagtaacttcataattcttaacaccaaaagattccctgggggccaaaattattaatctttctattacagtgatcctttaaggaactaagtgtaagaatcttaaaaagaagaacacctacgaaacaatcaagtgtagtcaagtaatctgaagtttgctggaattc

SEQ ID NO: 205868 - DNA, 1000 bp, Homo Sapiens
tcatttcttcctttatagctgggtttccatcttcagcctgaagaaaatcctttagcaaatcttctagcagcagattatttcatcttctatcttaaaatgcctttaccttaacctcatttttaaaggatattgcactggaatatctggcttgatagttttctccttttcaacattttgaaagatgttgtcaattgtcttctgcgctttattgtttttatttatttattttattttatttttttggagacagagtctcactctctcacccaggccggagtgcagtggcgtgatcttggctcactgcaacctctgcctcctgggttcaagtgattcttgtgcttcagcctcctgagtagcactgggattacagacatgtgccaccacacctggctaattttttgatttttagtagagacagggtttttccatgttgaccaggctggtcatgaactcctggcctcaagcgatccacctactttggcctcccaaagtgctgggattataggcatgagccaccgcgcgtggacctggcctttattgtttatggtaagaagtcagctgtgattcattttatacctcctgtgtatatgatgtgtgcttttcctctggcttctttcaatattttatctttatctttggtttttatcattttgactattatatacctaggtgtgattttctttgcatttatcctccttggggtttgctgagcttttcacaccttaatatttttcatgaaattttagggaattttgttcatggttttttgatgtttttcttgtcctattctcattttattctcctatcctccttctgggactcccattgcacatattttagactggttgatattttcctacaggtttctaagactattcatttttcttcagtcttttttttctttattctccagattggatagtttttgttatttgtcttcagtgattttactgactcttctgtcacctctaatctgctattaaacctatcaagtgaattc

SEQ ID NO: 205869 - DNA, 1000 bp, Homo Sapiens
aatgcacacaccctttcccgccgaaacttgttcccccaaactgctttaaccaagccatgatgggatttaagtttcttctccctggattgggggcatgggcttttcaaagctcaggctggaggtgtagggtcagagctgggtctgaaactagtcctggtttctggcatttaccggtgagcagccctgtcccgtggtaacactgatcatagagccattgagggcatttccctacaatctctctcatcctcctaacacttctgcaaagggcttgttcccgtttcagagatgaagacactgagaagagacatgcctaaggttgttcagtgagggacatggcaggtcagacctgcatctgggacaagggacaagtgtgaactgctagctccattcctgatgtgaataccagatttaccccctccacttctggccttcagtagagaccaggttaatctggccccaaagttcctattctcccagcactgctcagcttgctcagtccttctgcctcccaggacctcagtttcaacgcctttaacatggggcagggcatttagccttaaaggggccttagggctgtgagggagcagtggtaagggaggggccctcttaggaacttgagctcacaaccccgtaagctgtgctggtgggaaggggatatggggtttggatccttccaaacaggaaggtccaaacagcagggtcattctcacagtgctgtagttcctggctagcctatcctgtttagatcttcaatggataccatttcctatcgtgttggaagctttcttccaaaggcttctgggagtcccaacggctataagggggctgaatctccactcctctctctgcaagggcttagctccacccaggacctcatccctctaggccaatgattctcaaactttaccctgcatcagaacacctagagggcttgttaaaaataggtggcgagttccacagagtttctgatttagtaaatctaggaggaccctgagaattc

SEQ ID NO: 205870 - DNA, 1000 bp, Homo Sapiens
tttgagttattttttgtatatggtcccacctcgttcttttgcatgtagctatttagttgtcccagtaccatctgttaaaaagcgtattcttttaccactgaaagatcttggcatccttgttggaaatcagttgaacacaaataggtttatatctggactctctattccattgatttatatgtccttgtgccagtaccacaatgctttaattactgttgttttgcagtaagttttgaagtcaagaagctgagtcctcttattttgtcctttttcagtactattttggctattctgggtcccctgcaactccatattaatttcagaatcagactgtcaatctttacaaagtcagcaaggattctgataggaactgcattgaatttatagattagtttggagaatactgctatctttacaatgttgaatcttctgatccatgaacatggggtgtttttctatttatttagattgtctttaatttctttcagccatgttgtaagttttcagagtatgagtttttctttgttaaatttattcttttgatgtcaccatgaataaaattattttcttaatttttttttttttttttttgagacagagtctcactctgctgccccaggctggagtgcaatggtatgatcacggctcactgaagccttgatctgctgggctcaactgatccccctacctcagtctcctgagtagctgggactacgggcatgggccaccaacatgcctggctaatttttgtattttttgtagagatggggttttgacacattgcccaggccggtctcaaactcccgggctcaagcaatccacccaccttggcctcccaaactgctagaattacaggcatgagccactacctccagcctgttttcttaatttaatgcttcactgcaagtgtataataagacaactcatgtttgtatactggttttatattctgcaaccttgctcaacttgtttattagtcctatactttttaaatgaattc

SEQ ID NO: 205871 - DNA, 1000 bp, Homo Sapiens
tgcatggtgattaggatgattagtgaaataatgcatgtataattgttttttctagtacttagtacacagattactggataaagtcttttttataagtgttaaaatatggaacaggaagagactaatgacataagactacccagaatacttccatgtttattgacatcattctgttttctcataggtttcttcctgccctttctggtaagacacaacctttaaaatgccacttgtgcaggaatggatttgcccttagaactgtgtcaaacttagttttgttttgtttggtgggagtaggaggaataactaaaccttgtttgggggtaggggggataactaaacctaacagagaattaggaagctgttctgaagtgagatcaaaagacctcagtgggtaactcaataaaccagaaaggagtctaaattaacctcttaagttaacttagtttctctttgttactctttgcacttaagttactcttaagttactctttgcacaaaaatgcatcttcccctttcaccttaaccatcctaagagctaatgaaaaacgacctttggccaaaaggtccaggatgtgctccttattctggaaatgcaatagcgtctcacctcaccaccctgtccagtagttgtggcttgttacatgaaaattaacctgtcccttagaattcacatcatgcggctgggcacagtggctcatgcctgtaatcccagcactttgggaggccgaggcgggctgatcacgaggtcaggagatcgatactatcctggctaacacggtgaaaccccatctctactaaaaatacaaaaaattagccaggcgtggtggcaggcgcctgtagtcccagctactcaggaggctgaggcaggagaatggcgtgaacccgggaggcagagcttgcagtgagccgagactacgccactgcattccagcctgggcaacagagcgagactctgtctcaaaaaaaaaaaaaaaagaattcacatcatgctgaattc

SEQ ID NO: 205872 - DNA, 1000 bp, Homo Sapiens
aatacctcccaggctaatgggatcctcctacctcagcctcctgagtagctgggactacaggcacgcatcaccatgcctggctaatttgttcttaaaatgctgataaaatcagatttctgagtcagctagtaaatgtctcaacagacaggctgccagtcttcttggaacacattatcacagggtaagatgacaggtagccaaaatcctgcctgagggctcaggggaggattcttggagatgataacatttgaattttatcttaaaaggtgataaggttttcaggtaaagagaggtaggcagggcattcccagcataatccagggcacagagaagagaattaggacagcaaagtgggaggacaactagtgaaatttgaggtgtggctgagagatagagaggggtcaaatcaaggagatccacaagtctcgaggggaagaaagagtcattcaagtttgtgtttgtttgagacagagtcttgctctgtcatccatgctggaatgcaatggcatgatctcggctcactgcaacctctgcagcatcccaggttcaagcgattcccctggcttggcctcccgagtagctgggattacaggtgcacgccaccatgcctggctaattttttgtatttttagtagaggtggggttttgccatgttggccaggctgctctcagacttatggtctcaagtgatcctcccatctcagcctcccaaagtgctgggattacaggtgtgagccaccgccccagccttccccaggctcttaaaagcagagaagagttgtggaagaattgggctccttccctttgtcactgttcagtccttcccactctgctccagacctcagccaggatccatttatcaccaatatgtaagccagctcttccgtgagaagggaggtatacttagccttcaggcttgagctgatcttggaagtcctgtcccagcctgaggggtctgaccagtcactcaggctctttttaagtttagtgattaaagctt

SEQ ID NO: 205873 - DNA, 1000 bp, Homo Sapiens
cggctaattttgtatttttggtagagatggggtttctccattttggtcagtctggtctcgaacccctgacctcaggtgatctgcccacctcagtctcccaacgttctgggattacaggtgtgagccaccgcacccggctttcttacagtttttaaagatactctccaagggctatatccccaaccacaattcattaggaaatggcttgccctgggccaggcgcagtggctcacacctctaatcgcagcactttgggcattcgaggtgagcagatcatttgaagtcaggagtttgagaccagcctgcccaatatggtgaaaccccatctctactaaaaatacaaaaattagctgggcatggtggcaggtgcctgtaatcctaactacttgggaggctgaggcaggggaattgcttgaatccgggaggcagaggttgcagtgagccgagattgtgccactgcactccagcctgggcaacacagtgagactctgtctcaaaaaaaaaaaaaaaaatggaaatggcttgccctaagatcccctacaagtatatggaagttttccttctgtggtaaacacagaatgtcaacttgtcaactttaagcaactggatcttcaagtgtgttgtgtagaattcctgagctagcactgaagtgttttaactgaaaagccctgtgtccagttaaagaagaggtgaaaggggcactttgggccatggggatgggaagaaggtgacagtagaagtgaagagagttgaacaaaagaggtgaggaggaacaaaggcctgttgggaactacagatcagagcaggaggagagtcatccaggagcagaaaacagacaaaaactgcaacttccactttgggaaccagaatatctcatgtgaaactagagagtatggggagccagggcataatgagagcgctgggctaggtgaggatgagacaccaaggattgtgatgagtgcctgctacgtagcaggcacataagatctgtctcaagctt

SEQ ID NO: 205874 - DNA, 1000 bp, Homo Sapiens
cagcataacctcattcttctgggacgtgggacaagaactcagaacccaccgaatgtgggtacaaagaaggccgtaacactgtggccctctgccctatgacagtggcgggagccaccccatgcaatgagaagcagtggcaggaacaagccagccctggagctgcaggctggagtgaggctatgggactgacagagctgtttacacactaccatccatcaagctgcagatggtgcgactaaaattgctattagtgtgctgcaacaccccctctggggtttcagcattgtggacacttctgcctgggtgccaccgtgttctcctcatctggatgctggagtccactgtgggagtcacttgtgacatgcctggtcaagccctgcatgaagcctgctcctgtgtcagtgcttggaacggctggcccaatccctcactcactcactcacacacctcctcccactaggggatgagggcactgttgtagtgtacatgggatccatgctggagtgcaaaccaggcatggtctggcaggctgagtagatggggcatctcctacagtgagcccagaactgagcaaggcctgggtaggggccatcaccagccagaggtctccagcttgcaaagtggtcaagaaaaatcctgtgtcacatctgtggtagccttgattgggtggtttcaagtcaacaatgaagtccagtgttggttctacattggtaacacagtagtatgtcacttaggggcatcatgggacactgggagatgaggtggacaagccttgtttgaacaatggatgcttttggaacactaagagtcttgaagactcaatgaaaggggtatgttaggaagacaaaaatgtccagaccagtaagaaaaaaaaaagacaaaagaaagagaaaagaaaatagaatatactataatcaattaacgtcatcaaccttacaatgttacatcaacagatatggaactggatccaattaaggagcagatgaattgttaggagctc

SEQ ID NO: 205875 - DNA, 1000 bp, Homo Sapiens
aataggcaacattaataacattaattgaactcccactatattgtagtttggggctttacatctcatttaatccttgcaacaactctatgaagtaggcaagtaggcattatccccatttacagatgaagacagtagatgttcgcttgttcaagggtacatagctaatcattggcagagaatgggattcagactttaggacatctgacactagagcccagattctgactctgctgtgctcctcttctaccaagtacctaccacaatgcccagcattcagtaggtgcaaaatgagagtttctttcccgtagtctctctggaagccagagaggtgactccaaattggaataccggcctatttttagtgatgacttattatgtgccaggcactttccatacattgtctcagttatttctgtgacaacctgttgatgctgtaggtcctgtttgtattggtttttatgttcttgattttcctgatcataaaatcgaagtgacccagatccatatggtggctgcaacctttgcctgccagcccctggtttcttagcatctcacagccacccaatcttccctttctgtctccagagaggcctggctctgcctgtggcccctgatcccagctgatccggatggttttcaattgcattgggtgcctaagtctgaaagtccaggctgctctaagaaggtggttttggtactcagctgggtccctgcacacagaggtttggcactgggaggaggaatgaaggagggtacaccacagagtgggaagagtgccgagttggaaatccagaggcccagcccctactcctacctctgtcactggggtgagccacagaatctttgcaagatccagtggccttacctactgcatggagttatcgtgaaaacctccactaagggagttggcctcttggcagtgcattctcttactctgtgatctaagtgttaagcacagacatcctgctcagaattgatttcccaaggagaaacagagctc

SEQ ID NO: 205876 - DNA, 1000 bp, Homo Sapiens
ccaaagtgctgggattacaggcgtgagccaccgcgcccggccaatataggtgaattcttgaaactactatgtgaagtgaaagaagccagacacaaaaagccacatattccatttattttttattttttttagatggagtttcgctcttgttgcccaggctggagtgcaatggcatgatctcagctcaccacaatctctgcctcctgggttcaagcaattctcctacctcaggctccggaatggctgggattacaggtgcctgccaccacacctggctaattttgtatttttagccgagatggggtttcaccatattggtcaggctggtctcgaactcccgacctcaggtgatccacccaccctggcctcccaaagtgcttggattacaggcgtgagccaccgtgcctggcccacgtattccatttatatgaaataaccagaataggcaaacccagaaaaacagaaagtagattaatggttgccagaggaaggtggggaatggggagtgtctgctaatggggtctgggttttctttgggataatgaaaatattctaacactagatagtagtgatggtcacacaactatgcaaacatacaaaaacccactgaattgtacacttcaaaaaagtgaattttctttgggaggccgaggcgggtggatcatgaggttaggagatcaagaccatcctggctaagacagtgaaaccccatctctactaaacaaattagcctggcgtggtggcaggcgcctgtagtcccagctaatcgggaggctgaggctggagaacggcgtgaacctgggaggtggagcttgcagtgagccgagatcgcgccactgcactccagcctggacgacaaagtgagactctgtctcaaaaaaaaaaatgtgagttttatagtatgtaataataccacaataggccaggcacggtggctcacgcccgtaatcccagcactttaggaggccaaggtgggtggatcacctaaggtcaggaattc

SEQ ID NO: 205877 - DNA, 1000 bp, Homo Sapiens
agattaagtaattgaggcttagacagttaaagtaacttgcctaaagtcactcataataagcgctgaaaatagcagccaaacacaggtcagtctgattcctaagtctctgcttttaaccattataagatactgccactatgggactcctcaagaagcatgcttacagggttgctttttcttctgtggtttaattcagctaccgttatatttccgaagaagcagcatcaactggtctttgctgagcttctgagatccaagttggaagccctggaaggtgctacaataaggcaatagtttctaacaggatttttacttttctaaaaaaataagaatttgttccatgtttcttaaaatatgtctgctttttgtaacaaaaattaaaattgggccaggtgaagtggctcacgcctgtaatcctaggactttgggaggccgaggcaggtggatcaccagaggtcaagagttcaagaccagcctgtcccaacatggtgaaacccccatctctactaaaaatacaaaaattagccaggtgtggtggtgcatgcctgtaatcctagctactcaggaggctgagacaggagaatcgcttgaacccgggaggcggaggttgcagtgagttaagatggcaccactgcattctagcctgggcgacagagtgagactgtctcaaaataaataaataaataataaataaataaataaaaagttaccccataaatgtgtacagttgttatcttttttaggacatttcatcatcccctaaagaaagtttgtacccattgtcactttttttttctttttttgagacagggtctcactctgtcgcccaggctggaatacagtgacgagacctcagctcactgctatctctgcctcggggttcaagcgattctcccaccgagtagctgggactataggcatgggccaccacgcccagctaatttttgtatttttagtagagatggggtttcaccatgttgctcaggctggtctggaattc

SEQ ID NO: 205878 - DNA, 1000 bp, Homo Sapiens
ggcacacaccaccatgcccagctaatttttaatttttttgtagagacagggtctcactgtgttgcccatgatggtcttaaactcctggcctcaagggatgctcccttctcggcctcccaaggtgctgggattatagacgtgagccaccacaccctgctccatctgagaattttctagcccacacttgtaactgtgcaaagatcttgccccaagactgtaatggccctgtcctgtttattcagtaaaacaccaaactgcttagtctctgacattaagcaggactgtttctaacttctctttccagcattgtttcaggatctaaacagcccccactccccacccaccatgaacccatctcactttcactggcagacagacatgggtttgaatttcaacccagacattgaccaccttgactacttacagcctcaatttcctgacctgcaaagttggggagaaacctctggcttgtaagttttaggaggagcaagtgaggcgatgcccagtgaatgctccatgagcaggaggctccttgtaaccaggggaagctgctcttcttagcatccccgtccaccttcttgagctgggtgaccctggagaaaatgtcccctctgagcttgtctcttgtgggggaggggacattttctacaaggtcaatgggggcagtgacctcatcctgcagaccaccccaaatgcccacagcaccccgcataggccaggtgccccatgtgtgcccagaggggatgcaaaatgggtatgaactcaagtcaggagcagagcagggagaaacggatgttgggtgggaggtgggcgaaggatgactacagggtttcgagtaaaaaggcaccagaacaatccctggattcctagttaaacccagaaggtagactcagtgctgcagaggacctacggcatgcacctggcttggcccaggaagtcagagaggaaacagaaaaggcagccccaggcccttagaaactttcaatgttttggggaattc

SEQ ID NO: 205879 - DNA, 1000 bp, Homo Sapiens
ggctccgaggaggaggaggcggcggggaccgagggcgacgcgcaggagtggccgggcgccgggtccagcgcagaccaggacgacgaggaaggtaaggcctgcatccgctgcccgagtcccccggtctgggtcccagcacccgcgcgggcctccgcctctcccgcgatgggggtgatcttgtgcgtgcgagaacttttgagtgtccctctagcggaagcgtaaggatacttggtcgtcatctttttgttgctgccggacaaggtaggacacgactttacgtaatactcctgcgggtctccttgaatggcagcgtttagagacactgtcaaaccgtgaaatgtttaaatgaatgcttctctgtagagggcctttaatgtagcacacttagtggctaaaagagccctagatcggggctctgccccttgccggctgtgtgaccttgggcgagttactttgcatccttgtgcggtgtgaatgatgatagtagcacctgcagaaaagaggtctgttttgactgaaatgtgtgacgaggtccaagaggtaggcgggtccagatcatgtagaacccagtaggccgggataagcgtttgactagtgttaagaccactgaaagcttttgcaggataagtagagatggttttgttaaagtttactctagatgctttctaataaatgaattatagggaaagcaaaactggaagggaggagactaggagggaagtgaagaaataatgagtgggtttcagattctcattattgtcaaggatttttgaaaaaaaaatcaaaattcttaatttagttatgcagcacacccagtgtaaatgggaatttaaagatgtcatttcagggcagtgctgttaggattattaggggtctatttgcaaaaaaaggtaaatactactttatacctcacacaaaaattatttccacagtaatttttgaggattgaagtgccaaatgaagaaagtaaaacaaagtgttagaagaaataatgaaagaa

SEQ ID NO: 205880 - DNA, 1000 bp, Homo Sapiens
ctggtgcatttacaatcccttagtcatggagtgctgattggtgcgtttagaatcctctagctagacagaaaagttctcgaagtacccacttgacccaggaagtccagctggcttcacctcttaatacaccctctaaacaggacaccccaactgctgttgggaattgggcaatgaccactctagctacttcctgctggataggggtgaagaaggtaccccacagttgtagtgtcctccagagaggaactctttaggccagtcaaagggccagtgggtcagtccagggctcctcggtagaagttgttaggtgagctcatttgggattccatttgtaagaccatctgtagcttgatggccttgatcctagaggaaacaaatttgacaaggaggttaaaaatacagggcccaaaggcgagtagtagcaagatggctgtcatgggacctagaaaagggagaagccacgtcacccaactccacaggttggtataagagaaaagcattgcctgatttcagaagccttttcctgtaaatgccaggcggtgtctcctactatccctgactggttactgtaaaagcaacactcatcccctaagaaggtgcaatgtcctcctttctcagcagtgaggaagtctaggcctcagcggttttggagagtcattgctgccaaagggtctatttgggattgtagagtaaggatagattttgttatttcttgcaaactatctgagaaatcctttgagagtgtgtggtagtaggataatacatgttacactgttaacttttagcaaactttacttttgttgaaaaccttgtaagtttgggatttcaattattctttgctattaataagacctcgttcagtccatattaacttaaaattggtatagatggctcctccctgattctgtaagtactttaaggcttggctgagtgcaaacagcttgcacgtttgagcaaaccaattattaggcaattttcctaactgcttctacaagaattc

SEQ ID NO: 205881 - DNA, 1000 bp, Homo Sapiens
cttagctaacctaagcattttgtattctcatttaaattctaaagacagcagcgactacaaaaatgcagctgaatttttattgggatgcactggagttatgtatcagtgggtagagaaatagcatctcaatgacagtttttaaatccatgaacatagtatatttcaatatatacttaagtctcctttaatttctctgcaaaattttgcaatttggggtatagaggacttgaacatctattattttaggtattggcatcctaagtatttcccagacagtagttgatgctattgtaaatggcattttaaaattatttattaaaaaattatttatttattgttgcttattccattttccaaatggtttgttcatagcatatacagctgtctatggtgacacagtaaataataactataaatttagggccatttccctttgaccaatgctatctctcattttcagatctttctctcatattctgggcctgtaatatatttgcggtcatcatcctagccagattataattgaacttttgtaataatttcttgctttctggactttcaactaagaccagaaattatagcagaactgttacttttcttttttaattgatatgtttactttcccaaaaacttgccagtgtcccagtcctgaaatgtgtcaatcttcctacctttgttcttacaacttatatcaagttagctagccctagcgtcgcacccacaggagtttccaagtttatttattgcccttcctccttcaacaaagaatgttccaaaaaatagttgtgtatcgtttttcctgattttagtaaatgatgttcaaaaatttctttatttcctccttgtagtaaagaatgctttaaaagtcattgtaaaaatatattgtgtgatgggggtcttggcatgaaaattatccaatgtgtagaaaatgtttggggtttgcaagaaacttgtattcagcaaacttggttaaagccattatttacatacaagagaattc

SEQ ID NO: 205882 - DNA, 1000 bp, Homo Sapiens
actggtgacattgagcatattttcatatacctgggaaccatttgtatgtcttctttgaagaaatgtctcttctcttcaattctttagcctatttttaaagcatgttaatcattttttaattgaatagtatcagtaacatgcatttttaaaattaaccttttatcagatatatagtttgcaaacattttctcatattctataagttgtctttttaccctgttgactggatatccagttttcccaccattatttgttgaagagactcttctttccacaatatgtcattttggcacccttgttaaagatcattttattatatatgcaaaggtttacgtatctacgtgtctgtctttatgccagtatcatactgttttgatttctgtagctttttgtaatatgttttaaagtcaggaagtataagccgtccagctttgttcttcctttttcaagattgttttggctattcagggtgctttgtggtttcatacaaattttaagagtttttttttttttttctatatctgcaataaatgtcattgaaattttggtagggatcgcattgaatttgtagatcattttgaatacatggacattttagtaatattaaatcttctaatccatgaacatgaagtatctttccatttatatgtatcctcttaaatttctttcatcaatgtcttagagttttcagtgtatgtctttcaccttctagttgcatttactcctaagtattttgttttgtttgtattctactggaaatggaatcattttcctaatttcttttttggattgtttattttaatgtatataaatgaaactgattttggtttttgattttttatcctgcaacttcatcagttttttaaaatagttttaactaatttttgtggaacctttagggttttctacatataagtttatgtcatttgcaaacaaagataattttacttcctttctgatttggcctttcattttttttccttgctctgggtaggaattc

SEQ ID NO: 205883 - DNA, 1000 bp, Homo Sapiens
gatgaatgccatgagtccagcatgtcaccctgtttctgtcctgccacagtgctcgagtcagtgccctccctgcttgcattcggcccacaggccttgtggctcctgtttctgctgacctgtccagcctcacagtctggggaggccttggggtccccagcctgtgctgggacaggggtattattccagtagcccttctgtggaacaagtagggaaggagtgatgtgacctctgtggctctcctgggacacaggttagtcctgtgggtgacctcactttagagagggctggccagctgtgccggaattaggaagtgggtacagctggacaaaaggtggctggagccagctctgcagaagccacacctgctcatgagaagggtatccttgtgagtacaggggaaatggcatggagaaagacaaacaccggtgggtggctctgccagcttcccctggggtgcttctggcaacgcccaggtctgtgcacatccagatctttgcactgcgctgttttgacttggagaggagaggaggaagttagctgctctgaatggtgttgctgctaatctctacagcactttcctgtaaattaggaacggtaacacacacacccctcccccaccccgctggagaagccctgcaccagagcatacagtttggcaagtaggaggagggctggagcccagcctcacttgctgccctggccaggccgtgattgcccagggtgcatactgtggctggtgctctgccactgctgtttctgtcctcagggtaggacacaaggagggcaagtagggccagtcagcgagaggcgcaggtgacgcgtgttctagggtctgagatcagctgcttccatttcagtaattgtctttggagctacattgtctgctcatacaacttcccttccagatagtgccattttaaaaatcccatttacccaaaagaaaacctgacacctggaaaggtcgtttgcactcacacaagtgatggttggtccagaattc

SEQ ID NO: 205884 - DNA, 1000 bp, Homo Sapiens
tgatggaaaccttggaatttctatttctgacttcaaatgcttgtccagtcctctgaggacgtcagacaagagcctggctggacagaggcgggctgcagagggggtggcaaggaaacatctgtatttaacttttgggatcagcaatgctcagcccaccttttggctgtagaaagactaaagttcaggagggaggagcatttcacagaaatttttgaaattcttcagatgaaagagggatttcacttactttatggcaaaggaagcagacttctctcaacataaggaaacacttccttaagattcaggcaggagatgtattctggtcctgccttagctattcttttttttgttttgttttgtttttgtagagacaaggtctcacccaggctggtctcaaactcctgccctcaagcgatcctctcgccttggcctccaaagtgctgggattagaggcgtgagccaccacgcctggcccatagccattctcaattactgtaggtgactataactttcaatggtaagagttttaggagtttaaaatatattttcatatctgttgtttcatccagtgctcttcccaaagcaaggaaaggagaaggcaatgctgaacctaatggagagattccaggcactgtggagtgagcagctctacagccaggttagtttgcatacattataataggctgcactcttcctgggggtgggagtcctgccttggaagccctaccttccatgattccttccgagacatcaaaacatgatgcttaggctttactatcttccttcgaattaagtggattcccagtcgctcctggaggaagctcttcagcagtggagggacccctggtgccatgatgggaaaataagattactattagctaaaatttatactggggcttactatgtgccaggcactattcaaattgctttacatgtattactgaaacttattctcaaccctaggaggtaggtcgagaattcctacctcctaggagaattc

SEQ ID NO: 205885 - DNA, 1000 bp, Homo Sapiens
tttcactgcagtggagacaaggtgctgtcacatcatacttttgcacaactggttgtcatagcaacagctgggctagaagtacattaacaggatgtgaggtagggcacaagaggtgtctcaacaccctctcatggcgaatttttaaaaaataacatggcataaccatcaatagatgtggttacctgtaaatgaatagttaaggtgacacaggaccatgcaagatttatcaaggtgactataagtaagaatgcctaattccaatcaaatgctgattgattaaagaaaagacaaaatatactatacactgctggtgggaatataaattagttcaacctctatggaaaacagtgtggagatttctcaaagaactaaaaatagaattaccattcaacccagccatcctactactgggtatccagcctaggaaaataaatcattatataatatagacattggtcaggcgcagtggctcacccctgtaatcccagcactttgggaggccaaggcgcagatcacctgaggtcaggggtttgagaccagcctggccaacatggtaaaaccccgtctctactaaaagtaaaaaaattagccaggactggtggcaggtgcctgtaatctcagctactcgggaggctaaggcaggagaatcgcttgaacccaggaggcagaggttgcagtgagccaaggtttaagcaataaccccaactctgctcagtgttcttcatctcatgctactcaaattcaccaaggaccagtatgtaaaccatggttcaactttaaaaattcacagaatggaggttggagcgaacccggattgcaccactgcactctagtgtgggtgacagagccagaacatgtcacaaaaaaaaaaaaaaaaaaagaaaagaaagaaagaaggaaggaaaggaaaaaagataagatatagataaagaatatatcccacgttttcaatcatgcatatgggctctggtaagagggaggcaaaagactatagaagctt

SEQ ID NO: 205886 - DNA, 1000 bp, Homo Sapiens
ggggaagcttgaaacctgaaagccctgcttgctttctcagctgggaggctggtagcctggggcaggttctcagtcctgttcatcagctgcctggaaacaaactcggtgctgtcctgtgggggatgggggcgccacagtgggagtgagactggccttttgggctgtgtaggagctgagtgaggcctgtaactgccagcttcccctcacttccctggtgacctgtgtgacacagcggaggcatccataatcctcatgggaacagaaggccatggtcctgagaaccatcccccatccctcacagcagccgcagcaaaccccgcctaaggagagtctgagttcagacacacctaatcctgcccccacctgatggtctttctctatctgccctggtagctgaagacaaaggacataatgtcttgggagctctagggccctgcccgccacctgatcctccctatactaccacagcagatgggctcttgaaaaatgccacctcctggcaggaggccaaccagcacaaaactagtgcagtaaacagactacaactaaggatcctcacagagtccatttcactcccctgccacctccaccacagcaggtgctgctatccatggttgagagacctgaagatggttcacatcataggactctgtgcagacacccccagtaccagcctagagcccggtagctccactgggaggctagatccagaagagaaataacaaccactgcaattcagctctcagaaagccacatccctaggggaaggtggagagcactacatcaagggagaaccctatgggacaaaagaatctgaatagcagcccttgagccccagatcttccctcttacatactctacccaaatgagaaggagccagaaaaacaattctggtaatatgacaaaacaaggttctttaacaccctcaaaagatcacactagctcatcagcaatggatccaaaccaagaagaaatccctgaattgccagaaaaagaattc

SEQ ID NO: 205887 - DNA, 1000 bp, Homo Sapiens
ggaagcaatgtgaagttagtgggaagaacatcagattctaatcttagctttgccaataattctaaaacaggatataaataatctatcctggatccttatcatttagttaaacctgtttggagggtaaaatgagataatgcacttaaaaataattctaaaagaaaaaaattataaaatgaaataaaactttatctcaacaattggttgacttagtataaatttatttaacaattggttgactttggtataaatacaggttgagaatccaaaatcttaaatattccaaattctgaaactttttgagtgccaacaaggtgccacaagtggagaattccacacctgacttcaggtgatgagtcacagtcaaaactttttttcatgcacatagttatttaaaatattgtataaaattacctttaggctatgtgtataaggtgtatgtgaaataaatgaattttcatatttagatttgggtcccatcccaaaatatctcattacgtatgtaaatattacaaaatctgaaaaagatttcaaatttgaaacacttctggtcccaaccatttcagataagggatactcaaactgtaacataaacctcatatttattttcctaattcagatgagtctggtattaatatatttaacagggtaggtctgtaatggccaagctcattacagtagtatattattagggaaatctgtattatcctaaaatacaaaatgtatccttaatcccacacgatgttcaatttatatactaacccccaccctcagctgctgagataattggattgactttcatgcttctcagtttctacgtttcctttagctcttccatcctagtaatagttaatttcaaaggctttaggattttattgaatgcaatctattcagtgagtttctgtcctgtccttaaagatctatgggaaaaataaattctataacctccttctacgcctaacaacttttacagtgagtaaattctgtacaatctgaattc

SEQ ID NO: 205888 - DNA, 1000 bp, Homo Sapiens
cctcggcctcccaaagtgctggaattataggcatgagccaccactcccggcctgcttgtttaacctcttaataaagtttgtgtcttctaggttacaacagttccaggtaaagacaatgctggcacaaggtttctaacccatccatcttctgacctagagaatgaaagcatcctgcctttgggccgccttgggtcaggtatctggagatttttactcctctagtgctatgcagggcctattcccatgaactcagcagggagcagttacagaacatggacctccacccttttgcaacccctttcagattaaggaggagtatctgatctctgaggggagaatgaggtaggaggcaggtgggactcgactgtgggccaggttgaagactggttgaaactgggaagagtctgtgtgtggtggctcatgcctgtaatgccagcactttgggaggccgagccgggtacatcacttgaggccaggagttcaagaccagcctggccaatatggtgaaacaccgtctctactaaaaatataaaaaattatacaaaaattagccaggtgtggtggcgggcgcctgtagtcccagatactcaggaggctgagacaggagaatcacttgaacctgggagacggaggttgcagtgagctgagatttcatcactgcactccagcctggctccatttcaaaagaaaagaaactgggaagagacactgaaggcacctttccataagacatgcccactaacgccatgactgtttaccattgccatggcaacacctgaaagttactgcccatttttgagctattttaaaataaccgaccccttaattagcataccattaagagtgggtataaatataactgcaaaagtgcccctaggctgctactctcagcacactgcctatgaggtagccctgcatggcaggagcagtcacggagctgtgacgttgccactgcttcagtaaagctgttttcttctacccccggcttgctcttgaattc

SEQ ID NO: 205889 - DNA, 1000 bp, Homo Sapiens
atcatggatcactgcagccttgacctcccaggatcacacagtcctcccaactcagcctccctagttgggactacaagtgcatgtgccacccaccatgcccaggtaattttctttattttttgtagagctgctggtctatgttgccagggctggtctcaaactcctaggctcaagggatcctcctgcctcaacctcccaaagtgctgggattacaggtgtgagccaccttgcctgacataaaatttaaatttctctttacctatttttggtgcaaagaaatgtgactgggcaatcaactctcaagcatgaaaatatgaaaatacatcaaggtaaatttctgtgtggaaaatgaaaagagataaagaaaaaaatgcaagagtctcaatttaaagaatttattcacaatttttttgttttatttgtctctcacggtcttgcctgaatatttgtgagtcttaaaaaatgaatagtgggtatccaagtgctatagtatttagtccattttaaaaagtgatacaactctatgtttaaaacactgatatttataatacattagaaatatatcctttgcaaatatggaaattttatggagaaaattttgaatgtcaactttaaaatacatgatacagagttttcaaaattattttagtaggtatgcagtaataaagtttaaagaccacggtcctagactgttattaacataattgcctggatccatctactcccagcctcccctcattcgaatccagtttatatatcagcaccacttcaatcttcccactctgttcaatagatgcccttgcacgccctccctcccaatccctaccattccaccccctgataagcctcccaggcagtctgaattaaggtacaactttctttctcatgctgtaattcaagggtgtccaggatctggccccaacctagtttcctcctctgtacacagcccatgtggagtcaatttgctgcaacatgccccactacttttctgtcttatgtg

SEQ ID NO: 205890 - DNA, 1000 bp, Homo Sapiens
tctgtagttcattaaggagtaattttactgtatccactttctgagttgaccgctagatcctggctggctgttgactctatttgccactctggaggaatggcatgaaaaggaaggattcttcctttgagaccctaactgaatgactgggctctctaagtcttgtgaagcagttgtctctttgacaaccgaaaaaaaagagttatgttattttgaacagacttatgagtgacttcaataatttatgctagaaaaaaagtcattcttctatattgcctaggactctcttaagagtacagtacaatatttcatagtacttagtactcttacatactattattaatagtactattactagtacttaatagtaccaatagtacttaacagtacagtacaggggtcagcaaactttttttatacagggccagatagtaaatatttcaatctttgctggccacacggtctctgttgtaattactcagctctgtgagtgcatgtggaagcagccataggcaatacacagacaaatggctgtggctgtgttccaataaaactttgtttgtggacattgaaatttgaatttaggatgattttcacatgtctcaaaatattcttcttttcttttttttcccccaattattaaaaaatgtaaaaattgctcttagctcacaagtggtacaataacaggcagcaggccagatttttttttttttagcagatttggtttgctgaaattttttgtagtaaaaatagcccacagcttagggccctgtgacctggatttgagacaaggagctatgattcactggcctttaaacttggccaatttgcccaaaccctagttttccctctataaaatgtaaattataatactcaacctctcatggtgaattagaatgaaataagataatttgtacaagtgctcttaatgctctcaaacaccacaccatgttgggtaaaatattgttgggttattattatatattctgtgatttatcaaaat

SEQ ID NO: 205891 - DNA, 1000 bp, Homo Sapiens
acttgggaggcggaggcaggatgattgcttaatctcaggaatttgagaccaacctggcaatgttgcaagacctgtctctaaaagaattttttaaaaaaagaactaaatatatgaaggcctttaaaaaacagaaaaactattacacacacacgcacaccacaatttttaggttattttatagataggttacagtatacttcttcaaaaggtgcaatctaaggaaagaccagtcagtaaagaaatccagacctatattagactaaactatttgtaaatgtgtagatgtgtgaatactaggcacaaccatggtaaataacacatcctggagtctgccccctgctcaggagctgtgttgagaagacaaatctataattcagattctttgaagaaaaatttagaggcaagagtggatgagactaattgctcagggtcacctaaggcaaatctgtatctagagattaagaggaacatatcctagggttggactgagctgtggtaaatcacaggattatataactctgtactgtgttctgactttcgtaacttggctgggagaagggaagagtgagcaagccccctgccctcccctaaagcaggcgctttgcctaaagccatgcaggactgcagaaggcagctgcagatacagttgttgtgtaacacgaggtagggatgctttgggcacctaccagggcactatttatcttgctgactggatagcaactggcctagcacaatagttcattcagtcggcagctattagataagaggctaaagtacgccacgggaaaaaggcagggcctttagccgcagaccacagagtgaggcctgctaagcctctgccagccgtccccacctgtctgaatgtttagaaacgtggggctattagaattctagggtttcagagaagatactggtcagcttctgccagaagagacgatgtaagatggcagcaagcctggcatagttagacagctgaacatgcctgctttgaacatagatc

SEQ ID NO: 205892 - DNA, 1000 bp, Homo Sapiens
tgaagttggacactgtggccagaatggacggacttgacactgtccctaattcttttttttttttttttttttgagacagagtctctctctgccgcccaggctggagcgcagtggcctgatctcggctcactgcaacctccacctcctgggttcaagtcattctcctgcctcagcctccccagtagttgggattacaggcatgcgccatcacgcctggctaatttttatatttttagtagagatggggtttcaccgtgttggtcaggctgttctcgaactcctgacctcaggtgatccacctgccttggcctcccaaagtgctgggattacaggcatgagccaccgcgtctggcctctctcttttttttagagacagggtcttgctctgttgcccaggctggagtgcagtgacacagtcttggctcactgcaacctctgcctccagggttcaagtgattcttttgcttcggccttctgagtagttgtgcctggctgtgcccagccaggataaatttttatttaagtcctttgcacactttctttctttttttttttttttttatggagcttcgctctttagcccaggctggagtgaagtggcatgatctcggctcatggcaacctccccccactgggttcaggagattctcctgcctcagcctcccaagtaattgggattacaggcgcctgccaccacacacagctaatttttttgtatttttagtagagacagggttttgtcatgttggccaggcttgtctcaaactgctgacctcaggtgatcctctcgcttcagcctcccaaagtgctaggattacaggtgtgagctaccacgcctagctccctttgcacactttctaactggatttttgtgttgtcgttgagttgcaggagttatttctatattctggatattaatctcttataagatacatgatttgcaaatatttcttccaattctgtaggttgccttgggctgtacttttaaattgttgaattc

SEQ ID NO: 205893 - DNA, 1000 bp, Homo Sapiens
agactcagtttcaaaaaataaataaaaataaaaataaatgaataaaaacagtctgactttgaccaggcacagtggctcatgcctgtaatcccagcactttgggaggcagaggcgggtggatcacaaggtcaggagttggagaccagcctagccaacatggtgaaaaccctgtctctactaaaaacacaaaaattagctggtggtagtggcaagtgcctgtaatcccagctacttgggaggttgaggcaggagaatcatttgaacctgggaggtggaggttgtagtgagccaagattgcgccactgcactccagcctgggcaacagggtgttactccgtctcaaaaaaaggaaaaaagaaaaaaagtctgacaccaaagccatcatagttcttgccaggcattgggtgtgtggagcgagccacctttctcccatctgtggccatggaggtctcactactgccttccctggttcctgcctccactcagattgggagcaaatgagctccagacaggttggatacaggttcactacatctaataggtcccgggcagtcccggtctccctcccatcttctagtgtctccaaggttgctgatggctgtccagaacagtaaacctaagcaaggaggtcagccagctgcccaggtctggctaagctgacttcaggctcagtcagaccttagaggagagcgccctctctctttcccttaacgcacaggtgggcagacacttgaaaccacttctaatatggttctgaatatgagtggaagagactcagcagggtcacattctccttaggtggggttgccatggcaaccacagtcgcatccatctggctttgccagctcgggtcccaggggattttcttttccagcggcagcagcatctaaccctgagagggggaaagagaaaaaatgtgtacattcatgctcccttgcagaatgttcccacagttcactcagtgcaaactaccccatcttgggtgaacttaaaggaattc

SEQ ID NO: 205894 - DNA, 1000 bp, Homo Sapiens
ttaaataaattctgttgttttaatacttcattttaggtcttggctattagaacaattcatgagaagtttctctattttctacctgccagtgaagagaaaatcatatgcctcactcgagtatttgaaccttttactggcctgaatcctgtgcaatataatccatatactgaggttgtatatatatttgtttatgtctgtacagtttcctgtttatgttgttctttttaaagacagatttaaaaaatactaaagtctaacaatgttgttaatgtatgtagcccttgtggaaagctgcggtgtctcaatatgaaaagattattgcacctgcggaacaaaaaatagcaggaaaattgaaaaattatatttcagaaattcaagacagtccacagcaggtaaaacattgagatatttcacttttaatatttctcttaagctaatatatatataaaaatatatatatatttactgagttgatccgttgggatgaacatgtacttattttattttatattagcttcttcaagcattcctgaaatataaagagttggtaaagcgtccaactataagcaaagaattgatgttagaaagagaaactttactggcaagacttgtggactcaattaaaggtaaaagtttatgagattatagtgtttgcttgagagaatatttttgtatattacttttttcttcgttgcataccatttaggattaaagatacatttttctgacattttcatgctgaagattaatttacttattctgttataaatgacagatttttttgcattaacaagttattataattcgctgtttcatttgatacatggtacagtccttggggataaggaccaactcattatttttctttctacagcatctgacatagtgcttggtacgtggaagttatttaggaaatctttgctaattctttgtaatcatttatttgatttaaattttatagattttcgattagactttgagaatcggtgccgaggaattc

SEQ ID NO: 205895 - DNA, 1000 bp, Homo Sapiens
acccaggagttcaaggctgcggtgaactatgattgcaccactgcactgcagcctggaagttttttccaaatgtatatataatatgtacgtgtgtgtgtgaatatgtctacacactcacacttatcttcatgttttaaaagagccattatctgacttagtgtcagttatcataaccatatcatacccagagtatagttaccaaacgagacagaaagttaaaaaggatatccaggaattgaactcagctctgcaccaagcagacctaatagacaccaacagaactctccaccccaaatcaacagaatatacattcttctcagaacctggggtattctttaagatggggtagggagtacagctggaccccaggcagatagcaccacccactcccctctctttttcctcaccctactacccacagactttcaagtctgaggaaaacccccaccttcttctaccctgttactagataactttctttccaatactctgaccaacccttacccctcaccatttgtgagtgggggtggttgggtgggggaagaaaaatcttcatagtttaggttggcttagacttcgggaatgtaaaataaacatctggcgggggtgggagagggctgggaaactttcattaatacaagtgtattaatattagtcacagctgtaatcccagagctttgggaggccaaggtgggaggattgcttgagcccaggagtttaagaccagcccgggcaacacagcgagatgccatatctaaaaaaagaaaaaagtcagaaacaagttgaaccctgtttgctgacttcaaaaaagagagttccagcagaggagtattaaaaggatatgctttgatgaaatcatgacaatccaaggttttataggaggacaaaccagcaatttgagggccctgggtctttttccttcggaactgtctcagcctcctgctctcctgcttcccagccaccgtccacatgtccttattctgtggaaatggctgaattc

SEQ ID NO: 205896 - DNA, 1000 bp, Homo Sapiens
aattgacaatgaatttaactttttagcaatcattctctctaaattcctgtgtgatagcaaaaattacccttaccttttgagcatataaagggtaaagagagaaaaagtcatattgaaaattatgggttttttgcaggattttaaatgatttggcctagtgaatgggtctgtgtttgtattatactaattcacaatggagatttcaaaactctttggaagaaatggatgggcttgggttgtgttagggaaaaaagaattcaagtccagatgtatgagtctcagaaataatttgttggcatagttgtgattatataagtaaaatcagacaaatttaaagacagtactctttaatgaatctttaggttccataggcagttcttaccaagaagatgtcgattccattctccaacacccactaccgaattccacaaggatttgggaatcttcttgaagggctgacacgcgagattctgagagagcaaccggacaatataccagcttttgcagcagcctattttgagagccttctagagaaaagagagagtaagctttctaaaattagtcattttttaaaataagaaactaagcatttgtttatggtaaaacttgcttaagaccatctccattctgcagaaagccttttatgaggcagggagtttcagataacagttcttgctctttgaaacagtatgtacctctttgatatgttctcttaaattcgtttcatattatcgaagattaccagttcattattcagaccgtcttcattgtatttctcacggacatacagcgtggaaggtaactgcaaaagagcatacatttctcgggagaaatcagtgggggaaaaaaagatcatacagtctaccctcgccacgttccagcatactgttcctatgcatccctggcagctgactgttattcctgagatgagtatctgtggtttcctttcaattttgattccttccatttgaaagtattttaagtactgcaaaaagaattc

SEQ ID NO: 205897 - DNA, 1000 bp, Homo Sapiens
ttctagggagccatggaaacagtgctcctaggatccgccctccagtcctgctctcagtgagaactcagcgcagggctccggacacgggcagacgccgcgctttgtcttcccgtcttcccctcacctcagtgtcctctttctctcacgttctttttttttttttttgagagggagtctcgctctgtcacccaggctggagagcagtggcacgatctcggctcactggcaagctccgcctcccggattcacaccattctcctgcctcagcctcccgagtagctgggactgttggcgcccgccaccacacccggctaattttttgttgttgtatttttagtaaagacggggtttcaccgtgttagccaggatggtctcgatctcctgacctcgtgatccgcccgcctcggcctcccaaagtgctggtattacaggcgtgagccaccgcgcccggccctctcacattcttaagaaggcacagttcctcctactccttcaaccccaaagagaagccctcgggaatatcagtaatgaaaacagcacgttcccaggaactccctggccccgctcctcccaggaaccgtctctgcggtgctgcaggccatgagctccgctctgggtgggaaatccagcccctgccgcgagggacctgggccgctaggccaggaggccgtgtcatcccattcacaacagcaacaacgcaccctttccaccgaggcctgtccatgtttggggctgttctctgcctcatacagcaaagtgtggggaggtggagattgttttctaggaagacaaggttcttcctgggagaaaaaaacctcttacgcagttggctttggcattttccaggaaaaggagggcggggcttgagtctgggttttctgtgaaggccgagaaagaaggcaaggattataaccggaaagttcagagtgggatgtagctacccctagaactcgtgctagtaactcagtctgggcttcataattgttgtcaaagtgaattc

SEQ ID NO: 205898 - DNA, 1000 bp, Homo Sapiens
aatctgttccagaccttttcactcagagagctcaagtgtaactgaaggggggcaggaaagaaaaaaacgtgtgggtttctctgatctagagtgacagcaaatagagacaagctgttagctgctggatttgaagttttccttgaaatcagaagttctgcatagtggattatgttttatctctgccaaagaaatataaactatccccttgtttctgaccctttgggccatacaaacacaaacaaatggtgtaggatattgctttcatgattgtggagtttgcttttcgatattcttcaaatctatattaaaatatttatcaatttttggcttaagtcaagtagatgtgtgtctttcagtgtcttagaatgggagctaagcccctagagaagcttaattttagctccttcaaacaaccccttttatatgtttatttatcagatgctttcagattaattatagttagaatatagccatttgctttaagattaaacatatttagtaattacacttcatttgctgcataataacgtttcagtcagcggcagaccacatatacagtcgtggtcctatatgattctaatactgtgtttttactgtaacttttctatgtttagatacacaaatactacccgttgtgctacagttgcctacagtgttcagcacactaacaggctgtacagttctgtagcttggggcgataggctataccttacagcctaggcatgtagtaggctataccatctaggtttgtgtaagtactctctaagatgtttgcacagtgacagaattgccaatgatccatttcacaaagcatatcctggttattaagtgacacatgactatatttatagtatcaatccttcacatctcacatgaaattaatgttatttatgtaattttagggaataaaagagtaatttgttgtggattgggttttttaatgatttttttctttaacatttaaaagctatttctttaatattttaattttagagaattc

SEQ ID NO: 205899 - DNA, 1000 bp, Homo Sapiens
tatggcagacactgctagttgcctctaatatctgttttttccattttgctcagtaataaaacctcaaatgttagctgggcatttgtcccattaattaaaaaagattgtattcaccatcctctcttgcaatgaagtgtggccatgtgattaagctttgtccaaggaacgtaagttgtagtagtttgtatggatcttctgggaagtttttttaaaaacaggaagtatgcccttttctccccgcccccgcccccccgttttttttttttttttttgagatagagtctctctctgttgccaaggcaacagtggtgtgatcttggcccactgcaacctctgcctcctgagttcaagcgattctcctgcctcagtccctgagtagctacgattacaggagcgtgtcaccatttctggcaaatttttgtatttttagtagagacagggtttcaccatgttggccaggctggtctcaaactcctgacctcaagtgatccacccgcctcagcctctcaaagtactaggattacaggtgtgagccaccgcgcccggcctctcttccccttttgctggtcttcctggctagcatgttgatgtcatgttattttctaagttagggtggaaatcacaggtagcagatggcatagcaaactgtcacaaagaggctgggatccctaatcgttatggagccaccattttattctaggactgcctacctttacctgagagaaagaaacttttatctttttgccattgttgttttggacttttcatctgagtatttctcttttattttcttcaaacaactacacctatctgatattatcttgttcagttttctttgttattttctgtcttctccctctagaatactagcttcgtgaaaataaaaatcttgtctctcttgtttctgtttgtttccttagcacagtgcctggtaaatagtaatgactcagtaaatatttgtagatgaatgaatgaagactagaagattcgaatggaattc

SEQ ID NO: 205900 - DNA, 1000 bp, Homo Sapiens
ggtgggtgggtgggtgaatggatagagaaagggaaagacagacaaagaggtttcaatagaattgtgacagggattggccttatgcgatcgctgtaaggctgttatcttcacgtctgaggctgcagcctaatgtccatggggcaggcagttggggaaggaaagacagctgcagactggggagatgtagaacatgctggaacccacagcacgaactggagcccacaaggagggactggcgtccacgtccaccttactgcttctgtccttgatgtgggtgtcaggcatgagccagcgctctttgtcatggaccaaaacacacacgcctggccccagagtcagagatgctgaaggaagcccccggcagggtggaatggcaggcccagcccaggcctcatgcccaggaggagagcccgcgggtgcaagactgcctgtggcagtcccgggaatggctgctgctctgtctccgctgcctcccttttgcaagaatctcttcagtgctgacactgactggaaatgtcgagggaagggaattctggaaaatgcagttctgccttgccgcactgacacattgtaaagccaacacagatggcaagctagccaagacttggagttggggcaggtctccaaagagaaggtgacatctaagccaaggcccaaggaagggcaggaggcagctggatggaggaaagagagagactccccagagtgctgggatcccatgaaaacaaacgttgtctggaaaaatcttgtgttttgaaaaggaaatggaattttaaaagggaaaagtgtgtccccaaagaataaacttgtccaaaaacaaaaacataacacttttatttagcatctaagtgaattgaaatcaataaactggttgagaaaccactttccaaactcaccggatgggtcacagcttcctcccccttccctcccttccacctttctttcttcattttttttgagatgggggtcttgctacattgcccaggctggcctcgaattc

SEQ ID NO: 205901 - DNA, 1000 bp, Homo Sapiens
gtcatttttacgcacatggtggtttggctgacttcatatctggctcactggggttggggccatagggctgttactctggccaggagcatgggcatgtggttgcttggttggtttgggaatgtgtttgtcagaggcagcccacaagattgtttctcaggcctgggatggggcacaaggctacttggctggcttggggatgtgcttaccagaggcatcctgacaggctgttttttagttctgctatgtgggcacatagctactgggctggcccagtatggcacatatctgcttggggtgacccatggggctgtttctcaggctcaggacacagcggcatgactgcccagttgacctggggatatgtttgcttggggtggcccacacgggtgtttctcaggctcaggatgtggtcatatggctttttggctggtctagggacatttctgctcggtatggcccacagggttatttcttaagtctaggatgtgggtgcacagctgctaggttggggaacagacatcaactcagccaaatcatagctgatcctggacccaggctcctcacagctggttgtggcatttagccatcagtatgggcttggcataatgaaaatggagttacagtactgaggaagtatagtggctaccaggtcccagaggagggtgcactctagaggtggctctggtctcaagatggcactatgctgcagcagcttgtctcacaggggttggtgaggggcagatggtgcacaccttgtgtgcctagtctgaggcaatgcgtctgcatgaattcccagcagccttccaatctgggctcaaggcttgttgagtactatggagcttcccctgtagtaagaatggtaggtgttttcagtggcactggagagtggcgggatcatctgcttacctttttcctgcaactggaagtctctcctaactctgggccaatctattccaagtggtggagacaacacaacggaggtgatgacctcctggaattc

SEQ ID NO: 205902 - DNA, 1000 bp, Homo Sapiens
cataatatggagatcaagaatgaaaataaggatttgagagacattgataatttagtggtgttcaagcccatcaagagtgaatcagaaggttgtgagggaactgagaaaagaaaataatcaggaatagaatctgagggtaaattggcttttaacaggcttaaaaaaagaataggccatggaaaccatgatggaattttctgaaatgtggaaatataggtaacaataaatagttttaaaaaccaagagatgatcataggatcatatcagtagatgcagaaaagcatgagaaaaaactcttggctaactagaaatagaaaggaattttctaaatggtaaaacgatgtctacaaatgtctacagcaaacatcagtacttagtggtgaaatatggaaagtgtttaactaaaaaactaagaccgagataaggatgcctgctatctccaattttattcaatattattaaaagttcttacaataataaagtaaaacaattatgtacacagaaagatacaaataaaaatatagttttagaaacagattatgaattcaatacaacaaatgtttggtatttctagttaaggtagtgtgacataggtgtaaggattttcaaatgcatcaacagaacaggaaagagagagttcagaaatagatccacatggatatggacacttgattcatgacaaggtttcagaaaaataataatttcaataaattgttctaggttcattataatgagatttattgccatcttaagtgtaagcaaaatccatcttagacagtgtacatatctaaatttggaaattaaagcaaaaagttttagaaaatgccataaaaagtttttcttcatgacttcagaataggcaaagacttcttaaacagggcacaaattacatcaaccatactctatgaaaattaagaactcattttatcaaaagataaacagaataaaaatgcaacccagagtgggagaagatgttcagaaaacacatatcaaagaattc

SEQ ID NO: 205903 - DNA, 1000 bp, Homo Sapiens
ctctctctactaaaaatacaaaaattagctgggtgtggtggtacgtgcctgtagtcccagctactcagcaggttgaggtgagaggattgcttgaatctgggaggtggaggttgcagtgagccgagactgcaccattgcactccagcctgggtgacagagtgaaactctgtctcaaaaataaaaataaaaataaataaattaaaacactatcttttatgaagcattcactgtgtgctagctactttccttgaaatttctgatttactcttcactctcctatccagtaagtgtgattgtccatctataagggatatagagctgttgaatgccttgccagagtcacatagccactaagtggcaaaagtaggatttgaaccctggcctagcataccccctagttgccttcctttccctgctccatattgctatttctaggaaagatcacagaaaatcaaggcagttactgtctctataatctcattctgtcaggaccacccaaaagtaagcttcaccattccaaataggaaacagcttttcaaggttgcccagtagctgtaaggatcagcagtccttctaagttgctgacttccttcacgtgttactttaaggaaggaggcaaaagacagaatgggaaagagcacttgagcttgactcctggctcctgtttaccacctgtgggaccttgaccttgggtgatgcatttaactccatgaggctgtttccttatctgaaaaatgaagaataacagtaactgcccagctgggttgtgagaattaaatgaaatgtgggtgcaagccacctgcatggtgcttgtcacaaaggaggtactcaatcaatactgacacccttcaagcagtcattgttttctcattcatgctattagcatctgttgagtggctattatgtgccaggcaccttgagataaacagatgagtcatagttcctgcctccaaggagctgacagtctagcagagtaacaggcatatatacaaccaagctt

SEQ ID NO: 205904 - DNA, 1000 bp, Homo Sapiens
aagcttgttgcagctctagccaaggtcctgccctcttcccgccccgcccctagggtccagctcccttcacctaggagctgccaaacatctggatcaacctgggcactacgaggggttgaatttctaccattatcgcgccttttgatatttttttccagacctcctgctcacatccgtaaagcccactgattcttttactacactttttatgagaacaagacattttctaggaagatggtggcagaaaaagagaccctgagcttaaacaaatgcccagacaagatgccgaagaggaccaagctgctggcacaacagccgctcccggtgcaccagcctcactctctggtttctgagggtttcacagtcaaagccatgatgaaaaactcagtcgtaagtgatcttcctgaattaaatgcactcgctctgaatcaggggacacgagatttacagaggttggccagccttaggatggactctgagccatgtcctgggtggtctttgccaaaaaaggcagttacttggcaagtagcaaacggtgccccacagtgtgtggggggcaggctaggttgttagaatcttgggcaagtgatgtactctgcccatttataagcaccttcctgataacttatggtttctggaccgcccaaaattactcttaagctatttacacgaggaaaaaagatcccctttacttactaattcctaactagccccactcagcaaagggccttatagaaggtgagttcttagaaatcataaactcttgcaaaatttaacatgagctgatatacaaccgggaacataaactcatgaaataatctataatgagaaatttcttcacttcaacctaggaaattttagaatatcctagcatttgctctaacaacacttgtctcttacaaaatgatgtcatcttcttagagtactgaaagccaacttaatatgaacactgtttcctgacaggccttttaagatgatgtgctttaaacaatacaagctt

SEQ ID NO: 205905 - DNA, 1000 bp, Homo Sapiens
cacaggttccagcagcactgatgtgaaggaaaaccgcaatctggacaacgtgtcccccaaggatggcagcacacctgggcctggcgagggctctcagctctccaatgggggtggtggtggccccggcagaaagcggcccctggaggagggcagcaatggccactccaagtaccgcctgaagaaaaggaggaaaacaccagggcccgtcctccccaagaacgccctgatgcagctgaatgagatcaagcctggtttgcagtacacactcctgtcccagactgggcccgtgcacgcgcctttgtttgtcatgtctgtggaggtgaatggccaggtttttgagggctctggtcccacaaagaaaaaggcaaaactccatgctgctgagaaggccttgaggtctttcgttcagtttcctaatgcctctgaggcccacctggccatggggaggaccctgtctgtcaacacggacttcacatctgaccaggccgacttccctgacacgctcttcaatggttttgaaactcctgacaaggcggagcctcccttttacgtgggctccaatggggatgactccttcagttccagcggggacctcagcttgtctgcttccccggtgcctgccagcctagcccagcctcctctccctgtcttaccaccattcccacccccgagtgggaagaatcccgtgatgatcttgaacgaactgcgcccaggactcaagtatgacttcctctccgagagcggggagagccatgccaagagcttcgtcatgtctgtggtcgtggatggtcagttctttgaaggctcggggagaaacaagaagcttgccaaggcccgggctgcgcagtctgccctggccgccatttttaacttgcacttggatcagacgccatctcgccagcctattcccagtgagggtcttcagctgcatttaccgcaggtgaggaactatgctgctgctttaaaacacggggtcattgctcttggtaatgcttctagc

SEQ ID NO: 205906 - DNA, 1000 bp, Homo Sapiens
tttataattctaattgtaaacatgataactgctcaaaagcaaataatcaaattcagaaaagcacaaaataaatacaaatgatctattgcctatcacttgaaacaatctatagtagtattccttttaatttttggtgatttcatgaaaaagatttaactgtatttctgtagacggtgagaaaccaaaagatatattcagacaaagaactaatatgacaagatatgtttttaagaagatatcactgctaacagtatggaaattgaatgagtgtaagaggagactggagaccaagacatttaccctcttttttttttttaacttctttgaggtttggacaaagaaacctgtttgatcccagctgtgcaggagccgaagtttccacagaactacaaccttgtaacagagaaccttgctctgacagagtacaccttgtacttgggatttcacaggtaactcctctgatgtcattaggaaaaaacagtttagttgtgttgataactagaaggtagaaattgagtctttggccaggcacagtagctcacatctttaatctcaggattttgggaggccaaggcagaaggattgcttgaggccagaagtttaagaccaccaacctgggcaagaaagtgagacccccatctctaccaaaaaaaaaaaattagccaggcatggtggcatatgcttgtggtcttagctgcttcagaggctgaggcaggaggattgctctagccgaagagttggaggccacagtgagctatgattgtgcaactgtactccatcctgggtgacagagtgataacctgtttcttaaaaaaaaaagagaggaagagtcttacagatataatctgagcttattctaaaggttcacattagaatctaatagaaaaggggcattgtatgaatttacttgtgtttcatgaatcagctttgtccagattccttaaatttgtttttaacttttatcgttgtcgttgttgttgaaatggattttcgctcttgt

SEQ ID NO: 205907 - DNA, 1000 bp, Homo Sapiens
ttcttcctgaacaccgttaatcatttcaggcctggcatggtggctcatgcctgtattcccagcactttgggaggccgtggcagaaagatcacttgagcccagaagttcaagaccagtctgggcaatatggtgaaaccccaactctacaaaaatatacaaaaaagttagctgggcatggtggtgcatcagtagtcccagctactcaggaggctgaggtgggagaatcgcctgagccaggggaggtcgaggctgcagtgagccttgatcccaccactgcactccagcctgggcgacagagtgagaccctctctcaaaataataataacaattaattgttccaacagtgcaggaaatgcctagaatcgcactcgccccacatgttaacaccttcctgcattcccgctgcatttagcagacggttcagtttctgtggtgaccagtgaggcttgtgagtcacttgttccggaaaactagagcaaaacgttgctctcatatgcctggttgtttccttgttgctaaatctttttttttgtttgtttttcgtttttttttacagctttcttctcaaccgacatctggaagccattcagtgctgcatacacttcctgcaggctgcccctctgttctctcgcccttctcatctcacgtgattgatcacctgacaagctacctggatttcctagtgccccagagttgccctcaatcaacacacaacacgttcccatgtggaatcttcaccaagtgttcatttcttccattacaggaaatagtattctctccctgtccccaaaactttgcagtaaagacccctgacaatctagttcaaatgtcagtcatgacactgctagctttctttttacaagactgtgtgagtccccctgcaaaaaagtcaaactgaattttatcacatgatatctactatagtccttcaagcaattgtcactgcatcttttcagttatggttaccaaaggttgtgtttaaaattagctcgcagaattc

SEQ ID NO: 205908 - DNA, 1000 bp, Homo Sapiens
tgggcccattcagcttggcagactgcacttggttcatgctaccagcttggatcccatgcctgtcaagggtgaaaggagcagcagggggtgtgtgagtgagcgagtgagcttgaggtccagccactgcgcacagccaggcatgctaactgcagcaggatgggcagctccaggaaccagcacaagcaccagctctctgcaaggctgtggctggaccagtcatcccacaagctacttccacagctgacattggggaatgtggtggggcccagaagcttggagatgccaggaactgcagagccccaaagaggatgtcacagccctggcttaaggagctactaggtctgggatccccaaagggctgcagcttttctttcttttttctccctgcaatatggtgagcaaggggcatgtatcagccctgtttgtgttagagctctttcatccccgccatttggtgggtcctgagttcttgtcctgcgccctggaagaataaggtacacagacaagtggagggtgggcaaggcgaataggagctttactgagtgatagaacagcccagaggagactcacagtagataacttctctccacagccatggtgtcctgatgagtgttcagctctcagcagagaggagaccctgtaatgggtagttcctctctgcagttggttgccccaacatctgctcagctctcagcagagaggagatcctggagtggcagctatattagtctgttctcacactgctgataaagacatacccaagactgggtaatttatacagaaaaagagatttaatggaatcacagttccacatggctggggaggcctcacaatcatggtggaaggctaaaggcatgtcttacttggcagcagcaagagagaatgagagccaagtgaaagggattttcccttataaaaccatgagagaatagtatggaggaaactgcccccattatttaattatctctcaccaagtccctcctgcaatatgtgggaattc

SEQ ID NO: 205909 - DNA, 1000 bp, Homo Sapiens
gcaatctctgcctcccaggctcaagtgattcttgtgcctcagcctcctgagtatctggaattacaggcatgtgccaccatgtctggctaattaaaaaaaaatttttttttttggtagagacagggtttcaccatgttggccaggatggtctcaaactcttggcctcaagtgatcagcctgcctcccaaagtgctgagattacaggcatgagccactgtgcctggccaaatatatacacacacgcacacacacacacacacacacacacacacacacatatatatatgtgtatatatatatatgtatacatttaataaatatggtgttggtgaaaaaaaccaaatatctaaaaatattatggaaatgctttggaactgggtaatgattacaggctggaagagttttgaggtgcatgctagaaatatgaatgttagaatgattctgctgagatatcagatggagatgaagaacacgttactggaaactggaggaaaagtgatgctcgttctaaagtggcaaagaacttggctcaactgtgttctagtatttttgtggaaggtagactgtgtgagcgataaaatcagatatttagctgaagagatttctaagcaaagtgctgaaggagcagctggatcctcctgactgcttatagtaaaatgcaaaaggagagaaatgaatcgaagaaggaattgttaagcaaaaaggaagcagagcttgaagatttggaagattctcagtctatccatacggcaaaaagtgaaaaagcctaaccacattgcaacaaaacgaacactgagggtatggctggaacatcacttgataatgtatgggattataaaagcaggaactctgccagtttgaatggaaggtgatggagataagacaaatgaaagaagactatcggacttaatggatttgacagaagagggtaacagagctgtctggtcacaaatgtgtgctactcttcaggaagaaggcaaaataaccctgaaaggaattc

SEQ ID NO: 205910 - DNA, 1000 bp, Homo Sapiens; identical to SEQ ID NO: 115048

SEQ ID NO: 205911 - DNA, 1000 bp, Homo Sapiens
accaccgcgcccggctaattttttgtattttttagtagagacggggtttcaccgtgttagccaggatggtctctgtctcctgacctcgtgatctgcctgcctcggcccccgaaagtgctgagattacaggcgtgagccaccgcgcccggccgtaatttccatcttaaaagcattagcttagctgctaagttgagaatatgcggtcggaaagcagggcagttttagtaagacatgttggaaatctgcttttcaacatgtaagatggtgatgtattgacccaggttgttagcagtgcaggtgttgaaaagcaagaaataaattttggagatagagccaaagtttttactagtggatgaggtggggttaggtatgactgcaaactttttagcctgagtaactgggaatatagagttgcagttatctaagttgaggattgatatggtttggctgtgccccacccacatctcaacttgaattttatgtcccagaattgctatgtgttgtgggagtgacccagtgtgaggtaattgaatcgtgggggccggtctttcccgtgctattctcctggtagtgactaagtctcacgagatctgatgggtttatcagagtttgctgcttttgcttcttcctcatttttctcttgcccctgccatgtaagaagtgtcctttgccttctgccatgattttgaggcctccccagccacgtggaactgtgagtctagttaaacctctttttcttccccatctcaggtctttatcagcagaatgaaaagagattaatacaagggtgaacgcagtaatgcaggcttaagggctgtggagaatcacaaaccatatctgggcatgttagggtatctggcaatttttagtaggcatttacttggagtgtggaatttaggagaggagtccctgctggagatatatacttggattttgtcagcttgtagagtgcattgaaagctacaaactgaagctattaatattaccatcattagattca

SEQ ID NO: 205912 - DNA, 1000 bp, Homo Sapiens
tcctacaggcaataactccatgatcagttcttactaaaaattctccaactggaattcaattctcctactcctggaggatgccagtgaattagtaaagaaagatcatgagttttacactaatgaatatcactctacatgaaaacacaaagaatggagcataaggactccttaagaataagacccaaaccgtgaaagacaaaataatattcttagtttgtatacctagagaacaaacagagcctcaactaaactttctactgcaaactgattagtatatgaaaatattttaatatcggtgagaaaaaaagaagtgagaaattatcaacggacttttttgatattaaataatctggatatattgtctttggaagaacttatgtgccagttatttattgtcacaacaatactgcagtgataacaccatagaacaaacaaccacaaaagtgtatgtataattaacaataattagtcattgtgcatgtgtctgtaatcaagtgggggtcagttaaggggatcccctgacattgtttatgcttgcttagatacctggagctcagagggctgttgagggaggtaggctggcttctgccagagtgaccagggcaactggacaactgtaatgtgacacaggcccagtgacccaggctaactgcggagacacaagaaagaatacattgaaatatgtcagaccccttaaggtctaggttcatactaggcaccttctcttaaaaatcaccctatagatcaaagcaatgtgtatgtccaagtttaggatgaagaggtgagtgaatatgccccatctcttttttggaaaggattgcaggatcacatgacaaagggtacaaatatagttagggaggaagaattaggaccattaatgcagtctatcacagtgtaacattgaggcagtgactagattttaaaatttagttactgacagaagaaagatggcatacatagccacattacaattgagttttcctcatttctaatatttgca

SEQ ID NO: 205913 - DNA, 1000 bp, Homo Sapiens
atcttaactatttttaagtgtatgctacagtagtgttaactatatgcatattgttgtacagcagatctctagaaccttttcatcttgcaaaactgaaagtctataccccattgaggaatgactacttatttccccttccctccagcctctagtgaccacattaactttctgtttctatgagtctgactactttagataccttatatacatggaatcatgcagtatttgtctttttttgtgactggcttatttcacttagcataatgtcctcaaggttcatgcacttctagtatatgacaggatttccttctttttaaaaactgaataatactccattgtatgtatataccacattttctttatctagttaactgtcaatggatatttaggttgtttgctcccacctcttggctatcgtgaatattattgcaattaatatgagtgtgcataatctcttccagatcctgttttcaattgttttgggtaaatacccaggagtaggattgctgaatcacataataattctactgttaatgttttgagaaatctccatactgttttctttagcagctgcaccattttacattcccaccatcagtgcacagggtttccaatttctccacactctcaccagcatttgttattttctaatttttggataatggccattctaatagttaggaggtgatatctcactgtggtttttgatttgcatttctccaatgattagtgacattgagcatcttttcatttgcttgttggtcctttgtatatcttctttagagaaatgtctattcaagtcctttgctcacttttaaatcacgtttttgtgtttttttgatgttgagttgtaggagttcttatatattctagatattaaccccttatcagatatatcatttgcaaatattttctcccattctttttttttttctttttctcccattcttcaggatgcctttttactttactagttgtttcctttgctgcacaggagttt

SEQ ID NO: 205914 - DNA, 1000 bp, Homo Sapiens; identical to SEQ ID NO: 115028

SEQ ID NO: 205915 - DNA, 1000 bp, Homo Sapiens; identical to SEQ ID NO: 115030

SEQ ID NO: 205916 - DNA, 1000 bp, Homo Sapiens; identical to SEQ ID NO: 115037

SEQ ID NO: 205917 - DNA, 1000 bp, Homo Sapiens; identical to SEQ ID NO: 115038

SEQ ID NO: 205918 - DNA, 1000 bp, Homo Sapiens; identical to SEQ ID NO: 115039

SEQ ID NO: 205919 - DNA, 1000 bp, Homo Sapiens
acgaagattaaaaactctgacaatattgccaaggctctgtatccaaccatttctgaaactaatttatatatttgttaccttagaattgtattgtgttatttattattattttctttttatgcctgaaatgtttaatagtctgatagcatttaacataatctatattagattttactgtgtgctttgcaaatgattttgctatggtttaaatgtcttctccaaaaatcatgttaaaacttaattgtcattgtaacagtgttgagaagcatgacctttaagaggtcatttagtcataaggctctgccctcaaatggattaatgctgtcatggggagagtgggttcctgatgaaaggcaggaggcagaggtctgggggaaaatgccgtggttctcatgtccccttcaaaattcatattacaagttaattgacatcagaacagtgttgagaggtggtacctttaggagatgattaagtcatgaaggctctgccctataaatggattaatgtgatatcaccaaagtagattagttatgtcaggagtgagttactgttgaaaggatgaagtgcatttgcttgccttctgctatgagaagccacagcatgaaggccctttcaagactccagcatcttgatattagactttccatcctccaaaactgtgagaaataaatttattttctttataaattacttagcctgtggtattctgttatggcagcagaaaacaaattagaacagatataaacaaaactacaaaaatttatcattttcaattcaaacagtgaaattgttcacagatggtgatacttgacataggctttttcaagtgacagaccctataaacatgaacatagttgattcaacataagaactaagatggacagcctttctttctcaagaggaattgttgaaaatcctttatgtgctgaagataagccactaattaaactgctactttctgggctttgggagttatagttaggtaaacaagacttaagga

SEQ ID NO: 205920 - DNA, 1000 bp, Homo Sapiens
tcacctattctgattgatttaaaaataaataaacaaaactgcaacatcaaataatttgtaagagcttgaaaaagaaatctcttccttctctttgctgctaacatccctaatcaagaacattatatatggttcaattcagtttctaatgacccctgacataatgatctcaagtaaagaggctaaaactttgaaaattaaatcaaatgaaccattttcttaattagcattgatataggttttaaggtctttaagagtcacgcaacacatcatgctatcaagctgatccaattgcctaaaaccgatcatctacaaccttacaataacccatgtaacgaagctgagaattcagtgtgtaggacagattgtgttcagaaacaaagggcagtttctagaggaaaaaagtgaagtccaattcataaaaacaggaggctgagaaaatggatccaggtcatgaagtcatttctgcagaatgcattgtcttgggacttgctccccatgggagaacgtcatcataagcagtggacctttctcatccatgcttgagaaagcacattctggcttaacttacatgtatcttaagtaattactagttagtcagtattcatatgaattacgatgttcaattcatcacaatgactatcttgcccagtttcaaaacacctaaaaattacattcttaaacagtggttttcaactcaaaattaaataaaaatagcaaacaataaaatgaggattatagaaaccacaagtgttcctgaagataatttaaagcttccatttaccaccataacaaaacaatgaacgaagcaaccaaaaataaggtaataagaacaaaataagacacaaattcatcttttttggtcatatgcttcattcagataacaataaagctaagccttactctaacatagcagccagtttttagacttttacttacctgtgtagcttgactattctctcagggttctgagatgccttctcttctatgaaatctactttgt

SEQ ID NO: 205921 - DNA, 1000 bp, Homo Sapiens
ccacattagattccccaaaagggatttatctggtaataaattctgctagacaatgaacagttccacccatgataaaataacatgttgttgctgcaaattctttgtattgtctaattgcagtgcttaacgtaataaaatcaggctggtgttattgttaagaactagagagtgaagcattttttatccaaataaagtgcaatgggttttaaatcaaatcattttagaataagaatcctatgagataataataaaatgcaacttcatcttttcctgccgagaacaaagaagaaaatagtgtaggagatgaaaagtaaagtagacccaacctttttgctaatttgtttttagatacgtactccatgcagacaatggtgaagtgaagtgaagtgaaggggtgtcatcttattcacctagagaaccacaaatcttggtgctggaaagtacgatccattcgacatgatggactatttcccacccggccactcactcgagaatggataacctgttttcccgcctggggtaactgctttccatggatgtacagcttcaggcctcatacgagaggatctcacaacaatctcttcaaactttttctaatccccacactttccagtcttggcacaagacctcatccaggcttctgagtctttgttgaaaatttacacaaaattctagaaatgtattttctttaagatagttactttaaaaatgttattttcatctcagcacagttagcctttccttatctgttcttaaaatgtttcaacttgaaactaaaaaagaaaaaaaaaaacacatttcatctcaaattatgatatactaaataattattgacttggccccaaacatttctactcttttcttcttacacaatcagatttaaaaatgtaactaccttttctaaacatacaatattaaagcatactcaacttcagtaacaggtaatgaatgtacctcaaaagtcagagcctctacgttaagtaccatagtgctccaacat

SEQ ID NO: 205922 - DNA, 1000 bp, Homo Sapiens
agataagctgcacagtttcttgttgaaagcaagttatgactctttctgttaatatctacttccactcaatcatggttgtgtgtgtgtgtgtgtgtgtacgtgtaaaccatcactgttcatgcattcagtggtgttgtaacatttctcccacaagcaaccttcattggcattatttatttatgacagtgtcttcctcatgaaatcatgtctcagtagctcttctctgtcttctttcaaagactgtggtatttctagtcacacaggctctaaaattcatgagtcccaattaatgtctcttttgctccaatttattccaactcttgttcattctgttttcctggctcacagctcttcctactctgtctttccattttcattctcattgccttattttagccctttatgacctcttacttaaaaaatttctatagcttatacctacactttctccctacgcaaatctgtctgacccatgattgctagattaatcactccagagaatttgtgcttaaatattgttactcaaaatactttagtctccactcaaaatccttctcctggggatgtcagcaacatggcagaacaggagactcctgactattccatctctcacagacatacaagtaaacacctacacatgaattagttctctccaagaggaagctagaatccagttgaaagtctcccacacactggaagactgagaaaatacccacatccaaacaggtaggaaaagcagagacacacttgcactaatcctaccatgagcacaacgccttataattaggaaggaaactccaactcccagcttcttccagaaggttgggagtcttgtaccacatgtatagtgcccaacttttacagttcctgtgggagggctttgatcttaagttaccatgcttgaagaacagtagggacagtgcattggaggatttctctcaagcacaatggacaaaggggcttttgaaccatgtgaggactcccagctactctagccccc

SEQ ID NO: 205923 - DNA, 1000 bp, Homo Sapiens
gagttattgaaatcacaaccttcccactcctaaagcatgtaatctcaaaagtgaaatctgcctggctgcgtcttgtgtgatggagaaggaaatgtgcctggcgggcccctttaaatctgatgggaatggggaggacattaggggttactgctcagacccacatgccaggtgactctgtgggctgctaggcctaagtgtgacctacagaaacttcctcagcaggtcctgcagggcaagcatttggaccttttgaagcaacagaatcaattttgcttgaactttctgtagctgactgcattgctctgtgtttcctctagcaaatctcagtatgagaattactgtgagccctctagggcagcatgtttcaaactgtgtgttgtgacccattactgattatgaaatccatttaacaggtctggagcaacgttttaaaaaaaatgtgaaagaggatagaataggaaggaaaatatcagcttccatagcctgtagtgagggcaacatttattgaaacttgtttattttgttcaagatcttctaagtgtcttgtactggcttagaaattaaaatacatttcttacagagtcctcaggccataaatttcaaacactacttctctaagatatatgagcaaagtcatgcctgcctgatcaaataacttgtttcctttgaaggaacagctctttccctagtacttggatctggaagatggagactgggtctgacactagaagaccatattgctcttcatgatctgggtgttatctgacctcctaatcaataaagtagggcctgaccagcatcacttaatcatcacacgaaaatggcatatatggtattagacaataaccagcccagaacacacaaataatagaaataagttgttctcactgccagtatacatcctgatgcataaagtgtcacctgccccatgacccacaactagagtcacatgtggagttccatttgatgtgttgactgaggggaaaaataaatggattcc

SEQ ID NO: 205924 - DNA, 1000 bp, Homo Sapiens
taacaaagaaacaaacaaagaaagatgtttcttggcatttttctggttctccattaaataatagtttagatagttgccagactataactgtcttctaataagaaattatgtgtctggacttaaccacatttgctgtctatgccaggtcaagtaaattaaaaaattgttgagattgtaaaaagggagtcaaaacaatcagaaactcatgtggtagagacatcacaccatttggagagacagatatgactaaatttgcttagtacttaatctaatcttggagaaattaccaaatctttctgaccttcattttgttatccttaaaataaaggtgaaaatgaacctagttcataaggctcataaaaaatcaataagatagtgttttagtttgttctcatgctgctaataaagacataccagagactgggtaatttataaaggaaagaggtttaatggactcacagttccacatgactgggaaggcctcacaatcatggtggaaggcaaaggaagagcaaaggcacatcttacatggcggcaggcaagagggcatgtgcaggggaactcccatttataaaaccatcagatctcatgagacttattcactatcacaagaacagcatgggaaaaacccgcccccatgattcaattacctcccaccaggtccctcctaagacatatggggattatcaaggtagatttgagtagggacacagagccaaaccatatcagatagcatgcatatgtacatagaaaatgtcaaattgttcacgatcagaaaatgtttgttctctcccctattcttttccctttcctctgtagctgtgtgcacatatgtattttgattatgaatgaactccatttattctttcaccttccagctgagctcttatcccttccctgattttctctttcacttaaaaatggactaaggaattccactctgtttatattttatagcatatatttaaacatttctttcacattattgttggctaagttt

SEQ ID NO: 205925 - DNA, 1000 bp, Homo Sapiens; identical to SEQ ID NO: 115033

SEQ ID NO: 205926 - DNA, 1000 bp, Homo Sapiens
tatttcacagggctctgtgatgattgtgtgtgtatagctaattgtcctgtgcaataggttttatgtatgcattttctgaattacaaccatgagaatactggagccaagataatgggatccaaaattgacaaatctcaattcacatcgttttgcactccttaaaaggaaaggacttaataaatgttagtaacctgtacacaatatttatacacaatttgctagttttgaattatagagaatggcagtcaaaaaaggggaacataatctgttcgttattttggtttcttcaaatatatgttaaaaattttaaatgaacattctaatgataaaatattttaattttagaagagtgttatcttgggacttttaggccctgtaatgtctcttggaattcaaaagcttttgcataataatgttttgatgagtttaagtgtaaatgtaaataaaaaaataataaggattaaattttctttgacacatatgtgaaaattttgagaaaaaacatgtctggcacatatgttctggagtcagtaaaacaggaactatgagcaaattgtcccaaagtagttcacaaaacacaaaatccacaagaaaagggtatccaattcaccccgcaaaacagaggacaaacgtgtattactaaattaacagaggtagatccatatattttatttgtttccttgggaatatagaatgtcttaaaagttgaatctcaataaatcagttttatgcagtgttctgatatgttatactcattttgcttctaaaaccttctagaatcctgtataagactagttaaccaattgggaacaacgttagcaaatatttccacacacacacacacacacacacacacgcacagatggccagagttttgcttaaacatctttctattgcagtcagaactattccttcatagagaaactaatgtgtatatttttaataacaggtttatattattgaaatgactgtcacacatgctgacccagaggctgtgagg

SEQ ID NO: 205927 - DNA, 1000 bp, Homo Sapiens; identical to SEQ ID NO: 115042

SEQ ID NO: 205928 - DNA, 1000 bp, Homo Sapiens
aaaaagtgagaaagtttttattttcaacttatttttatatacacctttaagatattttctttagcaaatgtttctctctaatttgaatggatgtttactgaataaatcaaattggttttgcttcattgacattactataagcgaattccagtaaatttaagaccacattttatgaaatgcattcaaatagaaaagtctattatgttatcagagtgccctttgaacttattttaaagtttgtgaaaagtaacgattacctttttttaaaaaaaatcccaagtctttgaggaagcacttgatgcgacacattttaagaagtaatgagaacaaaaaaagtgaagaatggcctgcttttcaaaacagcaatttattggcctagataagaaatggattttaaacttgataagatttttaaacttagatgattaacatataatcatcttctaatagacttctattactccatctgagtgtttaatgtgaaatctttgttaaacacatttacgtgataaatctccaagtgccacttatcttctaaaataagttgtggtacaggaagttcacattctctttcctctagttactgaataaaagcacatatttcaaattttctcagctagttttatgcatgagaacttttctgtatattattaaagccatatgttacaaaatggctatttcaaagtagattaatagattatgtaatgcataggtctaaatcatattgattttaattattttaacatttcccattttaatgttttctatttaaacttagatattgactaatatacattcacttactttctcttatacttaagatgctttaaataagaaatatggaataatttttcaaaataattgaatttgtttcatttttttccttttaagcaatgttatccaaagtaatttcctaagcccctctgaataaagttgtctacttaggcttattttggaattatagaaaattgcagatagaagcaaattaaaaaaagaagat

SEQ ID NO: 205929 - DNA, 1000 bp, Homo Sapiens; identical to SEQ ID NO: 115051

SEQ ID NO: 205930 - DNA, 1000 bp, Homo Sapiens; identical to SEQ ID NO: 115050

SEQ ID NO: 205931 - DNA, 1000 bp, Homo Sapiens
ctgcagagtgctctgtggaatgcaaaccatacgctctataatgaatagatctttctttgaactgcaagaaaaatgcttgtacctgatggtgcattggatcctgttgtattcccatcattcgtggctgaaactgatccatattttgatgctgtgtgtatgctggctgctgcatgccatctccaggaaagccactaaaaaaaggtggataatcttttacccattcaaaagcacaagcttctcagccacacttaaattacagaaacagagtgttgttcatgagtcattaacattttactgaaccatatatttacctatatattaaatttaatttataaactcagtattattcccaacataaaagccattttttggttttaaatcttaagaggatcccttcctcattcaagagaaaactaataccacaaattttacaaaacaacttcatagaacattgttgtcattgctaaatgttacttaggttatgccttacaactattaccaattttctatctgctgaggaataaaaaaaaaaactaacaatggtgcctgtggaggaggaggagaggcagcagcgggtgcagcagcagcaggcacggtggcggtgggtgcagggggtactgcggcagcaggtgctgtcgtggtgacggcagtggtatcctctttctttgattcttccacagcttctggctcatcatcatagtcaaatctatcaagcaacttctggaataattatgtcaatatttcattttaaaatttagactgattcactgcacaaaaaactttatgaaaacaagggatgtttaccaccatctagaaacccacattgtcaagcacaatcttattttcccttatgcccctcaggaccttggtttgtagatataaacaatttttacacagatgccagtttggaaaacacacagtgttttcattctgttttccttcctcaattgtaagtacagtgctttctattttctattggtgtatttcacaagtaatttag

SEQ ID NO: 205932 - DNA, 1000 bp, Homo Sapiens
tgaacagttcattatggttgccgagtcgattcatgctttgaccaaaagtgtttgccaaagcccagaggccaacatcagcattattaataaattggctgttattaataacagccaggccacacaaagaaaccgctggttatgcttcaagtgcttgtgatcaaccactgtgggcgcttgcattgatatagagctgttgagtgacggtgccttgtctggtcagttgtgtgttaggttgttctgcccgtggctgatgtctgtgcaggctgatatcatggcagccaccatttattgtgtatatactatttgtccccttacgtgcattacttcatttaacactcacaatagtcctgggaagcaggtattgccatcaccgacagacacacaaggaagttgactcagatagagacagtaggttcctaatgtcacccagctagtactgggcaagaccaacaaccaggttaccccatgcttgtctgtgcagtgtggcaggccccccaccaggttacttcagggtgtatgtccactgcctgaactctgaaggccagttgatgagccaaagccatcatgcccagccaaacagcagacgtccctgataacccaaacatcttgtagtgtatctgagaacccatcaaggaaaacagtcccatcacacacacagcgggcaaagagccagaaaattagcttaaggatgggaggcagtgcagatctctaaagctattctgctgccatccaggagagcctcacatgtaagttctaataaactaatctactcactaagaatgacttgtgtctgagtcattctgtgttcttttggctccctcctagtttggggaaggtttttctatatgattctgggtttttctgcatatcagatgctaaatgggcttgggaagataaaggaggggccctctgttaggttaaggaatagagaaaagaaagtgagcacagatgtaagatgctgaaggctgttacatcaaccttggagggcggaggaccagca

SEQ ID NO: 205933 - DNA, 1000 bp, Homo Sapiens; identical to SEQ ID NO: 115044

SEQ ID NO: 205934 - DNA, 1000 bp, Homo Sapiens
gtaacacatttttttttctcacaaagacatatagagagagactttttaaaatagacatatatatagagagatgttttaataaagagaggtttgggtttatataagtaaaaaagatgatagaaaatagagaatgagattaggcttccccttgctctcaaaaaatggtttgagagtcttggaactggttccactctatgatagccatgagtactgttcgcccaacttttggttctcagccttccaggccccggtgggatgagacttccctgcccccacggttgagaggagccatgggcttattctagccaatgaatggtggatggacgtgactcgtgtctcttccaggctggagcatttaattgtccaggtgagatactcagggactcgtccctccagagctgagaatggccatgtttccagagggtctgcaggagcaacctgagtctcagagcacagccaccagcagacctgctgcacgcatgtggcgggggaaagaaagaaagccagctgtctgcagccactgagagtttggggtggttgtttctcatgacaaaaccagctcaccctgacttatacaaagtctttgagttatatagatggagaatgaggctcttgggtccctctattctcacaaagcaatagcctagctaaatccatctaactagggagcagaaaaggggatgtgctggcttgcacaccctagacagttgttcaagaagtcaggacaccaggcctggagtgatacttcagccatccttctaggtgagggtcttgaggccacacagacagaagtggcagagatgggacacacattcgtcttctcactcacagtctggcactgagctgtgggctgctgggacaccatgcccccatacgagtagccttcccactccttaccttgaaggaaaagtgttttttggacaaatacctgatggaaacattacatgggccttggaatctgttagatctagcttcctgaaactcttgctagctgtgtgac

SEQ ID NO: 205935 - DNA, 1000 bp, Homo Sapiens
taaggactaccatatatatgataatttaagaatttatagtccaatatatggaaaaactttaaaaacagaaaacattttgtgcctgaaatattatcagtggcatgaaattctatggggaaatttgataattctgagattttttttcacattccttctttcaggctatgttaaaggggcaaaaaaggatatttactagaaaggttattatgagtcctttattttttgctttttcaatctatcagacactgcttcagctaacagctctgaaggaccagccagaggtggacaaaacctgctatcaataacaaaacgaaaagctgagtagagtatgcacacatacacacacacacacacacacacacacacacacaatctgagtaaagactcactaaaatggactagatttgagggttcagtatcttaaagagaaagcctgctcattgagggaaagagaaacctgccattctatgctgattttcccctaaggctttttcctgtccatatcctgggcaaagaggctgagcaagtgagtcaggaataactcagtggcaaagaggaagagactctgagcagagcttttgtgagtctcgtggccccagggagacaaaaattgatgttcagccctgctaaggcaaccaggacttgaggggccaaaattccaaaggaaagggaagcagagagaaatgagaccaacaccctgagctgcttttctcgtaaagtttttggttgattattaaattgttcctgctgaaaggtagataaactgagtagaaatcagttgctaagaggccaaaaacttgatgcagaattcttggatatctcatgatactgcagtgaaaaaaatgtggttcaaagcctgccaaaggagaagagcctagttattaacccagctgaaacccgtgaagtacagtcagacctccctaatggtgggttctgcgtctatggattaaaccaatttaggactgaaaatactcaggggagaaaaaaaggtggttgtttg

SEQ ID NO: 205936 - DNA, 1000 bp, Homo Sapiens; identical to SEQ ID NO: 115045

SEQ ID NO: 205937 - DNA, 1000 bp, Homo Sapiens
aaaaaaagccttgatggtatttttagtctaagtgcattaaatgtataaattaacttggggagaactgaccatctttgtgattttgagttgtcctacctatgagcaaaggatgacttacatttgttcaaatatacttttgtgtctttcagattgttttaaagtgatcttgtgttgattgtgcatatttcttatgcactatcttacgtattttatcttatttgttgctattatgaatatatcccataatttcctttaactagttattgcttgttgtatataaaaactattgatttctgtataataattttatatcctgctctattactgaattctcttattgtttgagttagagaatcactgattctttaaggtttctcatttcctctgcaaacagatagttttacttctttttcaatgatacctttaattgacttctcttgtctgtttggattggctaatacctttagtacaatgccaaacagaggtggagacagtgggcctccttgccatgtttcttagtgtttccctgctatataagatgctatctaggactcacagacacttacaagtcagtaaattatccactaagtcctatttttggaatttttaaaaatcaggacagggtgttgaattttataaagtgttttctcagtatctatggaaataatcatacatttttcttttttgatctattaacatattaatgagttaagagatctattaatttttttaatattaaaccaatcttgcattcctagaaaaaaaaatcacatttgtcttaatgttagattctgttagttaatatttatttagaatttctgcattgatgctcattagtgatactggcctgtaatttttatactgtctttaacagatttaagtatcaatattatttacttcattgaaatgaatttgaaaattttccttcatttttgatgagcccatcctttttccactgaagtactccttctgaggaagactaaaaaaaaatttctgccaa

SEQ ID NO: 205938 - DNA, 1000 bp, Homo Sapiens
ccacatgtgtgatagagaatgagatagtgaaaagacccttttattgtaattgggtttcagaaactctgagatacctttaatttaagcttcattgaaataacttcagtagggaggtctgaattaagtcttttctcaactaacaggagttacattatgttttatagggttcagggaaaaggatccaataaaaggtgagaaaagtatggagaaaagagaaagaaataaagttctctgcaaatttagtagatttggtttatgatctatcattatttcttatgctagctgtgggttttttaatgcagttatttaaactttgaagtccgtaaatgcttaggggataggatttgaccttgtagcctatctgagagatgcctttgtcttcttatactttaggtgtcaggaagcatggcctataccctttcagcaaaacagagtttaatgaaatgccatatgaattggagtctgagctaagcccaaatagtctgtctaaaaaaactccagaacctttagagccacacggtaccccagagcaggattacttatggtaaacctgcataaacacgtacccacgtaattgtttctggcttcttgtagtgaaaagctgatccttcttaaaagcgttgtttgttttttatattttctcctagattttcactgaatcacagtgttctttgtgaaatgtgtagtgaagaggaaagagctttggaccaggtgtcataaaaatcagggttctttggtttgcctcttaagtaagtgtgatattaggccagtttctagcctctagcctctttcactagtaaatcaccttgccagtagtactgtgcctaaaatgggaatttggtttgggaggagctagaagcagggttggttcagttagcttcaggttttggtactgttagctttgtagattaaaaagtttatacttaatatagaagatttccaaaatatgtaaatggaccagcaaagattttggttctgtagcaaaaaacccttatcattg

SEQ ID NO: 205939 - DNA, 1000 bp, Homo Sapiens
ctctcaggatctggcttaccatctttgatggacaatcattttattagcttgcttgaaagaattagttcctctgttataatcactgtagtgtcagttggaatgacttgagccatttttgtaaaacttgtgaaatctttatgtatttatgaaagttaaacttactgaaggctgaatgactgcagtgaaagtatgaatcctttaattaaataagtggttagcatttatataagcagtctaattaggaccccaaatatttgttcattttctttagggctactaacctggatgcccgatggagtaatcatcactgtcctgtgtagatcttgtagatttttgaaagtactttctgtctcacagtggtggtagattttgtttatttaattatttagggggcatgttttcagtttagcctgattagttacctgctgaataaataatgttattctaataccctgctaggaagaaatttatgtaattgaaattctgatttctatgtaacgttctgttttcgtattgagacatgatactgcctgacagggctgcttcagcagctgtcatctggtttgttgtttcttgtgttgttatatggattctgctagcctaaaaggcattcttctctgtgtctctgcagggctgtccagtgagtcatctaaaattaaactttgatcagaaataagtttcgtttttttcccgcaaaggactggagtgagtgggcttgagaatacttgtatgcaaattaaaaatatatatattcataaatatttgggagcattaggtcaagtgccaattaagtcaggaaggatcctgcagccatagtcatgaagataaactttttaaattgcatttgctcaaacttaaacatgtttgtgagtattttgtataagcgaccattatttcagttgctatgttagatttgttgctttctttagcatggattttttttttttggtaaagtgttagtttttaatgtttcaaaagattttttttgcagtcatttaaa

SEQ ID NO: 205940 - DNA, 1000 bp, Homo Sapiens
agatgggaagtatctggccttggaacacgtggttggtgggtggttgaggcaggacttgagcctgtgctttcaaattcctctgtgcctggggcacagcggagcaagcagcccctccacatgggctctggagaagcccaggaagggcactagctctgctttgagtcctccttcccactagcctcatgtcccatgagtctcactcctagtatttccttaggaaggcttttggggagctgtgcatttgagtgcagttaccctgtagtgctgccccaagagaaagaaaacatatgctcacacaaaaacgtccaaggcagtgttgctcacaataaccaaaaggtgaaaacaactcaaatgtacatcaaccgatcagtggataaacaaaatgtggtctgtccaggacggaatatgattcagccataaaaggaatgaagtactgatctgtgctacaacatagatgaaccttgaaaacatgcctagtgaaacaagccagataggaaagaccatagatggtgtgattccattcataatagggcatctgttgagacagaaagtagatctgtggttgtttggggccggggaaaaggtgtgggaaggtgatagtttaagaacacaaggcttctttttgaggtgatagaaaggttctaaaattgatctcggtgatagttacacatatctttgaatacacctaaaccactgaattgtacaatttaaatgggtgaatcgtacggcatgtgaattatctcaataaggattttaacttttaaattcaagggtacacatgtgcaggtttgttatataggtaaacttgtgtcacgggggtttgttgtaccgaatattttgttacccaggtattaaacatagtacctattggttatttttcctgatcctctccctcctcccatgctccactctccactaggccccagtgtgtgccattcccctctacatgtccatgcattctcttcatgtaactcccacttacaagtgagaacacgcagta

SEQ ID NO: 205941 - DNA, 1000 bp, Homo Sapiens; identical to SEQ ID NO: 115034

SEQ ID NO: 205942 - DNA, 1000 bp, Homo Sapiens
aaaaaagaaaagagggccaggtgcggtggctcacacctgtaatcccagcactttgggaggcggaggcgggcagattacttgaggttaggagttcaagaccagcctagccaatatggtgaaaccctgtctctactaaaaatacaaaaaataaaaatattagctgggcatagtggcacatgcctgtaatcccagatactcggaagcctgaggcaggagaatcccttgagcccgggaggcagaggttgcagtgagtcgagatcacaccactgcactccagcctgtgggagtgagactctgttgaaaggaaggaaggaaggaaggaaggaaggaaggaaggaaggaaggaaggaaggaaggaaggaaggaaggaaggaaggagggagggagggaaggaaggaaggaaagaaagagggagggagggaggggagggagggagggagggagggaggggagggagggagggagggagggagggaaagaaataaaatacagtagggattatttaggttaaaaaaatataagaaaataagcatgtttatagaattcagggaactagtcctcacctgactgattttaaacacactgaatttcagcatcaactgtagactcagaatctcgaaaacacctaggattcaacagctaactttttttagttacggcgtctgagggccagggaaactcatttttaaagaccctcatttcttctgaacttggacagggcttttctaccaagtttctggtgatctgtttattggcaaattgggcctgttttaccattcctcgggcctgtgagtttgtgtgtatttgggtttccgggtggacgtgcactttgtaatatattcgtagtaagtatgcatacacagtgcacaaaccttttccctttcaaagttcttgggcacatgtgttccccatcccagactcccacagccctggagacttcccacaccctggggaagcgtgcaggtttggaagcagtggaactgtaagcttcacgggggca

SEQ ID NO: 205943 - DNA, 1000 bp, Homo Sapiens; identical to SEQ ID NO: 115046

SEQ ID NO: 205944 - DNA, 1000 bp, Homo Sapiens
cagggagatgaggtccgtgcgcaggcagaggggcacctgcacctgtgttggttctgagaagtggaggatgtgtggctgaatgaagaattacccagcaaaccatacgacgaggaagccgtgtgttgatgttgtaccttttcattagaaaaagagaaagcgtcccatgtacacgtacgagagaaccaagatcaaacgcgtcaggtcatttaatataaacgagataaacagaagaatcaaaaactcaatcccgtgcctgtccaggagagagtcctaaagctctgtgactgagagagcttgtaaaatgaaacgatgggcgaagaacggatggacagcctcaaacagaaacgaagctgggtttatatccttaatgtcaggtaaggctgagttcagggagaaacacaccaaggaagaccagaataggttctttagaataataaagaatgcaactgacaacagatatgtcccaactacaaatatttatgtaccaaaaaggtgcttcaccatgcatagggtgaaaattgtgggagatacagtgaggtacgtgtagggccacgatactaataggagactttaaagaaaataactgttgtaatgtattcaatttctttttgtattttccccaatattttactatgaaaatgttttaaatacacagaaaagttgaaagaattgtacaagaaatgcccacatgccctcctcctatgtcaggggtcagcaaattatagcccgtgggctaaagctcacccactacccgttattatatgggctgcaagctaacaatggtttttctgttcttaaatggttaaaaagtcaaaagaaaaaatatgttgggacacataaaaattatatgaaattcaactttcaacatctacaaatgaagttgcatttgttttacaacagaacccaggcacactcatcatttgcatagtgactatggctggcttctaacaacaatggaagaagagtcgagccatcgtgactgagattgtctggtccataa

SEQ ID NO: 205945 - DNA, 1000 bp, Homo Sapiens
ctaatcacgttgttcttcagtttaaaatctttcagtagtgaagtccagactccctcattcgattattaggctctgaatgatgtggccactaagtccctccccagcctcttctcttgccttatgttcacacaccacactctctgctgtggccataatgactttcagttccccaaacccaactttctgtaggattgctgggcctttgcctatgctgtttgttctctgcttggaacaccttccactcttcttttgggtaactcgatgccttctccaggtctcagctcagctgtcacttacacaaccccataggcaggctttatccccaacccttgtccacagtatcctccaggtgactgtgtctcccaggtgggtagcccctgaagtaaccctctacactccatcactgtcagagagttggaaggctggagaggcatgacccctcagagtcaacctagatccttgtggcttcagcccccagcaggtagggagcccaccaagcttcaactctacagcagagacacagccaaggctactggtatgtgcaaaacattggcttgtgaaaattacagtatccaaaacatgattttttttctaaaagagctttttaaattttgttttctaaaagttaaaaccagaaaatttctgatttctgacaggttaaggatttaggggaatttttaagttatgtgatgtgaggttctctgtagttttgtaccaactagattgttcatttcctaagaatgaggacctctcctattcatctttgtaatagggacagtgtcttacagatgaaaacattcaatgaccctacattagaggagaagaaactggagcacaaattggttgaatgttcccccatgtgacacatttaataaggctaatgttgttgaagtggaggctgggcaggcagtaagaggattcccttgtatacttgcacggtgaacatgagtactggcatcgcaggcctcgttcaatgttgatactcttgaatttaaagtgg

SEQ ID NO: 205946 - DNA, 1000 bp, Homo Sapiens
aagaagatgagcagactcacggacccatgagtccacagcaagcagcccattcgagtacctgggactgcaggaggcaggggaagagaccgaatagctagaatatttccaaattgcataaaaatgacaaagcctacaaatcttgacaaacccccaaaacacacacacataccctaaagcttatcaaattacagaaaaccagggataaagagaaaaaaacaaaagcagccgcagaatacatacatgatgactatcatgtatcagtcaagagatagaaacatttaacacgaagaatgattcaacaggaacagagggttccactaacatgtaaagagacttccgagaacggaggcgctgaggcctcgggagaacctccaccgccaggactgagacaacaaacccacaagcgttgagtctggatcttggtgagaacctcggaaccccacgtcggctgagacgcagctctgacctgagtggggctatgatgtgccgggtggtgcagttggccaaggtgcagcaggccaaggcctgagagcaggaagcccggggcaggagtgccagcgagactcacccagaagctctccctggggcaggagggaggcagacgccctgggagctggacagaggcaaggaagcttagcaggaatccttcccaccgtggtgaatgaacctgggtgttgctaaactcctgcagactgtcactgagagcccccgcccccaccatgaggctggcaggcacacaccacggaagccaggaaaagcaagcacactggaaccaggagggcaggcccctccctcctgtggagtccctccagctccttccagtgacagagccaaacactgtgccaacctgcaaaggagggtacagggagggcccagcccagggtcacacggcagggctgagaagggtgcactgggcacggagaggcaagacacggatagctggagataccgtgtgggggccacacatatctgcacgtgcacatacaatcaccctcccact

SEQ ID NO: 205947 - DNA, 1000 bp, Homo Sapiens; identical to SEQ ID NO: 115047

SEQ ID NO: 205948 - DNA, 1000 bp, Homo Sapiens
ctgggtgagctggagggaggggaggccatggaggcaatggtgtgagcaggaggaaagaggagggaggaggagcaggaggtcttgcagtttagagggaacaatggtaggaaaaggaggcagggaggagaggaggtatggcctgagtgctacagcaatgtttaccagacagtccacctgatgacaatgtgcagggtctggcccaaggcagactactgccacagtgaagggcacagcaaatcttgggagctgagaaaggcaggtggccttgaaattagattgttgaatgaatcacccctaaacatgttcaagtcattcaagatagcaggaaatggggagggggacaccaacaagccagtactcagtgaacaagggaaatgcctggatggtcagaaaagtacagtgatgagaaaggctggatgtgaagagagcaactggttgcttgaattttcaaggaggaaaaaaattcgcatgagattggaagagaaacagccttttaaaaatgagcattctgggacatttcattaaaaataaaaatgggcagctagaagaaacacttcccctaagaactggaataagacatagagatatccactcttaccgcacctattcaacacagaactggaggccaggtgtggtggctcaagcctgtagtcccagcactttgggaagagccaaggaaggcggatcacttgagctcaggagttcaagaccagcttgtgcaacatggcgaaaccctgtctctacaaaaaactacagaaattagtcaggtgtggtggcacacacctgtagtcccagctactcaggatgctcaggcaggagaatcgcttgagatcagcaggtcgaggctgcagtgagccgtgattatgccactgcactccagcctgggtaaaagggtgagaccctgtctcaaaaaaaaaaaaaaaggttcaagctgagagccaaatcaacaacacaatcctatttacaacagccacacacacacacaaaaacctaggaatac

SEQ ID NO: 205949 - DNA, 1000 bp, Homo Sapiens
tcacattacacatttcatttcacttcacgttttattggtttgagtaatggtttagaaactatcttttacttcaaaatgtttgtgcatctgagattttctgactttatatctggacagggcgccgtaatggtagacgatggccgaggttcagggaaccctgtttctgtggttcaggacaggtccagcctttctgagccctgtccccgcagagagccccctttccaggcacccgtgtcttgggtcgccgctggccctgtgaggtgacactctgcagctcttgcactgtccaggccaagggtggctgttctgaaacctactcggtttattccatcttgaatcaatgcattttttcaagtccgtgcctcagggtgcctgtagaatgacagatgtggcatttcaatcggtaaataatgagtacacctttaaggtccaggcactctttgtttagaacattgtggaatgcctacatcatctcatgcttgcacaggagcgtggctttgtcagaactcatccccaggcagccctgtgggcacctggtgggggctggacaggggtcacgaggagaagccagcaggagggtggtgggccctccaccttgtccccgcaggactcccctctctgcccagacacactcagcctccaccaggactcaggggttccagccaagctcctcttaccaacgatgccccgtgactgccccagggacgggagggctcaatgccattcccctgcaggccctgtctctccccagcttccagttggttgtcctgcagcctcaggtctctgatgggatgaagcaaagtcgagaacttacggtttgtctggctttattcttgtgagagtgggagtgacaagctctgtacatccccagcagaaaccagaattccacctcctacataactttgtaaattgcaaaatataatgaaaagtgcatgaggccaggcacagtggctcacgcctataatcccagcactttgggaagccgaggtgggtgggtcac

SEQ ID NO: 205950 - DNA, 1000 bp, Homo Sapiens
ccagcacctgaccccaggctgaccacctcggccaccacctctggccccaccttcctccccaggtttgttcccaaacacccctagagtcttttccggagcaatctcagacgtgcagaacgctcagggggaccctgggcctgaaggcggtaggagaaaccgagaccgacccctggtctagaggagaggtgtctgccgctctccatcctggactctggctgcccaaaagcaaacggcacgcctgcccacgtgggaatcttggtggcgtctctcactgcatcagttagcccccagcccagtgctgcctggattcaggcttcctggtaccttcgtccacccttcagccctaatccatgctggccaggtcatctcgttctctggctcagtgggaacactcgtgcccagagacctctcgtggttctctgcagcctgcacacagggcctgcttccctggcttgaccgcacagacaaggggactgttaccaaggcctcccactgaggccaccccccctccaggccatgcctgcggggccaccacagcctcagcatcattgcaggccccaggcctctgcacctggtcttgttttactgggggcactgtccccactcacgtccacctgggaccctcggctcctgtccactgcagctcccctcccggacaccttcccagatgcccccggaagctcctgtccaggccacagcatccctcagcctctgtcactggtcctaggaagaccctttgggagctctcactcagggccacactcaggacccccgttgtggggctggccgccttccttctaaagcacctggaggaaggaaggagggggtcaatgcgagcctcaatccccaggcgagtgtgccccttttaaagatgagggaaccgaggctcagagaaggaaaggacttgcctggcgtcacacagctagcctaagatggtgaggtcaggagctccctggcaacacccaggctgccgtaccgtctcctgcatcagactgagcct

SEQ ID NO: 205951 - DNA, 1000 bp, Homo Sapiens
taatgtaaattagatcttatattatttcccagatagtatagtgtactaagactgctttaacttcatgtagccccctcctgaattttgtgatcttcttgccatgtatttcatttctataaatattttacaacttctaagacatcttatacagtaaatattcatttagatttccccatgttgtcctccttttgttacacttcatttccttttcgacttcttgcttccatctgtgatcattttcattctgcctaattatctttttattttctgtagtgcagatcctactggtgacacaacctctcagcatccagagaacatcattttcctgtcctcatttttgaggatcttcttcccaggtgtagaattctagcttggtgcttcttttctttcagacagtaaatatatcattccatcatcctctggctgccatcatttctactgagaagtcatctgtaaatgctattgttgcttctttaaaggtaatatttctttttttttcccttggctgtttttaaatttttctctgtctttggatttcagccccaatatgcacaggcatggtttcctttgtattcaccttgctaaacattcttaaatgctttttgcatctatgggttaatgtttttcatcactttaaacttcttgtctattaaaccttcaaatattttactacccttattttactcatctcctcctatgatttcaaccatttatattcataattatttacaacataagggcatgcttactactccactttcttcatttccctcttttctttcccatctctgtactcagggctgaatttcctcatctccctttcttcactaatcttctctttggttttgtctaatatgttgtctagctaatctacttagttcttaatttcagctattatgttcatttccagaatttctgtttgattccatttcataaatctagtttgacactgaaattctccatttgtcctctggttttttgagcaagctaatcagcatta

SEQ ID NO: 205952 - DNA, 1000 bp, Homo Sapiens
attcttctgcctcagcctctcgagtagctgggactacaggtacgtgccatcatgcccagctaatttttgagtgaaagccagtgcacctggcccatttgttatgattaatgaaccaatattgagacacaagtaactgaagtccacactttgacagtttccttaggtttgcctcatgtccctaatgtggtatccatcagaacaccccattacattgagttatgtgtctttaggctccttctcagactttcctcgtttttgatgaccttgacagtttcgaagagtactgggcagatattttgaagaatgtccctcaattaaaatgtgtctattatctcctggttagactgggactgcaggttacagaaaggaagcatctaggggtgaagtgccactgtcaccccatcacatcagggacacacactgtcacctcgactataactgtgaggctgacctgcgtcacttggctgaggtggagtctgccagttttctccacaataaagtggctctttccctccttttctttattgcactctttgggaggaagtggctatgtgtggtctacacttaaggagaggggagttacgtttccctccttgagggtgagtatctacaaaatttatctgggcagcttttttttttttttttttttgagttagggtctcagtctgtcacccaggttggagtgcagtggttgcctggccttgacagctttttaatagtttaaaatgaattgaggctgggcgaggttgctcatgcctgtaactccagcactttgagaggccaaggcaggtggatcacttgagcccaggagttcaagaccagcctgggcaacacagtgagaccctgtgtctactaaaaatacaaaaattagctgggcatggtggtgtgcctgtaattccagctgctcaggaggctgacatggagaatcacctgagcccggggaagttgaggctgcaatgagcggtggtctcaccactgcactctagcctgtgtgacagac

SEQ ID NO: 205953 - DNA, 1000 bp, Homo Sapiens; identical to SEQ ID NO: 115035

SEQ ID NO: 205954 - DNA, 1000 bp, Homo Sapiens
cctggctaatttttgtatttttagtagagatggggtttcgccatgttggccaggctggtctcaaatccctgacttcaggtgatccgctcaccttggcctcccaaagtgctagaattacaggcgtgagccaccgcgcatgactcagttgccccatctctaaaagtgaggggattaggatgactaatcccaaattcacttccaacagtgaaaaactttatcttcagcctattagttcacctgcctgacagttaactcatcaacccacccacacaacagttactaagcccttctcttaaatgaaatattctagacatcagaaatgccaagattttaagatacagtccctaccttccagaagctcagggtcctttaggggtgaggaaaaattgttaaacagataattataatacaatgggataagtgatctaataaaaggttgtgggaattcagagactttgaggagctcctgcagaaaaattcaagacctattttggaatcctaagtcaggtatttattatttactagtgaagggggaattaatgaattttataagtatattagtcaagaagtttattcttttccttagaggtagaatgaaatatagccccccaccctccggaggcctgggttaagagagaatattaaccgcttatttctcctctacgcacggagaggcttatctgtgttccaccgtttcacgttccttgaggcaccacgagttcctgcttccctccctagcgcgctgtaaagtcacaaggttgataagcaattgctacaaaagcatgcattcccaaggatgtaagacatgtggtgtaacaaatgtaaaagaataattaactgcctttgttcttgcttctgcaagtaggcttcctgtagcaccaaactcccgccacaaattgcttaaaaggtgattgatccctttgttccgggctcagactttctggaccccagtccgactgagccagtgatcaccttaataataaagggttgtcctgaattc

SEQ ID NO: 205955 - DNA, 1000 bp, Homo Sapiens
agacattgtgtggagatcagaggaagggagagactggtccctgcgcttgtgggactagcctctcatacattaggatatctttcaaaaacacaaatataaaaggtactaaagcagctgcatgctggggagatagagcagatgaacaaacatgaatgggtaccatgcaggagagacgtcctttgcgtgggatgtggaagggacagaagctactttaatccaagtaaagaccgcactgggaaacagttcagccacagccatgtgggcagtgatgggtgagtgtgtcctgcaactggacgtttaaccagcacgcttggccgtggcgtgtgcgctctactgaaacagaaaggtctggccacagtaccaacatcttactttctgtactttctgttccccagataccacttgaaagatgtcattgtagggaagatatacttcctgctggtgagaatcaaaatcaagcacatggagatagacatcatcaagcgagaaacgacgggtacaggccccaacgtgtaccatgagaatgacacgatagccaagtacgagatcatggacggggcaccagtgcgaggtgagactccaggcccaggcctcggctaccacagcttttctcccatgtcctgcacagaattctggaggggcttgagggattacactgtcaaaataagatgtcctcttaacctgtaacttcttaatctctcagtttacaccgtgggtggccataaggaagaaaaggaaggctgagtgtgtagaacttgaggctactatcccatcttcaccctgaaaagttgcacttagacttggattatatatcgggcttgtactgaagattgaacctcaagcgtcactttggaaggtccaggtttagcagatgtggtttgaaaacgtttctgcttcttcctgttgacattctggcattctctgctgctcaggagcaagggatgcatgcacagcagcctgtctgtgacttggctctagctccgatttattttctgaattc

SEQ ID NO: 205956 - DNA, 1000 bp, Homo Sapiens
tttcaccatgttgtccagctggtctcaaactcctgggctaaagtgattctcccacctcagcatcccaaagtcctgggattgcaggcatgaaccaccgtgcctggcctgtctgttgattcttttggggttgttttagcagattattatatcatttataactaataacagtttcatctctacctttccaattcttacacctcttctttgtttttcttcagttatggcattggtcagaacctttactgctatgtaaaatattaggagtgacaatgggcatccttgtcttgctcaggatattcaaaggaatagaatgaatttaaattttcattggtaagtatgtttgcgctaagtttttgttatataatatttaccaatttgaggaaatttcttttatttctgattttctaacagaagtttccctccatgtaaatagagaagctgaaccacacattagttggaataatcataagattttattttcttttagtctattaacatagtgaatttatattgagagattttccaatattgaaccataaaatatgcattcctggcgtattttactttgagtgataacttacctaaaactatgagttaacagctatttctaccccaccagtactttgaagccattactctactgtcttttgatttttactgatgctgagaagtctgctgtcaatctaatcgtaactcatttgtaattaacacatctttttgtcctcatatcttttaagatttttctcatccttattgttctggattttcacagtcatatatttaggtgtatatttagtattatttatcctgcccaatatctgaagacccacatcttcaattctgaaaaatctcttcaagtaatgctttatcattttctctattaattcttagaagcacctgtttggatacatattggtttctcattttctcctccgtatatcctaactgttcttattttttaaaatcttttcccccaatttgctgtattctgagtgaattc

SEQ ID NO: 205957 - DNA, 1000 bp, Homo Sapiens
tgcttataaaaatttccaactgtcagacagaattaatatatcttccagaggtatctgcttacatccagggagtggttgagggcatagaaaatgaagttgtttcgtttcctggaaaaggtgacatgtttcatgtctatttggacacccaaagttatgcaacaaatgacttcctcatttgagtgtgccttattcaagtttatcactgaattaaaatttcatacatttaaagaaacaatgtattctaataaatcttttctgtaaaacaaatgatttgaattatatgaaggatcatgccagactcagatattttttaaatctgtattttcatacatcaggattgcttaaagcaaagtagacctttccagctgatagaccctgaaagctacaaaaagacgttgtagattacctagcataactcatccctaaatctcaatttcagagtattaaaatgccatgtagtcactggtttgaggcaaaaatgtgagcatagtggtcctgagtctccatttgtaggagagggatgtgggggggatacaagcaggggtgcttgccactagggccagttctggggcgcagtgcagcagggtagaggaaacggactattcctgaaaagtgggaacatcccacagtgtgaatttcattgaggcaagagttcgcaccaagtgcagaattgcatagaggtgaattgtttacagttactgcctcaagatgcattgtttgcagaaagataaacctctcagggtacagtaggaatggttgtccagagctggattacagggaccaccaatgaaaatcctccatacagcctagtcgtcttcagcttcttcctgtgtcataaaaagtaattccaattttttgcttgacataatatgtaaaggctaatatttctctggtgtttggcaaacatgctgtcctatcagaacaaaccaggcaactgttttctagtttttaaaactttttcattacattcattatgctccaaatgttctttttggaattc

SEQ ID NO: 205958 - DNA, 1000 bp, Homo Sapiens
aagagatgggattttctagctttgtagtcatcttctgtactgtctctggtcagcatagtggctttatgcacgtctgtatctcggctttcacttctcagacgggattccctgcaagtggcacctactcagtgaattcttctctgccggaagaccctgcagggctcgtgcctgcccaggttggctcttccctcacctccaggcgttagctcagtacacctggccacagtcagagcatccttggccagcgcaggctcctgtgcaatgtggggggcctgtatccccagccccacactgagttccctgctcacacttcctctgggctccgcgggtgggccacacctggttcaggatctccctaggcagccgttgcctcaggagaatgctggaggacattgttcccttttcctccctccactcggtgccccagggctgtgctgaggcgcccgaacccttaaggtgtggctggtgccaactgagacctgctgtgagtacaagacaccctgcatttcaaatattgggtacacataaaggaatgtgaaatctcaatcattttcattttgattacacattgaaacgatagtattttggatacattgggataaataaaagattattaaaactaattttacctgctccttttcaaagttttacatgtagctactagaaactttaacagtactcatgtggctggcagatcttgctgttggcagtgttgccgagagggacagcaggatggaggcagcccccccagaggcagctcccaaagtccccatttccaggtcaccttccagctcccaagggtgaaggaggccaggtggctcccccagcagtgcgcctccctgttcgccgcgatgctgacaggactgaaagcacacacagcaagtggggtgtacggctggctgagggttccacgtctcacaatgcatgtctttacctctggttttctgccacagactctggatcccaggggtccaaagggaattgcaaaggggaagaattc

SEQ ID NO: 205959 - DNA, 1000 bp, Homo Sapiens
aaaaaaaaatcactgagaatacacgacacaatgaggttagaacatttctgtgaactgcaaataccatgcttttgtttatctaaccttatgaataatttgggaatgtaatctgcctcagaaacatggatcaaatttaacattcacttttgatcagttacgcccattatgagtggaatagtgtcacacttgcgcccattttagtttctctggctttcaacccattaactcccacgtctgctccacatttttgattctctcataaaggcactaccatctatgttgtcatctgagccagaaaagtaggagtcaatcagactccatcctgtcttttgcctgctgccatctgccaatttaataagttgatgagtctgcttgatttatatcctaaataatacttgagtccacactctccttattcttcccatacccccaccaacactgtccatgttcaggatcccataagttctcagctgggctatagaaacagcctctgagctggctagcctgtctgtggggttgcccgtttcccataaattctctacactgatccaggggactttgtgaatcacatgctgataaagtcctccttgaaaacttccaatggctcacactgcccacaggacagaatacaagctttcttacactgccataaccctactactatatatgctgaacccccattacttctgaattacttttttttttatgagacggactccagctcttgtcaccccaggctggagtgcagtggcacgatctcagctcactgcaacctctgcttcccgagttcgagcaattctcctgcctcagcctcccgagtagctgggactacaggcgggcaccaccacgcctggctattttttttatttttagtagagccggggtttcaccatcttagccaggctggtctcgaactcttaccgcaggtgatccgtccacctcagcctcccaaagtgctaggattacaggcgtgagccaccgcacccagccctgaattact

SEQ ID NO: 205960 - DNA, 1000 bp, Homo Sapiens
ccacttggctttgtgaggtaggttgatagaattgttgtgacaataagggagatagcaaaatgaaggttactaacatagtccctgctcttttaaatatctgttgctttgtcagtttccttctctttccccccatgactgatcccaaaataacttaccacagcctatttgacaaaagccaatggaagtatcaagtgattgtgaataaattgaatactaagacccggctggtcatctcgtgaatctagcattttcattaggttcttaattttccaccagaaatgacagcagtcctaccatctgtttggtgcttttaaaacatacggattgctcttaatcagctacacaaattgcccacactccaagctgttgaaattgaataccagcttcaaatacctgctgctcaactttatcgaaaatcccgtggagcatagtttgaaagtcatactctctgttcttttcttttagcattatttcccaggtcaagacagctcagacacagctgcatgaagaaacccatggtcttgactccaggaattgtcttctgacttggtgtcatgccttcatccaaaatgaaacaactttaggaaacctctcatggaatccattattacctttagtgaatacactgtaaacctgcatttcaacttatttagtttacttttttatagtgtgtatgttcattaagccacctcaaatctcttgggaaactatatggactctaaataatcctggtgttataataatcgctgaggagttggtgcaattatacaaaatttccactaggaggaggcagagcacgaatgataaaaaattcaggttagactatcatttatacgttgtacaattatttctaaattagaatctttattattttaaaaaacatacataattaaaatagatcctttgaatatgtggatgtggtataatttagaagaggaatgtaaattttaaaaattatgccctacattttagctgcaatttgaacagacacaatgaattc

SEQ ID NO: 205961 - DNA, 1000 bp, Homo Sapiens
aaacactgcctccaaaataagctatcaattcaaagagaaagaactctgtatgcaaagaaagagccaaaatgcctaacacagtaggtactcagttaagagggactaaatgaatggataatttggtacagactattttcctaaatttcctgatatatacatgttaaagcattagattcttctgacaaactcttcacagagttcaattggccaacatgcagtggaccacactagtgcagttgttgggaaaataacgtttagtttggtgcaaaattaattgcggtttttactttccatggcaaaaaccacaattacttttgcgccaacctattaaattaaatcaaacataagatgatgtatttgtagtcctcttttctccaattgacaatcactgcatagtttccaaatgttacaaaaaaaggtttacagcatcagtgccacatttttacaaagacaaaggaaatgcaattcaaatttaatcttttttttctctaaaaactaatattgagtaagaccaatacatcacatcttggaatttctttaaaaagtaaaatgacatacagaaacacttttctaattgtacaagtaaatttctacaaggatattcactgccgtatgatctataataccaaaaaaaaaaaaaaaaaaaaggaattaaagttgtccaacaattgagaaatgcaaaataaattatggtgtacattatggcattatggtgcactatgtagtcattaaagataaaattaattagcctcacataatagaaatgaaatagtaatatccatccagattactgaataatatgcacatgtatatatgtgtatctacatgtacagtcattgatatatagacataaacataaatgaaagcgattcaggtggttacttctaagatgtagagggaagtttctatttttttctattgtatcatcagtgtttaatatacagaatcaggtatttcttttgacatttaatatattttaataattaagtaccaagaattc

SEQ ID NO: 205962 - DNA, 1000 bp, Homo Sapiens
tgaagcagaaagtgcctttcctaatctaggttgaaagactgaaagactgatgggtaggcccctgtgacttgatctatctcctgaaaaccatgtgttacttatgtatgttagaatttggaagtgagatgatagtggggatacatatttacatatttattgaaattgaaaaacaaaatcacagttttctttttcctcacagaaaattccactttagttattgcttcacaattaagaactggctttgccagtgaagttctttggcagactttttctctaaattaattaagttaaacgtgctgctctactgttttgatgaaaaatatttaacatataagtgcaatacacaatttgctggaaattacaattatgtttaactattaaatcatcaatataaaactttagctaacaactgaaaaatatactgtaaaaaactattttggaggcactcaagcaaaaacattggatatctctagatcagcaaaacatattcacccagacttaaccactatgaccaagacatgctgggcaaacccatttcttttcttttcagactcttgaatgtctcatgacctaggaccacacactttggccgattagcctagtgccccagatctcaagcatttgctagtttctagttgtgacaggtgaaagagaagacataacacaagtatattaggtacccaaaagatggtcttttttgatattctaggggtaattaattttacttgttttataaatttgcataatgctaatatcaaatttttatagtactctatagctaataaaatatttcatgtgttatttcattttattctcatgaactttgagtacatttttttgcctgtatctaaaagcctgagatacaaattcttttcaaatgatttattgagggagtatcctcagaagaagggggtgtgagagaagccagacaggacaagaactagaagacaaacaagtgagtggtttcagctggtcactagcttcaatctaatcccacaga

SEQ ID NO: 205963 - DNA, 1000 bp, Homo Sapiens
ggcacttgtgtggacactgcacaccctcatgagtatgcgccctccctcccggcacagggattggagggcgaggttgggggctgagaaggaggtccggggcagcctctttcttcgtgtgaagagggaaggtctccccagggaaggccttctgctctacctaccctttctcctcctcctacgtgctctcttcggcttcagaggccggcagagtctgactaaaggcaagacagcggtggtgccttcaaataaatagctgttgtctcatcctcagccccatttcctcttggagaaagttggcaggccctggggccacaacagcatccactctgttgtagctacaaagagaagatggtaagggtagtgcccgggtgctcccctcctcagaaacctcctcctgggagcagtcagacagatctgtggctctgccattgaccacctctgtgctctggacaagtgactgtccagcgactcagcatcggtgtcttcatctgagaatgagctcattccatgcaccctggaacatctgctgggctgcctgttctcctcaccccatgcccccagcgcctgggaagtgccaagcacacaggagacctccctaagcagtaggtattcctgcacccaaggcccgtgatgaattccctcccactccctggcattgcagaccctacccttttcttaagctctgcccagggacaccctgaagccctacaacggccctaactcctaaaaggaatccctgcttggctcaagggcgatctgacccaggcggttccttggagtctgggctgggctgcggtgacacccctggtgccccaaaatccaccgtgcactcctctagtctctgaatccccatggaggggtgtcagagcctggcaggcgtgggacctgtgcctcctggggaaggaggctgaggtgggcaggacccagggtgtcaggcagagtcagacactgtagaaatgcctgggggagggtggggatgggagacttgtagtctaagctt

SEQ ID NO: 205964 - DNA, 1000 bp, Homo Sapiens
tccagaatcataagggctatcattgcctttgatcaactttcattttggtagggaagacagtcctttcccaaattttctttattatgaattaaattagataaattattcgtgtttaaatataacataagaacctgaaacttgccatcttcatcttgttgactcgagttgggttctagcctcggccctattactataggctctgtgactttgggtaagtcatttaacttctaacattccagggtctgtgatgtggggtccatggggagctgatggacagaacatagaaattgttggagagactttggaaggttttaagcatacgaatgtcattatctggattgctttcgtaaaggctcactctgtcttctatgtttgggggctgttgcaaaaatccaggtgagaagggacagtgcctcacacatggatagtagcaggatctgtgataagaagtgatcagattccagatatattttgtgatatatattccagacagattgtctgtgggacatgtgcaaaaagagaagtcaaagacaatttcaaggtttatcgcctcggcaactaaaattatacagagtcacagcagctacaatgggaacattataggtgaatcaggattgttctttcatgtgttgggtagaagtgggattgagctgaaattcagctttggcatattaaaccttacatttctgttcattctattcacagattagatggcaatcttagccaaatgacctcaaggttgttcaagaggcaaagaggtagtgagaagaatgtggacatcagagtctgatagatctgggctcgtcttattgtctcatggttgtaagatggctgctgtagcactaggcatcttggtttttcacaagcaaaataaatacaggaaaaatggatattttcttttattcataagagatctttttccaatattttttagaagacttcttcttacccagaactcaggaacatgcccatctccagattacataataggccagaattc

SEQ ID NO: 205965 - DNA, 1000 bp, Homo Sapiens
aaaattatgatgatttcccctttattgtgtatttataccatttatcttctaagaatggattctccgctgatttataatttgattcacccatctaatgagtatttagcatcaattaaatgctgggcaataagttcctgccactcaggagtttaacatccagaacgtagtcaaatacttacctcttctttgggggcatctccatgaggtgtaattagaaaaagcagagccaggcgcagtggctcacgcctgtaatcccagcactttgggaggccgaggtgggcagatcatttgaagtcaggagttcgagacaagcctgaccaacatggtgaagccccgtctctattaaaaatacaaaaaagttagctgggcatggtggcacatacctgtagtcccagctactcaggaggctgagcaggagaattgcttgcctgggagacagaggttgcagtgagctgagatcacgccactgcactccagcctgggagacagagtgagcctccgtctcaaaaaaaaagcactaagagttgtcagaagagttgagagtcacagggattggggactgggatataaatcttagctggtcacgacccctaactccttgggtctcctttgtgtactcatctgtaaagtgggtatgatgctgatctttccttcataaaggattttttaaaaaagattatattaaataataagatgaaagaagctggcacaatgtagaatttattcaatgctattttcttcttgtcgcctatgaaaaaattttactttctatttactttaattctgacaccaaaggctatccttttcctgttctacaccatgcacattctaaactagttccatttcctggtactatcttcctgttccaactcccctttttatttatgcaatgcccactcttccttttccatctgcccaaattgtgtacttccttcaggatgaaattcaaaacctcactcctccaaaatcactcatgggccccttgacttttctggaattc

SEQ ID NO: 205966 - DNA, 1000 bp, Homo Sapiens
ttgcgtggaaaatcagagtaataaacgtggcagtaaagactgccgtgggtaggaacttccaactaagtggcagtctgaaggccagggaatgaattgtctttctaaaactgctatcttcttgacccattgtgtattaaatcatatgagttagcaataacagtttccttttttataataggtgtatttgcacttccatgaattctgatttaaaagctcagatgtggaatttggcaagcctgcaaatctatgttagggtttaaattcctaatatttttattgtttaatgcataacatcctcaggttttcaggactgcagcatgagcaatgcagttgtataacattgaaacccagtagccttcatatcagaactttgcctacttatccagctttatcttgagcttgcagtctctgataaatggagtgatatactgttagtttatatacatccattcattcattgtttattaaatatcctttttgcctggtactatgttagactttgtatacattgtcttatttagtcctcaaaataatctttgggtttggtagcgttatctccattttacagatgaagaaaaggaggctcagagaggtaagatacttgctagcatagttctgtctctctttctctctctcctaaaaactaaccccacatctaaagaagctggtctctgaaagagattttttggagagaacctcattattgattggggtcagcaatgaatatatcacccaagctgagccaaacaaatttttttctcctagaaatatgaagttggaattcaaacactgcaagtcactgcttatggctggaacatatagacttgacaggcttggagaagtagattctgacaatgcagttggagaagcatcagaggcagagaatatgagagtgaagcagctgcaaagagagaagcaggggtgagaggtgtcatgacagccttgcagatcctaatttacggcccttttgagctctagctgtatttctacccatgaattc

SEQ ID NO: 205967 - DNA, 1000 bp, Homo Sapiens
tgatcttgatcttccagctttcagaactgtgagatataaacgtctattgtttaagccacccagtctatggtattttgttatggtagtccaggctgactgctgactaatacacatatagaaactcatttagtcttctaacaacagtataaggcaggcacaggtattgtctcccttcagcaggtgaagaaactgaggcttagagaagtgctgtgctaggtacttagatggccactaggaatatgaagattaatgctttgggttccaggaaataatccagtccagtgagttcaattcagcttggcctttagggctgtaccctggtgccccaaaacaggactatatccattggcagaacatgttttgcttgcttaacaattggcctcaatcatgtaaagccatgctttaatgccactttgggaaactctacttctagaagtttcctcaatcatcaagaaacatctttcctgagaagggacagaaagaggcctgacttccattcttttgtgatctttggcaagttacttgacctttctgagtttcagttttctcatttgtgcaatgggtataataacgacgatttcataaaattaatgtgaggatttgataaaattgagatgtgaaaaatgccagctatgccacaaataccttaaagagattctggcagccaccaaggaccagccctctccccatggaaccatgacttagccaagtgggggagagcaatctaacccttgctccaaaatctctaggtaagctacatttcacaacttcccggaggaggaccgtctgttggcccagacccagctcccaggcgctttcccaacactgcctgctgactttaacctcatttcccatcctggaataattaaaagaattgtaaatgtgttatgtatggattgacttacatacattccttattccttaaaatcattccttattccacaaaaagaactgaggggtctccatttgcatggcgaggaccctctactgaagagaattc

SEQ ID NO: 205968 - DNA, 1000 bp, Homo Sapiens
gaccaatagctggctggctgattagcaatgcaaggacccaggctaatttcattttatggttccaccatctttcatgtatggcttccattgtacttatgtgcatgaaacctactgaaggcaaagaaagagcagggaatttgcactttggaggctctcatgggccaggcctggaggagttgcatgtatttttgcccacatctcattaggtagagctgaggcataggtcatcacctaactgcaaaagactaagaatgtagtcctgctgtttgctcgaatagctgtaatcagctgcaattcagtcttcttaaatcactatttctttgcatttgtgaataaaatgacttcaatataattattatactctgatctaggatgattattaagagaattgatggccctttaaaaaatcaggcttatacaaatgcttgagtacaaaattccggagtttaagttctaagttttaaagaactgctaagcttcgataccttggtcatgacaactttctcaaatgccagggagggaacctttgaatccaaatattttctctgtatgaaaggcccacccacaataacattcatttgcagaaggaaatgatttattgctccctgtgagtgagtgccaaaaaaagttttctcctgaaatatcgtgccagtatttccatataaacataattttagcatattctgcgatgtggaaatttatttttcatagaatttataggttttgagatgtaaagggtccccataaagtcgttttgcagcttgaaaatgtgaaaatatttaacttttatagttcaaaaattttatgttgtagaaatgatagaaacaatatctagagaatgtttgaagactttttcttccaggttatgtggtctgcttgccagaggacattgttttatattcttattcattaaacaagcacttattgagcattaactatgtgctatgtgattaattcacttagtacctagtcctccaaaatttaaagtcagttagaggag

SEQ ID NO: 205969 - DNA, 1000 bp, Homo Sapiens
tgtaaccagtgagaaagcagccacatgtttggaataaaaagattctgacatactgtccatcaggtgaggatacaagaagacataccctcatcagataatggatttgccagcaccttgatcttggacttcccagcttccagaaccatgagaaataaatgtttattgtttcgtgttttttggagaaaaaaaaaacgattatgaagtaaagttaaagggttagcactacacatataattcattttctcaatcattcatagacaagcagttatagaaaagtagataaatccagaaatgtacagagtgctacaggatatcactaatgtggttaatttcatagaaacgagacctttaataaatagaggaatacttacaaactataatgagatgtgtaggaactatcacacagtgtttaagtgacttagctcccgaactggactgcatgggctggaacaccggcaatagaatttattagctatgagatcttggacatattacttaatctctacaagttattatcatctgtagaatggtgacagaattggtcagagttttacaagagataattcatgtatagcacttagaacaacgcttggcacacagtacatattcaataaatgttagctattactggttattatgagaataatcataaaaatcttttataccacaaaaaattcattaatcatcttttggcaaagaacttagaggtgatcaacctcagagatgaattacacatttttcttttacaaataagtaagcattccaaatttgctggcctattctgggatattttgtagaccgggatctatgagaatactccatcagtatctcctgctaaattagttatattgatagtgttggccacaaatatttaacagaaagtacttcatcagaactttaaaatagtatacataccctcaaatcaggagaaaagttgtcggcagaagttgaaatggaatctgatgatacaacagaagctgattttgtatgcactgaattc

SEQ ID NO: 205970 - DNA, 1000 bp, Homo Sapiens
gattttaggagatattaatacttgcttcactggtcaccatcacggccaatttggttcagtgtgaatgaaaataccgatgataagacaagatggcactgctcctagacattttctcaggaaaatggatcatggtatagcaaaagccttttggtagacgtggcttccatcttaaagcccaaaaccaaacaaaacttcacagatggcatagggctgattcagtcttcaaagtgtaaaatggggaagctttctgggttattcactgtaatagcaaccagctttgtgctgagtgcaacactggaccctacgtgtcacatgcatcaagtaatttgatgttcaaaataatcttacaagagagtcagaagtattaccccggttttatgaatgtgaaaaaatgaaacccagagaagtttaaaaaacttgcccaaagtcacttaggtagtaagtgtctgagtcacaatccaatctaggtctgactccctccaaaatctccaaccccttaacctgcccttctaagctgaaatacattgttctatcttcaccaacagcagaaaagattatagttgaaagggattaactcctggctagcctgtgtgatttgggatacaggatttatttttctgaacctcaatttaattttcataaaatgggaaaattcctgaataaccttttctcagggctgttgaaagatcaaaatgaaataaaactataaagtattacacaaatatgtgttatgtgatgattaaactcaatgtataaatctcttgattatgaagtagtcaaaaaattgctaaattgaactaaactgaccatgtctaacatctaggactgttgccagccatgccttacagcccaaagatgccaattagtaaatgctgcaaagctaattagtgacatttcagctcataggtaccctactggataggaatggatctcatgagaaaatcatttctagtctttcagacacctttgtggcttcaatttgagtatttccaaagaattc

SEQ ID NO: 205971 - DNA, 1000 bp, Homo Sapiens
cggtgcagtatgttacacactgctggccccattgccccttattgcaccccaagtgcaagaagaaagaaggggacctgggatgatctgagcaagactctcagcttgggatctagagtcagagaaacttgggtttgtgactttgggcaaagttaggacatctcttgagactcagcttcttcatttgcaagattggggataatgttaatactacctcaggtttttgaggattaaatgagatgacgcatgtaagtttttagcccagggactgcatagaggaactgctatcccaggtcccaactatcgtttctgataatttctacaatagtccctagccaccataagaccttttcttaatttttgaattcactttatttctgggcaagttcattctcctaagcagggcggttttttgctttttgttcgtttgtttattttgagacagggtctcactgtcacccaggctggggtgcggtggcgtgatctctgcttactgcaacctcctcctcctgggttcaagcgattatcgtgcctcagcctcctgagtagctgggactacaggcgtgtgccatcgctcccggctaatttttgtattttttgttagagatggggtttcaccatgttggccaggctggtctcaaactcctggcctcaagagatctgcccgcctcggcctcccaaattgttgggattacaggcgtgagccaccacacctggctaggcaggatggttttataggctgattttgatggggaaacttgagtcttttcacccaaggttggatgctcaaggccagtgtattgcctcccttcagctgtaggctgaattatagcgttaccacacagcatttagggaggatgcaggcttaatgccacatagtagggtggatacttaagattcatagaggatgtgagtacttatgatgcaaaaacagctgaatatagaattatgtatttacataagactggttactttcatggttataaagaatgcgtaagaattc

SEQ ID NO: 205972 - DNA, 1000 bp, Homo Sapiens
ccaagcctggctttaggccaccatgattgttttccccagagttgcaattcagcaggagtaggcaagacctacgccagctgaaatggcaccctggactacagggctctggccacgctgctatcgatgcttaggactaggccgtgctttgtgttgggagggctgtcctgtgcattgtaggatgttttccagcatcccaggcctatccctgctagatgtcagtgccacacacacccaaatctcagcaatcacaaacatccccagacatgtcccctggaagaccaccagtgtgcaagatacagatactgtagaataacaggagggagagggagcacgtgagagcccaagggcagaggggatgatagaacaatctggcgctggagacggagctgatctgagcactgtggcagcaacagggatgttcaccaaatcttccctttgctatcctgcctttcccatcccccttgtagccaagagaactcgctatatgactagctctgaccatgaaatattggcagaagagacaggtgtcattcccaagcccaggcggtgaacagccctgtggggttctccagcctctgtctccctgacatggtgcctaagaggtcatatgttcctcctggtgtagggaaatccaggtccctgagggactgtgcagaacaagatgcccccaaatgaacagagagcaaggcacgggcctctaaggtgtaagccttgcagggtgggtggtagagcctcacctgctctgactgatggaaatcggcagagggaagaagggaaaccccttctgatgggggtgggaggcctgaaggaagccctggagatgggaaagtcctagagggaactggctgtactggaacagccacactgtgccaggaagttgcaaaaacttgttgcaggtgggaggcggggtgtgcagcgggcagcccactcacagaggctggagtgaaggatgtgtggtcaacaacacggatgatcagaggagagacatttttaggaattc

SEQ ID NO: 205973 - DNA, 1000 bp, Homo Sapiens
taaattgcccagtctcaggtgtgtctttatcaacagtgtgaaaatggacgaatacaccttctaaatgttgaagtcacccatgccttaggccttgaatattttctgtctatttacagtcactcaccaggtgatctcttctagttttgactttaaatttattctataatccagatttacatttccatcccaacctttcccctactttccagacacacattaccaactgcctatgtatcatttctccatggatgcaataggatctcagacttgacattcctgaaacccaacttttcatcactctcccaatctctaagcctgcttctcctccacgatcctccatctctttaaatggtgccgcaattcgtctagatgcccatgtcaaaaagccttggaatcatccttgaccttcacctctcacatctaaatcatctgtaaaccctatgggttctaccttcaaagtatatccagaacctaacgttttctcacctcctccattgctccaccctaccttacctggattactttagtagtgtcctaactggtcttgtgtttccactgttggcatccttcattctattctccacagaatagccagactgggcttttaaaactgtaaatcagagaagtagaaacaaacatggtgaaccctatggttaccccagactgctgcctgggagcactttctgaactatagtgtgggaagggagaatccaagcagtcttactgagctgaggagagattgaagtttgaagaggctgaagcagctacaatttgcaaggcagactaatgaggaggagaattaagccacacagagcaagaaattgcatagtggtctccttgagtgtgttgctgaataacaaactatgccctcacagaatataattccaagaggccaggcaaagaatgactggagtcctagaatctgaataatttccagagcttacatagggctagaagatggttgtgttctaatcagcaaagggcaagtactattgaattc

SEQ ID NO: 205974 - DNA, 1000 bp, Homo Sapiens
atgtacccccacccccaccaactctgtattttattccctggaaggtggcaggaggtcacagtgggtccgaaactgggctgtgtggcgctactttcgagactactttcccatccaggtaaagtgctgtgagtgttgttttgggagggtgggaatggatgggaaatctgaactcaggccttaacccacccacggggaagcaagtttagaccaagttggtctcttcatttcctttctactgtgtcactggctgtgctggggaccccactgctcttctgagtatccatcttctttgggccagccctgaggtcctgacagggaaatggtggctcagtttggctttcagtctcagctctgtctggcccctgcctggtctgcaagctgggctggtgaggcacagccatctggccctgatgcatgtgggcaatcctggtgaattgaggataactctggcaggatcctgaaggttttccccacaggggaaagacctgtctggccagctcactccacaccccagctccagcacaccctagctgctgagtaccctgcagaaggtaggggtgctgaagagtggaggcagcacgtgaatgtgaaagagttctgtgcagggtgcagggtggtgtatatttgctgttgtgagtcagtgactgagatcctggtgtgttgcctgggggcagtggctgggtaaccctgcatccttcactgcattcggtattttgggggtggcagggccagctccttctgctcatccttagcctaagcccagtcttcccgggaccttcctgctcctcagggtcagcgttccttctccttttcctgaccccatctctctaactgcagaaaatttgaagctgtttttgttgggagaaagttgcatcataggacccaaccctctaattttggaggtaaagaaactgagcctcagagatgggcaggacttgtccaggctgcatagtctagtatgatggcaacattgcaaccaccatccaggcttattgaattc

SEQ ID NO: 205975 - DNA, 1000 bp, Homo Sapiens
cccaggaataactactcttaaccatttgttacatatcctttcagatatctttctccaagtgcttattcaacaaagacttcttttttattttttattttgagacagagtctcgctctgtcgcccaggctgatttccgctcactacaacttctgcctcccaggttcaagtgattttcctgcctcagcctcccaagtagctgggattacaggtgtgggccaccatgcccggctaatgtttgtttttagtagagatggggtttctccatgttggccagactggtctcgaactcctgacctcaagtgatccacctgcctcagcctcccaaaatgttgggattacaggtgtgagccaccatgcccagccacaaacatttatttctaatggaatgtatgatgtacatattctgcaattttgtttttttcccataaagcatgtcatggacatctttctaccatagtgcatattagtcttccttgttttcctcgtgattgcctattttaccattataagtctgtgccattttagacctggtatcttcctgcttctgggcaatctttttgtggccaacatggaagtctatagcccacttaggagacatttttcccagtatggaacctcagtccagagcccatgatcctgtggttaggatgagcagacagtatggccgctttgccccctctctggacaattcagccttatcagcctccaactcacttccccagaggatttggaaatatgcttcctactgctctgtgcccctgggcagagatgctaagtatcctgtccaccccttccttcggaacataacacagaggatttttggctttttaaacctacatcttatctgaaggtagggattgctctgcctgccatcccaaagcctacagtcctgacactgtgaaatgagtgcagaggaaggaggtggaatgcagttggctttgagtcctagccagccgtttgaaggctacagcctgcttctaacttgtttctgatggaattc

SEQ ID NO: 205976 - DNA, 1000 bp, Homo Sapiens
tcgaatgtaataagaaagtggttaaacagcattcaactcaagtaagaaaacaaactaggttcttccataatttcattttaattttatatagtgaaaaaagcatcctccctaaattaatcaaaatgcttgtctacatataacaaagacagacttgctagttattgagggtctttttcctgtactagttgccaaatgacaaacctggggaggaaaacagaagaatctgcattcaacatacattcagttagacctcagggggcctataaatacacattcatggagctttccatatctacaaaaattgatatttgatatccctccaccccataccttttcctgggaaaagctagtccagaaaatgagaatatattatcttcgcatctatggcaagtttgaaagtgacttgcagttattctatatgagcttagataatccactaccaaaatcattttaaatctggcttaactgctaaggccaattttgagtagaagtgtttttgacagtcaaagccttgataaccacttcacacctacctagaggcccctgcaaccaagagctaagtggcaacagaaaaaaactacagtttttctatcctatctgtgaaaaccagaagaatgacaaaggtgattagatgagtgaaatgtgatggacagacctcactacaattcatgttagatacaggtccagacctcttcccagaagattgctttaagttggtaagacatggacttacctgataggtcctgaattccactggcctgttctaaatgacagcgcagtcagcatattccctggattggactgatctcagggcttctagtcctggcttcctgtgtcaaggtagtgtttgactcacactcattctgggttcttccccatttcttctttggtctattcacttgttgattttgcaacccaaataatactattgtcaatagatgtccaaagactggggtagaattaatttaacataatgcatgtggctgcttaaacaccctag

SEQ ID NO: 205977 - DNA, 1000 bp, Homo Sapiens
tgctgtgttgcacatacggtgataaagggtacattagttttcttagtctgccttcacagaataccactgactgggtggcttcagcaacaggaattcatttcctcacagttctggaggctgaaagtccaagaaccatgtgtaggcagggtctgctcattctgagtgccatgaggaaaggatccattccaggcctgtctccttggcttgcagatgactgtctcctttctgtgttttcacatcatcttccccgtgtgcattgtatatctgtgtccaaatctcttatcctaaatgcaccagtcacattggattagggtccaccctaaggccttcattttgacttaatcactgctataaaaacctgtctcccaatacatctaccctctttggtattgggggttaagacttcaacatataaatttttgaggtgggcataatgcagcccacaacaaaaggcaggatggaagcaggagacatgagaagaaatcaccgtaaccacctatgcaagagatggtggaacttggaccagggtcgttatgatgaagatggtgataagaagtagattctgaatccatggtgaagatcagaataacaagatttgccaatagattggaagtgaggtatgagaggaagatgagtcagggtgacaccacggaactaaaattccagatgggcttaaccatggaggcagtgtgaggagatggaagtgaagagtgagagaagtggaagcataggaaggtacttatctggcttagaaggaggataaagacacaacagttttaaaaatataataccaggagtacttattagtagtaaatttcaggtagattaaatagttaaaggggaaaagagcctataaaactgttagatacaaaacatagaaaactattttcattattttgaaatttcttgattttgctaatcaagaaataaacctcaaagtcatttaaaaatgattgaaagcttcaactaaaacatgcatagcatttttgcatatatcaca

SEQ ID NO: 205978 - DNA, 1000 bp, Homo Sapiens
tgctcaattctaagggctggactgacatgtggcaactttgtacaggccagaccccaggaggccggctccccaattgcctttgccacactgcctctgtcccaccacaaccacagtgaccttaaggagcagaagggtctgttacaaatgtactgcccacatagggtaggggagacagatgtccaaaccaatacccagcccaccaaaggcaccctatgagagggttataaagagaccacagggccaggcgcggtggctcatgcctgtaatcccagcactttgaaagatcaaggcaggcagatcatctgaggtcaggaattcgagaccagcctgaccaacatggtgaaaccccgtctctactaaaaatacaaaattagcctggcgtggtggcacatgcctgtaatcccagctacttgggaagctggggcaggagaatcacttgaacccgggaggcacaggttgcagtgagctgagatggtgccgttgcactccagcctgggcaacaagagtgaaactctgtctcaagaaaatataaaaattaaaaaaattaagaggccacagcaattccgagaaaggagcagctccattctttctgggatgggcagggggctgttgagaaagttacagagagcaggtgacatctgagctggacttgaagcacaatgaagagtttgtcagattgtcaaattgcagaagagaacgttaaaggaacaggctatgcatggaatgcacatccttacatagcagactgcacatttcaaaaatcagttcaaaatcacaatctcgtttcaccctctcaaatcccataatggtgttattaactgcctctcccacggccctccacctgccacacacaggcaaacaaaaaaagtaaggtccagtgaaggcagatggtgagccccagggcaaacaaacggtgactgatttctgagtagagggaagtgaggggtggactctggctgaaatggtcctcttctcactgaagtgggggattcctgaattc

SEQ ID NO: 205979 - DNA, 1000 bp, Homo Sapiens
gagactctccctccagggagaccccgaggacccagcctctagtgctgtcaccgctggggactcaggcccccagcctaggccaactcccagagctcagcaagctcttggggcttccttgcccttacccagatccttgaaaagcatcttatccagcacaaggcatttaacctgagctgtaataactgacgcccattaaaactgtgacgcttcccaggatgcctgcattttactatgtggtaaaccccgcacaggcagggactgggtgcaggtctgcttgccagtgtttatccatcatcagctgcagagctggatacacactacacccttggtacatactaatcaaacgaatacagttaaagagaaccaaaacatcgatctaaaaagaaagactaactctgggaccccaggaactccaccagaattggggtagcagggtcttcccaaggctgggaaataatcccagcggtgacccattttgccaccttaaagcctcagccctcctggtttgaagtagcagcttcccatgtccctctaaggactctgacagcaccacacatgcagggagctgccgctcctgggcacctgcactgcctgcacaggcttcgagaagacagcagcggggacactgcaggagtgagctgatgtctcatgggaccacagcaacaaggaggggggcagggggtgagatgcagttgggagaagggcttcccctggggcaggcccaccccggaaacagccctcaggcaccgttgatggtgaggtggacccaccctggaagccgtcactcaccgttgatggtgaggtggacccagctgccattgtggaaggtgtcatactgctggtccagcatgagcactttgcactcataccagccctggtcctcagagcgaacttgttccagccgcagagatgccttatcatgaagactggcccggcctgggggaatagagcagacaaaagccccacaggccatcaggtaaggacagcagctccccgcccc

SEQ ID NO: 205980 - DNA, 1000 bp, Homo Sapiens
gttcagacaacattatttcatgacatatcttcttatttcttgaaattttgttttgtggacaagtatacacttaaaaaagttccatgtgtgcatacaatgaacatgtatcttctatttggggtacaaactttcacatacattaattgtgttcaaatattttataaccttactattatcaagacctttaaatttatcaagcatgaccttaattaggtgatattaatcgtttaatcattaattgatcattaatcaacctttttgctgtgaaattttgctgatcaatgtgaaagaaactacgaaggtaataatgaaggggtcattttgtagcatggtagtatcaccctggtcctaggacctgggtctcagctccttttctgactctctcagtgacgtgaggcttctctgaattttacctctaaaatggaaacaatgacatatgctctagcttttttacgtaattgtgagaggaaagatgcactacataagccaatgctatgaggattgcagaacttccaaagcaaggatggttgaggaattccctttcttactttacacgctttaattatggaaaacaagatataacaaaattatacgcagactttttccttaggaagttttttatacgatgtttcctactttgtttagtgaggagttgtacaattagtaacaatcaaattaatataagcaatattaaaatcagctgttcccatgagggactagtgataagatataattttgttgtaatgcaagcggcaatgacaattcattatatgtaaattacgggatgttttaagttctataaagctcatgatattttatcttatttaaaaaaataaatttagaaaataagaaatagggtttcaccatgttgctcaggctgctcttgaactcctgggttcaagtgatcctcccacctcatcttcacaaagtgctgcgattacaggcatgagccgccatatctgatcaagtccatgatattttaaattctaaaatggaattc

SEQ ID NO: 205981 - DNA, 1000 bp, Homo Sapiens
gtttctcccatttggaatgactgtactcccactgtatctaggaagtaaccaacctgcttttaattttacaggctcataggtggaaaggacttgccttgtcttgaatgagactttggactgtggacttttgagtaaatgctggaatgagttaagactttgagggactgttgggaaggcatgattggttttgaaatgtgaggacctgaggtttgggaggggccaggagcagaatgatatgatttggctgttccaccacccaaatctcatcttaaattcctacatgttgtgggagggacccagtgggaggtaattgaatcataggggcaggtctttcccatgctgctctcatgatcgtgaacaagtctcatgaggtctgatggctttataaggcagagttccccttcacaagccctctctttgcctgctgctatccatgtaagacgtgacttgctcctccttgtcttccaccattattgtgaggcttccttagccacgtggaactgtaagtcaattaaacctctttcttttgtaaattgcccagtctcgggtatgtctttatcagtagcatgaaaacggactaatacaactaatacaccactctcatgtctgggcagggccagtgggcctgggaggcagagtctgtcagtgggactggggcaataaggggtctctcttgtgtctgaaggaaccacagtgacccactcagggggcctagaggcagtgaaggctgtgggcctgccacatcttgtcaagactgctcaagcaagtcctcactgctcctccagctccctgccaccctccaatccattctcccacataatggctccttcgccagaaggatgaagactttatgtgggtgttcagggcctgatctctctaccccatctccacaacagtcctccatacacagcccaatgttcctgaacaggtcacagtatttatgcctctgtgtacaccttgctttgtctgaaatgctctttctccttctttgatagaattc

SEQ ID NO: 205982 - DNA, 1000 bp, Homo Sapiens
ctcctaaatgtatacacccactatgtactcacggaaattaaagaaaacaacaaaacttcttttcaagaagcttaaagacttgtgcacttttttgccatgcatatgacagaagcttcattttcaattttaattattaaaaattcttatattttgtggcagaagattcgtggaccttgtctccaactagaggagctctagcgtactgaaggacactgagaggtaatttctcctaaaggtgcagccaccctgagtttgcatggcaaaagcttcaggtgccccccaccccacatcaggatactggatggagctgctgtcattgtgggaggctgtataaagggcggttaaagttttaggtatcaagagttttattacatgtgtcaaatcctggctccacagcatgcttctataatttatataaacactttgtgcgtcagtttcctaatctgccaaatggacatgatcatagaacctctaaatgattgttaagaggtttaaatgaaaaatgtacttagaatgttctgacatatggcaccccaaaaatattcttttattaatttgtgacatgttctctttcaaccaggagaggtaaaaaggaggaactgcctgctgaattttgacaacatttaacccttaggttaaatggggatttctaaacttgcctgggggtcttccaaggcactgacacaaggggaattctggtgcccgtctaaagtatgatcttcttaaactcagcttagaaataatttgttgcatttttcttttgcaagaaggctaatctgctactccggatattacttccacgggatggtaatgaggctttctgggaagtagtagttaatagctttaggtgtcttttgtttcctttgtaactgttagggtgcagacgctgattgatggatgtcagcaagagagactgcaggtaagaacaattggggccgctgtaaggtttcagagtaaaagagagatgaaggtttagatctagccacatctgtttgaattc

SEQ ID NO: 205983 - DNA, 1000 bp, Homo Sapiens
taaaagacagacataaagaaactgaaaaatcctggatgcatacagatgaagtcagtggttgaatgtctggtgttcttaaagacattagcactcaccaccgcagcaggcctggatgaagatcaccttgggtttgtccttcaaacttggacagttcctggtattcaacatttggaaaatttcattgacttctaatatatttgggagttactcagagtattttttcctacaaatgccttcccaaataccatgagacgtgaacaccaggaaagtgctgtcagaggtcctgtgctctgggcaatgagcaaatgccttcagctctgtagtcatctcctaaaaggcactataccactgattttggactgtgtaattcactatcatggcaccttagaaatcaaataaataaatacataagggatttcttaaggaattttatgatgaacaatggagaggcaagaaaaattttagtcttagtttggagaaaagggaagaaagtgttataggaaatcatccagagatatagagagaaggaagcattattgagttaataaaacactccccaattaagttataccaggctttagctgaataatccttatgttataagagaacatgtagcatccggcatcctccaatggcaaatttggattttagattatgaagagattatattctctggtcctacaactaagctttctaacataatttaggaatatgaaagccattaccattgtctctgtgtatgataaaacttactgaagcagtgacattttcattcacatccacgctataccccagagattctatcagcatcttcatatctctgacatcaacttcacctctaaccctcccaggaagaatggcattcctcgtggataatgggattcttctctgtcccactttgtgttccttacagcatcatctatgtgtgaagccataaaagaagaaatgcattcttaggaggacaatcctgatgtagtcattaacaccattgagtgaattc

SEQ ID NO: 205984 - DNA, 1000 bp, Homo Sapiens
ctgggactacaggcatgcatcaccacgtcctgctaatttatgcatttttttgtagagatggggttttgccatgttgcacaggctggtttcaaactcttgggatcaagcccacctcaacctcccaaagtgctgggattacaaataggtatgagccactgcgcctggccattaggaactgtcttctttcaattctttcctaggcatactaatctgaactcttgtcctagtaagttgtttattatttcttccagtgcttcctaaacttttccactgaagtactgacagagaagaatgaaagctacacaacacacacacacacacacacacatgcacacacacacgcacacacacacacacacacaccccggtgtgtactcaaagccctgggaaagtgacccaaagcaaaattattgggaaatgcaaaatttttccaaagtcctgtgtttatcttaaatattcgttcaagtcccacaacctactctgtttttcttaaagaaacagaagtttaaaagggcaattgatattccagaacatgcagtatgtttaacaagggctttgagaaatcccttcccctcccaaatcatgatatacctcttataaccccatttaagaaacccagattgagaaatcacttatataatagatttctattgctctgaggtagaattcatactcttaaaagtagtttgcctttttaaaagaaatctgcattctatctacttatgaagcatctatttttttttttgttctcattttagcaaaatcactagttgtttcggtttttttttttaagagatagtgtcttactttgtcacccatgctggagtgcagtggtgcaatcacagctcactgtagccttgaactcctgggctcgagcaatcctctcacctcagcctcctgagtagctaggaccacaggtttgtgccactacacccagctatttttaaatttttttgtagaaatcgggtcttgctatgttacccaggctggtcttgaattc

SEQ ID NO: 205985 - DNA, 1000 bp, Homo Sapiens
aggataatttgagcatcaaaataataatagtaataatgactataactgattataacaaattgaaaacaattagtctacagtgttttttttttttatttttgagatggagtctcgctgtcacccatccaggctggagtgcagtgacatgatctaggctcactgcaacttctacctcccaggttcaagcgattctcatgcctcagcctcccaagtagctgggattacaggtgcccgccaccatgcctggctatttttcacatttttagtagagacaaggtttcaccatactggccaggctaatctcaaactcctgacctcaaatgatctgcccaccttggcctcccaaagtgctgggattacaggtgtgagccaccgcacctggcctatgacaatatttttcaaagagtttaagaaaagctgttctttatagaaaaattctaaaaatacacagtaactgaaatacagtatcaacatattgcaccctcaatgtaatttaatgatcaattcaggcaaggaacaccaatggatacttgagtttggatatctgtcccctccaaatctcatgttgaaatgtggtcctcaatgctggaagcggggcctgggaaggaagggaagaaggaaaggaaggaagaaggaaaggaagaagggaagggaaggagggaaagatgatgtagagagatagaatgaataatgcccccaccccgcaagatgtctacgttctaatccccggacttgtgaatatgttactttacatggcaaaaaggattttgaagataagattaagttaaaagtcttgaggtggacagattatcctaaattatctaggcaggccaaatgtaatcagaagggtcctaaaaagtggaagagggagccaggagagtcagagggagatgtgagtttggaataatggtctgctttgaagcagtcttcaaataatgctgctttgaagataaaggaagagggccatgagccaaagaatgtgggcagcctttagaagctt

SEQ ID NO: 205986 - DNA, 1000 bp, Homo Sapiens
gggtgaccatagcgctgtatgtatggtgatggaagctatggacatggatgttattttctcagaaaagcatagagggtgagacagaaagattttctgtgaactaggcttgtggaagtccaaccctgtgatggttgggtggatgaggatgaacctgcagaggaaacagaggatcagagatggagaagcaaaaccaagtgactggggtaagaagtattgcaaaagaagacatgattaaggcatgtggcagtagatgaggactggaacatgtccacagattttgtaacatggaatgaattagtgaccttagcaagagctcttttggtgaagtgatgaaggaattttagaggttagaggaataaacagtagataaagaattgaaataatgtatagaaaaaacccaaccaaccaaccaaacaaaaaaccttttgagaagaagtttagttgggcttttagaacccaggaaaagcagttaggctttctctttcttaggtcaacttctttgttgtaacctaacaaaaaaggaaaaagagagagagagagaaattcaagccaagggaaaatattcataactttttaaagtagcctgattcttccacctagagattttgaactaaaatgtggaatgtggatctattccaggccaatacagaggaaccttcttacttgaggaggggcagacaggcagcagggcacagttatgctggtggtgggtattctagttggatgagacaaaaatccagtttagctaaactaccctagaaattccctcattgtcagagcttgagttcttgatgttcccaagccagaggagaaaaatccttagtacaaagcagagcagcataaaaactctatttcttagcagagagagaataagtaattttgtttgagtcaaatacatgtatgatatgtttctccttcattagtttttgagtaccaacttggtagaaagcatattaccagtgttttgattactcttcaacatatttctgcctataagctt

SEQ ID NO: 205987 - DNA, 1000 bp, Homo Sapiens
taaacttagtatattccatatatctttttgtgtcaataaatacaattctgcagcatcacttttaatgatcacatagtattctacaatatagataaaatcaaaacttaatttatttcctactttgacttgtcaggctttctgtgttttgttcccccataacagtgttttaatcaacacccatgcaaacaaacctatgccccccttcttctttcttctcaatgattttgtttggataaattcttaaaaggagagttgccaagttcaagtaatctactcacaatttagggaatcattacatattgccaattgttctctaaaagattatatcaatttacaatccagtcaactgagattgagcatttttctgcaattgcacgtataggtattatgttgaaaaataaaaataaaaaacacatttaaaaagcaaatcatcgcatcctaagtgttgaacggcaagaacatccattcttcatgctatgttaccagcccacgacaactttccaaacccttttccagatatacaagatcctataacccagcgaagatgcagtctcactaaatcggtataaagagagttctgtcttgtcttactaatttgattaatttaggagaaatgacaggaaagttcatataaattgtccattgacattcacatgaattctctcactttgacattttaccattctacgtcagtatcactttcagtaaataatgttttacatgcagatagttttacaatgcccatttaaattaattctaaactgttatgaaatccataaaaacccttgtggaacatttgtagcttgtacagtagtctcccattatggaatcaaatgtgaaatgtctgtgtgggagctgttttcctaaggtaaatagattattatttatatctctaggtgcaaatgcttttaaataaccagaacatacagcatctgaatatgcccttacataattttcacagctgctgcattcttgtcagtgcactgtcatggtgaagctt

SEQ ID NO: 205988 - DNA, 1000 bp, Homo Sapiens
agctatattgaacaaaaatgtttaaactgcataaaagtgcttgaatttatagtgtccatccaaacattgagaaatatgagccatacacatgtgtatgggggtcatgggctgttccttgtttatttttaccccgttcagacaaaaaaggtatttgacaattttgcccaagtggtttcttgccctctctagtgtttcttttgaaggacatcaggagataaacgtatttgttactggctcttcattagtgcaagttaatgctgtctcacatttgtaacgatgtggtttatcggtgttgttcagatctctgctgccccttcagagactgtcctcatgatgtgcctaggattccggggagggcagaaccttgggctgcatggaggaggctgaggatgaggggcatacctgtgtcctgttgggccccagcgcacgctcgtggggaggcagaccaggagtctgacaactctgtggtgctgtgctgcgtggcccttcagaatggtgccagactgaaacaagactttctgtgctggcagaaagcacagcaaatcgattttcaaagaagtttatggctataatttaaggcctgagtttttcacagtctgctgttaactaactttgcacttctctcacccctcagttgccaccttccagagaagaggtacgagatgacaagacaaccataaagtgtgaaacctccccgccttcctccccgagagcccttcggttagaccggctgcacaaaggggcgctgcacaccgtcagccacgaggacatcagggacataaggaagtaaggagcctgcagcagccccatgcagagcgcacctgtcttttcgtttctggtgttgagaaatcgacaaatctttccttgagtaaaacagtgattttgtagaattacccattaattcagttgagtgtatttacatgttacacttagaatgcttaccactgctctgggctatagtgaaatccagcagaagatgcatatctgtttgggcaagctt

SEQ ID NO: 205989 - DNA, 1000 bp, Homo Sapiens
tgtccgggggtggcgaggctccgccccatggcgctgcagcgcacatgatattatctctggcctgggctcagcctccagcaggatgcggctttcaacaccttcctcccctcggacaggccggggctttttgagtttctcacacatggatggaggggctgggcctgggcagaggaggcccccagctgaggcgcccccaccctgagcccccgtcatcagtcacagcccctcgagtgagagagggaagggccgtggtgcgtgagaggcagagggttgcatgcatggttcccctgagcgtctcccccaccccctcccctctgctctgttgtccataatcctgggcgcctgttcaaggaattctccacccgtgtgttagtgatttatttagactcggctcatcccgccagcctgcccggcgggtgacaggcccccactccccacccccaccacagaccctgggaccattttcatctccagcacggcaggcctggctctgctccaggccactccagatggtaggggctctgcttgagtctgcaggctttcatgggaccctggaatctcacttttgggggcccaggtaaccgcttcatgttcgtgaaccctcctcctcagtcgtgttgagagcggcctatctgtgttggtgattgttattgctgggatttgttattaacccctctggcccccctgtccagctgggaaggtgacaggtgacttttaagagcaagagaatcttcgactccatctccccattgaacaaatgggtggctacaggccaagacacagcaaggccctgggaggtggtggggagaccccagccccatgtctggccttaagattcttgattctctgtcccccacacatgatctcatctaagcctcagtcaaaccctcccaccaacaaagggtacatagctccatctgacacatgaagacatgaggctgagaatgggagagggacccctggtacccaaaccatcaggctaggagcagagcacaagctt

SEQ ID NO: 205990 - DNA, 1000 bp, Homo Sapiens
aattgcttgaacccaggaggcagaggttgcaatgagccaagatcacaccactacactccagcctgggggagaaagcgagactccatctcaaaaaaagaaaaaagaaaaaaaaagaaaagacagattatctcactaaagaaaactttacctataagacaaaacaattgggtacaaatgccaagatagttaattaaagttaattttaattaccttaagtacataaataaggcactctaaaaaaattcttcttaaaagcataaatgttaaatgcatacttaacgtttatatagcatatatatacatgtatgtaacaacttaattcacaaaaacaagaattgcaaaatatgatatattgctataatctgtttattcaagtaagcttttagaaagctatgaaattaacatggtagtgcttcaaatagtacttatatgtaagttaccagacttctgattgtttaaaactagaaagtcacatattttccctataaacaaacgctgggtcttttcagctgtttccctcctcagtaaatggaactactaactacccactctccaagccagaagtctggaaattaatactattcctactcaaaacactttgcatcaatccattaactaagtccttatctattctacctgcaacttctctttctcagatctagccttttctctcactccctatggccacttccccaactttctcacaataggaatgtaatattataacaacctccaactggtttccctatcaccaccccaaagtgcccactgcctttccaacaccccaaaagaattgtttcagaaatgagaatttcaggtcacccctggtgaagatcatataaatccattcagagaaactggggtggggctcttagaaaaaaaaaaaggtaaataacagaaacggaataatgacttttccctcatggtgtcttgggaaagataaataaaaaattgaatttttaactatactcagaggattcaaataaaaagtaataagctt

SEQ ID NO: 205991 - DNA, 1000 bp, Homo Sapiens
atcatgatctattgtggtgacttagattaactgtagttataaacaccatcaaggagttgatacgtgagaagtgaaattaatcaccactcccttcccacacacacacatttgctcacaccatctagcacatgaaacaagacctgaaggtgtactagcactgtgcgtcaccgtgctgttcctaagaagtaaatttccaggcaggcttttttattcttgtagcatctaattacagaacaccggaatgcaatggagacccagaggtgagctgaattattgaaaaagtaaaagcaaagacagtccagaaagctattatatatcttcataatagattcaccaaacttaagggtgctaagaaatgcaagcatttaattcagaaaacaaatatattttttcatagctctagggaaaactgctttttttctctaaaccttctggaagttttggtaattatgttagacagagacaagaaacataaaagatagtgtaggctctccgaaggaagttgtatttagtcaggttaaagttgaagtaattcatctattaaagcattcccatatttctgtatataacaaggtgtaatgtttccccaatgatttagcaaaagggaatggaaattacaaaggcacatgactagtgagtaggataggaatgtgggtagagaagggagagtaaggggttggaaagatttaatcgtcagctacctgactcgatctagtgccttgtcctttaaattacaactttctctcaaatatcatttaaaatattgaaacatcctttgtctacctcagaaagtccaactttcaaactcgcagaacaaaagaataaaaaagatactgtgtgttcagttgataaaaatgaaggtgaaatctttacaccaagtttaatagtgaatgaaaaattcttacaattaaaaacaggatgaggaaaattcggtacattcatttgtatgcttcaatcttctgctttaaaccacgtcaagaaactaaagcaagaaaagctt

SEQ ID NO: 205992 - DNA, 1000 bp, Homo Sapiens
tcaagagacccgtctcacatgtaagacacacacaggctcaaaataaagggaaggagaaacttccatggctgatttgttactgttgctgccaaatgtcacagactgaaagaatcaaaattgtaaaaatttctattctaaccaattaatgtatgaattatgtgaaataccaatcaaaatcacaacatgcttgtggaaactaaaagttgattatgaaattaatacagaaaagagcaaagtatatccaagatattcttgcccttacaaatatcaatgtattcagaagctatataagtgacataagcaagatggggagtcagggatctcagccctcatcacccacagaaaacaactggacagctatctgtgcatgaaaattgctataggaaggctctgcagtccagttaaggagctgcagcaacacagtgaagacaagtgaatgaacgtgttagtcagagttctccagagagacaaaaccaataggatacatcagaggagttcctgaactccttaaaattgttggaaaaatattctgtatatatacatcttttttgatcaaagctttacatcatttggattcacaagaaggaccatgagataacctctgtgatagctctaggctgttatcttgtaggctttttcttttcacatgtccatgtgttatctacacacaattgggttcttttgctttaatatttgtgtgtatgtggagtattcctttttcttttaaacaaaggtaagactagactttctctgaatatgctatttggcaacttggtttttttttttccactaaagatagccttccaggtcagcacataaagataaacatttttaatgtttgcatagtgtccctgcttaatattacatagagtagctgggtcataattatttaatcagtactcaaaaacatagtatgagtgcaaaaatgttcactgatttggagagaaagattgtgttatggcaagttagaagaaacagaatatgtgaaggtgaggaattc

SEQ ID NO: 205993 - DNA, 1000 bp, Homo Sapiens
attcatcggctcttagaaattcctttctgagctgaacttaaatccttaaattgtaaaagtgatttattccattcagtgaaagttggtagtaattcaacagcactatccagttggtatacatcaaaggcaaaacccatttgaaaaattttatactttctacttatctgtcaaataatttcagtagtatgattatgctggtcgaaggagacatttattagttgcgtgaccttaggcaagttatttgatatctctgactcagtttcctcatctgtaaaatggaggtaataatactaccaaattcataggattgaagagttaatacatgtaatatgtttagaacaatccttgacataagtgcttaatgataactatcatcattactatcattattagcattatcatttttccactgcccactaacaagggctttatactcttatctaaatctgagaatgggtggacatacagagtcttaaactctaagttagtttgaagaacctatggtttcaaatgcagaaatatttcagatttagtgtgaagagattgattatttcggagtgaatttaaacttcagcactaatcattagtcagggtctttcatagagccaagttaagagaagtgatacaactacgttttgatatttcaacctctggttggattcttggaataaaatttgctccaggaattttgggtagagaaactgagaatggtgtttgcttagagagttgaattgtctcaattccttcttagagtgaagggtggtataaataaataaaagtaatggtgcgtttcttctagtgtcgttagatctagtctgtttttaacaggaaggataataacaatacattgtcagtgacacatacggttatatatacagcactcttctgttcttttctacttaggctcccttgtttactgcctcagtttcccttgtttgaaagccttagaacctctggccatgcaggcagttagataattttcaaaaggttcagtgaattc

SEQ ID NO: 205994 - DNA, 1000 bp, Homo Sapiens
gtgaggtcaccatagagactgctgctgctcctggactccaggggatagtgctatcgcaggtagtttatcaacacctttttgtccttgcatcatttcctcaagattcagtgcacatccagttgactgagcctaggtcgttctaactgctggaacagggttggcttctgtaatggaaggtagatagaacctgcccctagacttagacagtgagttcagtgttccctaacattgaaaggatttacttaggtgactatcaggaagggaacatggtaggtaatagttggaagttgaactacctaatctctaatttattttccagctctaacatgttaggaaaataatgtactcatgcttttaacccccttctccttacccataactaagctacgctgaactctctattccttaaagagacaacactttcataacccagtcctatgcttttgtttttcccatgttgggccgatcttccctcactaccaccttctccacaccccacagtggattaacatcctcctcattttccctccggttcaatttcagcccacatatctctttctccttgtcactgaagctctatgtcccttccgtcagtcaacaggtagtaatgattactcatggaactccaaagcagtatgttcctttaacatactttgcaataaaaatgggtagttgtgtgcacgttggtctctggaaccaaatcgtaaaatcctaagggccaaggacagtcttactcatttcttgctatttatagctccactcacagtgatctcttggactcaattgttactttaaaggttaagcatgtgctctgcattttggtttatattgataatatctcaaagatttttaagtaagcattacaaagttaaacttcagacaagtttgaagttattcaacacacattccactttcagagagagtctaagttaaataggtgtcggggtcttgatttcacttgttttctggaacatatggattggtccagggtttagaattc

SEQ ID NO: 205995 - DNA, 1000 bp, Homo Sapiens
tgcattctgataggagggggcggcagggctgggccttgtgacaatctgcctttcaccacatggccttgcctcggtggccctgactgtcagggagggccagggaggcagagcgggagggagtctcaggaggaggctgccctgaggggctggggagggggtacctcatgaggaccagggtggagctgagaagaggaggaggtgggggctggaggtgctggtagctgaggggacgggcaagtgagaggggagggagggaagtcctgggaggatcctgagctgctgttgcagtctaacccactaatcagttcttagattcaggggaagggcaggcaccaacaactcagaatgggggctttcggggagggcgcctagtccccccagctctaagcagccaggagggacctgcatctaagcatctgggttgccatggcaatggcatgccccccagctactgtatgcccccgacccccgcagaggcagaatgaacccatagggagctgatcgtaatgtttatcatgttacttccccacccctacattttttgaaataaaataaggaattttattctcacttcctgtgtttcctgcacgccaatgccaggccatggtattgggtgatagatgaggcccttctagctgggcctgggcaccaggaggggtccccatgcttgcatctctctgtatcccctccctcccctgtggccatcccacccgcctctccctgctgcctctgaaattcattctggggcccggaacttggtggaaatgacccaaaaacattggcccatcttcctcctctcagcagccgaccccagcccaattctaaaacagggctgagagccacctctcagcagctgacccctacccaaggagggtggcatggaggggcttgcagagactcttcctaacatcctccccccccagctgtctccccaagtgcaatctgccctcccatccctgggccagccagcttccacagagcgccaggccaaacagaattc

SEQ ID NO: 205996 - DNA, 1000 bp, Homo Sapiens
ttctctaaggtagaaataatccacctccaccctcaaagatccaattctctgttttacaagctaagaggtttctcagttgtgaaatacacttattgaaaacttacctttacacttgccttctgtaaactgattcttgattgaaaaagactaagtttagatctataataaaaatagaaaagtatgtttaataaaatcatctaattatatcacaataaaattactaaatatattattaaaatttaaaaataatcttttttgaagatactgctctaaaaaagaatgaaaaaatggaaaaccaagagtaatgattattttcctttattttactacaggaagaatttattatcatggtaaaacaggaaatactgggattaatataagacaaatatccagaatgaccaaaaaaaaaaaaaaaaaacttgaccaaaaaaaaatcaaaatatattggtgtctcctaataaacaagagccatcaaattatagactattctcagtaccatacaacttcatacactttagttcctgcaaaggttagagagacccagggacaatcaacctatggaggcaagcgtcagcaaactttcagggctgtgtgtgaaagactctaacaataggctctatgaagtccttacttctattatttccaccattaaaagtacttcttgtttgggtacctgcctgtgtgcctcctctgctctaagggggtattctgaacttactgagaaagtcctgggactctctgccctgtatgatgtaatcttctcccactcttgggttcttatttcccttgatcctttttcagtttgggagagtaaccataatctaacaataggtagtacaaacatgttgattttacccaaacagctgcagataaccatatggagaaagtcaacagacaaatgctagggaacaagcaacactcccaggaccagtgattttttttttaaagctgcaatgtttgtcctgacttcagtgtcagggtgatttccatgagagaattc

SEQ ID NO: 205997 - DNA, 1000 bp, Homo Sapiens
aattggtaagaatgaagaactgtgaacaatccatatatctctgaaaagatgagtagaaaaactatagtgtattaaaatattattcatcaattgaaaggagtgaactgctggtgcatgcaacaggatagatgatctcacaaacatcccatatgggaaaagtagcaaaatccaagtgaatacatactgtatgattccattcctattcattcccaaatcaggccatagtcccctgcaatcatagaacttagaaagtggttgcctctggtggcaagttgggattggctggaaagcttctgtcctgcgagaatcctatggggctgtgctaatgttctacatcttttatgtgttgattacatgggtgtatataatttttaaaactcactaaagtggagacctaagatctatgtgttttactgcctgtatcttaaactggagaaaagcaaataggagacaagacaagggcagctagaaaagtaagaaccatcttactaaattctagaaagctcaatcttgggttagcatgccaggcaagtagttgtttactctattttttgttgtttttattgtaccattatttttcaccgtttctttctttttatgaatgcatttgatcctcggttggttgaatccactgctgctgaacccagaggatatggaggcctgactgccttctgtgaccaagatatctattcatagacaggagtacatgtgagccccaagcgctatccatgtccaagcattttcagagcaacattttttgtaagaggtcaaaagtagaaaggaactaaatacccattaaaaacgcaaacatttataccattgaataaattacagcaaggaaacaagacaaagtacagctgtacagaagaacatagatgagggaaatgccacacaaaaaatacatgaaaatacataaaacacaattctatttatatttatatagggtcataacattttcaaaatagacaatattttaattaatttaatttgtttagaattc

SEQ ID NO: 205998 - DNA, 1000 bp, Homo Sapiens
acaaatcatgcggcctgtgccaccatccagtgccggatctgaactactgatccactgagctttgggctgattggttctgcaacgatgggtggccaaggccacggtcaaatccagctggagaggtggatggggccagtgtcaggggtttggatttcaccccaagtcagctgaggcacactggaatgtcgtaagcctgcacatccactcatcacacattttaaccgcatctgagtgtggaccgtaccgatgggttcctgcacctgcagcctccacaccattgctggtgccctgcctcctagctggagtatccttcctgtctcttggctgctctttgtacccatcatggtccccctaccaccctccaagttctgctccaagctttgttttcctccaagagaagaacctgtccagacaatagtttcaaagcagcgggaagctctgctcacgtgtccccaaggaccatgctgtgtgaaattcccttctgtaatcacagagcccattgccctggcctattcctggtccaggaatagggaggaggtagacagaggatgcctccttccccactgctgagaaccctgccatcctcagccacagttgccacagagaagataccacatccctgggggaatcagcaggaatcaggtagagagtggcactgctctggggagggagggcgtctcacagcatcaaacgtcaaaaacccacaacattgacccagtcctgccaagacggaaccctgcatgagcatgggggatggggagttggggtgttgcaaaagacgcaatacatgaatgatctcaggtaattctcaggcaacccccggaggctggtgttgctagcacccctctgcaggagaagaagctggggctcgggagctgactggatctgctcaaaggcccaggaagaataagagttaggaactgggacagaccttgaggaagctgcacttcctcctgaggtgagccagcgttggagctgtttttcctttcagtatgaattc

SEQ ID NO: 205999 - DNA, 1000 bp, Homo Sapiens
ttgtaaatgtttgcatcataaaagttgaactcaatatgtgggttgtgaccatccattactgctgcacctgtgaaacttgacttcacaaagcagaggcgccacatgagccagggtgatcaggcagcccattggggagggagagaaggcaaggtcatttacaaagacatctgaaacagaatgtaattactttgtcttccagtttcacacttgaatatggaaagaactaacaagtttaccacgtgcgtgttaagagctttatacatatatcatcacatttaatcccaaacaaccccattattgtttttgtgcccattttacacatttggaaactgatgaagagagaggtcaagaaacaaactactgagttgcaggtcccaaaagaaaccaggtggtgtcaactccagagcccttcagccaccctgcgtgctgcctgcccccaaatgtccacacacacctagggtcactgaactttcatttttgtaatgccaagaaacaaacaaacaaaaagattcctacattcacctggagaccgggttcatatgttaagcatagtggcagctcttccagttattctgttaggtgggggaacacgatggagagtgtgcaagaaacaaagattaatgaatgctaatgccacgaagcacttactgtggccagtaccaataccacgtgcttcattaggattgttaacgctttgaatttttttttttttttgagacagtgtctcgctctgtctcccagactggagtgcagtggcatgatcttggctcactgcaacctccgcctcttgggttcaagtgattctcctgcctcagcctccggagtagctgggattactggtgcacgccaccatgtccagctaatttttgtatttttagtagagatgaggttttaccatattggccaggctggtctgaaactcctgacctcaaatgatccatgcctctcaaactgctgggattaaagacatgaggcaccatgccccaacaactctgaattc

SEQ ID NO: 206000 - DNA, 1000 bp, Homo Sapiens
agttagacctaaaagtataaaatcataaggaagggtggcttatcctcgtttgaaaaggggaaaaaagaaatcataagggaggccaggcatggtggttcacaccaataatcccaacattttgggaggccaaggcaggaggatggcttgagtccaggagttcaagaccagcctgggcaacatagggagacctcacctctataaatagaaataaataaataaaataaaataaaaagaaatcataagggaaaagcttcatgaggttaaacagcccatgatttcttggattgacactaaaagctcaagcaacaaaagcaaaaatagacaaataggactacatccaatgttaaaacctatgcggatcaaagaacacaaagtgaaaggcaagctatgggatgggagaaaatgtttgcaaattctatctgataaggggttaatatcaagaatatataaagaattccaactgggcaccgaggctcacacctatagtcctagcactttgagaggctgaagtggggagatcacttgagcccaggagttctagatcagcctggccaacatgacaaaaccctgtctctgtgaaaaatacaaaaattagccaggcatggtgacacacacctgtagtccctgctacttgggaagctgaggtgggagggtcacctgagctcaaagaggttcaggctgcagtgagccaagattgcaccacatcactccagcctgggcatgcagcgagaccctgtctcaaaaaataatgtaagtcacataatatataagaattcctataactcaacaacaaaaaacctgattgaacaatgaacaaataacttaaacagacatttatccaaaaaaggcatacatgtgaaacgatgcttaacatcactaatcattagagaattgcaaatcaaaagcacagtgagatatcacctgacacccatgaggatggccactatcaaagcaacaaaaaatgacacgtgttgatgaggatgtagataagtgagaattc

SEQ ID NO: 206001 - DNA, 1000 bp, Homo Sapiens
ctatcacttcccgtcttggtttggatgccatttcctataggaagccatccttagctatatctcctctctctaactgtattactcctatttattgctgtggcacactattaccaggcacgagattcacaccttgaaataaaaaacattcttattcagcaactattacactgcctggcaccttttaagtgcagaataaatataccaaatgcctgaataaacttctaacatacacctattgaaaaaattctctattatgaaccataaatttgaatatttctcccatatgacagagcttcaaatattgaaaatgtttcttcccaaggctaaacatcctcagtttatttcacagttcttcaaatggtacagtgttcagggctaaaccttctcatccagaccagccatctttcaaaataacaacaaccaaaactaaataaatttcaacagccagggtgtggccagtaaaaggtacagagagccaattactgtcttgttccagacacttcatttctaatagcacagtctaatgttacactattgatattgactccctaatcaatcaactaattacaaatgcactccggggatattttttgaactgtgccagaggtgcaaagtaacagattgatccactcactttggccaccacaaagtgctgggattacaggcatgatgcaccgggcctggtcaaattttcttccataaaaaataagttatttaaattgcacttttggaaatacttctatttcagaattgaagtcaccctacaatcatttagttcaatctccatttaccaatcagaaaagtgagggtttaaaaagttgtacacaattaagctgtcttagcaatcaggaagctgaaccacctccctacaaacctacccaatataacaaattatccttacctcactctctatcctggatttcagcaggtcaatgtcttcagatagcttatccacctgggtaatcaggccctgcgcgctctgcatgctaggcaggaattc

SEQ ID NO: 206002 - DNA, 1000 bp, Homo Sapiens
ccaaggtgggtggatcaccaggtcaggagatcgagaccatcctggctaacatggtgaaaccctgtctctactaaaaaaaaaaaaaatacaaaaaattagctgggtgtggtggtgggcacctgtagtcccagctactcaggagggggctgaggcaggagaatggcgtgaacccagaaggcagagcttgcagtgagccgagattgcaccactgccctccagactaggcgacagagcaaaactctgtctcataaaaaaaaaaaaaaaaaagcctgcctcctcttcttccccatgcctgccttcctccttgccgacagctcagctccatctattcaaggtgctgcattgctgccgcttatgacctgagagttcgacagtgggggaaacacaaatgggctgcttccacgtttggcctcggaagcattcagtacaagaggattgttgttttaggtatgccaaagaattggcatagattctcataaaaagtgaagttctgctttcttattggctgtgattgatttctgatgagtagacaagataacagtgttaatatagatgtttctttgatgaatcccttatagttcagagaaaaagcatttaggaatataataaatcctattttgagctgttcggtcaattatttaaaaaccaggtgatatttaactcctcaaagtaaattaagtttcttttgggttaccttctgtattagtttgtttttatgctgctgataaagacatacccgaaactgggaacaaaaagaggtttgcttggacttacagttccacgtggctagggaagcctcagaatcatggtgggaggcaaaaggcacctcttacatggcggcagcaagagaaaaaatgaggaagaagcaaaagtggaaacctctgataaacccatcagatctcgtgagacttattcactatcatgagaatagcatgggaaagaccggcctccatgtttcagttatctccccctgggtccctcccacaacatttgagaattc

SEQ ID NO: 206003 - DNA, 1000 bp, Homo Sapiens
atagacattccagcctgcacagtggtaacatagtttgctagctaagagcccagacctgcgagtcaagtgcctgggtttgatcctgccgccaccaaccttgtctcctctgggtatgtacattatagaattcttgtgagggttagattattggatgtgtgtaaaacagtacaacagtgcctggcaaatagtaagcacccaaaagggatagccattcttgcaatcacggataggcttgagcctgggccctgaggggagtcttatggtactgcctgaactacagagaggagtgagaatatgccacagagtgatgacagattataccatatcgtcacctagattcatgaacatacaatacacatcaacaatgagtgcaaagattgctaggagggatagcactgtgggctgatgctatctggatctcccccaagtttcctccaaatccactgttatcatggatctcttattactctgagtcaaggaaccggattactaaatcacagtttgtaaattacgatgagtcactttatctaatctagacggtcatatgcactcacctctcagaggctgtgatgtcagcttggacagattagagcatccaaagcaaagggcagcattgaaacacctgttccttgcagccctccacaccctcaggcagcagcagcagcacctgactatggtgcacagaacccacgggtgcctgagaaggacacactgaagaccggtggtagctgagttcaggtctccaggatgctggttgcccaaagaactgtatactttgaaatctactactctagtcccaaatacaggatgcaccatcatgatttcctctttagccactctcagggttgggaacagctgggaagaggttgcagagaaaagccaggaggaaaaactccccagttactaaagcaaaaccagagtgttgaaggtctagcatgaggaggagagggagatgctctaggagggaaggatgactgaccaagtgacatgacctgtcccc

SEQ ID NO: 206004 - DNA, 1000 bp, Homo Sapiens
agcgagtcttattttctttttactgtttcctcttaagagttttttaagttggctgaatttactctacttactcatatgtgttttagtagctattgagccattttatttaatagcttgaataaactattggttattgaatctttttagaaatacttatttctaatcccctctctttcctaaaaaggagggaagaagagatattttattatccaagaatatgctatcaatatcctggagcccacctatctagtttccagtgtgtcaactagcaccagcttagctaaccagacttacagtgagtttgtaattacatgattaggtatggcatacccagttactccttcttttctctgcctaccccaagccccattagctctgttttatgacagaaatttcagatttctttggcttttctgattcatttactgacgaaagagactttttctaggtttcaagaattatgaagagtctgagattctaccctacttgcaggttaacgtattagcctgccatactttcttatgttgctggacaactcatggcacagcaggcagtatgagcttgaagtttgcattgactcccctgcccctcaagtcccacaggggccacatggagacaggcctgggttggtgctgtccacagagtgggtttgtgtcctaggtgtaaaagctcaagcttaggagacccctattgttattaagactgctagcaaacctggacaactttcgcccctgagggagaagttatctttattctggtcaggaaacaactctgcccccccagggagacactttctgtctctcctaaggctgtatgctatccagacatccataaaatcgtgtggacaagttgctgacacaagatgtacagaaacatgagatgtccatggatgatggcttcccaaagttaggtagtagcaaaaagtagaactctgaatttttctgtttttgtcggcttctcccaaacgagaaaagttactttaaatgatgaacatgaattc

SEQ ID NO: 206005 - DNA, 1000 bp, Homo Sapiens
ggctctgataaagaagacagataataacaaaatgtggcgaatcggaaccttcatacaatgctggtgggaatgtaacatggtacagcccctttggaaaacagtttggaggtccctcaaataggtaagcatagggttaccataagacccagaagtttcactgctaggtatatattcaagagaaataaaaacatgtgtccacacacaaaacttgtacagaatgttcatagcagcattatttataatagcttaaaaaattgaaacaacataaatgtccaccaatgaatgaatggatcaatgaaatgtgatatatccacacaatggaatatgattcagtcacaaaaaggaatgaagtactgatacatactacaacatagatggaccttaaaaacattatgctaaatcaaagaagccagacgcagaagatcacatattgtatgactccactcatacaaaatatctagaatagacaaatctatagagacagaaagtaaatgtataggctggggggtggggaggtctggggagaaatgaagagtgtcagctaatgggcatggagttttgttagggggagatgaaaatgttataaaattgactgtgctggttcaaaactttgtgcatatactgaaagccattgaattgtatactttaaatgggtgaattgtatgatatataaattacatatcgataaagctgtcataaataattaaaaacaaaagacagtagcatttttaatgtctgtagacattattcctttgcacagctgcatcataatttatttagatttatattgctagacctttatgttttctattaattctttcatttcaaaatatttcaaacacacatgaaaatgaatcgaacggtgtaatgaacccctgtgcccgtgacccacttcgacaattaccaacacagtttctgcttttacacacattgattcgatgaacattttgtttgtctttgtccacattccacactgtttcctttcatttatgctgaattc

SEQ ID NO: 206006 - DNA, 1000 bp, Homo Sapiens
tgggtccacactacctttatgagctgtaacactcattgtgagggtctgtggcttcattcctgaagtcagcgagaccactaacccaccgggaggaacaaacaactccgcacacaccagctttaagagctgtaacactcaccatgagggtccgcggcttcattcttgaagtcagcaagaccaggaacccacaagaaggaataaattccagacacagaatgacgttctcaaaaacaatgatttttaaaatgtaagtggaacttgaaaaaagaaatgatgctgtattttttatcaccattactgctttcctttgccctgataagttttttgttcatttcaaatgaaattatttttttcctcatctggctgaaaggactcttatccatttatgagagagttgcagaactagagctgcagatttcagtgacattttcattcagtggatactgtagtgcacagagagaccagaggttggtatttacatttaagaagttatatatttttggggccgggcgctgtggctcacgcctgtaatcccagaactttgggaggctgaggcggccagatcacctgaggttgggagttcgagaccagcctgaacaacatggaggaaccccatctctactaaaaatacaaaattagtcaggcgtggcagcacatgcatctaaccccagctactcgggaggctgaggcaggagaatcacttgaacctgggaggcggaggttgcggtgagccgagattgcgccattgcactccagcctgggcaataagaatgaaactccgtctcaaaaaaaaaaaaagttatatttttaagaaagacattatacggcagagtgcggtggctcgctcctgtaatcccagcactttgggatgctgaggcaggtggatcacaaggtcaggagatcaagaccatcctggccaacatgttgaaaccccatctctactaaaaatacaaaaattagccaggcgtggtggtgtgtgcctgtattcccagctactcag

SEQ ID NO: 206007 - DNA, 1000 bp, Homo Sapiens
tcacccaagacccaaagtgtcactcagtgaatgtgaccaatgcatcttgatgacaacctaacgggatacttaggaggtggaaaggactctggaggttgccggtttaagtgactttcttgcccattgcaatccttttcttgcatcttctggaagatgttaaccctatggccatgactacctaacattgtgtctagtggagagatattttaaggtccatagaagaatttttttttcagaagggtccttggcctccctcatttcatgtcaccttggtccactgcctttcttacaaatccagttcttctaatttaattttctgagcttctgctaggcgcgccaaagtgcaatgaagacttgtttctgttttttatttccacgaatttttttttttttttaccttgtgtggcaatgttttgggtccaattctgttctccaaatagatatattgaagtcctaactcctactatcggtgaatgtgaccttatctggaaatagagtctttgtagatctaatcaagccaccaagtttgtggtagtttgttctgatgattcttgaaaagtaacacatgtagtaataaaggcaaagaggaagggcaactggaagccaaagaaagaaggaagaggtttttttcttggcttaatttactgatgcactggtattaatttttgattaaaatgatccagaattgttccacatgaacccttgaaaaataattcatgggaggccgtctctgtccggatctttaaaatacaacatactctgctatttaaataaattcccatcgcacaatagtcagctgtttttcagtgctcttgattaacaattgggtttgttttccttaactcgactgctttgattttttgttttattttgccttttaatattttatttagtaacataaatgcatgaatagtaatgttcatttcatcaaaatatggaatcaaaggcacttaaaaatacgaattatccgtaatatatttttcaggtccaaatggaattc

SEQ ID NO: 206008 - DNA, 1000 bp, Homo Sapiens
tgagagccccccaaggagaaggtagagattcaggagagcagcaggcccagctctcccttccaagtagaagcttgtatcctttctcatacggcattaatccttcttgactcattccctgcaagagtccatattatgctttaagggacaatttcccactaggctacagctctcccagtaggcagggttattgttgtctctttctcaaaaaggtggaagtgaagtgagaggtattaggcacaacacatgcctaacacagggcaaaggaaatatgtgttcattgggtgtatggagaattgagaaccagaagccacccttgcttcccatacaaacgacattttcctaggcttaagcccttaatccaaaatacgttcactgaagaacgaactacttcccaagtaccagtgatataatctatttttgtgaccatcttccccattagaccgtgagctacctgaaacctttctactctctcaggtctactatatgttcaaatgtagaatccgggcttagagacgatcaaaaaaggagagtagacagcaacttgagacttcatccttgaatgtcaggccaggcagggcagggattagagtgtggggagaagtgagaatgcactaagaggaagagggagaatttaaaactgtacaggtctccccagcctaaccctttctccaaaggtatcagatctacagccaaattctcagaataggcatgtctccagctaaaggaaccctcaggccccaggcagactgcactgaggcaagccaaactcagaaccaaatgaacttcccgctccatttctcttttcccacaatctagccaaagctaaatcctctttgttgcttcccagacaatttcccacatgtcccgatgtcctcactgtatcgattaaatccttcattggccaattcaaaggccaccaacttccagagtcgtcctctggccctagactagcagcgaccttccttctgcaaccccagggactaagacgatacacgaattc

SEQ ID NO: 206009 - DNA, 1000 bp, Homo Sapiens
agtgggggatggagctggggatgggaagagaggttagtgacagtcttgagctactccatcatcacacacacacacacacacacacacacacacgcatgtgcgaaggcaatggggtttggtcaagagcagacagatattggaggggaatcaagctttgaaagcaggaattataccttttgggatttgcaagtttgcagctttttgcctgaaggcagtccaatctgcaggcaacttggggcaacaggaggccaaagtcttaatagcttgaggtatcagataatagagttggggctagaagagaagccaggaaatgaagagggggtgggttctggaagggaataagccgcggaaaggataaactccccaatctacccaaattattggctgaccactaaactatgcacacacagggggattggcaaaaaaaaaaaaaaaaaaagtacagctggaatctgaaagaaccaagcagagatttaagttgttgctgattaggagagacagagttgagaatttgagtccagccaaatcaactccctcctagaacaaacattactcatctgagaaataaaagagaatccagagtccatagaatctagggtacattgaagtccattgtaatattctgcttactttatatatgtaagaaattttccataataaaaaaattaaaacaaaataaaacaccaaaaaaatcactgaaccccaaactgttcttgacctccacatttcttgccaggactgttctttcactctcctcccttccattgccaaacttcctaaaagcattgcctacactaactgcttccatttgttcatcttccattcatttctcaacccactgcagtatgtcttgtctcaacatcgtcctaccaaaactgctcttgcaaaggctaccaatgaccttcacattcctaagtgcaatgaacactcatcagtccccatttcctttgtcttcttggtagcatctgacacttttcatcactcccctacccaaaatttg

SEQ ID NO: 206010 - DNA, 1000 bp, Homo Sapiens
ttctttcctcagtctctcatcccacccgactagacatacccacagctgtggaggggcaggccaccccttcaagtgagtgctgagggagggtcgggagccttgtttggttcccttctcctcaggacaaacaggagagtgtggtggacagatgggaggagaccaatgtgcaaactgtccgctcagcagactgtgcagtttctgttcttggttgtgctgggggtctcagaaatcttattcaaaattttgctctcctcccccactggttgtccttttcatagacatctcactcatgatagcagggaatcagtccctctaaactattccctaagaacaacaaaaagattatgaaggtgatgatgaggataaagaggatgatgacagacaccatggcatcatgaacccttactgagggcttcctaaaggccaggctctgagctctgtgctctatgcagcttgtttcatttcatctgcgtagtctccactttattagtgcacatttcaggatgattttacagactagaaaaggagcaacgccttttcatagaactcgtactagatcatgaggtcaaaaagggtgaagtccaatttgaaccagtcagtctaagtccagacacatggcatttggccagtcctctccctgcaaccaacctgccctctcaaatcctcgtcactcaggcggatgcccctgctcactatgcccttccctttcggggttccttgtagaacacagctagaccagtgggtgccacaatcactgtgtcaagtatggaaaggacagctgagatcacatcgaggattccagaaagaattggcacaggatcattcggggcgcatctctcccttgcccctgttcctggctttctgtacagctcttgacttccacaaagcagtcatcaattcggagtttggcttccattcctattgaggaagctggaaagcgtttcaaaaatgctcctccgatgtgcctgtggttacgacctctgagctctgcttaaagctt

SEQ ID NO: 206011 - DNA, 1000 bp, Homo Sapiens
cagcatttgttcaggtttcagcagatatttaaaatttcaaggatccattcagaattaaaattgatataggacttctgatactggttatttaataaagttaagcagactcttaacttttcctcagaagttagcatgatttagtgatttaacacattttttaacattctattctttaaaatgtagtgaaggataataaatatttacatttaattgggaaggctattttggtaggcaaaatagacttcctttgccaaacaataatgattgtactaacctcattttccgttcctatttaggtcatgtatggaatgttggtctttacattagtacttcgatctatttatattgttacatggtaagtagtttggatcatctgcaccatgactgaagtatattcagacctataacagtaaatctatagcctaaatcaaaataacacataaaagctcacttcagtagagatgttggaagaaaactataacccaacatttattgttatattataaggaatactgggtcttcagacaagttgttaatgggcatcatgtgaaaactagggttccaaaattaaagacatgggaaaattaaagagagctgtcgacgatggccttgttttgaatatttataaaattcattagatattagagaccttaaaaatcctatagttaaaaaaaaattgtttttgtctttcttaaacctacttgactagggaattccttttacatagtacctccaaggaaggctgttaatgtcacaaagaattagtatttcatgaaagattatttgggaaatgggtataatctttaggcattcatgaaaattaaataagaaataacattcatgagattaccttaaatagggcctggccacacaacaggtgttcaataaataagtagtatgatttgtgggtttgttttttttttcttttttattaaacttttagtatctagataactgtaaaaatgcatacatttgtaaaaaataatagatcccagtatcc

SEQ ID NO: 206012 - DNA, 1000 bp, Homo Sapiens
attccttctgaaactattcctaacaattgaaaagaagggactcctccttaactcattttatgaggccagcatcatcctgataccaaaacttggcagagacacaacaaaaaaagaaaacttcaggtcaatatccctgatgaacatcaatgcaaacattttcaataagatactggcaaaccgaatccagcagcacatcaaaaagcttatccaccatgatcaagttggcttcatccctaggatgcaagggtggttcaacatatgcaaatcagtaaacataatccatcacataaacagaaccaatgacaaaaaccacatgatcatctcaatagatgcagaaaaggcctttgataaaattcaacatccctttgtgttaaaaactctcaataaactatgtcttgatgtaacatatctcaaaataataagaactatttatgacagacccacagccaaaatcatactgaatgggcaaaagctggaagcattccctttgaaaaccagcacaagacaaggataccctttctcaccacttctattcaacatagtgttggaagttgtggccagggcaatcaggcaagagaaagaaataaagagtattcaaataggaatagaggacgtcaaattgtctcatttttagttcaagttttggaacatacagaattcttggctgacaggttgtttttgtttgttttatttttccctttcagcagtttaaataaatcctcacattgcctttgggctgctgggtttctgctgaacaatgtgctgattatcttactggatatcttttgtatatgatggttcacttctctcagtacttaaaagattcggtcttttgacagtttgaatatgtcttggtgtgggtctctttagttttatcctactttgagttgttaaatttctcggatttgtcaatttatgtattttctcaaagttgagacattttctgctattattccttcaaataatatcttcctctttctctcttctccttctggaattc

SEQ ID NO: 206013 - DNA, 1000 bp, Homo Sapiens
gtgttaggagaaatacaaaatatgcactccattttcttttttaaatctgaacatttccaaattctaaagtgcttctgattccaagggtttcatttaaggaattttaacccaataaattaaataccaattttaaagggtctctctgtttagaatacccttcatccctcatctctctggaaaacatccacaaacatttaaaatgtcatcatgaatgaatgaataaaggaagaaatcaatttgtcttgccaacaggagttaggtacttaactttgctacatagctggtgtagtaagaatttatttaccaacgagggtcttttgctgcaagagagttgagagaagtggtgaacaacattgctgaaaactttacctaccccagtgttctacaccctcagaactaggtaaagaagcacatccaagtaactgcagttggcatgaaacaacaacaacaacaacaacaaaatcccaggctccacgaaattcatagtgaaagaagacaaaaatctcactggaccttcctttcaactgttagaaacaggcacaattttgctttctgatttcataaactgacttaaaaggaccttggttgacacccccagggactctgaataggttctcaattaagttgaattttttgttttaagaaaacacttttagaaggagcttacaaacatggcagtgtttcccatttagaaagaaaaataaacactcctccactggattggtagtcaaaacaaaataatcccagctgcttaagacctgagaaagtcaatgaaactgccaaacaacagtgatgctgaccagtgagaaatttgtaaggcaaggcagtaaggacccagtgctgaaaaaagaaaagacccatggacggcccagcatccaaagtttggctctgaggaagctgcaccaaagtttagtgcccggtcatctggtctgattcatctcatataacaggggcttcgtaaaggtttgtgaggtaaaaggaatccaacaacttggaattc

SEQ ID NO: 206014 - DNA, 1000 bp, Homo Sapiens
aaaagcaggcagtgggctggatttggcctgtggcccatagtctgccaacccttgctctagagaagttgccttcaattcttttgattttgcatgctatcagtttaaataaaacaaaacactcacatacatacaaacccacaatgccttaaatatgaacccccaatactgtatactgtatatttttatttatgtataaattatatacaagtacgaatgtgctaatatattgtcttcataataaaacatttaagaaaattttttaaaatgagatatagatgcataatgcttttgaatgtaaatttaattgtgacgacttcatactatcatttcctaagagctgaaagtacaatatatactgagggctaggttcacagtttatgtcagaagatttaaatccataattccaatagttttcttggtaattgaaaaaaatttggctaactttctattagatctaaataggtccttgtttttgtcttgtgaagtcactggcaaaaaactgaaaccattttttattataacaacatattatttgctctacactagagactgccctaagagtttcaaaaatattagcttatttaattatcataacagccctgtgtgatgggtactattagtaacccctttttaaacatttgaaacccgtagcacacagaggttaggtaacttgcctgaagtcacagctgctaggtggctggctccagaatccttgctcttatctactgaattaagctgcccaagcaggcataggggaagcattagctcttccactttcttgccctcccttacactttcactattagaattcaacttcggtccacactttcaggaatatcacttgtctatttggtgtatggtgactttaagtcaaactggataatgtagtccaaaaatccacttaaccaggcacatgtaaaccgcaatgtacattgcaatataatgaatggaagtgaatgaatgagggctccactgtcaaaccctcaaccttatggaattc

SEQ ID NO: 206015 - DNA, 1000 bp, Homo Sapiens
acctcaagcaatccacctgcttcagcctcccaaagtgctgagattacaggtgtgagccaccgctcccagccagtgggctgtcttttataagggcactaattctactcatgagggctcaaccctcataacctaattactttagacaggcccccacctccctataccatcacattgaaggttaagatttcaacatatcaactggggtagggggctcaaacattcagtctataacagagtgtgcctcaccccatgggtctgaatcaggtctggtctgagttggttgtcccagatccctgcacagagcttgggatatagtaggccttcagtaacatttgttgaataaatgaatttgtgataaatgagaatgattgattaaaaaatactgaataaaataatgaatcagctaggcgtggtggctcacgcctataatcccagcactttgggaggccgaggcgggcggatcacctgaggtcaggagtttgagactagtctggccaacatggtaaaaccccaactctactaaaaatacaaaaaattagccaggcatggtggtgggtgcctgtaatctcagctacttggcaggctgaggcaggagaatcacttgaacccgggaagcagaggttgtagtgagctgagatcgcgccattgcactccagcctgggcaacaagagcgaaatttcgtgtcaaaaaaaaaaaaaaaagaatgaatcagttgacattaattgacctgatggttcccagggatctttgccctgcaaaagaagaagctgacagaagttctagtcctaattctagtcccagttttgcctctcagttgcgtgtaatcatgggcaggtcacttttcctctctgtacctcaggtgaaaaatgagaaggaggcttcttgttattcctttttgttctgccaaccacacctcattctaatcgtcacctgcttgccacctgatgcttcatgctgggacctggctggcctgctgggtagcttattattaaaatccacc

SEQ ID NO: 206016 - DNA, 1000 bp, Homo Sapiens
cacttcccttcacccccaggcccagtgtgggtaggagtgacaactggagctctaattggctgagctggtttgggttctcactagcagccacagaagaaaatgtctatagaaacttgtatctgagtcatgccacataggaactacactgattggaaacagaaagtggcctagaaactgtaaaaaatgaccgcagatgacttcttgatacactttgtgactaaggggcctggtgatgacatttttctggtataaacaagcacactgatctcagagggtatctaaaagtgttgccagtagggcagtgcaggttcttgtcttcaaagcataagagaatctgaaaatgagacccaagcgaaagtatagacattttattgtggagcaaaaccaacgacaccctcaagggaggagtgcaggcactcaaagatttgagtcacaggcaatgtggttcacgtactatatgaataagcacaatgaaggtatggagtactctgtaatcaaggggaggggttttctgggaaatgggcgggcaattcccggaatcggggtgccacccttttcttgactaaagatggttaatccggaactgtcatggcgtcaggtgcatgatgggagtgggaatttccccatggaagttttatgatattaagggcataatgaagctaagggtcagcagtcagccaagttttcgaccatcttggctttaaccagttgcggccagtttcttctgtgttacattctcatctgtgcctaagtaggaagtttgcaatctgtcttcattgtcacaggctgttgtaacagttcctatctactagtggggcaatccctctgctaacctttttgaccgcatttttattgcttgtagccacctgcaagtaatcatgcctcattccctcactgactgcttgcctcaaaagcatatatacagtctttcttcctaacccaggctcctaaccctaaattcagagcttgagggcttgattctagtcagcaatttacttga

SEQ ID NO: 206017 - DNA, 1000 bp, Homo Sapiens
cgaggttttgccatgttggccaggctggtcttgaagtcccaacctcaagtgatccgcctgccttggcctcccaaagtgctgggattacaggcatgagccactgtgcccaaccaccctgtcacatttctaatgatcaaaagtttttactccctgttctgggaaattggagaggcatttcttatagagtccattgcacagtgccatgcttatgctcagtgattagtaatctgctgctgcaaatcaaatgactccaaagttaggagtttaaaacaacaaacatatactgtctctggggcaggaatttgtgtgtgacttagctgggtgcctgcagctcagggtctctctcggggctgcagtcatctcagggccccacgtggggagaatctgcttccaggtttgctcatgttgctgttggcaggccccaggtcctccttggctgttggccagagacatcagttctttgccacatgggtctctccctagggcagctaacaacacggcagttggcttctctcagagtgaatgagcgagagagagagagattgagattgagagagggcgtccaagactcaagccacattctttttgtaacctaatcttagaagtgacactaggtccagcccacactcaagggaggcacatcatagaggccattcgcctcatgcagccttgaaagatgatgggcaggaagtaggcattgaagagggtaagagtgggattggcaagcccagcaaaagaaactgcccgggcaaagccctcaaggcatggaatggcagggagtgtttctgaagggcaggagcctgtcttgtgacctgtgttttcttcctgggccccaggtggggcagggaatcagaaggggctggcatcagcagctgtacctcacccaatcccttaacttagacaaggaagaactgagcaggagctgaccagccaaggccacggtgactggcaagttgctgttgggttttagcatctgcttttcccaggtggaaaagaattc

SEQ ID NO: 206018 - DNA, 1000 bp, Homo Sapiens
tggggcctgaggcctgggccctcttccccacagagcctggacgatgcactgcgggacctctcagctgccatgcaccgggacctgtcggagaagcaggcgctgtgctacgcgctttccttcccgccaaccaagctggagctgtgcgccactcggcccgagggcaccgactcctacatttttgagttccctcaccctgacgcccgccttggttttgaacaggccttcgatgaggccaagaggaagctgggtaagccaaggcacatgttggccctctcctcctagagcttccaggcaggaggccagaggcatctcacagctgtctgtgacttcaggagccagaaccgcagtgccctgtgctccggctccacctggtggggaggggggcttctgcagtgaaacatcagactgaataatagctgtggcctccctggcagggaggggattccatggatagggtctcactgtctgctggacctgccccatagtgggcaccgatagccaagaccctcgccataccctccctacacacactctgagcagggctggatcagggaaagcgattgatcagggttcatggcttagaagatccacagagacctctgggtctaaccccaagacaatacacatgggaaaagattgaggccaggagcaactgccttattctaatgtggctgggatcaggccttcccctaaagagaccctgaggggcaggggaggaaggggaatggggcaggggcaggaccagggtgagatggatgctatgctaagcagggtccgtctgtctgtccatctccactacagcatccagcaaaagctgtctagaccctgagttcctgaaggccatccccatcatgaaaacccgcagtggcatgcaggtatgtctgcatctgggtcacttgggtacatgttttcaaagccagcaggtgttcatgaatttttgtgtacgacattgtgtatatgccgtgaacattgctattgctccttatgtcttggagaattc

SEQ ID NO: 206019 - DNA, 1000 bp, Homo Sapiens
caaaatatttggaagacatttttgatgagtaagacttttcctacccaaacttcatcaaatttatcagagtattaacactaatttcaattagagccagtaagtagtgtttccttttcattttccaagcattgcagactgatctctgttttctaaacataaacttactaatattttactgtgtgctcctggaaaaactacattaaatctatctcaatttgtccaattaatgaaaattaaataccagaactgttcatatgtacattgtctcccccactagattatattctcctgaaaaacaaggaatttatgttttttatttgagcatgtctcaaagtagtgcatactagatgctgtacaggtgacaagatgaatgggtggatagaaggatggatggatggatggatggatggatggatggacggacggacatatgtatagatagatgggtgggtaaatggatgaatgagtgggtgaatggatgaatgcgtgggtggatagatagatgggtggttgggtggatggatgagtatttgcatgtatagatagatgggtgggtgaatgaataggtcatggacggatggatggatggatagatggatgggtgaatggatggatgggtggataaatggatggatggatggatggatggatggatggatggatggatggatggatggatagatggatagatggatggataaatagatggatggctggctggctggatggatggagagatggatggatgtgtggatgaatagatggatggatgggtggatggggaatgagtgggcaggtaatacatgagtgagtgggtggatggaaggataaatggatgggtggatggatgtgtgggtggatggatggaaggatggatggatggataggtggatgaatagatttgtatttgtgagtgggtggatgaaaagatgggtggatgggtgggtggacagatatatagatttcaaaaatgagtatatctatatgaatgaatgaattc

SEQ ID NO: 206020 - DNA, 1000 bp, Homo Sapiens
aatcaatttcagaaagattttaatcaaaagtcaggcactgttttgtagctcctgttggtaaacctattatccagaatgtgtgtttatttggaacagctcatttctcaataatgctggatgtggaatgaggcacagaagcaactatatgccaatgccttctttgtgccatgtatttccacaaatttatctcatttcacggtcaccaaatctgacaagtacatattgttattcctattttacaacaaaacaaaacaaaacaaaaccaacaggtggctgagagaaatgaagtgacctgtggaaggccacagatactaaatcaaagaggcaagactgcaaggactggaacccgagccttcgggctccacgcctggccttgctgcatgacactatgctatctggatcttgaaggaacttattccacagcagaatctggggaaatgagcaaggcagatctatcggtataggatcccccaacttcccactttttctgtgtcctgattgagaaatacaggccttgaccgctctgtgactgacacagccattagcaactcttctgcaggctggagtccacgctgaagccttgaacattctcaggtactgaaaaaggtgtttaggttgtttccccaaacagtaaagaaactagccctggccttgagccaaactccttaaatctctatataaactccataccctgggcaccttgctatggagatacctaggtagaaaatccctttctcttgctgtctgcacgagaattgctacagcactctgtaagttcccctaataaatgctttggacagatcaacctggcttttagtgcttctttctttgcaatcccaaccagccctatcttgggatagtttggggcaccccctcatgggaacacttccctgcctctatttttgtggcgactctagctatgggttcactggatcaaacagtgggacagagaagcccatcctgaaggcagcaaaggatctatttgtaggatagagaattc

SEQ ID NO: 206021 - DNA, 1000 bp, Homo Sapiens
agggtgagattttcctcttttctttccaaatggtgtttaactttttcccattggtgttctgtttcattataactatggagagtgatacaaaaatcagatgtatccagtcacattgtatttgaattctattttctaaactcataatacgaacccccatccaaattacagtctgatggagatcattaatttgattaactattttttgatctgtttgaagctgagagttccataattttgtggaatttttctgccacttatcaacaaattcagcagtttgcacagatgactgtaaagctacaccagctactgcagcagtagtagtaacagcagtgaggccaattatagcaaatgtgagagccactataaatctttttgaatgggataaaagtttcctaaggatttcagttataatatgaatagtgatgcttcccatggtctatttagagacacagggatccaaactccttccctggctctaattaacagaatagttttttttgttttgtggttttttttttttttatcaaaagttgagttaatgcaggtaaataggcgacattctgggcaggtaacagagtgtgtatttatatcaatagtaacatttcctattgctaacataaaaggtggtcgaatgcaactttgaatccaaaacgtcctgttggaaagaaaagaaagagcatatttatccttacctccctccccactgtacttttcatatttaccctcccaaattttaattggactttgagctacagctaattttcataattctgaatgttcctgtcctatggcaggagatatcatttttggactaggggcgataatgccagcaggattccatatgataggggcatcagcttccatctgaatgtattgtgtatgattacattgccagcgattccatcagtttgttaaatttgctttacaagagggccttcttgtgcaatttggtttaaaaatccccttaggggaccaatcaatgacaattccataggaattc

SEQ ID NO: 206022 - DNA, 1000 bp, Homo Sapiens
gtctgtcgcaagccctgcgagggggacaagggaactttttccatttattttatttatgtatttatttatttttgagacggaatctcgctctgtcacccaggctggggtgtagtggggcgatctcagctcactgcaacctccacctcccgggttcaagcgattcttctgcctcagcctcccgagtagctgggactacaggcgcacgccaccacgtctggctaatttttgtatttttagtagagacggggtttcaccatattggccaggctggtctccaacttctgacctcgtgatccacctgccttgggctcccaaagtgctgggactacgggcatgaaccaccgcgcccagccctttttacatttcaatagtcctaaatagaaaagtgaatatcacaaagcttctaaaagaaaatatagaagaaaatcttcataatcttgggataggcaaagcgttcttaaacatgatataaaacacactgaacttaaaaatattataagttggacttcatggaattaaaatattctacttatcaaaagaaactattaatgaagcgtaaagacaagctacaaatggggagaaactgttcacagtgcacatgtcaatgacaggactcaacccagggtatataaggaattccctgaagtcaatcaattcaatttaaaaattggaggaagatttgaacaggcacctcacaaaatatgatatctaaagtgtcgagaagcatatggaaatatattcaacatcattaatcaacagggatagaaaaaagcataatgggatgccaccacatacccaaaagaagagctaaacttaaaaaggctcacaatactaagccttgggaaagatgtgtagcaactagaactcttatacactgctggtgagagtgtaaaatggtgcaaagactttgtaaaactttcggcaatttctaataaaaataaaacatacacctacccaatggcaattccgtatccaggtatttagccaacaggaagaattc

SEQ ID NO: 206023 - DNA, 1000 bp, Homo Sapiens
ttagacctatgaaggtaaataccaggagaaacagtgaaccaagttcaaggtaagtatggactatattgtgagaatggaaaggaacagagaactactgtttttaattagaatctatttaacacaattatattttttactcgaagcacctatatcattttaaaaattagaagtatgaaaaaataagtagaagacaaatgaaaggtgaggagatacagaaggaacactgggaaaaagtggttggtgaaaacattgagtggaaagagcctatgatgctgaatattatctcagatcaacccagaaccccaccaaagtcttaggaggtatatattttattaaaagaaataatggatttccttaaagaattaattacatgaagaacaacaagacatagacagagtactgatgagagacatgaagtatatcactaagaataagatttcctcacaaaaattaaaggcctgcagaaattcaaagaaaagcagtatctttctgagctgtgcatgtttcagtaaggaaggcttcttggaggaggtgatggttgagtagcattagaattgttagggaagcaggaggctgggagagccagaatgacactattttaaaatcaactccatctgaaaaccagcgagacaccttccctgccagtcaccacccatagtcctaaattgtttatagctaaggaagcagtttggtcatgcctgcaaagacaaactccaacaacatcagaaagtccagatgtcccaatacctataacaatatttgctttcaagataattatggttctgctttgatgtactcacacacgaaaatgtcaaggacagtttcctttaaatcaatagaacaatactttttgtcatgctgtctgctaactcccatgtagtcacagcttagtttagtctttacatagacaagaccccaatataagaaaaagttaaaacaaagatggtgcatttctccagctgctttctgagaatgccttaccaaggcattctgagaattc

SEQ ID NO: 206024 - DNA, 1000 bp, Homo Sapiens
aagaagacatctatgcagccaataaacctatgaaaagaagctcaacttaactgatcattagagaaatgcaaatgaaaaccacaatgagataccatctcacgctattcagaatggcaattattaaaaagtcgagaaatggcagatgctggcaaggctgtggagaaataggaacacttttacactgttggtgggaatgtaaattagttcaaccattgtggaagacagtatggtgattcctcaaagacctagaaccagaaataccatttgacccagcagttccattactgggcatacaccaaaaggaatataaatcattctatcacaaagatacatgcatgtatgtgttcattgcagcactactcacaacagcaaagacatggaatcaactgaaaagcccatgtcttttgacaggctggataaacaaattgtggtacacgtacaccatggaatatcatgcagccataaaaacgaatgagatcatgtcctttgcagggacatggatggcacttgaagccattatcttcggcaaactaaagcaggaacaggaaaccaaacaatgcatgttctcacttataagtgggagctgaacaatgagaacacatggacacagggaggggaacaacacacactgcggcttgtggtggtaggggtggagggaggaagagcatcaagataaatagctaatgcatgctgtgcttaatacctaggtgacaggttgataggtgtagcaaaccaccatggcacatgtttacctatgtaacaaatctgcacagactgcacctgtatcccaaaattttaaattaaattgaaaagaaaacatagtcatctctctggtcagttctaaaggaaagcatactgcagcgatctgtgatgctgtgtgatcagataggctcaaatagactgattaggaatacatgctgtgggaagtcatatccattgtcccctcactatccactcaagttaacataatttagctaagtctcgtcagttatatgaattc

SEQ ID NO: 206025 - DNA, 1000 bp, Homo Sapiens
aaatagttgttataggaaggggcgtgtgtcttaggagttgagaagactacattacactaaggtggccagttgttgttctgggctgtgccatctcaactaattaagaactggatggtgccggaaagggaaggacttcaagccaaggaggggacctaggaacagaagcatgaatgatatgaggactgagtcagaagaagcaaaaattaacaaataaatgcataaataagtaagacacgtgagcgctaggaaaagcaggatgggtatgtccacatgctgatatcaaaaatacatgcacgttaggcagggtgcagtggctcattcctgtaatcccagcactttgggaggccaaggcaggaggatcgcttgagcccaggagttcaagaccagccttgaccacatagggagacttcatctttacaaaaaataaaaataaaaatagctcggtgttgtagcacacacctgtggtcctacctacttgggaagctgaggcaggaggatcatttgagctcagaaggatgaggctgcagtgagccatgttcttgccactgcaccccagcttgagtggcagagtgagactgtttcaaaaatatatctatatttcacattagattcatacctatttgaaaattagcatcaattattcttttcttttttaaatgtttatctttagttatataagtaataaatattcattacagaaaatttcaaacgtagaaaagtatacgaagaaaatttaaattgttctatttatattcatgtaccatctttgtaggcattttgctgtagttttttccagtcactttcataaatatacatttgcattgtacatggtaaagattatactgtgcaattctgtcttttttgtatgattaaattgaattggttttgaatttttttagatttaacttgtcaattccttttggttctatagttgtataaaagatataagcatattgagttcttgcctagttttatgtatctatcattaaaaaaagaattc

SEQ ID NO: 206026 - DNA, 1000 bp, Homo Sapiens
tgttatgtatcatgtcttttttgttgttatttatatatgccaccttccttttctcttttaacacagaataaccaaatatttattttagtgttttgttgaggatgtttgcaactatgttccttagagacatcactcggaaatatatttttttttcttctactgccttttactggctttggtatcagagtattactggtctcataagatgagtttggaagtactccctcatcctcaggtttctggaagatttgcgaaggattcttgttacttcttctttaaatgttcggtaggattcaccagtgaaactctctggccctggactctttattgttgggaggattttgattactgattaaatatacatacttattttcctgctcaaattttcaacttcttcatgattcagttttaatagattgtatgtttctggcatgtattcaattatcctaggttattcaatttgttggtatagaatagttcagtttgttctgatccattttatttctatggcattagttataatggcttctctttcacttctttgcattctgcctctttgcatttatttttgattcacataataattgtaaaaactctttttctgtcagttgtctcttccttgacattatgggcacacaaagaaaaatcctgaattctttataagagtttgatgaaagctactaatgtcccattatggatcttgttttacaaaatagtccaatgaatctatatggtaattgaattgaattatatacaataaattttattcaattaaaattaagtaaatgttccctttattcttagcaatattcataaggaaatacaaaaatatatgtaatgtcattccttaaaatatttaagagtcaaagcactaaaattaggtacaatgaacgctgaccgtgtaaagaggattaattttatattttccacatggggaaatctgtttcataagcttttcaaaagctccagtttttctaacatttcaaagacaaaagaattc

SEQ ID NO: 206027 - DNA, 1000 bp, Homo Sapiens
ggttgtagatgtgtggtattatttctgaggcctctgttctgttccattggtctatgtctctgttttggtaccagtaccatgctattttcgttactatagccttgtagtatagtttgaagtcaggtagcgtgatgcctccagctttgttcttttggcttaggattgtcttggcaatgcaggctcttttttggttccatatgaactttaaagaagttttttccaattctgtgaagaaagtgattggtagcttgatggggatggcattgaatctgtaaattaccttgggcagtatggccatttgcatgatattgattcttcctatccatgaggatggaattttcttccatttgtttgtgtcctcttttatttcgttgagcagtggtttgtagttctccttgaagaggtccttcacatcccatgtaagttgtattcctaagtattttattctatttgtagcaattgtgaatgggagttcactcatgatttggctctctgttggtttgttaatggtgtataggaatgcttgtgatttttgcacattgattttttatcagtcaaactttgccaaagctgcttatcagcttaaggagattttgggctgagatgatggggttttctaaatatacaatcatgtcaactgcaaacagggacaatttcacttcctcatttcctaattgaataccctttatttcctgctcttgcctgattgccctggcaagaacttccaacactatgttgaataggagtggtgagagagggcattcttgtcttgtgccagttttcaaagggaatgcttccagtttttgcccattcagtatgatattggctgtgggtttgtcataaatagctcttattattttgagatacgttccatcagtacctagtttattgagtttttagcatgaagagctattgaattttgtcgaaggccttttctgcatctattgagataattatgtggttttcgttgttggttctgtttacgtgatggattatattt

SEQ ID NO: 206028 - DNA, 1000 bp, Homo Sapiens
gtaaattttatattatgtattgacatattttgtatttgtattaacatattttaatgctggatgaatgaatccatgtaatgtttaaggatcagtatcctgctggatgctctaagccttgccactctacaagtctaaggatctaagaatgcaaccaatgcactggtgtaaatttgggggcatgtcaggaatgcagaatcttgcctcacctcctctgcttgacttatcaaatagaatcgacatttgaacaacgtccccaggtaatttgtatacacattaatatctgagaaataggacatcaggatgatttaggatcaaccctagcaacatctacgtggagacacatggagcatcactgactcccgacagggactctgcccacctgtcacaacttcatggtgaggaaggtactgccctccttcctaggtgagctgttctaccaatagagagctcttcccctatgaagtctgtgacccccgcctgcttagactgcgcctgaaggaattctatagacccttctttcagccccttagaaccttgtgtatattccaactggtccctgggaggtttttttttggaacgggggtgcggggaggctagaaggggctctgctgctaactggctgtatcctcgtacccctccggaaggctcaatgtccacatctggaaaacgaggatgctaatgtaacgcgatggagcaaagttgtgtgagagaataaaatgaaataacggataagacagtttcgtaaattaaaaaacactgtttctcctaataatttttttaaaatcctgtcagacttcacatattaatgacaacagcggctgcaaactaacacgcccactaacttgcaatatcagagattatcaacaagtcagcacttaacacgggcgtatggagcctcttctgttccggcaaagtgcctgggatttggataatctaccctggtccggatcggttctggatctttcccgccagagcttacctgaaccactttcgtgaattc

SEQ ID NO: 206029 - DNA, 1000 bp, Homo Sapiens
aggcattttctgctattatagagaggacagtggatatttgtacaattccatggggcctgacatcagaagatgctagattgcatggcttatatgattcctgcttcaccagctatatctccaacatgcttctcctgatcacgaactcctatgtaaggtggaggaatgttaccttaggaaaatccttgagtccactttcacaaactgttcattttggtaacaaatgctgggaacatatattatagctgatgtgacaggtgtgttgtgacagaccgagaagtcatagtggatggtgtttagcccgagaagatgagagagggcaggtgcttttcagggactagggagggaagaaagggtccagtgattggagccaaggatgaggcaaggcagggtctggtgggaggggagccgggcatgggggcctacaatactgggccagcccttctggggcccaagcacatctattttaagacaaggggatttagggctcaggtgaggttttctgccattgtttatctggatttctcaaaatcagaagctaattccctggaaatctgccagcctttaagctgtctttattttaggtgatgttcctctttaatattccctttgagtttaacaaaggttcctattgaagatggccctgggtctcagtgtgctttagaggaagcagggattttaaaggtgcccgtggaggctgggccagatttgacagcagcccaccccatgctctgctgcagttaacccttatggtccaggctgtgctgatgggttcccacaaggtctgtctcacctttgggggttccttgaagggttcgctgtagaggctgcgtattcttctgcgatcaatgaccttattgtcagctgttgttggcttgctggcctctcctttgaactgagcactgtagctggtctcatgaaccatcttatcatctgggggcttgtactggggcttggcctttattggtttcacaggcttgatgtccgtccatgccctgaattc

SEQ ID NO: 206030 - DNA, 1000 bp, Homo Sapiens
ttttctctggtgtgatcagagctggggctcaagccttatggttgtagctgtaggatgtgatagacccatggcctaattagccacctgagaattctaccaggtatgactgccttgagcagttggctgtagtccattatgatagagttctgcagaaaaccaaatcctttgggaggccagtcctcagggaattcatcttggacaagttaactttcctctcaagtgcctacagccggaataatacatgaactagagctacacacaaactaggtacatatattttaaaaacataatcttgagtggaaacaataacaggcacaaaagaatatatctattatgatatgtttatttaaagttcaaaaactggccgaactaaaatctacttgtattggaacacacctgaatgtgatgaaagtatacagaaaagcaagaaagttatttaaataaaagtcaagatggtggttacctcttaggtgggggctataatgagaaaggaaggacaagatagagaaggttcttactgtcagtgttccatttcttgatttggtggatacaagtgtgtttataattattctttaaacaatacaaatggttttggcccatttctcttaatttatatttaaaataaaagtgttaaaaagaaagaatacacattcaggtatatagtggtaaaggggcattctatctgcaacttaccactctcaaatggttcaggaagaaactactcattatttcatataaaaaattagaaaaggaaagaaaaaacgaagagaaaaaagaaaggcatactccaatagaatattttcatctccttttattgacagaaatagaaatttgtgctgcagaggcagtagtacctcagagcatgagaaggtagtcaatggggctgacatgacaagccacaatgctggccaggggtcctaccatagtgggagaaccaaaaccacaaaaatagcaggaggtagcaaacatccccaacacccagtgtaagcatttccatttg

SEQ ID NO: 206031 - DNA, 1000 bp, Homo Sapiens
ccctccctttttgccaggtcctgtacattgactatctctttggactccacaaaactttaggaggctggtgttatcatctccatcttacagataaggaaagaaaaattcaaaaaagttatgtagcatgcccaagattccgcctggaaagtggacatctttcatttcagggctgtggatgtggctgggtcaggcactgcttatagtaggaggggaagaagtcagatttcatccaaatgacaagaagaaaacatcatccacaagcccagctagtgaatatgctgcaggcagggagaaaagaggatccggagtcaaagacatctccaggagaaacaatgtctgctgctcagaggagaacagctggaagcccaaggcctacttctataaggctactatgcccacagcaaaagcatgggtcaacccaagagatctaggacggctgcagagagatacacacgtcaccatgaggccagaatgcacatcttgggtcttcacccagaggagaagcagagaagcagggcctgacagggcctgaatatccctctgaacctggtgatgaggaggggcagctgttctcacatcccacccaagcagggccaaccaagaccagtgtcagccaagatgcccatgaggctttaagtcatcttaggatacaaatgagatcagctagtcagcttttgaaatctgtggagttttccttctttgcctcttaatttttctctccaaacatgtcaacccgtatgggctaagctaatatgaaaacatttgtccctctgagagagcagagctagagagatcagagctcccctagaggctgggaaaagcccagctagggaaggttcagcccacacaccctgagcacctgtggtgcatcaagcctcactccaggtgccggggagtagctattagcaagatagaaaaggcctctgatgtcatggagctgaccttccagaggaagggacacaaatgacacaggactaaacaaagactatagagtgaattc

SEQ ID NO: 206032 - DNA, 1000 bp, Homo Sapiens
tcatttgtttttcttttacatatgttatgaacatcataatacattgttaatgtttttctttaagcagtcagttatcctttaaggggattaggaaataaaaagaaaaaagttagatttactgtatctggcattctttgttcctttgtgtagataaaatttccgtctgatgtcattgtcctcctgtctgaagatgtacctctaacatttcttgtggtgaaagtctctcagctttttgtttctctgaaaaagtctttatttgccttcatttttgatattgttgctgggtataaaaatgtagattggcagttttttttctttttatgtttaaatactattattcacttttcttagggcttgggtggttttaatgaggaatctattttttccatttttccttctctgtatgtaacatctcctcctgcctccctggccacttttaagcttttctccttatccttggctctcagatgtttaactatgctgttcattggtgtggttcttggcatatttattcttcttaggcttttaaaaacttcttgagtgtgtagatttattattctcatcaattgtagaaatattttggctattattttctcaagtagtttttttgtgggggagttctttccctcttctttctttctcagacttaaattacacaaattttagtctgcttggtatttttccattggctacttgctctgttatttttcccttttgccttccatgcttcattttggctgtttttcctatattatctaatctgctgttaatctgattcagtgcgttttttatttcagctactgattttttaaatcactagaggttaaattcaggtcttcttttatgttttagaaagtgttggactcttttttttctgtcatatagttaggttacttgggggttcaattattttgaagcttagttttaagttttattagtttgagttcagagtagtctttagtctagaattagcttcacaacaaaggctacctttgaattc

SEQ ID NO: 206033 - DNA, 1000 bp, Homo Sapiens
caccaccatgagaacagtatgggggaaacctcccccatgattcaattatctccagttggccctgtcttgacatgtggggattattacaattcgaggtgagatttgggtagggacacagccaaaccatatcacacccagggccaacatcactcgcagctccatacttttacacagcttgttaggactgaattgccctccacaaaatttcatacattgaagccctaaccaccaatacctcacaatgtgactatatttggagatggggtcttgaaagaggtgattataagctaacataaggtcatgagagtgggccctaatctaatctgactggcatccatataagaagaagacatttggacaccagggatgtacacagaagaaagtccatgtgaggacacagcaggaaggcggccatccacaagccaagaagagaggcctcaggagaaaccaaacctacctacaactatcttggacttctagcctccagaacaatgagaagacacgttttttgttgtttaaagagctgagttgccaagatggccgaataggaacagctctggtctgcagctcccaccgtgaatgacacagaagacaggtgatttctgcatttccaactgagatatctggttcttctcattggggctggttggacagtgggtgcaggccacggagggtgagctgaagcagggtggggcgttgccttacccaggaagtgcaaggggttgggggatttccctttcttagccaacggacgcagtgacagactacctggaagaatgggacaatcttgcccaaatactgcgctgttcccaaggtcttagcaactgacagacaaggagattctctcctgtgcctggctcggtgggtcccacacccacagaggcttgctcactgctagcacagcagtctgagatcaaactgtgtggtggcagcctggctgggggaggggagtccgccattgctgaggcttgagtaggtaaacaaagcagccaggaagctt

SEQ ID NO: 206034 - DNA, 1000 bp, Homo Sapiens
acttttcagtgaagaaacctggcagtcaccacctaaactaagtaaccaaggttaacatcatcatcattaagacatgttgagatgatgcaatgaaagggccaattcacttgtataattccccaaatcatggggattattcttccctacaatcatgagaaaacatcagataagcccaaattgatagataatgtataaaacagctgacaagcactctttaaaagtgtcatggccaggaaaaactaggaaaagaaacagactggaacatactaaagagatacaatgaaatccaacatggcatcccggactgcatcctacatcaacagaaaaagaacatgagtaagaaaactggagaaatctgaataaattctgcattttagttaatggtactgtaccaattctaatttcttacttttgacaaatatcatggttacatgttaatggtctttgcaagttctgtaaatctaaattttttttttaaataaaagatttaaatatatacagtctggtaagaatcatcatgagataagcatatgatctatgagacatgcagccagggtcagcaccaggggttacgtgtgtgaagtctgggaataatgtctcaacttactcttgaaatatgggaaggagttgatcagctggaatggggaagggggtagagaaaacagaataatccactatccaggaacaaggcagatttttggtttgtgtagttaacaaatggttcattcagcatggctggcataacgggagaagaaatggaagtagtgtcaagaaataaggtcagagagaaaagcaggaattacttgtcttggagatccagcctcaaatcccacatatatcatatcaacctagggctgaagtgacttcatctcctgaaatcatttcctataccagtcatttagccataaccacgtactgccttgtgataagtttgtcctattattttaattttcccaatttaaatcttactccacagagtgagatagcaggaaccaagctt

SEQ ID NO: 206035 - DNA, 1000 bp, Homo Sapiens
gcatgatctcagctcaccacgacctccgcctcccaggttcaagcaattctcctgtctcagcctcccgagtagctgggattacaggcatgcgccaccacgcccggctaattctgtatttttagtagagatggggtttctccatgttggtcaggctggtcttgaactcctgacctcaagcaatctgcccacctcggcctcccaaagtactgagattacaggcatgagccatcacgcctggcctccctgagtgatcttatccatccgtagattaaatctccctctgtctgctgaggactccctgcctatactatgagtacaatgtcttgatttctatactccaagaacaagtgcaactgctgcccagaagtctctacttggatgtcctagaggcaagttcaaatctactcctaaaaccagactcattcttttcaaccccaactatgctctcttccttttggagaatggcaaatgagggaatatggaggaagtgtcaggtaagatgagaggttctggagttacgattgccagggtccaaagtccagcttatccacctactagccatgcatagtaattatttaacccttccaagcctcagtttcctcaactggaaaatggagatagaagtgcctacctcatgggtgggttgtgagaattaatgagacaataatgacaatagcagatatttatagggcactttctgagccaagcacttctatgtggctttcacgtattatttcgtttaatcttcacaacaacccactggagtaagggccattattcttcctcttttacaggtgagcaaccctgagatgcagaatgcactgacattctctgtgttagtggcggaatcagagttcaaattcagcaagtctggctccagtggcatcctcttaagcacctcagtgttctgtgtgtgcaaagttccttgaacagtatcaagcatataagaccctatgcctggggaagtgacttggaagggtatccaaatctggtcaagctt

SEQ ID NO: 206036 - DNA, 1000 bp, Homo Sapiens
aaaaaaaaaaaaaaagattccaattatataacattcttcagcttcctttgaaagctataatgtcaaaacatatacatataaaaaagataggacttagctttcagtacatgataaaaatgtttatatatatattatatcactgagaaccactgcaaaaaaataattcaaaggaaataaagggtcatataaataaataatttcagacaaacttctacaccagtttaaaagaagctccgaagacaataggacaatttttttttttttgagacgaagtctctctctgtcgccaagttggagtgcagcggcacagtcttacctcactgcaacctccacctcctgggttcaagcaattctcctgcgtcagcctcccaagtagctgggattacaggcacgcaccattatgcccagctaatttttgtatttttagtagagatggggtttcaccacgttggccaggctggtcttgaactcctgacctcatgatccgcccgcctcggcctcccaaagtgctgggattacaggcgtgagccaccgcgcctggcaataggacaattttttaaaacactgaaatgaaatgaacatttatctcaaagtaataaaggcattgatttcttccacatatttaatgacaatgagaacaaaaagccattcaaaaaagaagctgcattgtactagaaaattctgttaaagcatatttttatctttaaaacagcaactttctgctgtaaaacatggcaaatgacgtacctatcattaacttttatttcttatgttaacacagtaggaaatcatatcagatcaattcaagaagacttgttaaaacagacccttataacacactatggtcttgcatcatatcagagaatactaatacaacttatcctgaattggtcctaaattttcacaaattaaaatatgtccaagattgtcccaagggctcacctgggagcaaataaagttactactatagataagaaaatcttgaatgaaaagcaactgc

SEQ ID NO: 206037 - DNA, 1000 bp, Homo Sapiens
caccctgacttagtcacctggactgttagaggaatcagttgaagctgttctgaatgaagcaagagactctaagagaacctccttctcacccagtgcccacaaattctgtgctcaaccatttcgatctgtctttctgctcaggggcaggcttggtgaaccttcagttctagtgactagctagcggtcaacacttcctctctatgcagggggtgatcttgtcccttcaggtccaccagggcaactggacttttgctccatactaaatatcttggagatcttttcatctcagcccctatagatcaaattcatctctttgatggttgcatagatattgcattgtgtgtataacttcagtttgtttaaccagactcctattgctgaatgctttaaggctcccatagtagaattacatttttattgattgacttttgaatgggggaacagccagtgtttagagggggacataatggaaacagcaggtcttgggcaacttctcccatgtcacaatattttgaagggtggcttcatctaagaatcttgaatgaaaataattcagtaaattatgagcgagaaatgaattcttctaaatctactggaggctagaaacagattcattggtgtccttgagatcagagaagagtatagagtcaataacttgaaaactgggttcattgaaacaacaggggctggtccacaaactttcaaagttcatgtctcaaatcaaaaccttggcctctaacactcaagctgcttgatgtgaaaagcagaggtggacaacagcaaaaattaacacttcagaaaccaacaatgccgagagcaaatggccatttagtttctccaccaaacttccctaatccagtttgattgttcttgaatagcactggcttaacagtttgtaaagtaaatacccttccagatttttgggaaccgttgcctcccagttatgtttgactttgttttcctcccaactggtggcctcctcctgcctcactgagaattc

SEQ ID NO: 206038 - DNA, 1000 bp, Homo Sapiens
ctgcggtggggagcggagggaagaaacataggtggtacatagaatgaaatacagaaacatatttgtgagtcactgacacagtttgagtcagccatacttaagtgtcccatatttgggaagagtggcaaagataaaagctgagaaaaaggaatcgactgcagagacgggaggatttgaagcaaggtggagccggcctgaggtttccgggatgaggagagggtgtggcggatgatccagagagaaaggctgtggtgtggcggaggggtggtggggacaggaacagcctgctgtctgaaataacagagacagtgaatcaggcgatgacatcctttgcatatgtggtgaagggtgggtggcctaggctcctggacgcaggtaaccaaggaacacaactgcaggtatagccgcctgcacccgaatcagcctccagcagcagagacacccagttacgcagcggcggtgtgctaattccagcccagactggcagacagcaggggctctgtctgggggaggaaaagctctagagctggggacgacacattctgaaggagggaaataagctctgagctatatttagtgctgcatggctgtgcgtagcggacttatggcaagcgcgtgcatgcgaattcatcagatggaaacacaggcatgtgtagcctgcgctctaacttcttttccaccccaaagattctttttttctacagcctaacctgtcggggcatcatttcctacccgctgttgcgtactgatgctctgctggtcagcttcctagggcctctgctgacgataagtacagctgtgagatgatgacaacggcacatagcagacattgattaatcagcagctagctttggttttttgttttttaaacggacacatcttagacaaggaatcagcagctttcgacatcagaggaaaagaaagtttcttgattcccaattttttaacaagtgtcagacacaagttcagcttggttggaaatagaagcacaatggaattc

SEQ ID NO: 206039 - DNA, 1000 bp, Homo Sapiens
agtaccctgtggcccatttcattgaccaaactttgaaagccaaggtaagttcttaacctttccttctcctgtttgaaacctacttgagtctcctgactttttttctgctgtagtcccatcattttggggtacatgcttacaaattcatcacttctactccttccatctgtatttccaccctatcttttctccttctcctttctctagccttggccaaggcagacattgtatattttaggctggaaacaggattctcaagtttcttcatgcatctctactatattgaatggcaaaatgtgagtcgtgttcctattctacacatctgtttctttttccagtcaactcatcagaagactctggtggcttagcaagtcctgtgtgtatgtgggtacctgtgtacagcatacatatacatgtgtagacgtgtataagtatatccttgtatatgcatatatgtggtaagtgcatgtgtgcacatgagttaaatggcttaagtgcattagcagaaattgaacaatttagtttgatgagtagggagggagagaagacagaatatggagcccagaggatcccaactggcaagctatctcatccccagttaccagatatttccacctttttaggatggcaaaacacagacctatgagacagaaaacagtaagagacaatgtctcaatacctggctgagaaacaaaggctctgttcttggaacatgctaggcttggttccacattgggagctttccttagcttttgtttctgcctgtatccctcttcactcagatcctcacatagcttgttccttcttgtcatttgggtgtcagctcagaggtcaccttggtggagaagtcttctccccattaaagcagcctcctcctcaccctgtaatatcactcctgttttattatattcattacactcatcaccatctgaaattatgtcatttatttgcttatttgcctaggacattgtctgtctccctaagatactgtctctctact

SEQ ID NO: 206040 - DNA, 1000 bp, Homo Sapiens
gctcagtcaagggtgagcagagagaattgtacaaggaagctgaatttccagctggtctggaggaaacactgaaaaccccaaacagaagatgtccaggtggagcaaatgcagctgagagttcttgtccaaggggacagaatgtcagcagagtaggacacaagggcaggtctctactgaaagcaccaggggcaaagtcacccagcccttcaaccggctggccaccaagcacatcggctccactctgcctcctgcccgtgccaccctttgcacttttgtctgtaccatctcctccaccaggagtgcccttcccgctcctccatgtggtatactctcagccacccctcaggctcagatccagagccacctcctccaagaagtctccacctgtctgctgggaaccctcacatcacactgggagacgaagccaaaagtgggggggtcagtacagaggtgtgggaggtaggtccaatcctggctggacctggctttgggtgccatttgggacagggtattggggaggttcagcaggaaggtgggacctcaaggctttctttttatgaaggaggaggaaccagctgttgacagagcagcaacagcagggagccaccaaggctgagccttgaaccctgggccaccaggctcctgcaggcaactgggagcagctcagcctctcacagtcccatttccagggaggaagatgatgcagcctgaggcaattggccacctggaggaagttcagctgggtggggcaggcagaggaattcctggaaggaagctcacccctcagcactggggtagagggacactagagacaggggtggcccaggagctgcccacctcctatccccatgaataagcaggtgggcccgggtgaccagctgggagccacccctgggtgctcaggtaccatgcttctggcccagcctcctgagctgtggcacaggcaagagcaccggcccacggggtctgcatggggcagtgacctgttctctctaagctt

SEQ ID NO: 206041 - DNA, 1000 bp, Homo Sapiens
cccactccatacttccacctcttcctttttctcttcctcctcctcttctttttcttcctttcctctccttatctctctctctcctctccttttgtttgtctccctctgcttcctctctcccctcttccttttcctcttagttattgtttgctattaaagagagtcagtcaatatcatgctatattaaatctctttgtggtttgttctaatattctccattctaaacatgacacgtttcagtcacagtctcaacaagaagcaggtgacataattgaattggatatactgaagagtctttaataaaggaaccattcataaaggtttgggaagggagtagagaacccacaaggcgtatagcagaacactgtgcctagtagcagtagatgtcagaggtacccctaggtctgaagaggcactgggtgggagtgcatctgttgactttttttttttttttgagacggagtctagctctgtcacccaggctggagtgcagtgcggtatctcggttcactgcaagctctgcttcccgggttcacgccattctcttgcctcagcctcccgagtagctgggactacaggcgcccgccaccacgcccagctaatttttttatttttagtagagacggggtttcaccgtgttagccaggatggtctccatctcctgatcttgtgatccacccgcctcggcctcccaaagtgctgggattacaggcctgagccactgcacccggccgcatctgttgacttttgcagtgataaccaacaacctcggtatctcagtggcttatgataacaaacatcatttctcgtgcatgttgcatgagggctgtagtttggctgtggttctgctggactctgctgggcttggctgggcccgacatggccttctcatttgagagtgcaggctcacggtggtctcacgttgggacctactcttctcatgatggaggtcagaagcacgaggggcagagccacatcatccaagagcacattaaagctt

SEQ ID NO: 206042 - DNA, 1000 bp, Homo Sapiens
gctcaacattatgttggtaagattcacacatttgtcgcatgtagttgtagtttgttcattcttgttgtgctgttccattgagtgaaataacctagtttatccattctattgcatgtggagatagagattgtctccaatggccgggcgcggtggctcacgcctgtaatcccagcattctgggaggccgaggtgggtggatcacttgaggccaggcgttcgagaccagcctggccaacatggtgaaaccccgtctccactaaaaatacaaaaattagccgggcatgatggtgcatgcttgtaatcccagctactcaggaggctgaggcaggtggatgacttgaacccgggaggtggaggttgcggtgagccgagatagtgccactgcactccagcccaggtgacagagctagactctctctcaaaaaacaaacaaacaaaaaatatgattgtctctttttgacttacaaatgttatatattttaataaaaatatattaaaatacattataatatattaaaatatattataataaaaataatattaatattaatatttgacttacaaatataaatagtatatgattatggtcagttttaatacggccaaacaattttctaaagtcataccattgtttcatactgctttcaaaaatgttcttttgttttcccttatatttagcaaaatattttgttgaggactccaactcatttcatctacaaacaaaagtttaaaaatctatgcttagaccaaagggatggaaaaagaacagcaaagacacaggaaacctgagggaggaggaaactgggacagattcaggactgtttggccagccagttcttcctgtaagatattctctttcaagagctaagctttgggggttctaattctgttttaataaaacacagtgttcctttacatagttgaactgaattgttttccaacaaatatgaattaaattgcctcattatttatttaggttaaacaattaaactgtaagctt

SEQ ID NO: 206043 - DNA, 1000 bp, Homo Sapiens
actgtaccaaaagccaattattagtggacaaacagagctaatacaaaggagcttttgtttgaaataaggttggtgcaaaagtaattgcgatgtggataccctgtgctatgggaggggaggggatccaatcccctgaggtatgactatagttgttactaggtataaaaggtttagaaatccaagctctgtccactaataactggcttttggtacagtaaggcagccagctatcctgtgaaatgggtggcaagaaattctataatctttgaattccctgaactcaccaaactcaaaatgctgttttctttccttttttattcccttccctaccctcctctttccacagttttgccagaaatccacttgtggatttaatttaatgcagatatgtacataatatacagacatgcagatatgggcataatttaatccagatatgtaatattttgacctttctgatcgtagatgcttgggaaagttgtctgttgaacttgcattaatcagttatgacattttagattgcaagtaattggaaaactcagctcaaactgacttatgtgaaaaatggaaatgtatggtgtatatgattgaaaaggtgttaaaatgtttttttcatagcttgtttcaagaaacttgcaagaatgtcatgaggacccagtgatttctatatacatatatatttcttattatgtattatgtatatcctcatatataatatatattctgaaagatctgatgtgctggaatatatacatgcatatgatcatgtatgttacatatgatcattgtatcactgatatacatatatatcatatatatatttatgtatatgtacacacacacacacacacacacacttctctgtattggcaccatttttcatacagcatctctttattatcacagaattattgcagctattctctaatttatgatccctcaggttcaagtctagtagaaagaaacagttacctatttttcagaatacccagcagaattc

SEQ ID NO: 206044 - DNA, 1000 bp, Homo Sapiens
ttgctttctaacctgtaagatatttttaaaagtagacacttaaaaaatctgagagttggataagaggtatgcctataacttatatgagtgattaaaaagaatttttaaaaatcttaaccatgaaatctatgtccaatatgtctatatgtttaataacctacattttcaaggtagttcgttggaataaaacctagaataaatatacatccatgttactgctattttaaaataaaaattaatgcggatgtattcacaaaataaaacaggagaagtaagctaaacctcgttgctatgctattgctactaaaaaaaagactggaaacattaagaatgctgttgtcataaagtttaaggtaatttgttcaattcttcccatgccttttaatgacatcttctggagaaaaaagattgagaagaaaaaccaaaactagtttttctttttgtgacaatttctactggaattgatgattatcaggttgtgaacataattgaggggctaaaataccatatgaggattgcattcttcattctgaaacctgttagtcttcttagatgcaggcattatgaaaaaaccagctaaagtggagactagactcagatttttatagtatattattttgggtttatttagaaagttcagtgaatacttcctttggtaagaggattccaaaggggaattgtgcacgtaaacctatttatttatacatacatgctaaatattgacaccatcgttgttagagtaatgttattttaggggttaaagtttgtataaacatttccagattttaattcctaaaattatggttttgcctgtagacagacactgattgcctgttgtgttttaggttatatggactagattcattcttgatgctctctgtacacaaattttgtgtaagatcttaaccacatgcaactagaatacaaaataaaagagagatttccatgatagaggtaacgtctggtctataaatttctttcttctatcactttggaattc

SEQ ID NO: 206045 - DNA, 1000 bp, Homo Sapiens
ctaccgtgcctggcctcagttacctctttttttttttttttttttttttttttttgatggagtttcgttcttgttgcccaggctggagtgcaatgacatgatcttggctcaccgcaacctctgcctcccgggttcaagcgattctcctgcctcagcctcctgggattacaagcatgtgccaccacacccagccaattttatatttttagtagagacagggtttctccacgttggtcaacctggtctcaaactcccaacctcaagcgatccacccgcctcaacctcccaaagtgttgggattacgggcgtgagccaccacgcccggcccagatggtactcttaaaagaggtaactgagccgggcgccgtggctcacaccggtaatcccagcactttgggaggccaaggcgggcagattgcctgagctcaggagttcgcgaccagcctgggcaacacggtgaaaccctgtctctactaaaatacaaaaaattagccaggcatggcagtgggcacctgtattcctggctacttggaggctgaggcaggagaattgctttaacctgggaggtggaggttgcagtgagccaagatcgtgccactgcactccagcctgggtgacagagcgagactccatctcaaaaaagagtgccatctgattccaggcaggtccctaactttttttttttttgagacagagtctcactctgtggcccaggctggactgtagtggtatgatcttggctcactgcaacctgtgcctcccaggttcaagcaattctcctgcctcagcctcccaagtagctgggactacaggcgtgcagcatcatgactggctaatttttgtatttttagtagatacggggtttccctatgttggccaggctggtctcaaactcctgacttcgggtgatcctcccacctcagcctcccaaagtgctgggattacaggcatgagccactgtgcccgaccaggtccctaactcttatacatcccaaagctt

SEQ ID NO: 206046 - DNA, 1000 bp, Homo Sapiens
tcacttggctccagcatttgctggtattttgttaacttttggctcctccatgttcacccacccactggtttcccagagtaaaaatgccaaaatatcttggctgaacaggcgaatggatcacagatgacagaggtaaaaaaaagaaaaaaagaaaaaaaaaagaaagacaatcaagaggttctgtaatatgcttctttttaaaggtaaaagcaaattgcacacgtcctcattcttattctctttgagttggctgtcttgtgaaacattctgttgtctatattttcattcatcacattgaaaaaaaagttaggcaaatgggtcatgctgaaagtttaagtaaatttaccgtcttcctatttcagaccagctgtagtccatctcccctgaagcctggccaacagatcaaggagaacatggcttgagctgcaaaaacagaccagagagagaaaccctgggaaactaggctctagcgggtagctcaggaggggaacccacactgcagaggaaaagtaaagaggcctgggtgccgggattaactctaatcatccgtgagactctggcaagacatgctctccctcagaacctccaaagactggagtgatcaggtttttcaacttttaacaaaggcccagcgtttctaaccaaatataatctccctaaaccctcagtttctcatgcacttcctctttgaggattgctctgctgcctgtttattcctcagaaaccaagtttcactttctgaaatctgttataaagccaggcgacttttcattgttacactataaattatgataccaaataaaaacttctaaaaagtatatacaaggataatctgaaattcagccataagcctgagtgtgtgtcattgagagttaggaactaaatgctctaaaacaaactgtgatgttttctggttgttcctcatttccattcctgacttagcctgaactgcaattttactaaagctcctttgcttccccttcacacacgttaagaattc

SEQ ID NO: 206047 - DNA, 1000 bp, Homo Sapiens
aataagggagttagtccaagtaacacggttagcatcgtagcttcaccttgatgaggctgaacgtgacagctgccagcctctccctgggcctgaggccctgaccttggggatcagattgaggtgagaatggcaataaactgccaagagacagcaagtgggcagctgggactgaaggagtcttcacgtcttgggcaatccctgggcatctagtcccaacttcagaatctgggcctcccagcttgagcttcctgaggtcaaacatatgctccttggaaagccctgacccacgttctagaagaagagggggtaggcagggcacctgaggtcccagttaggggtggaggctatggttggcctagaaaatttgggagcccaggtgctggtgatggaaaggcctagatggctgtcctggagccttgactgtgcccctggacacgtcgccctctcctgagcccctgggtggtgatgcgaagggaggatgcccagccctgtctctgggagctcgggcaccagggacggatggcattccaggctgtgctttgcagggacctgtggtggcaaggccacgtggggagtgggaggtacataccccaggcttgcctcactggttaagtggcagatgttccttttacagcctgttggagctggaaggagccttagaaatcatttagcttaacctactcattatgcagatgaggacaccagaatccagagatactggcttgcttaaaattgccaggagttggcgtgtgagccaggctggatctgcgtccctgcctccagggccagtgtcctctcactgcattgagctcctagcctcaggctctgggatggtggacttactcctcccgccccacccctcctcctcctcctcctcctcctcctcgtcctcatggcagatgtctacatatccttgatgtgtgccaggcaccacgctacatgctttctgtgctttggtggactcagtcctccctgcaattcagtgaggtgtgtggaattc

SEQ ID NO: 206048 - DNA, 1000 bp, Homo Sapiens
atacccgaaacagaaggtagtaccagacctgactgctgtcaatccaaacatgtttctgttcatgttttccactcacagatttaatgccttttccttggtaatttagtacttaacatgcactgtagctataacttttgcagtttgaggtgggatagcaactagcatgagtttctttttccttcttcccaatttcatgaatagaagatttgttcttaccatacatcttagcaacctcaacctataattttttctcatctcttatcaagttaagaactttcactttttcatacaaaggaagcattttactgcttctctttggcacatctgaattgctagtaacactacttttgtaccctggggccattgtaacactacaacctataatttttttatttcttatcaagttgagaactttcactttttcaaaaaaaggaagcattttactgcttccctttggcatatctgaattgctagtaacatgacatttgtgctctgggcccatctaagtaaaataagggtggctagaacacaagcactgcaatactgagacagttgatctaataactgagatggctcctaagcaacgaaaggcgggtggcgtgtacagcgtggacatgctggaaaaaggagtgattcatgtcccgggtgggacagagcaggacagcacaagatttcatcacacttctcagaacagcatgtgatttaaaatttatgaattatttctggaactttccatttaatgttttcagaacacagttgagcactgaattcctggaaagtggaaacacagatgaagccaagggtggggactactgtactaggcaagcagaagacagcctctggggtgggtctggctaaggctgttggtggggctgggcagacaggagttgagtgcaagctcactcacgggcaaggcaacctgaggcctgggatgcatgttgcctacattgaaagggccatggcaagggggtcgactggtcagggtcagggctgcaaactg

SEQ ID NO: 206049 - DNA, 1000 bp, Homo Sapiens
ggggaggtggaagataggggtagagataggagatagaggggagagatgggagatgggggaaggtgggagatagagggagaggtgggagataggggtagaaataggagatagagggggaggtgggaaatagaggaggacgtgggagataggggtaaagataggagatagaggggagagatgggagatgggaggaggtgggagatagagggagaggttggagataggggtagaaatatgagatagacggggaggtgggagatagaggggagaggagatgggactgggcataaaaatgagatgctggaggagataagagtgaatgggatcaagagcagttagaagtattagtcttggcagaaaagcaggacacttctcagatatgacagtgaaagaagttctggagatattttaatgagagctaggaaagctgagggaatttgcattaaattgtgtaagcttcatagtgaaagtaaaattacctatagaaagtgaggtggcacattggaattaagtgataaggaaacaggagtggctgctatgggcagtgccattcacagacactgccaagagagctgaatgaaagagttctagcgagagggagggccctgctaggattagtatttgatcttaatagtttgtgtttgatcttacattgaaaggagctcagggttattttatcattctatttccatattttaggatacttagattttctggagaaagtcttgggaaagagatagcattgcttagctgtggaagggtcacatttgggtggcaaatgaggttctaggatggcaatgagtgcattattaaagtgagatgtgggcaaatggtccctgagagggggtgatggactgggaagttaactcagatgaggaaatggagatcacaagaggctagagaggtggagtaaaagtccgggaatggagacactgacagtttatagacatggtgtgatgctttgcagctatttggatccatgaagacacctgtggaattc

SEQ ID NO: 206050 - DNA, 1000 bp, Homo Sapiens
tgtcataaaatccaccctttttaaagtgtgcaattcaatgaatttgaaaaaccgatagagttgagtaaccaccaccataataaataaagctactatgaatatttaaatataggtctttgtgtttcttttgggtaaatctccaggaatggaattgatgggtctaatggtaaatgtatgttgaaatttataagaaactgccagttttccaaagtgactataacatcctgcattcccatcagcaatgtataatagttctgtttgtttcacatctttgctatcacttgtgattgccagtctttttaaattttgaggtggtatctcattgtagttttaatttgaattttcctaatgacaaaattaaattgagccttgtaagcaaaaagtctatttgagatcagtctctctctctctctctctctctctctttctctctctctctctgtgtgaagtgttcagatcttttgctcatttttaattgggttgtttgaattattgagttgtaaagttctttatgtattctggatataaatcagtcctttataagatatgtattttccaatattttctgccagtttgtggcttgtcttttcattttttaatgttggtgaagtccactatgtcagtttttgctgttgtgttacatgctttttgtgtcttatctttgcctaacccaaggtcacaaagactttttcctttgttttcttttgtaagttttcttctagaagttttatagttttaggttttacatttacatcaatgatccattttgaattttctatataaagtgcaaggttcattgttttgcagatggatgaacaattgttcctgtactctttgttgcaaaggctattatttctccattgaattaccttgtcatctttgttgaaaatcagtagttgagaatcatttgtgtggttctgtttcattgatctgtatttctgtcttaatgccaataccaaattgtcttgattactgtagttttaaaatgtgtctagaattc

SEQ ID NO: 206051 - DNA, 1000 bp, Homo Sapiens
tcccgggttcacgacattctcctgcctcagcctctccagtagctgggactacaggcacccaccaccacgcccggctaatgtgtgtgtgtgtgtgtgtgtgtgtgtgtgtgtgtgtgtgtgtgtgtgtttagtagagacgggatttcactgcagatctttctttctaaatattattctccagtaaaaaggaacccggtctacttaaacagatagctgattatacggctggggcagggaagaacagaatgaacttaggacatcttgtggagctagtaactaaggaagtgctcaaaaaatgatggacacatgttgaaatgacacaagccaacttggtaagactcctagatctgggacaatctgaacaacaaaaatgtttaaaagataataatgttcactcacagattaaaagcaatattcatgagcccatacttatttaaataaaaaattgaataaacaaataaatgaggaagaaaggaaagttctttcttactgtaatactccaattaataaatgcagaaggagtgatgcaaatagcaagtcaccaatggcaaagatcacagtaaaaattgtttttcaagaacgtatcagtggatgctaaaattcatggatgaaattattaccagaaacatgatatttatttagtctctaagtatttttccatgagatgcctattaattacagtgagaaatgtcataacttcacaatgtagaaatgtggcatatatagccttaaccaagattaaagcttattgtgtgcttcctgatatgatgcactgagaaggacatggcatcccttatgtggtatccttaccaaaaatgcataacctgaatttaatgtctgcaaggaatgcagacatacccaaatggagggatgttccacaaaataactgacagctgctcttcaaaggtgtcaaggttggaaaagataaagaaaaactgagacatcgtcccagcttaaaacaggctaataaataaaggcaatgtgtaatcctggtttggat

SEQ ID NO: 206052 - DNA, 1000 bp, Homo Sapiens
tttgtttatgttttggaaaataccagctctttgttttgttgttcttttctattgtttttcttgcccatttctccacatatctttatcgtttcctccttctgctagcttttgacttagtttgttcttttttgttttagttccttgaggtgtaaagttagattgtttatttgaaatcactgttcttttgtaatatatacagttattgccataaatttccccctcttatgtgcttttgctgcatcccatgagttttgatatgttgtgtttccattttctaaagattttatcttatttctctttgatttcttcttcgacccattggttgtttaggagtgtattgcttactttccacatatatgtgagttttcctattctccttaacattgatttctagttttatattattgtggttggaaaatatacatgatatgatgtcaatccttgtaaatttgtttaaaattgttttgtggcctaacatatgatctctcctgtaaaatgcatgagtatgcttgagaatgtgtattcttctgctgtcagagtgaacgttctgtaaatgactgtcaggtctatttggtccacagatgattcttggctttacaatgattcagcttacaactttttaattttataatggatttatggggaaataacccgatcataagtcaaagaccatccatatggtgttgtctagtgtatgctttccttgctgatttcctatctggatgatgtatacattgttgaagtggggtcccctactgtaattgtattgctgtctatttctctatttgtttgttaatatttgctttatgtatttagttgccccatccttgagtgtatatatatttataattggtatatcctcttgatgaattgacccctttatcattataactgccttctttttctcctgtgacagtttttgacttaaagtctatattgtctgatgtaaatatagccacacatgctctcttttggttaccatttatatgaaatatccttt

SEQ ID NO: 206053 - DNA, 1000 bp, Homo Sapiens
gggaaggattatcccaaggggattgttctagtaggcagcctcaggatcccactgagatggatgtcaccctgtctggaagttctcaggaatgttatttacccacttgagatcaatggacatctgaaggtagcctaaattataataacagctaacacttatatagcactatgtaacaggcattgttctaagcactaccgagatattaatgtccgttatttccacgataaccacattctgaagtagatgatcctcctaggtaggtactataataatcattcccatagctactaagcagctgagctgggattggaaccaaaggactttggctctagaacctgtgctctgaaagatgacaactcaaggcttctccttttcctgacatctgttgttcctctctgcctgtcccgtagtcacgagtgctgagagatggggccatcctagaggactgggaaaggaagcatggggccttatgggtagaggtgagtcagggagcaccattgtgggaacagaagcagaagccagaagtctgtgggacctgcagtcaccatctaacagggttggggctagtccccctccagggttcccagatcaaccctgtgggttcccagatcactaaccagcctgcattgtcactattagctcaattatgtcctccagggggcagtgggttcctccagggcaaggctggtgcctaggtcagctcagtggtccctctgcagacagtggccaatggcagtagggcagggaactgggccatcacctgaactattgtgatcctgggccctaaaacaatgcactcacagcccaagtgctcatgaatgggtagatgaaataggccaggaaacaccacaataagcacttatataatgtttctttagtatttctaatttctttaccttttatatgtttctgctccacacaaaggcccttaaacttgaatcacctgaggagtttggtaagaaggcccaaaaccactgagattctgaatcagtagttggtt

SEQ ID NO: 206054 - DNA, 1000 bp, Homo Sapiens
caaaaaacaaaaaactgaggcacaatgaggtttgataacttgcccaaggtcacgcagctaggaaatagcagaactgataactgatattattattattcccctactggatggtaggctcattgaagaaaggggctttgcacataataatgggggttttttaatttgttttttgagactgggtctcgctctgtcattctgactggagtgcaatggcacaatcacagctcactgcagccttgaattcctggcctcaagtgatcctcctgcctcggcctcccaaagcattgggattacaggagtgagctattgtgctgggccataataactttaataactactttcgacaatgttaaaaagtccgagttcaagtccctgcaaatttcaagaggcatcctctatttcctaaaattcccccagaaaagaaattcccagcttcttcagggaaacggcagtgacatcacagggaagaaaaaaaaaattctttttttaatcagaaagcttggatcgattttggccaagtcacctcttcccaactctatgagttgagaccaatcgcttcgcttttccgagcctcacctttctggtttgtaagatagggtcagcaaatgccagagctgcctgcttgcctgggcggagctgagaacgcagtgtgagatctcaagagataaagcactctgtggactagaacgccctgtccaaagagaaggccttttcattcgtaaccctttcccatccttggccccactactgggaagtttttccattagggccaagcctcaagcgtgtggtggaaaataacagaggcatttaaagggaaatgaaactgccctcctcagcagaatgttccctacacatttgctgtggcccatggcagcgcctctgctgggcgccttcagccttaggaagcaccagcggctgcctgacgccacggggcaattcagaggctggtaaacagcacatggcattcccggcccgtggcaggcattcatgcatggaattc

SEQ ID NO: 206055 - DNA, 1000 bp, Homo Sapiens
ctaagcctgtatccaacaaagacactgaccgctggggtacaaggaagggctccaggcccaaaggcaggaggattaggctttagctcttgctcacagcctgctgagacctggggcaagcccctgtccctctttgggccctcaggtttgcaatttgcagaatgaggaaatgggttcctcaatctacaatcacctgactataataatattttgcctttatataccgcgtgggtaaattcctgaaagtaaactaagctgttttcacccctggatctcatttgatcctcccaacagcctgtttgcatttacaaatgagaaagctcagttccctaagggaacaaaattacccaaagtcacacagcaagctggaagcagagcctgggtgcagtccttgaatcctgatccttccctggtcctttactctctatgatgctggaaatctgcctgacttcctctaacctgttgtcccatttgtaaaaggactgttgtgaggactgaattaggagaggcgatgaagagggtcattccttgtgaatcataaaagaaaggaccacagaacgatgactggaccgttaggttactatttattacggttatcttcgctcaggcgcccccacgtgtcgatcccgagactctcggcttgcgcaggcgctctttggtgtttacagcggccgcgaagccccgcgtttgcgcgtgcgcttcccgcccgggaccgcccagaggtcccggactaggggcggtctaggggccgctctgcctcccgccccctagtggttgtggccgctctgtcaccacggctcccggggcctctgtcggctccactttggttgagacgtctccacagcccaacaacggcggcgatctgaggagaggcaggagaaaatacggcgcgctcggcatcgtccttctgaccggggactccagcatctcagtcatcgcgtcaccaagccccaggtgcaggttctggcatccatcatggcaaactggagaccgcggtgaattc

SEQ ID NO: 206056 - DNA, 1000 bp, Homo Sapiens
tccttgcagctcttagtacatacatgacacccacatacttacacacacacacatacacacgttcttatagaaatggatttaataggggctgggtgtggtggctcatgcctgtaatcccagcactttgggaggccgaggtgggcggatcacttgagtcaggagttcgagaccagcctgtccaacatggtgaaactccatctctactgaaaatataaaaattagccaggtgtggtggcacgcacctgtagtcccaactactcaggaggctgaggcaggcgaatcacttgaacccgggagacagaggctgcagtgagccaagatctcgccactgtactccagcctgggcaacagagcgagacagagtgtctcaagagaaaaaaaaaaaaggattaatactctacctcttctgcttttgtttttttaataacttaatcacatctgtaaaaacttttacaacattacatgtaaccagcttccggcatgtgatagctttgcaataaatatttgatgagtgaatgaaccaatgagtgaatgaatgaattttagaatattgtgagccacagaattataagatgaaaaggaatcttagagaatgtctggtccattctccctgccactgccaatctcgcctgagtggcaatgctggctagtcgtggtccagtctctctgggaagactccgtttctagagctcacattctcaggagcctttcccccttctttcctcctaggtgagcagacacgttaacaagcaaaagaactgaatgtaaaactggtggtttttgactgagtgtccctcaaatttctcaatggccactttattttttgtgaatgttatagtcttatattgcttataacaaatcaccataatttagtggcttaaaataacacccatttatgagcttacaattctgcaggccagaagtgccagctgggttctctgctcaggctcttaggaggctgaaacgaagcctcctttctggaggctctggggaagaattc

SEQ ID NO: 206057 - DNA, 1000 bp, Homo Sapiens
cacaatcggccttcaacctatctttcaactagattttccaatattcccagccactttcccctcctatccccatactttttggtacaaaccactatacacagctagtaaggcccattcaatctcctatcaccaggtctatggcaaattttttcaatgcagccttctctgacatcttcaggcaaaattaactcctccttcctcttgcttttatggcaggtttttcatttctaactcatagcatacatatctatatacatatacacccatacacgtatatcactaaatttattacagacaccaaaaaagggggtaaatctcgtctttctacgtatttagacatacatacaaaaaactcgtggccgggcatggtggctcatacctggaatctcagcactttcggaggccaaagcgggcagatcacttgaggtcaggagttcgagaccagcttggccaacatggtgaaacctcatttttactaaaaatacaaaaaattagccaggcgtggtggtgggcgcctataatcccagctactcaggaggctgaggcaagagaattgcttgaacccaggaggtggaggctgcagtgagctaagatcctaccaatgcactccagcctgggcaacagagcaagaccccccccccaaaaaaaaaacacctcatatatttgtgtgcatttacagggaaaggcatttatatagcaattcttactatttctgattctattgtttcctttcttatccactccttacctatatcccatacactctacagcattaaaaaaacaaaattacattgaggccaaagtaaaatacttccaaatgtaaaaataaatgatatggcaattagcactactgttaggatggaccatgcagcacccaatacatattaattgtacaatctgtttcatttgtatacagagaagcagggcttttcactgtgctttacccagcagaaatggttgtctttgcctaggatgctaaaggatcaaggaattggaattc

SEQ ID NO: 206058 - DNA, 1000 bp, Homo Sapiens
catatctggttaatttttatatttttaagtggagatggggttttgtcatgttggccaggctggtctggaacttctgacatcaagtgatccacccacctcggcctcccaaagtgttgggattacaggcgtgagccaccacaaccattgtccttatttctcctcctcattcttgccatccatcctctcctcttttccttcctccctcttgccccctctctcttttcttctctatctctttctaatcccctttccctctcttcttttttttttttggccgggtgcagtggctcacgcctgtaatcccagcactttgggaggctgaggcgggtggatcacaaggtcaggagttcaagaccagcctgatcaatatggtgaaaccccgtctttactaaaaatacaaaaattagccggttgtggtggcgggtgcctgtaatcccagctacttgagaggctgaggcaggagaatcgcttgaacccaggaggcggaggttgcagtgagccaagatcgcgccactgtactctagcctgggtgacagagtaactctgtctaaaaaaaaaaagaaacaaaaaaaaagtgttttttttttttttttttctgaaaagtctgtttccacccagttatgtgtttctgttgatgtttttgtctctgcttttcatgttggaggctgttcacagaagtctggtaacccttggctgtcaggttatgacaggtttggagaccaaagagctcactggaagtttaagaatggagcttggccaccatacccttcgttgtaggatgatatgggatattttttgaggttcccttgagttgtgggatttataagggcaactgcaatgagttccaaggcccggaattccaagttctgggtgcattcaatgtcagatggtcactaggccatggcacttaggaatgcttctaggttatatcttttttcttaaagagaaaaaagaaaggcctctctgctggggctccctcactgacctgtactgtgaattc

SEQ ID NO: 206059 - DNA, 1000 bp, Homo Sapiens
tgacattggacattagttaattttcccactagcagttgagggttcatgaggacaagagtataacaacaatattaaacattttcttttttcctgtgttcttaacgagagtttaatgttgccacatacacactgtattagtccactctcgcactgctataaagaactatctgagactggggaatttatgaagaaaagatatttaattgactcacagttccacaggctgtacaggaggcatggctggggaggcctcaggatacttacaattatggcagaaagcaccttcttcacatggtggcagaagagaaaaagagtgaagggggaagtgctacacactttcaaacaaccagatatcttgagaattcactcactatcatgagaacagcaagggaacatctgcccccatgattcaatcacctcccaccaggtccctcacccaatattgggaattacaactggacatgagatttgggtggggacagagccaaaccatatcacacacacatagttattcatatgattagttttaaaattcctaccttcctcattagactgtaaactcctaagtgcagggactgccattttactccctgctctagccccagtgcaggaaagcagggatatatctgccttaatatccgtggtatctccagcactgagaacagttcctggcatattgtaggcactcaatcaatatttttgatgttgaattttgctcataactgctttttgaatgaattaatcagtgaaagaaatgagacaatcaagtgaaaggaatactagtcagtggtttccctggattaacaacgagagacagtgaggatttcacaacataaaagtacatttctatggaatcattattttatacatttccagacatattggacataataatactttacacgtgtgtagtgcttgcaggttcacaaagggcattccgcatattgtaccatttgattcttcaacagccctgtaagataggtcaggtatattaatattt

SEQ ID NO: 206060 - DNA, 1000 bp, Homo Sapiens
tattcctagataaatttttttaataattgaaagaactgaaattagagccataattgtacttaatgtatttattgtgtcttgatctatagtgttttgactattgtaatttcaaggatagatgagacacggagtaaaacagaagtgcaaggtctgttgggcacctgcctgtggcaacccgtctaaatatgtaataaatgaataccaggatcaattataaatagggtgctaattaactcctcatgactgaaaaaatgtacattggccactgtattcagacccactgataaagatagttcccttaagtaaaaatctaaaatacatctttctgggacagatctagctttgttaggtagttttgcaagtttgtcttgtgtaaatgctgatttcagctagctgatagtcactactaaagtcagcagtcaaacccaactgatatgcagaaaccaaatgatgtatttgggttttgcatcctgcattttacccagaatgagtaattaattgtctaaaccatttatcatgaatcctaaaaagctacagcattaaaaaaaaaaacacaagaaaactaaagacagaatagtatctactaaaaaataagcataatttgccattatgaaagccagtgaataaaacaaattctatctttatagctaaatttatataatctattatgcataatgaatgtgatatatatataatttttaaatgaaaataaaagacacatctaaacagattaaaattctatgaacttcagacttcaacataagaggaaaaaccttaagaaaacatgagaaaatctttgtgaccttagattagcaaaggtttcatagataggatattaaaaatattaactattttcaaaattggtaaacagttcttcattaaaattataatcttctgctctttgatactcaagaaaatgctaaaaacaaattatagacagaaaatatttacaaaatacatacacagtaaagaacctctatccagaatatataaagaattc

SEQ ID NO: 206061 - DNA, 1000 bp, Homo Sapiens
ggggtctgccattggctgagagaactctctgtaggtgaggcaatccacagcaagtctgacaacagaaggctgtctatgatcaacactcccaggagcactgccccacttggggagcacatccctctgttcatgacagctagccttcctcttttcacctctccctattgtaatttagcacatacattattcccatattaatcttccaacaacccaggtttggtaatgaaactccattgctcaataaccttcacacgcttccatcatacacaccacatttagctaactctccattatttcacccaagccacctctctaggttttatccacagtactcacttacgcatcttccatttagcaaaaccactattccctaagacagttcagggtactattgttgccagatgaatggtgtgtatgtcagagtagtggtggacaagtagggaagtcatttttgtgaaagatttttgttcatgccccatccttgacttgaacctttacttcgaacgtttcttctctaaatgtccctacccccaacttctaactttaaaaaattctgttgttcttcagagcccaactcatgcgatttcttccatgtaattcctcaggtaggggatgtccagatgctatttatgaaccaggatatttaatattaaattgtacaggttttggcatgctacaatgtatctctccctttccctccaaactacagactgccttctgtgggtgatgcttcagagacatcacacacagacaagagactatgataaatgtcttaaagatctcagagacaagacgacagaatggccatggtgtggaaagtcctgaataagaccaagggttcctagaaatatgaaactggagtgggatagaactattaaaatttaaatctttgccaaattgctgacactgtacaaggcattctactcctccaatacatggaatagggccctctaacaatttaaattttaattattaaactaatgagtgactccatgaattc

SEQ ID NO: 206062 - DNA, 1000 bp, Homo Sapiens
ggccccaggtcagggcctccgcctcctgggcccaggccctcccacctcagccttctgagtagctgagactacaggcatgtgccaaccacccaggtaatttttggttttttttttttttttttttgccatgttgcctaggctggtcttgaactcctgggctccagtgattgagcctcggcctcccaaagtgctgggattacaggcgtgagccacctcacaggcctcaggttgttccttttgaagtttcaaaatggttgctacaactccaagtatcaccttcagatatgtcaaagtacagagacagaaagtgatcatctctttgtatggctttttctattttgttttaagagacagggtctcacttgctgcccaggctggagtgcagtggcacagtcataactcactgcagcggcacagtcataactcactgcagcggcacagtcataactcactgcagcggcacagtcataactcactgtagccttgaactcctaggatcaagagatcctctaacttcagcctcccaaatttctaggattacaggcgtgagccactatgcctggctgtgtaactttttttttttttttttttttttttgagacagggtctcactcagtcactcaggctgcagtgcagtggcacaatcacagctcactgcagcctcaacctcctgggctcaagcgatcttcctgccttagcttcctgagtagctgagactacaggcctgtgccacaacacttgactaattttttactgtggccttcttacaatgaagacacttttctcagaagctcccagaacacttcctttcaggttatggggctgatcctaaaccaatcaccgcaaagagaagagtaaattgttgattaaaataggggcttcccctggggcttctgagtcacagagaggagagatggatgccaggacaaaattggggttctgttaacaaggaagaagggaagaagtggatgttaaatagacatctaccagcatttgctat

SEQ ID NO: 206063 - DNA, 1000 bp, Homo Sapiens
ggcctagagacattaagtcccttgtctaagttggtcacatagcatgtgagtggttaagcatcaaatcttggtccattcaattccacttgtgtgcactgtctggattatgtctacagcctcctaacaaggcctctctacttttatctacctctaaatcattgttcatattgctgctaaaaagatgtgcctaaaatatagctctgaccttcattttccaatttagaactcttgctccttaaattttgggtaaagttcaaactccttactatggcactgaaatacaaggtctttcatgatctgttgcctgaccatgaccatctctccagccttgtcccctgctcaactgagctgatagctcctgtggatgctttctaatatagctacataggggtttatgtaagtattacagacatttatataattataaagatgtttggtatattttcctagcaaatcagagctactatttagtgaacctgcttgtgttccagaccccatgctatatgcattatattatatatacaatttcatttacccctcacataaccttaggagtaagcacaattattctcattttagagttgaggaacctaaagatcatgaaagtcagggaacttcatagcaaagctaatggcagagctgggatataaacttaaatctgtctgactcttgtattttaaactattacagtaaaggcattcaataagtgtttattaagtagttaccccttcttttcactttatgaatacctgtaacacataaacgtccgaggtaaaaatatatacagaaacattttaatgtcacctggtattttaaaacttgtgtacctacctgcataagatcttgaaggctgtcaacaaaagaaatctctgcttctatcatataaaactctgccaggtgcctccggctctgagaattttcagctcggaaggtcggaccaaaggtaaacacttgagtaaaagctctgcaattcaagattaagagaatgcaaatagaattc

SEQ ID NO: 206064 - DNA, 1000 bp, Homo Sapiens
gagctaaggtcaggattaatgcctatttttcatttggtttgcatcagaagagctcgttttccttcccagcagctccagtggaattactttttggaattagaactgagaccaaacaaagtgatgatgtcagtcattgcttctttcaggtgccttccaaagcgatgagaatcctttcatgtaaaaacaaaaaccaaaaacctattaaaacgtggccatccccacatttcaagctttttcatttgcaatctgacccaatgtttcattgaaattcctttctgccagttctctaagatctgaccaacgtcttaaagcttaacttagacattccagagaaatgctgagggtaaagagatgacagctgatgtgtttgtgcgggtgtgttgtcgatctaagccttcccctaatgccaatgcgtttatcccacggaaaacacaatgaccatcctgagcatggtggctcatgcctgtaatcccagcactttggaatcgcttgagcccaggagttcaagaccagcctgggaaacatggtgaaaccacatttctacaaaaaatacaaaaatcagccaggtgtggtggcactcccctatagtcccagctactcaggaggctgaagtaggaggatcccctgagcccaggaggctgaagctgcagtgagccgagatcacaccactgcactctagcctgggtggcagagtgagaccctgtctaaaacaaacaaacaaacaaacaacaaaagaaaaccgcagtgaacaaataaaccccaacttcctctgttaacagcgacagtggcatgggttgccaggctatgtacgacaaggaaagcagaatataaataagggcaatgtgccatgctagggaggaggtcccttgttccatccacagaggaagccgggggtcccctgctctgtatgcagatttcttagtgtgtacccattatttttagttcatcttccaagtgctaaagagtctgaaagttacagcagcactccaacgttaagctt

SEQ ID NO: 206065 - DNA, 1000 bp, Homo Sapiens
tccatctttatcatagtgcatgacccaggaagttatgcagaagtcattcatgaaaaataagtgagcaaagtgactgtacacctgcacacctggtggatttttccctgtggcctcttaaaagtgttgtttggtaaactgcattgcagattcctctcaagagcatctggacagagctcaaaagttagaattctaatactgggtccatcaccagttacctacacatagtcttggacaagtcccctgacttttccctgaacttcagctttcttgtgtcttttttgctaaattactaataaggatcaaataaaatcatgaatgtgaaagtgtaaaaaactctatagaaacataaaaatcactccaataatactcatggatttcctattgtttagcatgtcagattcacattcttctttatggaggaaaagccaggcagatgttgtaacaaccaaatgccccaaaagccaaaactgaacggtcaggttcctagatcaatagaacctgcttcattgccttactcattccttcacttaccaaacattcattgatttcctgttgttttcaactacttaataaggcacaggccttgccctgatgcagttcaaccttttgataggaaaagaaaaggaaacaataaattgcaatcagagagataagagcaaaatagaagtatgtgcaggattctggggatggaggaaccccagttctctctaggaagagagggaaatagaacacagaacccagaacaatttcacgcagcagggtctacgttctcgccagctctcctggggacacagccattcagccaggatctggaggaaactgacacatggggaaaaaaatggaacacaaccaggaattgagcttctatctgtaactcttcctccagttccttgccttggcactacctggacacagccccaaaggattcaggtatgtgtgcaattatttctctcaacagtcctacgaggtacaaggctatcacttgcctctgtgtgaattc

SEQ ID NO: 206066 - DNA, 1000 bp, Homo Sapiens
tattgcctaatgagccagtaagttagtgaaatcatctcaatatgatgtatgtttctctatatctaaaaagcatatagagctagcactctgcctatatatgattcagactactctataaataaactgcacaagaccaggacttctcaacttgagaatatcttagacttcacttgatccacatagctgatgactctataaatagggtagataagagatttttgctcttggcaagtagggaactgtctgcctattacacaggatgtatccatggtgaaagtcatgaccagatgctccttacccatgtctctaatgtgctcttattcgataaggtttgggaagagggttgaagaggaaaagatgaaggcatcctagattaataataaatacagactcttctagcagaatgactcctgtgctgatgaaacaagaacataaatgcaagactggcctatctattatagctgtaccatttagcatgtacgtgtgtgtgagaatcctcacagtaattacattctcacagtaatttccccttgaatggagagggtcctataaaactgccccccgatagtgtcagtctctcttaagaatcatattatcgtattactatttgctagagtcttatctattctgggctaatccttttctaatcctttctaatttaattatttaatccaagttattcatgcacattgtttaaagaattaagatttccataaggattatttaaaacaaaattaaaccaaacaaaacagctgtcctctatcaaaatccttgcctgttttctgctcctcagagaaaatcactttaaatttgtttgattgttaattttagtatttacctccatatctctacttaacatggttattgtcccacttctttgtctgggggaggttttggtattaacgattatggtcctatggaagaggattttgttctctttcactaccacttcttgtgctccatttatctgaaatgattgtatcataattatgataggacc

SEQ ID NO: 206067 - DNA, 1000 bp, Homo Sapiens
cctcacgcttcacacctttcccagcaccagtctcagcttcttagtgggcgttcagaggacgccagccaccccctgtgtgccttctcgcccctggcccccggccctcccagtggccctctgactgccctgcagcccagccttgagatcctggctcaggaagtcacagctcctgtagtgcccaggtgggtcaggggtggcagactccgctcctccagtacccctgcacatgggctcagcgcctgacagcatttgtgccactcagtgaaagacctgaccccactctctggggactttcagccttgcccaccacagaccatgcaactgtggactcgggatgggaagaaactgggaggggtggtctccaggagccaccagagggacaggcaagccagccatcttgcctctcagcctatccatcctccctagcccacaagcccagggcagcagcctgggacagtcccttctggcccctaggggcctctcaagagcctcaggatggcctgtccaaacagtccctgcccagttcacaggacacatgccccagcccaaaggcctgtttccctcatgaaaagcttagcatatccgagcctgaggggccattccttagaggttagcctgtccaatccttcactggacagataagtgagcagagaacccagagaggggctgtgacttgcccaaggctgcagaatgaggctctggcagaaccagagctggaaggcagatgtctgggctgccaggccccatgctcccttgcaggcctttggtctgatgggaagcagacccaatcaaggtgacaagccctcctcccatgattcccaaaggctaattcatcctggaaaccacaggtgtggtcaacccaacctaaggtcaggcatccactggccccagctgtgggatgccgcctgaaccctgggacctcccaccctaccccttgcccatgagcagcgccccaccccctccctgagacggagacagtaggagatgcttccctgaattc

SEQ ID NO: 206068 - DNA, 1000 bp, Homo Sapiens
ctctgtggaccaggctagagtgtagtggcacaatcctggctcactgcaacctcctcctcctgggctcaagccattctcccacctcagccccctgagtagctgggactacaggcacattccaccaagcccagataatttctgtatttttttttttttttttttttgtagagattgagttttgccatgttgcccaggcttgtcttgaactcctgggctcaagtgatccatttgctttgggctcccaaagtgttgtgattacaggcatgaggcaccagcccatctttccttgttatcaggccaaaaccagataatgtgaatgctcagctgatatccggttcttatgaaggtgtagtatcttgcaaggatagttgtttaatctgatgttcctgtgactgttggggggtaaggggaacgattgctggagggttctattcagccatcttgctctacctcctgagcaatatttctagtctgagttcttaaaaaaatgccaaattgtttcaatactgtttcttgaaaagactataaataaccattaaatttctttagcacctttgtcaaaaatcaattgactgtgtgggtctatttctggtctctgttccatcccgttattcttttgtctgtccctttgccaatacatatcatactgtcttgattactgttgctttataataagtcttaaaattaggtaacatatggtcatacaacttggtaaatttattaaatcgttggattgtatacttgaagtagttgaatcaaataatatgaaaatgtctcaataaagttatatattaaaaatcaggttgtgaacttttccaactttgtttttgtttttaaaaattgtttttgggtaaaccatcaaggtgactgactagagaaacccggcatccacctcctccacaaagaaggatcaaaacagtgagtggtaatcacatattgaatagataattacatgtcaaatatagaacctaagaaagaataccagaattcagcagggaaa

SEQ ID NO: 206069 - DNA, 1000 bp, Homo Sapiens
ttgaaatccaagtccatcctttgaaatgttagcgggaagactgaggattgaaatgtgtagatagaaaaatcacagaatttaacttaaagtacatgaaaaaattccaatgaaattataaccattaatatccttaatacataaaatattcatacaaatcaataataaagaatccccatgactgcaataaataaataagtaaaggtccaaaataaataatttgtaaaaaaaaaaaaaagtttaaaatgttaaatcccagtagcaatcaaatacatataattcaattcaaaacactgaaatgacacttgtagtcttttaaattagtgattttaaaaaaacaaaacaacaaaaaaacagaatattggtaagagagcaatgaaaaatgagttttcatacactgtgggaaaataatttggtaccaactatttaaaaagcaatttggcaatactgtatacatcaagagctacaaaattaccctttgactaattttacttctcataaattatcctgaaaaaaattcaaatatctggaaaagctttagttcaaagctaatcattacaatgttatttgtaatgttaaatatcagaaataaatgaaaattactaaaattgaaaaacagttaaagtttacttcatccttaaaaggaatatttcacagagaatacaaatagaaatacagagagactgtgaaatagcacagataaatgtctaagctttaatgtaaaatgaagaatatacatatgtaatggatcaactataagaaacttaaaaatatgattaagaaagaaagattaaacaaaaataccaaaatttcaacaaagattatctcttgttaatggggtttgactatttcttttctgtgtttcccaaatttttatgatgaatgtgatttattctattttaagagggaaagaaaatttttttatgaagaaaaattgaattaaaataaatttttatggggctgaagaaaaggcctctataaatgtgacttgattgggaagctt

SEQ ID NO: 206070 - DNA, 1000 bp, Homo Sapiens
tagtcaaatatgtacatggagtggccactgagtgccaggctccggggatgcaagtgaatacaaggggtggggagggcatgggtcttatttcatggtcctagcggtttagatgggaagacgactgaaataactaactaccaataacaaatgaaaatatggctaagtgccaagtgctgtgagggaggacagtgggcaatgggagctccagatggggaccaaccgggtgtgggttctatgtggtgaaagttcacacacactcactgacgtgtgaatatccacggagctttatagccatagctacacccttaccgtcactccctctctgcatcaatctcaggcatttccctaaaaatgcactcccaagtccagggttaagccatgttttccagctcctagaagcagtgctggcagcagcagtggttgggtccatagtggtggtcaaggcaggacccacagcaggaagactctggtgctacagcagcagcagcaacgtggttctaatggcagcagcctctgtgatgaactgaactccctgggtgcatcattttgcctttttctccatggcctgaggagcagtagcaactctccgcagttactaatctgtggtttcccttactgttctccttatgccatctagatttttcagtcaactccccaaatagaattctctctgattgaaatatgccatctagatttttcagtcaattacccaaatagaattctctctgattgaaatctctggcatgtttcagttttcctgactggacactgacagacacagggtgcaaagatgtctaagaggtggccgtgccttcatggtctgctgaggacacaccctcggccttcccagtggtgacatttgagttctcttctcacttcgctgagagcgacggggtaaagaagagaaaccccttcactatccccaactaaatgtgtcctagcttgactcattgtggggactaagagctttctctcactaaatgtaggtatcccaaagctt

SEQ ID NO: 206071 - DNA, 1000 bp, Homo Sapiens
ttttattcttagaagatgagactaaagaataaagattagtacttttataagcccatctgaagatttcaaaaaattttataagcatcattttatttatacctgcaatgtactcaagactccaaagagttattttacccaatgaaagcaagtaagtacctcagggttgaaataattcagttttgaagctggaaaaaaaatctttgactcatcataggtgtagactctcgctctaacatatgttctttaacttttcagagcatgcagcttttaacagcaagtagaaggactggctagagtcagaactccaaaactatgcatgttaaaatcttgatgctgctataaaagctgtgtttttatgatcttcactcacttattcatttatacaaaatgataaggagagattctagataagatacttttcctgaaatgaaacattatggtttctaagctatttcaccttctgagtagcaatttttcctttttttcccccccatttctttttttaagcagatatgagggcaatctgtctttgtctcctgaaatcccattgatcactagagttgatctaattaatcttgtcaatcagatggctgttttgtgttcagaaagtccaacctaaaggttgacaaatgaagagaattatgaccttgataaaggaggacagtcctttggttaagagcagtcatcattgaagaaacatttagcaccctctgtgtccttccctgatcccatcttcttccttttcctctggagataaccagtatacttaatttagtgtttatcatttcctagcttttaccactttgcattcctaaaaataaactgttcaggtttgcttgttttatattttatataagtggaattgtactatatgtacattcttccacagcttgctttttttttttaaacacaaattgtgcttattagtatcattcatgctcctgagaattgactgtgttgatggatgtagatataattcatttatttttgctgttgttta

SEQ ID NO: 206072 - DNA, 1000 bp, Homo Sapiens
cattttgaaagcatcagggccgtaagtgaatacacttttattcttttagtaatgataactttagaaattttgaatcaaatgtaagaccttgcttagctatgaagtgctaagaaaaaaaaaaacagaacatcgacttgataaaaacaattactttctgccattattttatgttatgtcaaactgaaagtaatatgtaattattttaaaacccccagtaaaaaactgagaatacctcattatttaaatctggtttctttgccacctttgtttaatatttacacaatacttctcaaaagttatgttgctacataaagtggcaattcattatttaaagcatcgttaacagtaattatgataaaataaataaataaaatgcctgcctgtccttctcctcaagaacagtaatttttggagtttctttaattttttacaagctatagagcttaaacatacaactcgtagtcataaatgcacattagccttaagtcagtattcaaagatatactcatttctgccatttttttcttaatatcttcttttatattgtgtacctacatggcaatcaaccaaatggagtgggaaatctcttgaaccaaatcctacagaaccatcacagtgctttaactctagagaagtgaaaagaggccccttccccacatggacttatttaaaatgtaatagagtaacataatgagagagggaggagaaagacagatggaactggggtggcagaaaaagagcgactttggctggaatcttccttctatattggctaaagagatggagccaaatacaatttttgcctacaaattggatttaaaatgctgttgcatacttattagtatcagttgatccatcctgaaacactttgagaagcattggaaaaccatagctttagtgagcccaagtatttaaactcagtgtcaattggattttattttaaaggttatgggatacaaggaaaaaaaaaaaaaagccctaaatccaaagtcaggaattc

SEQ ID NO: 206073 - DNA, 1000 bp, Homo Sapiens
aaatgggggcaatggtacccattacattaggaaaattggaactaaaatcctgaatcccttaggacttcccaataccaaatgagaaaataatcagtcataggcataatgaaaaaaactccatttgtcttcctgtaaatgcttttgtctacattaaatgtaaatatacctagaagtataggtggctttacaggctaacattttctggaggggatttgtggacaccaagttgagcatgaaatcctgcctcaaatctatcacatgggaaaccaagagtaagagggggcgctgcagatgtgggggagctctaatgaaggaaaacaaggattaattttaatcatgccattactgttttctgaatccagtatataagtgattccctttccctgtttcccataaaatggcttaatctcactgagaatccggtggaaagaaatgtttaatccagcattgtgagcatttttgtgtgtgtgttttgtttgtttgttcattttttagtggagacaaggtttctccatgttggccaggctggtctcgagctcccgacctcaggggatccacctgcctcggcttcccaaagtgctgggattacaggtgtgagccactgcacctggccattgtgagcacttgttaagcttccctgaggaagtagctgagtttgatgttcagcttaatgtaactgagctcatagtacatagaaaacaggttccctatgcaagtctagtaggatacaggattctccgaagaaagtagttgatgtctagtaaggaaagcaaagagctaggagctctgaagaattccttgcaatcaggcaaggagagcaggaacgccctcaggtgatgtgcatatctaatgcagagtttgattgaaagtaaagagggagggagaaggaacacttcaaagttgagaagattcaggaaagaaggtagaggacatgtatagaccagtggctctggtggcggtagtgggatatgagcttgggaagtcatacagggctgaattc

SEQ ID NO: 206074 - DNA, 1000 bp, Homo Sapiens
ctaagagtccagagagaccaaggtagttagaatgtccagggcaaagtagtaaaggagagaacttcacagagaactcctgagatttgcagtgatccatgcatgcttgtgaagaaatatacaaggctaagggaagcaccaccggaactagaggaaatcatagctagtgctcacacagggccagaatagtgcctcttccgaccagtcagtctggaaaacctcatgcttcacaagacattgagtacgtactccgaagggttttgcctcagtagtggggaatagtaagccctagactaactgctgctctagtccttcctaacaaatcttaaaagaaataccaaaatgatcaaactgtttccaagtgacttaactgcatctcagaacaaagtgcaagaatatttatagtaatacaaaaatgtccaacactcagcaaggtaatattcataattactatcatcaaataaaaaattaacaggcttgcaaatcaattaaaactggcccaggattgacacagatgtaaaaactggcaggcaagaacattagcacatttattatagctgcattatatatgttcaaaagttaagtggagacatggaagatataaaaaaaagactcagatcaaatttctacagatgaaatctctagacttcatttactgaagtggacttcttccactgaagtcttgaactcctcaaagtcatccatgaagactggaacccacttcttccaaactcgtgttaatgttgatattttgacctcctcacatggatcacaaatgttctaaatggcatctagaataatgttcctttcaggaaggttcttaattgactttgcccagatccatcagaggactcactatctgtggtagctattatacccttacaaaatgtattttgtaaataataagacttgaaagttgaaattactccttgctttatggactgtagaatggatgttgcgttggcaggcatgaaaacaatcttgtacatgttcatcagagctc

SEQ ID NO: 206075 - DNA, 1000 bp, Homo Sapiens
tttgttccctctctcccaatgacctattgatgtgataataaatatacatgtataaagaatgaaaccatggtaatggtagaaacaaaagaggatgtcattgggatagcaaaggttttggcacagttctccaagatacaaagtagataggactgttttgatgaataaactaaagtagagaaaaactgcagcctagaacacaaatagaaacggctgcaggtagggttcctgatagaaccatcagaggcttcaagcttggaatttgccagtattgagatcaagaattaagtagagcaataatcagggtaattgagcctgttggcccattctccttcttgtgtgcatttggagcagctttctataacatttgctgtagctgctttctaaacataatggattcctgacctgcttaggtcccacggtataagtgtttgacatggtagaaagttgcagtagaacttaaagtgactggacttttatcgccaacccagaggaaaacatgaaagacaactctactcgagagtgaaatacctaccccaaataaaatcccagtgtgaagctcccttgacagttgcagtaatttgaagtaaaagtataccttctcccagcatatatacccagaaggaaagcctagttgtcaacaggaccagctcacttatactaatggcactaaggggtgaggctttttatggaaataaatctcatagctccagaggaaacctatgccagttgtctatactaatcagtctaatcacttattcatgggtttgaaaggagcactaaggatcatcagatatttgaggaaaacagcatgaatgagacctagttgaataaacagaatagctgacccaaaataaacagacaatacaaagaatggagaacttttaaaaaatcaaattaatatcctcagattttccttccagcctctgcctaagatgtaggtgaaaggagtttcacttctaccctgagaataaagaaaaaaaaacactggataatatacaaa

SEQ ID NO: 206076 - DNA, 1000 bp, Homo Sapiens
agaacatctagcaagccaaggaaatccaggggagctgtaaggacagagcagaaggggtgagatgaagagaaggagataagatcagagaaggaatgcaaggcaagatcctgtaagactttatagccagacatatattttaaggtgagtattctgtcagctatgcagaagataaatgttagaggaataaattacttggtataattttggttctaagcaatagaaattgcaacaaaaaacatattaggtcatattacaggatatgaaaattaaaagcttagaacagattagacaccaaagaagaagtataaaggtgtaccagtagaccatccaaaataaagcacagaaaagaaaatgaaagtgtgaaaatgttagcagagcagcatcgacctatgtgatctaacatatgtttgagtccaggaaaaatggaaaaacagaaaaaaaatgataaattaatggacaaatttttttctaaattcaattaaaatgataagtccaagactcaatggttttagcatactcctagcatcatagagaaaaaccacaccacactagttaaccacgttgcaataaaattgctgaaaaccagtggtaaagggaaaatcataaaagaagcaaaagaaaaaagacacgttgcatacgatggaacaaagttaagaattaccataggcttaaaataaattaaaaatatacctcattacaactccatgaactagataatatatgcattttacaaataagaaaaatgatgtttgagctacatagtaaaatcctgttgatctgaacagtattattcagcaattctatgtaacattagagattgtaattggaagcactctatcaccttaactccaaagttcacaactaccataatttgatgaaggtaataaaaaaaattactacagagttgatgtcagaacccttgcatagcttgcttgccagaaaatgatggagagatatctttaaactatcaaaagagaaaaataaagtcaacttagaattc

SEQ ID NO: 206077 - DNA, 1000 bp, Homo Sapiens
atttcccccgggctgggcagaggcccaaattagcccatgaggccaaaggcaataaataatccctggacctctgaggtcagggccctgcctcctccgcagccaccctgacctgcataatgggaccacaggcagttatgattcatgcacacactgcctgggctcctgccagcccagtctgaagaagcttcacagttggaactggataggcctaaaaatatggccccccagggacagcttgggccatgctctggggagcctggtggggctagaggcctagagagagttcttagaatcagtactggaaacacagggctgattcagccttcttctgtctgcagctggagccccagggagaaatcaacagccataacccaaccagacagagcaaaaagaaatgagtttaaagcaccagaaggaggacttagataataataatgcagtgagtggcttgggcagcaactgttgcaataatatcacctcccatttgtacaggactttactgtgcacaaaatgctcttacatatattatcgtatttgaccctcaggacaaccctgtgaaatagacaatctttgccgggattttcaagtgagagagtttggaactcagagagattaatcaattcaccagaagtcacacagctagtgagaggccaggtcttttgactttacaatgctaaaaggggatctacctgaatgaaccagaggacatacagagctaaagaataaagaaatgtcatagttatcttttaagaatagaagactccccactatgtttggaggaagttcagatagagaatctggctggggaggaaataaaatgactccccaaagcctcaagcttataccagggcaggtgggagggcagaagggctgtgcccatgaacaccagagtgtatattttgccttcaaacacataatctcctagcacagtgacaatagagacttggcttctatttttagacaccagtggatgtggaggatggggtcaacaatggaattc

SEQ ID NO: 206078 - DNA, 1000 bp, Homo Sapiens
caaatccatgatctgtcatttaaccctattcatgtcctggttaacatccattcatcttagatggggataaagagaggtttccataaaccttcatggtgtaaaatcagccaggcttaaacaagtgagcatatttaataccaatagtatcagattagatttgcccccaaggtagccttatttactcggagtagactctgaggtccatgaatgggatcagtatttcctagtgataacctattgtttctcaccgagaacataagaaatctttttaggtgacaaaggaaaggacattgaaaaatattagttgtacatttattttaaagcttattagacactatatataacaaatgaaatgtgtaatttaatagatatttttacataggccctggttaggttaaagcaataaagtgacttaaagaaaaattctaaatcaggtaaaaatacagatgatgcatgaacatggcaaatttgtgaaagtggtcctcaaataactgaatttaggaaaaccctgaggggtaaatggactccttagattgtaagtagaatatggtgaatatgtgattgtattcatcttttccaggtctatagctatcaaagggtttttaaaggggccaatgatccccaaaaggttaagaactgctgacttcaacggcatgagtcaacattaaaatacaggtgcaatgttactcctcacaggcatccaaaataattcaacctccatgcagagtggctactgaataaattattctaggaatctcatgtattcgagtgtctcttctttcctcatggtcatcaaaatatggtgctacttgtctgcagagagaggacggctgtggggggcactggagttgagccatcaacagcactgggcaatgactgatcagacttcagggcccagtgactgagtgcttcaggcatttgaggaatgaaactttttgttactgcatagctgctagtgttcaaggagagtaaagctggtaggaaatgatgtagagaattc

SEQ ID NO: 206079 - DNA, 1000 bp, Homo Sapiens
acatgccttcttcaactccacttgtcttcttcctgaaccctcttacactatcatcttatactggtgattttttttttaactctgcaaccccatgcttcaaataattgctaccggtaacgtattttatctttgctggaatgtctgaagccgctggaaattatagaacttccaactctgtcatgtcaagtactatgaaagttaataggattaatttatctttaataaaagtaatgtaaagtaaatgtttgttttaggaaaacattcctgagagttgtgttttaatgagaacttggtcaataatatttgtttctggatagaattgtaccatttttttctttttttttttttttgagacggaatctcgctctgttgcccaggctggagtgcagtggcgtgatctcggctcactgcaagctccgcctcctgggttcacgccatcctcctgcctcagcctccagagtggctgggactacaagagcccaacaccacacccggctaattttttgtatttttagtagagacggggtttcaccgggttagtcaggatggtcttgatctcctgacctcatgatctacccgcctcggcctcccaaagtgctgggattacaggcgtgagccaccacgcccggccttttttttttttcagttcttttatttgcctagcatgatttgctgcttctttgagggcagttttgaaccttcggtttcaatgggactgggtctggctgatgactaacagatgtgtgtctgagaacagataaggggaacataatcgctcaactcctagaaatccctgaagatgaaactagatctaaagcttaaacaaagagcaatttcctacctaccattccttggagaactgatttgtgagatgttagcatctggctgaatacttagtagcagctaatttcagggaatctaaagccagagagattcaggttgaaggacttgtgggatagtttcataagtagcataaaagaaatatgatcagctagaattc

SEQ ID NO: 206080 - DNA, 1000 bp, Homo Sapiens
aaacaaaaagaaacattgaggctgggagtggtggtggctcacgcctgtaatctcagcactttgggaggctgaggcgggcagatcacctgaggtcaggagttcaagaccagcctggccaacatggcgaaaccccgtatctactaaaaatataaaaattagctgggcgtggtggtgggtgcctgtaatcctagctacttggaaggctgaggcagtggaatcgcttgaacctaggaggcagaggttgcagtgagccgagaccacgctgttgcactgcagcctgggtgacaagcaaaactccatctcaaaaaaaaaaaaaaagaaagaaacattgaatacatagaaacaatgaatggaatggtagttaccaggagtgggagaaatgggaaggtgtaagccagagggtacaaaattactgttatgtagcatgcgtatgtctggagaagtataatattaggactatagctaataatattgtgtactggaaatttgctaagaggagattttagaggccagatgcagtggctcatgcctctaatcccagcactttgggaggccaaggtgggcagatcacctgagatcaggagtttgaaaccagcctggccaacatggtgaaaccccacttctactaaatatacaaaaattagctgggcatggtggtgggcgcctgtaatcccagctactcgtgaggctgaggcaggggaatcacttgaacctgggaggcagaggttgcagtgagccaagatcacgccactgcactccagcctgggcaacagtgcaagactccgtctcaaaaacaaaaaaaaggctgggtgcggtggctcacacctgtaatcccagcactttgggaggccaagacaggcggatcacgaggtcaggagttcaagaccagcctggccaagatggtgaaacttcatctctactaaaaatacagaaaaattagctgggtgtggtggcacgcacctgtaatctcagctatttgagaggctgaagcagagaattc

SEQ ID NO: 206081 - DNA, 1000 bp, Homo Sapiens
ttctaatttggtatttggaagtcttcattatattaaatattattttccagcacacatgaaagaaatgtaaatgtcattgtagtttgacactgaattagatggagatgtgtgtctctaaaaaacctactggaataacttctgaaatatactgagacaaaaaaaaaattagaggtttcataaagatgtgatatatacaatttagaattcatatagaaaatgtaaaacataaacgtctaaccacctttcctttcttcctcagaaatgtcatgaattttctggttcacgaactcagcataggatgcggcataccacacctgcaagaagcaagtatatcatcaagaactggggacatcaccagatgttctttgcatgcttaaattatttctcctgcttacaggaaacaattcaggcttttccacagcccattaacaatggaaaaaaagatcatgctgtgagctccccttgcaatacctttccagcagatcagtcaggaagttcatttgccaagacgcactgcctgttttctttttcagaaaatggtttctgttactagaataacttcacaagaattataatcatagtctcttcaactaaataaaacagcctcccctgatttcttatctatatttaaacactggtttttacagggttgtagtcatagtggttgccaccaaacagcccttactggggtcaccaatgacaccttccaaggcaaccaccttctcccgcccacccactggctacttctgctcactctgttggcctcttttttttttctccctaacttctaaatattggtgtggctcaaagcttagtcagagtgtagggacttcttattttgacctcaggtggccacattcatttccaaccaactctatgctaatgaatcccaaattaatatctccatcccagactctctctgttccctctgagtgtgtttgactggatgttttagatgtctcacaaacagatcaaactcagcatgtccagaatggaattc

SEQ ID NO: 206082 - DNA, 1000 bp, Homo Sapiens
ctaaatctctcccactctaggttcccacactgcccctaatcccgctcgaagcagccctgagaaacatcgcccattatctctccataccaccccccaaaattttcaccaccccaacacttcaacactattttgttttatttttcttattaatataagaagacaggaatgtcaggcctctgagcccaagccaagccatcatatcccctgtgacctgcatgtatacatccagatggcctgaagcaactgaagaatcacgaaagaagtgaaaatggctggtttctgccttaactgataacattaccttgtgaaattccttctcctggctcagaagttcccccactgagcaccttgtgagccccaccactgcccgccagagaacgaccccctttgactgtaatttttctttacttacccaaatcctataaaatagccccatccctatctcccttcactgactctcttttcggattcagcccacctgcacccaggtgattcaaaagctttattgctcacataaagcctgtctggtggtctcttcacatggacacgcatgacagagaacttgttaggacttaacatcaggtgaaaattatgaggaagatggaaaaattaaagagggtataaaggtcttaatctggaaagtatggtagtatcatttccagaaaagggagatgatttttagatataaattggtaacctgactttgaacacattgatttcaattagagtggaccatctcagtgaaactgtctactaagcagttgcaagtggaggatgggtaaatagtgtaaactctaggggaacagaagaatgcagaatcttttgtgtggaaagactcatcttttgtgggtaaaggaggaagggagccattgaaggagaaggaggagaggtttgatatgtgggaagagaagtgacatagaaagtagcatcacataagtcaagagaggagatagattcaagccaggggatgggaagtggtcaaaaatgaggagaaaagctt

SEQ ID NO: 206083 - DNA, 1000 bp, Homo Sapiens
aagtgattctcctgcctcagcctcccaagtagctggaattacaagcatgcaccaccacaccccagctaattttgtatttttagtacaggtggggtttcgccttgttggtcaggctggtctcaaactcctgacctcaggtgatccacccgcctcagcctcccaaagtgctgggattacaggcatgagccaccatgcccagcccctttgcccatttctgaaatggactgtttgggttttttttttgttgctgttgagttgtaggagttcattatacattatgaatattaacctcttatcagatatatgatttacaaatgttttctctcattccattggttgccctccactctgttgatagtgtcttgtgatgcacacaagttttccattttgatgtagtccaatttatctattttttgttacttgtttttagtgtcatagcctagaaatcactgctaaatccaatgtcacgaagtttttctcatatgtatttcctactaattttttagttttatttcttactgtaagatctttggcccattttgaattaatttttgtatatggtgtaaagtaagactccaacttcattcttttgcatgtggatatccagttttcccagcacgatttgctgaaatgcctcttctttgcccccactgaatggtcttggcatccttgccgaaaatcatttgaccatagatgtgaaaagtttacttctcagctctctattccattggtctacatgtctgtctttctgacagtaccacactgttttgatttcagtagcttggtagtaagttttgaaatcaggaaacatgagatcttcaattttgtttttctttttcaagattgttttgactaattagggtcccttgagaatccatatgaattttaggatgagtttttttctagttttgtaaaaaatatcattaggattttgacagagatgacaatgactctgtagattgctttaggcaatattaacatcctaacaatattaaagctt

SEQ ID NO: 206084 - DNA, 1000 bp, Homo Sapiens
aacacattctggtgctattggaccttgaactaattatattaaacttgaaaaaaaaactactccatgtaaatcttagattctcttcattagaactgaacagcaaatctagctctgatgtctagtattatcaatagacactagaaagtattctctactcacaagcacttttaagctattttcaaccaccttattaacatacggttgagaaagctcaggttattttacactaatacagtagcgtataaccacaatactacttttattaataatttcctcttagactcataactgagaagaaaaaatatgtaacatcccttattcacaccttcatatgggtgtttttttaatacatttttccatgaagagctgccaaaagaaacaaaaggctccaaagaaccacacactgctccctggagcctttcatgaggccgctgagtcctcatgttcatcgacagggtagctccaagagtagtggctgcaggagctgggcacttgccttgttacacacctgctacaaaggcttctacagttgattgtacttcagaagaaactgatacatctctcaaataatcacaagataattctggcagcaacagcccacttgacaccaagctggatgaatatgagtcttggatttctgaagtgaagacctccctggaagtagaacagggagagctgaaaggttgagaatactgtttcagagatacctaagcaggaaacccaaccttaatacatcaaccatttttctaaaaggatttttactcattaaaaatgagaaaagatattctgaaatttacactattactgttactctgaagatgcctaggtgcatttctacttttatttttacataggcatttgatgacttagcacccagctcacagctttaaaaatatacaacgttgcttaagtcccctctgcattctacctacaacagaaaatgttacttaccacatagaatacctttaaaagtaattgaccagaagagcactagaagctt

SEQ ID NO: 206085 - DNA, 1000 bp, Homo Sapiens
agaatagtagctgaagctgttatttatatagaatgttacctgctgtcatttatacaaagatccattctataaattcctattttagtttactaccagaaaagaaactgacatctcctctttccctttttgtctatctgtgtatatgtagaaataaaaaccttataacccaataaatttccattttgccttatttctgggtgattttaacactcagttgtcttattttgcgtgatgatttttgggggtggggggagcaggatggggagaggggggtctctgtcatactggctggagtgcagtggcatgatcatgactcattgcagcctcaaccctccagggctcaagtgatcctcctaccccagtctcccaagtagctgggattacatgcacgtaccaccacacccagctaatttttcttttttgttgttgttgagatggggtcttgctatgttgcctaggctggtcctgaactcctgggcttaaacgatctgcctgccttggcctcccaaagtgctgggattacaaatgtgagcttctgcatcccgccaatgctgttctaatgctagaactcatttcacaagcaaagaagttcagcagtgagctcatgcttgtggaattcattggtgttaacatgttcccaccatcctgaaacagcttgcatcctaggtctgtagtttccattggggttttgggtacttctagattacgtctcattgtggaggtggggtttcacaagactggaagacttctgtatgaaaacatgtcagctccaaggcaatgacttcaaacagcatggtactcccccttgctttacttagtgtctatactgcacgtgttcaggccctacttccttgtgttgaaagtcgcctctttgacaagttgggttgtttcccaggcctttgcagaagctcataggtaaaagcttgcaactcatctgccagctgggaaggccgaaggaatgggtagtctttgcctgcccacatcctcaggctgaaagctt

SEQ ID NO: 206086 - DNA, 1000 bp, Homo Sapiens
ctgatctcaatctcctgacctcaggtgatccacctgccttggcctcccaaagtgttgggattacaggtgtgagccaccatgcccagccagggttctcttaaatgtaatggaaagaggagaattggaatggcagagagagagagaactaggagcctgcatgaatgaatcaagttgagttggagagaaactgaatttataggaaagttaaggctctgagtttggaggccaagcagggtgggggtgtgcaaacccgtgagaaggaaagccgggcttcaaaaaatagctgctccttcttgatagatgcagagaggaaacaggaaagaccgggggccatgcagtgttatttgtagcacttgaatagcttggctcttagagtcccaaggcctccagctggtgatccagagatgccattagagggcaaaagtgctcgctgctccctcgtttgtcaccaagaagacatggtatggccctggtcttaaggacaagttagtcaattgcttattgtatatcacgggatgaacgctgggagagaggaaacgcagggtgtgtaggaagagggcaaaattggctacatctgacccaccccagagatgaggaaggcttccaggtgggaggtgatgccaggaggtaaccaggtggaaatcaccctcaagtagcagggacaggtgtgcaaaggctcagagggagcttctccaggatcagcagggctcaattgtagggtgtgagcctgtcacagaggctggagaaataagcagtgccttgctaagaagtctgaattttaacctgaagcgacatgggagctactgcaggctggtaagcaggggggtggtgctggttggattgcaatgcagagaaaccctgggttggcctgcgtctgatggactggagagacccttgaagaaatcagagtacagacagtcctccagagtagaaatgaggaaggtgctgagaccacagcagtggggaagagtgtgagagggatggaaattgagatgaattc

SEQ ID NO: 206087 - DNA, 1000 bp, Homo Sapiens
tcagatactgtaattgcctttgggctaatgaatgatttttcatttcaaatagtccatacaataaagttacaccatgttcaaaataaaaatatttttaaaagcttctatgtggagtgccaaggaatagagtaagaatcttctgcattatttaaatcatattttacttaagagttaagaatacccacttgatctgttagtctctggattataacatttcttccatccattctttcaactaaaaatgttttagtgcctgtcatgggccaggcatggatccagaagataaaacattaaacaggaaacatatctttcctgctttcacaaagctttttgttccatggaggttacaggtagctaaataagcaataacacaacagtgtgatggattagtgctgtggtttgtgcacttggggaggcgatggtgagtggagtaggtagggaatgaacatggagaccacataagtgatgggtccaatctaggcctggtgggtcagaaagagcttcctgcaggcagtggtgtctacactaaatcggtcttaggtgtaagtattaactgagcagaggggagggtaaattgcacttctaaaaagcgtggcttctaaagtgagatgagtgtctttaaccgtattccgtttaaactcttctttcaataaaattgtttcttatagctgtgcttcacaagctgagagacttgattctgagcatataagattaatttttgtatatctagtagcatttatcatgtttggtttttggccatcttcgtgtgaattgctaatgatgtgaaaatttgcaaagtattaaatacaatgaaaaagaaacagccggatgttccagatgttcattatccagtcaaattaaatttttaatatatataatcttaacctttttcaaacaaaaaaaggaaaaagaaaaggtgatgattcaactcttactaccttacatcaatctttgctttgtagactacattctctgaggcaggtagcttcctaaagaattc

SEQ ID NO: 206088 - DNA, 1000 bp, Homo Sapiens
atgaatatgctttctccctgactgaaagctatgtgagggcaaggagtgggacactttttacttgttatagtccctctaactggcacacaatttatggtcattaaatactggtatttgctaaatgaaccctggtaatttggttagagtccagcctcctcacgagtccagcctcctcactctctgtttagtgctgcaggtggaaggtgacctgagccttggaaagtgtcagactcttccttttaaacccctttctacagaggaagaattctcctgcttgtggcaggaatgtggcttttgttctctggacagttctgctgacctcatccgccatgtctacttccactgctaccacaccaagctgaaacagtgggggctgcaggccttgcaaagccaggctgaccttggcccctgcatcctggacttccagagccggaacgtcatccctgatatccctgaccacttcctgtgtctgtgggagcactgtgaggtcagcaggcagtgccagtaattggggtggaaggaagctgggggtcttaactctgatgccttgtccctttcagggatgccttatatttccaagattcctgctagtatctctcttccatttcttttgctcttttaaaatttgtttattttttacacacaggctcttgatctgaagcccaggctagagtgcagtggtacaatcatagctcactgtaaccttgaactcctgggctcaagcaatcctcccacctcagcctcccaagtagctaggactacaggcatgtaccaccatgccctgctaacttctaaattttttgtagagacaaggtctgggtgtgttgcccaggccggtctcgaactcttggcctcaagtgattctcctgcctcagcctctcaaagtgctgggattacagggtttagcaaccgcacccggccactcctccatttctgtgcagtgcctttcctcaaaatttcccatccccatcaagttaatttgggagagagccaagaattc

SEQ ID NO: 206089 - DNA, 1000 bp, Homo Sapiens
cttcggcaatagaggccccagatgtctgggtgcaaaagaactccatagcaccccgaccaacatggtgaaaccccgtctctactaaaaatataaaaattaggccgggcacagtggctcatgcctgtaatcctagcactttgggaggccgaggcaggtggattgcctgagctcaggagttcgagaccagcctagggaacacagtgaaaccccgtttctactaaaaatacaaaaaattagccgacgtggtggcatgcgcctgtagtcccagctacttgggaggctaagacaggagaatcgcttgaacctgggaggtggaggttgcactgagccgagaccgcgccattgcactccagcctgggtgacagagcgcgactccccctcaaaaaaagaaaaaaaaaaaaaatatatatatatatatacacacacacacatattttagctgggcatggtggtgtgcgtctgtagtagtcccagctacttgggaggctgagtcaggagaatcgcttgaacctggaaggcagtggttgtagttagctgagaacatgccactgcactccagcctgggcaacagagggagactctgtctcaaaaaaaaaaaaaaaaggaactacataggatgaacatcccagatcagggaatgttgactgtcgacagtatcagtatctacagtggctactgtctgatgtagaaagaaatgggatcaggctaggcgtggtggctcacgcctgtaatcccagcactttgggaggctggggcaggaggatcacaagttcgagaccagcctggccaacacagtgaaaccccgtctctactaaaaatgtgaaaattagctgggcatggtggaacatgcctgtagttccagcttgaacccaggggtggaggttgtagtgagcctagatcacgccactgcactccagcctgagcaaaacagtgagactctgtctaaaaaaaaaaaaaaaaaaagagagaaatgggacctccgtcttagactgaagaattc

SEQ ID NO: 206090 - DNA, 1000 bp, Homo Sapiens
agcggagcagtggaggatcatgtatttattgagcacctactatgtgccaggccctaggaggggctcccagaggtacatgacagagctccaacctgaacccaggtcccaagcgcatcatctgtcctcattctattattgtgtgaaaggccgcgggaccctcctgcaaaggtgaaacgggagaaaggacggagcttcagtgggggcttgtggcccagggttctggattgggcccaggaagaggaggagagaggtgggtgccctataccttgcaggacccagccgggccaagtcagagcctgcaggggctgactcaacaggctgactgtgcctgcccgtccatcacaatggggaatgggccctccatgagcctgagacctgcaaatcatagaaattaagagcaattagagagggaaccggcagcccctggcagcacttccggccacagaggcagttcggcaactttatgggatgtttcctcccattttgtggtccagctgggaggcagaaacaagccagctcagcacaaggcctcctcaaggtgctttagtgcaacttgaaggtgggacccacagcccctccacaacctgcctcccgccctgccttcccatcctggggccctgtcccagcctcgccctgagggtttctttttgtctgtgcatcggctctgtcctctgcactagacctctggagagctgtgtctggggacctgcaagagaaagagaaacagtcagggtcaccttgacgggctgtggcacgtgctgcctccgctcctgtgttctctccctctgctctacctcacctggcccagctggaggggtctttccacttcctggccaggggcagctcttgaacaaaccttcctcttattccccttgccccctagggaagaggtggctcagcttgtggaaagcatgcaggccaaagtggtggagaccccatgggtttcaggtggcggcaccaggatggtgccattggctaaaggcaaaagctagaggaattc

SEQ ID NO: 206091 - DNA, 1000 bp, Homo Sapiens
gtgcctgaggacaagggggcatcctggagcggggcagactctggagccatcaaggtaatttcgggcctccccagggtgaagagagaagaaagaggacctttaccagagtcagcaggagctccacctccactcccctcaactcatggtctagatgaatgatttgagtgaggtgagggagcggaggagagggcatgcagaggggcggagaggcatgaaagacaccgaaggacaaagggaaggggcaagaaaccagaggcggacagaagccatgggcgaggagaaagcaaaagggtgagggttccagctggagggctgagaatgaaaggacgaaggggaaaagcagcagggatggaggttagatatcttgaaggacttccagatcccagggctattggaccttctctctatagggcatgggagaaatattcacccaagccatacaccagtggtgaggcatagtacagaggagctgaaatcagaaatgtgccaagattgcttgggcaacagccaacaaatgtcccggccagcaggggcaaggcagagttaggggagactccctgtcaaatgcaaggtgtccacgtgagacatcccgtgggctaaggggacaaatcttgtccagagtcatgaatgggaaccagaaacttctgtgaagagcagaatatgggcccctgggggacagccacctgcgcagcttcttggaggtcctggagtgtggttcttgggtaggaatgcagtccatttaaaacaaggccaggccagcagccttcagtagcttggatccactttcttggaattagaggaggaatggtccagcctctgaagggggcgggtcagttttccagctcctgccacttcatggagactgaagtctgttccagggagtgggaaacgcaaggagctctctggtgatgtttgagcatcactaggcaagaccttcaccagtaggctccttccccagctgccttccctccacactgtctgggatctccccactgaattc

SEQ ID NO: 206092 - DNA, 1000 bp, Homo Sapiens
gaaggcaaaaccacagttaagggagtacgattgtatttatccaacaatcatgtaataggcgtcctttgttagtggcttgtttattcatttggtaaataatcactatgcaccactatgtgccagacacggtcctgggcacttgaaacacaccagtaaacaaggattcctgacctcacggcccttagattctatcagactcaggaaaaatctgagaaagacaggatctctatcttcaggcagtggaatcgacaggctcacacataactatagcataatgtgataagtagttggccaacaatatggaaaaagaaataggaagcagtcagttctgctgggtgcagggaataggaaattgtgaaagattgcatagagcaaggtgtaaccacatggccctataaatcatccctagagtcccacaagtggcaaaggaccttcacctttcaaatgcctattttacttacgtatttctaagagaaaggacttttggaattggcagccacatcctgaagcccacctcaaagataccaagggtttctgtctgctggccagacaacactccccctcatagcaacactcctggaaaaggggtcagtggaaatatgttttctcttctcattgacagagtgagagaagaaagctctggcccaacatctggtgcactctgtgctggactgtattcttgaagctatgactgtatgaatgacacttcccttggggaaaagccctttgcccagagaggaaactgacaagagggagttgccagggctctcaagggctctcgtctcaggaaataactcttggacagaaatggattgctgctttattatttttttggagaaagaaaaaaagaacccgccctttttccacttgtagattgtgacacagaacagctgctagagacgtaaaccttctcagaagaagtaaatgaagtgtttaggtagtttttttagtagcgtttgttttttcttttcttttttggctttttggcaaaagagaattc

SEQ ID NO: 206093 - DNA, 1000 bp, Homo Sapiens
gaagttcaagctgcctgtgtgggagaccatcgtgtgcaccatgcgagaaggggagattgcccagttcctctgtgacatcaaggtgtctgtcctgtacctgtctgcggtggctgtccagccaagccctattcctattccctatccccagggctcctcctccctccaccctctgctagactgccacccgctttctttttttttttgagatggagtcttgctctgtcgcccaggctggagtgcagtggtacgatctcagctcactgcaccctccacctcctgggttcaagcgattcttctgcctcagcctcccgagtagctgggattacaaacacccgccatgatgcctggctaatttttgtatttttagtagagacagggtttcaccatgttggccaggctggtcttgaacacctgacctcaggtgatccacccgccttggcctcccaaagtgctgggattataggcgtgtgccaccgcgcccggcccacccactctttccagaccaccacaccagcctgctgatggcgtcctggcctccattccgccttcccctattagccagactgaggccaggggactcgttctcaaatgcaaacgacctgtacatccctttgtttcaaacctctatgactcctggtcactgtaaggatagagcacagggggtcctcacttcatgttgctgatacattcttggaaactgtgactaagagaaaaaacatacatcaggttttttctcagccaccgtcatttctctcagcaaaattttgttagaacattgatgagaagaaaaattggtttcgttatgtattgtttcgcctacagtcacagtttccaagaacctacttaggacgttaagtgaggacttaaaccgtataagctatagctgctcacatagctttttgggggctggcccctgccgtctcaccctcttactcaacctccctgcttttcctttccattccccttcttagccaagatcttccctcttccttcaaagctt

SEQ ID NO: 206094 - DNA, 1000 bp, Homo Sapiens
ctgcgtagggtgtgaagagagcagagagtaagtctgtttaattaccttagtctgaaagccagggaaggcctcttgagcaagggtttacctgagacaagaaggattagcagcagtttgaaattttattacaaactccacagaatatctaacctatttctttgtactggatttctggtatattaatagtttcccagaaaacgtatcctcaaatcacagttgatctgaaaggaatctgccattcggcctctctgtagttaatgaacaagagaacacaagtgctttgaagccagagcaagaagatggaaaaccgtatatacatctagcttgctaagcatttcctctgacaaactcctgtattggtttttaaaatgtatttcgtgttggtaggttatttggaaattcttctattttccaccgtgttttggtagggaatatgtgaaggagttgaagggtaattgctacttaattagatgaaaaatgagctgtgaggatcctactttattgctctctgtaaatttagccactgcatagatgagaacaataaaaagcctttcttgaattggtttctccattttagagaatttaaccatcagccatctttggaggcatggaagtatgctccattataaagaataaggtattttatttatctacacgataataattacaaatcatagtgacaatagccagtgttgtcattatgtcaaatactatctaaccaataccaacactgtccttagatgtttgagtttactcagttcttctgcacaatgacctctcatatgggaactactttcattcccactttacaggctagggatctgaggcataaattggttttaataatttgcctaaggtcacagagcttgccaatggcagaactgatatttgaaccctggcggtgtggccctagagctcttgacctttctgctgccctggtttatttggacgagtattgaacctagcctctaggtgaaattgaaaatcattaattaagctt

SEQ ID NO: 206095 - DNA, 1000 bp, Homo Sapiens
cacatcagtgcagtcttttttacattaactgaagaaaaatgggtgccttttaaaggctttcatttgtttgttttttgttgagatggaatcttggtctgttgcccaggctggagtgcagtggtgtggtcttggctcactgcaagctccgcctcctgggttcatgccattctcctgcctcagcctcccgagtagctgggactacaggtgcccgtcagtacccctggctaatttttttgtacttttagtagagacggggtttcaacatgttagccaggatggtctcgatctcctgacctcctgatctgcccgccttggcctcccaaggtgttcagaacagtaagatggatacctaataattttccattgaaactctcacaaagtttcccttgtctgatgagaggaatgagcaggagttttgctgtggtggagaaagactctctgctgaagctttcctgggcctttttcaacttaaagctttggctaactaaaaatactctcataataagcagatcttattgttctttggccaaagagaaagtcaacaagaaaaatgccttgagcatcctcaaaaatagttgccatgacttttgcccttaactggtctgcttttgctttgactggagcacttccacctcttggtagccattggtttgattgtgttttgtcttcaggatcatactggtaaaccatgtttcatgtcctgttacaatcgtttgaagaaatgttttaggatcttttagtttgtttgtttgtttgttttgagacagtttctctcttgttgcctaggctggagtgcagtggcatcatcttggctcattaccacctccgcctcctgggttcaagcgattcttctgcctcagcctctggagtagctgggtttacaggcatacgccaccacgcccagctaattttgtatttttagtagagatggtgtttcaccatgttggccagctggtctccaactcctgacctcaggtgatccacccttcttggcctccca

SEQ ID NO: 206096 - DNA, 1000 bp, Homo Sapiens
tacaggcgcaagccaccacgcccggcccaaattctcttaacactagggatttattccacccactggggttggagaactgggcggtcccaccaacctgggggcactatgaggtaagcactctgctccacaggctcaacccagggcagtgaacggttgtcctctctggcatgatactgttttccatttccaccccactgtgatagtgttttagcttgggtggctgggtggcactatgcctggaagtcactcccaaagcacaagacagtgccagggaggttggaagttcaagcctcaaacacagtctactccagacccagcccttgccccacgaggagcccaattttccagccaggcacccccttgactcatgaggaatcttcctttgtggccttggcatccacccagaatcaacctaatccatccaggagatccccataagggctacctcaaaaggaaagaggtggaaccgttggcctctggagatttgtcacttccccggaacacttgctgatggagagtattgcaagtgggtgcttcgctgggccacaaaagcaaaacaaaaagttctgctgcagcaggtccccgagttccacttttatggctccttgcccgtaaggagctggctggatccacttcagtgcatctgacagttccataccagagctgcttccttcctgatggaatccaccgcccctctggttttcagatgggactgcaatgtttgtcgggggttttccggagctttgctgagccccagggtctaggctgccaggggctgcatctgctctgcatctagggaagatgttcttccttctgtgtcttctgaggcttagttactgctctgatcaaaaaagagtctaaagaaaaggcacttccattggcggttctccccaaactgaactaattatctttcatcctcctaactctatcctgtcatggtgagtttaggttggggagctattaaatgatcatccctcctgcatccgcttactgcaagctt

SEQ ID NO: 206097 - DNA, 1000 bp, Homo Sapiens
taactgtagctgatgatttaaaaatatatattttttcattttctaaataactccacttatctccattctagttctttttgtgatctttgcccatatttgactgtttcgtgagacacatacttaatagccaggtctctgctcccagactaattatttcatttctcactaataataataataattacttttacttttcaggtggctatatcttttccttgtgatgagagtgttcctttctgtgcactagcaggctttatcatccttcacctctttctacatctctgaaacaggaaaggtagccactcccttctcccctcacttgctttggggccttagtgccacaggtgctacgagctctcagatggtttatagggcctggcagggctgcagtaatggggaatcacacttcattattgctgttttctaagtccacccttttttaaatggctaccaggacactgttttagagtgttttccatgcctcccaggcacagaacccctgtggatgtggccagcctatagaggctgtgcaaaggctcataagaaaaaaactgatacctggtgaatattttgttacagcactaatttcttcctttttttccctcttcccaatcttataaatatgtcactggagaaatgtctattcaagttcttagcccagtttttttttcaaaagaaccaatatttttaaaataagtgtactacacaaaccaatctataaattcaatgcaattatcaaattaccaatgtgtttttttcacagaattagaaaaaaacagtgctagaatttatataaaaccaagtatgtgtgtaataaccaaagcaattctaagcaaaaagaacaaatcaggttactttaaaaaaaaaattcagttgtagagggttctgaggtattctggagtttaaccctgtatcagatgtatggtttgcaagtattctctctcattccataggttgccttttcactctcttacttgtctcctttgctgttcagaagctt

SEQ ID NO: 206098 - DNA, 1000 bp, Homo Sapiens
acacaaagatattctatgatcatgcattggaaaatattagttaacacaaattatgagttaaatgtaattccaatcacaaacccagcaagactttttgtggagcttgacaacttattctaaaacttatgtgaggccagacacggtggctcatgcctctaatctcaacactttagatgaccgggtggatcaccccacgtcaggagttccagaccagcctggccaacgtggcgaaaccctatctctactaaaaatataaaaattagctgggtgtgatagtgggtgcttataatcccagctactagggaggatgaggcacaagaatcacttgaatctgggaggcggaagttgcagtgagccaagatcacgccattgcactccagcctggggaacaagaacgaaactccgactcaaaataaaataaaaaataaaataaataaataaataaaacttataagagagatcaaggaaaacaaagacaagggaattgcatcccaaacatcaagcacgccaccatataattaagaacatatttctggatccgggagccaagatggctgaataggaacagctctggtctacagctcccagcgtgagcgacgcagaagacgggtgatttctgcatttccatctgaggtaccaggttcatctcactagagagtgccagacagtgggcgcaggacagtgggtgcagcgcaccgtgtgcgagcctaagcagggcgaggcattgcctcactcgggaagcgcaaggggttcagggagttccctttcctagtcaaagaaaggggtgacagagggcacctggaaaatcgggtcactcccacccgaatactgcgcttttccgacgcgcttaaaaaacggttcaccaggagattatatcccacacctggctcggagggtcctacgcccaaggagtctcactgattgctagcacagcagtctgagatcaaactgcaaggcagcggcgaggctgggggaggggcgcccgccattgcccaagctt

SEQ ID NO: 206099 - DNA, 1000 bp, Homo Sapiens
agtaccatgctgttttggttactgtagccttgtagtatagtttgaagtcaggtagtgtgattcctccagctttgttcttttggcttaggattgacttggcaatgcgggctctttcttggttccatatgaattttaaagtagttttttccaattctgtgaagaaagtcattggtagtctgatgggaatggcattgaatctataaattaccttgggcagtatggccattttcacgatattgattcttcctacccatgagcatggaatgttcttccatttgtttgtatcctcttttatttcattgagcagtggtttgtagttctccttgcagaggtccttcacatcccttgtaagttggattcctaggtattttattctctttgaagcaattgtgaatgggagttcactcatgatttggctctctgtttgtctgttgttggtgtataagaatgcttgtgatttttgtacattgattttgtatcctgagactttgctgaagttgcttatcagcttaaggagattttgggctgagacaatggggttttctagatatacaatcatgtcatcagcaaacagggacaatttgacttcctcttttcctaattgaataccctttatttccttctcctgcctaattgccctggccagtacttccaacactgtgttgaataggaatggtgagagagggcatccctgtcttgtgccagttttcaaagggaatgcttccagtttttgcccattcagtatgatattggctgtgggtttgtcatagatagctcttattattttgaaatacgtcccatcaatacctaatttattgagagtttttagcatgaagcgttgttgaattttgtcaaaggccttttctgcatctattgagataactatgtggtttttgtctttggttctgtttatattctggattacatttattgatttgcgtctattgaaccagccttgcatcccagggatgaagcccacttgatcatggtggataagctt

SEQ ID NO: 206100 - DNA, 1000 bp, Homo Sapiens
gatcactctgcaaaagtaatttcccttcccagtattcattgtgacttgcgattgtgatttttataactttaagagaaataaaagctgtctgttactccttctaaaggagacctcagaaataggtggaaactgttttcttacttagttttcataaaactactgttattaatttttttaaaaagttggtcttgctggattgctgaacaaattataaaatgagattatcagcaagccactaattccagaagtttctttgctctctagacgttagttcccatttgagggaatgaacttggttaagagggttcttttacaaagctgaaagataccactttttgttaccgatgatctgacgtgaacccaaatggattaaaacaaaaaaaaaaatcaagtcactgaaaaaagttacttttacttttccatttaaattaaaggcttttattcgaccacacaagttaaacctgctcataaagtctatcatgagtctcaattgctttttaaatatatcaaaattggatcctaagtagaattcatatatatatagttttgactagtactgtaactgaatgtaaatcattgcaggacaggaacatacaatggatttgtatcaacttcaccagggaagggtgctagcttcttctgactaggaccataattagttaatggatatgaggtcaaagcatttcataaaaattactgagctcctcctgttccccaaaaaaggaaactaaaaaaatacactgattggagaagttcccactagcattaaaaaaatgaactgaaagtcagataaaatataaaagagggtcaatgcttttcaggatagtcagctgactatttcaactgaggaaatatggggtttttatattagggtagcacacgagcctaatacattttcgtaattgaaaatgtttagcgtgctagcctaatatgagaaccccattcccaccaaacaatggtaaatattaccagctgttatcagtccttgaagactaagctt

SEQ ID NO: 206101 - DNA, 1000 bp, Homo Sapiens
gatcctcctgccttccgagtagcctgtagtcttggctgggactggacatggaccaccaagctgagctaatttttcaattttttgcagaggcgggggtctccctatgttgcccaagctggtttgaactcttgggctcaactgatccttccaccttggcctcccaaaacattgggattacaggtgtgagccatcaggcctggccccattgggttcttgataattctttaatcaagcaattgctccccaaaagttttataccataaatactcttgctagttttctccaataaaagatgaaatggcttctcttttgcttgacttcggagggcccattactgtttgaatttgaatttgagctacccccacttcaggcagaagaggagtctttttagtctgcatgagggagagctgaactgtgttaggcaagagaattttgttgtagttgatgttgtgcttaatattggtggatggtggatattggccttggggccccttaagcaattgaatgaagcagacacctgccacgtttcctggctgtccagcaactttttaaactcacctttgctctacttgggaaatgtcctgctttgtaagtcctactttcaccaggaacaacccagaaaattcagtctgcaaactcctctgccattacagcacaagtaatatgagctgggttctcccaatcaaattacctgtgggggacctggacttggaagtgaggaccttacagaacccattttgctggcaaggcaggtaacagaggtttctttgggaagaaatgtggttaagatggcatcagtggagttgcctggctgggagcttttgcccgggtggcagctgcttcctcatcaggacagggctgtagcatggatttggacatcgttctatggaattgcttctccaggctcccgctaagtctgtgagctagccaattcccttcccataaactcctttatttttgattaccagagccggcctttgtggctttctgttgaaagctt

SEQ ID NO: 206102 - DNA, 1000 bp, Homo Sapiens
tagttaggttatatagaaaggaggctcttcataggatctctgcatggaggacttctttgcagcttctgttgattttgttaaaaccaagagtactatagttttcattcataaatacagatttgtgattccttaaccaaaggctctgcgctgccttttgacttaacatattttcagtttaccatgggattattgggacataaccatattgtaaatcgaggattatatgtacagtttttttattgttttacttcagaatataatgaagtacgttaaatgctgaagtagctttaaacacttcaaacaaaaccaaaaaacacaaccatgagatacatctttagtgatattggaaacacttcatagactaaaacgtgcaagatgaaaattcataacttagaagaaatcattgtaggtttagttccttgattcccctttggtctgtttttgaagcccttttgcagcaagtgaatcataatgaactaataagttttagagtgccgattttcaaaatgtgatgcaacttttatggttctgtactttattattaaatacataggtgcaaataagaattttcattttaatctgtcaacgacaatctgttgaaaccctgctgtgtgccttgtgccatgctgctctgttaggggactggggaggccaggacatgctgccagggagctcccggctcagtgggaaagagtaaatgcagagtgctttgctactggtttaaaagaaaggaacacaaatatgattgctttcttactctgggtttgcctttctggcatgttgcctggttcccaagacgaagtctcggatgtgtacatatttgagagttcagtactgcagtatctattcagtgaagtataaacgaaagagcatttttcaaaacaaatggtatgtaatatttttgtcttctttagggctctggaacttcatccattctctatgaaacctcttctgaggcgggcgatggcctatgaaactctagagcagtatgggaaagctt

SEQ ID NO: 206103 - DNA, 1000 bp, Homo Sapiens
ctgggaattctgcccaagccttatccccccatctagttacggaaacttcacgtgggaagggattgtgtttaagcatctttgcacaactcccaaatcatcagcatagtctcctaaactaaacaaacgtaagataaataatgaaggactgtattagaagcgatggagtctcactcattatggtaggggcagtctacaagcctctcctctcctctttgcagtggaaataaagaagaggaaagcaggcccttgctgctgtccacagtggccctccaatggagctggcccagacagagagagagggaggaagctcctggcatttccttagggtgagtgagtagcaatgacctaaacgacagctttcttttgcaagggccaaggaatgtttaatgtcctgctttaaaataacagtttgggcaagtcttccttaaacctacttctgttctgaagagttggaaaatatttcttattttaaattattcccatttcagagaagtaattctgaatctataaaattatgaggcccttataaaactctacaagtaagcttttttttttcttaattttctattcttctgaacaggattgcgagggagtcctgggcagtggcccagccccatgaaaagctttccctccagacggttagtgtttggtttcgggggactacaacagcacttcattcatatttttgaagtttgctggagacaggaggtggaatggctgtcactacacaatattcatatctttccagaaccaccaacctgtgttgccctaccattttaaggaaccagtgtgggataaggaagataacaaattcttccatttggcagctttgagactggtcaagttgtttaagttctatgagccatctgaaccacagcttcctcatgtgtaaaaggagaagatttgtgtgtgtgttgcagattttgtgtgtgtgtgtgtgtgtgtttgtgtgaactactatatttcattaaatccaagatacatttttttcaaaaagctt

SEQ ID NO: 206104 - DNA, 1000 bp, Homo Sapiens
ggggacgggaggagtaaatttggtatgtaaggcaattacacttcacaataatgaatgtgacaggaccttgacaggaatagcaaattaaagaagattcttagtctctgttagttccattgcacatgttccactgggggctcttcacatctccagatttgagaattggcttgattttcctgaacatcttttgtctgtttcagcttacagtaaggccaaacagaggataacatataacaaaaacaattatatactgccaaagtaaacctctgtgcaaaagagtaggtttgtagctctttagaaacatataaaatataattagggatatttagggacatatatatgtatagcacagagtaaattcaaacaacagcgttttagaaaatagttgtggctactccctccatctaaaaatatttttgacccaggcaatgtggcaagggtgctgtaccatccctctgtacattcttcattcttacattccagaaatattgaaccataaggtttcttcctaaaaaaaaaaaaaaatcatgcaaagtaatctttgagagcacaaaattggcattttattgttcctacttcctttccaaaatgtctggtaaattatgaatttcaaagcctgtaaatctaaactcaataactgcattccctttcaggttaactggccaaatacaacaaaaggtgaattacccataataatttttaacacatcattcactcttcaataattcctagttccttatttttaatctaatactcagaaaacttatttccaatatcagtccacatttctaatatgtatgtgactattagaaaggggcctgcaagtataaacttgaagtttatgaaactgagcacattggaacctaatactggccttgtaataaacaaaaatatgcacttgtttatgattggaaagcaggacgtaattcattgtgactgtgagactctgaccattcagttcagtctggtttaaaatattgagctgaatactctgaagctt

SEQ ID NO: 206105 - DNA, 1000 bp, Homo Sapiens
catctctgttctaacccttgagtacttctctatctttcctaaaagacacagttcttaaaaggcaggacttgcaactcattttgggttagaggcctgatgcctggtaccatgcctagaactcagggtctccttgatgaatgcttgaatgaggaactggcaggcatagaactgtgagtaaaccacttcactgagttaacaaattaataggttcaaaaatttccaggagttagatagttgtgaaattctgtctctcaacctttttattttttcccaacttttatattcaatggtacatgtgcaggcttgttaaaaatatggaacatggctgggcatggtggctcatgcctgtaatcccagcactgtgggaggtcgaggtgagtggatcatttgaggtcaggagttcgagaccagcctggccaatatggtgaaaccgtgtctctattaaaaatacaaaaattagctggatatggtgatgcgtgcctgaaatcccagctacttgggaggctgagggaggagaatcacttgaacctaggaggcggaggttgcagtgagccgagattgcaccactgcactccagcctgggcaacaaagcaagactctgtaaccaaaaaaaaaaaaaaaaaaaaaaaaaagatatggaatgcttcacaaatttgtgtgtcattcttgttcaggggccatgctaatcttctccgtgtcattccaattttagtatatatgatgccgaagtgagtactatcttaatctttttaatgaatcagtgtgaattaatatacactagagaaagaagtaatgagacatttaaaaattattttattcttttaactctttgaatgttgttctccatatatcaatccaatctatttgacaacttgaattcatttcttgagtctctcaaagaatgcaatttggtgtcaggcagtagaggaagaactgatggcgattcaagcatttttctagaatcattcagtttagattttgggtttctgatttggaattc

SEQ ID NO: 206106 - DNA, 1000 bp, Homo Sapiens
atcagcaacaaatagcagtgtcctttggttttactgttgctttatgaaaattccctttctaataaatgtagacattgtaggtgtgatttaaacagcaaaatccttccagtttgttttatatcttaatagcctaccagccagttgaagactaaatgtatcctattataagaattcattcaaacaaatagttgagtccttccatgtattagatatggctgttagtatcaaagacatgtcactaaacatggggtcctgcctcacagagttcacactctagtggatgatgacctaaaataataataaacataaattatgtatggttttagaaagtggtgagtgtgttagtggggtaaagaaattacaagacagaatcagggatcaggggccttggaagagaggacactattttaatagaactgaccatttcagcctcactggggaggtgatactagagcaaagatttgaaggaaatgaaggggtgcaccttgtgcatcccaaggaaagaagattcaaggcagaggtaacagccagtataaaggcttggaggtgggaaggtacctggtttgaactaggagcagcaatgagcatagaaaagcctagtagcagatgacaggagggacttgccaaggcacagatcatgcaggatctggtagggcactaaggactttggctttaatttgagaaaaacaggatgtgattagaggattttgagcagaagagggacatgatctgactcacacattaacaagatcattctggttgctgaattgagggtcatgttttataatgaatattgtgaaaacattgcttaagaagaaaaccctcaagtgagaaaaacaaaattgagcctgattttgagaatttaaaaaaatcaccttgtacaatccaaagctttaatttatgggactgtttcaatgaaacttcatcatgaccatcagcaagatggcaagtccaggagttattgactttagtcagttattattggagaggaggaaagctt

SEQ ID NO: 206107 - DNA, 1000 bp, Homo Sapiens
gcctcagcctcccgagtagctgggattacaggcatgcgccactacacccagctcattttgtatttttagtagagacggggtttctccatgttggtcaggcttgcctcaaactcctgacctaaggtaatccacccgccttggcctcccaaagtgctgggattataggcgtgagccactgcgcccggcatgcacttgttcttgaatctcctcttccatcttttctttccacatcagttgttctcaaatgtgattagaaccatgcctaggacatagagacatgggttcctttctgtgaagccattcttgattcttttaatcaaaatcagttgttcctgccaggcgcagtggctcacgcctgtaatcccagcactttggaaggctgagacaggcagattacctgaggtcaggagttcaaggccagcccggttaccatattgaaacaccgtctctactaaaaatacaaaaattagctgggcgtggtggcaggtgcctgtagtcccagcttctcaggaagctgaggtagaagaatcgcttgaacccaggaggcagagattgcagtgagctgagattgcaccactgcactccagcctgggcgacagagggaaactctgtcttaaataaataaataatcaattgttccttcatctatgatcagaatacaattattttaccttatatttatatgtatttagttcttgcttggattagagttgttgacattctggtctcctctagtacattacagggtgtaagaggacagaggatctgggtactcacctcgttgtccagcaatgcctggcatggtggtctgtgtggaacagccacccggtagatgtggaatggggggaatgcctctctagtcacttttttctgtcatttccattttctcttgtcttcatatggcccctgactaggactgggtgtttgcaagccaatctagcatgagctgttctattcagtgtgaaccttccctttacctattctctcttcatccaagctt

SEQ ID NO: 206108 - DNA, 1000 bp, Homo Sapiens
cctctattctaaggaattatttttcattttgccatctctaaagttggaatacaccttacaatcattggaatgtcacagtctcgttggcagcatttttctgcttagtagcccataaaataatagcacatcttgtaactaacagtgttgtagatgctatgagatcctggggaagcccagaatctaactccactctgtctgaccccaaagaccacatattttctatgtctttggactggggcacagatgtagacaactcgagctttgctgattgtgagaaaggtatgagaaatggccctgaaggaattttcttcttgtacttgcagtggaacaaagcatcatcaccccactattccaggggaggtgctaaatacgagggtgaggctgtcaagcggtgcctggtggagtcctacactcacccaaacagcaacgagacagagcggagggagaacatcgataccgtcatgaactggttcaccaaggaagactttgacattgtgactctgtgctacagagagccagataacgtgagacatcgattcaggccagaggcagagaacaggaagttgatgattcagcaactcgacaggaccatcgggtatctggtgggagccactgagaagcacagcctgcagagcacctcagcgtcatcatcacatgagaccatgggatgaccaccgtgaagaagagacccaatgtcaacaagatcccttgtccaactacatcaagttcagagacttggtcaagtttgatattgtgggctacggtggctttgggctgcccctacccaaattggggcaagcggaagccctttaccaggcactgaagaatgcgcaccctcacctccacgtctacaagaaggaggagtttccagaacacttccatctcgctaaacatgaccaagttctgccaatcgtgatgtatgccaactctagtttcagtatcaatgggataagttcattctaaaatgaataaagtcaccttggatctaggagaaaaccat

SEQ ID NO: 206109 - DNA, 1000 bp, Homo Sapiens
aaattgttctatcgtaaagacagatgcacttgtatgttcactgcagcactattcacaatagcaaagacacagaatcatcctaaattcccatcaagagtggactggataaagaaattatggtacatatacaccatggaattctatgcagccataaaaaagaacaagatcatgtcctttgcagaaacatggatggagctagaggccattatcctaactgaactaacacaggaacagaaaaccaaacactggattttctcacttataagcgggagctaaacattgagtacacatggacataaagaagggaacaataggcaccagggcctacttgagggtggagagtgggaggagggtgagaattgaaaagctacctgtcaggtactatgtttattacatgggtgatgaaataatctgtacaccaaacccccatgacaaacaatttactcatataataaacctgaacatgtacccccctgaacctaaaataaaagctggggggaaaaaagaaattggagagaagagagcctcccttcctgaagataatagccttcgtgtatgccagacactgttataagcattttacacattatggctcatttagtgctgaacctgtatataggatgtaggttgacaaaactgaggcacagaaagcataagtaacttgctaagggtaagaaagattgtaagaatagaagcaaacactactgaagggaagacaacaggactcagacacattgagatgaggaccaagtaaaattgatttacaccatatacaggcaaatgggatgcgctgatagagctccttttattaaaaattctgcaggaataaaagaaaattcatggcaactatgcagagaggttaacacaaaaaagaagaggaaatatagtataaacgggaaagtgaaaaatccatcctgaaatctaatataagcctaagaaatagggaaaaaatctaagacaagtattttgtatctagaaaaaaacaaggaaacatgaattc

SEQ ID NO: 206110 - DNA, 1000 bp, Homo Sapiens
aatgagaggaatttgaatagaatctaagtgattcattttgttaggtaagtcgacagcattgtggttatatacaagaaatatacagagatggctactgaagtatatagggatgaaattatgtttgagatttactttaaaataattcagtatagatgaagtgagtgtggccaaagcttgataatagtgaatctaggtgacaggtttgtggagtttcatcatgctattctctatttttgtgtatgtttgaatttttttaagttatttacttcaaaaaacttaaacctgaaataattttgttgacagtataactgtcttccttttcactctcccaaatattaggagatttggatgagaaagtagttctgggacttctgacatagttattattaggtggtgactagaacctagaggctgcagtgttttgtggcctttctataagaaagactgattaaatagaatttaggtttattccagagaccagaagctccctagcatagctcacaccctaagtaattagataggcacctagctacctggttttataaactataactagtgaattcccaggcatataaaagttgagaaatcagggatgaaagaccatggagaacattaatgacagaaagaacgaaatggtaattttgtaaataaaagcagttttgaaaccttagggtgaattgggggtaagagagaatatgtggttcaattcagagatagtaaaagtcctttatatttctctcttccctctgaacagagtctgtagagattgaaaaattgctctttgttgtcaactttttcttgctgtcttcaaaggccctgtttctgtgggatagtttgtagtggttaggattgtgtgttcacagtttaaattctggttttatcacatatcaaccatgtgaccttaagccagttattaatatttaggtctgagcctcagttttatcatctgcaaattgagaatagtaatagtacttacttcacagaattgtggtgagaattc

SEQ ID NO: 206111 - DNA, 1000 bp, Homo Sapiens
aatgttgctgcccagcagcaaagggcctacatggtctggaccatcctatctttgctagcttctatctctcttcttctccaaacacaatttacggtgctcactgatgacaggtctcctagtctgctacctaacatgccttctctttcctgccttacatttctgtttagcctagtttctaagaaactaaaaccaacgtagttaaaaaacctgtaatatactccccagattcagctttttaaaaggttttcatttgttgtaggttgaacggtacccatactccacaaaaaaagatgtctacattctaatctctagaacttgtgaacatatcttagatggcaaaagatgagatttaattttttttgtgcttgcttcggcagcacatatactaaaattggaacgatacagagatttaatttaattttttttttttttttagagtcaggatcttgccctgtcacccaggcaggagtgcagtggtgaaatctcttaagtgagttctcttatctctaagtttccacttattagctcactgtaaatttgaactccttagctcaagaaatcctcttgcctcagcctcctgagtatctgagaccacaggcacatgccactgcactgaaccaaaaaaaatgtggctgagttcaaggtcttgtgaggaagagcttatgtattatccatgtgagccctaaatgcaatctcacatgtccctatatgagtgaagctagggagcatttaacacacacaaaagaggagaaggcaatgtgaccatgaaggcagaaactggagtgatgcagccaaagaatgtccgcagccaagagcaggtaacaggcctcccctacgccctccagaaggtgtgtggccttactgatacccctatttcgacacttttatcttcagaaatttaagaaaataaatttctgttgtattaagccaccacagttgtgcaatttgatccagaactcaaagaaactaatataccatctttatagcctggcttgaattc

SEQ ID NO: 206112 - DNA, 1000 bp, Homo Sapiens
ttttgctgattgcattttcctcgtgtagaattgtatatgtgtatctgccttatgcattaaattataaacaacctgatcagacatcaatcatggtttatcagtcaatttcttaaagaaggttgagtgagtgaaagagagagagaaaaaaataaggagagtgagagggagggggcagagagaaagagagagagaaagagagagaaatagtcaagtcatatatgaggaaaaaacacacagtgggtgactgcaaggggccactgcatatgtggccaaaatgtgtaataaattctgcgttttaccttttccttagtgagaggaggaggaagagaagacattatgtttctgctatcattattcttaaatttatcacataagccataagttttcctttttgctgtcactacaaatttccaatataatcttagtagtcaatcagtagtcctgtccacaccatctaaccgtctacaaccatctacaacatctaacactaaaatcattttcttagctttatttcttagctttattctctccacaagtagtataccagcttgtgtccatcattcacacttcaaattttgaagtcaagtattaatatactagattctactaatttcactccctcttcattcaccagcacctattagaataatttattcatggcaaagtttctgtttaatctttctgcctttacttatgaccagggtcttgttactttaattttgtgagttctctttattttcctgactccagaattcctcattgtaaatttattcttcatattgaattccttcatattgaattaattcttcaaattatgaccacctactctccaagagtatttaattgttccaagaattaaccacatcctgtttccttaaattagctttctatgcccaatgcaaatgagacatcaattttcattttgtcattccctctggtaaaaatgtgtaaagatgcctctcctatagattttctgttctcttaactgtgcactgaattc

SEQ ID NO: 206113 - DNA, 1000 bp, Homo Sapiens
tcgtcagggaatatttacgagccccagcctcacatgggcccagcagggcttctttagcacaggctctagttttttctcttgttccttgggtttcctagaatcccaaaggactctctgtggcagacatattacaaataggctgatgatgcatgtgtgatggtgcagctgcagtcgccagctctgtgttgctgggtggcgtccctccaggctccgtggctgatctcccactccattgtgggcccctcctgtcccgtgcttgccatccttcctgcttatcattcattatctaaccagatttcacggggatacacgtctccaaccttccattttgtccaaatggatctatcttggtttattttctcttgcctaaatattaggcatgcctaatgggtttcaaaaattaatataatttattttccatcttgtcagtgcaaaacaaaggtgttcttgaggcatggcagtgaagaccagaatccctcctcctcttctacttctgtttcttgaatcagcaacaagtaaacaacagttctgtaaacatgtgtgggtctgtgtccatgtgtgcgtggatgcaccgttttcttccattcttaactggtttcggacacgttagctaccagtggccttcttgtcttgttcaaaacggtgattcccgtaacatctggactttcatcagggcccgtttcagctgctcataggttacgaacatcaccacgttccaggatcccaaacgcaaaaaggagggtgtaaatctgataagaaaaacaaccaacacatcaggtggagtgctaggggaccacaacagatgcgtgtgctctcccgggacacagtggtagtgccagaggatccagacttctgttcatcacaagcattttctgaatcctttcagtctctctctctctttttttttttctgctaaggggatttaggcagaagtcggagtaaggaaaagaaaaaaaaaactcacgttttgagacgggttactgtgttaggcagcgaattc

SEQ ID NO: 206114 - DNA, 1000 bp, Homo Sapiens
tttaatccacaactgtatactcagtacctagcaggtactgtacttagaacctagtaggtgctcattatgtgttgaatgactgaaaaaaaacaaactaaatgattttttaatgaaacatttttaatggcctatacagatatattaaaggtttattaaatttacacataatttccaccaaatatgcattcccaatggagacaactacagctttagcataatttaagcttcagcataacaagttatgatattataaatgcaataaaccttaaaattctgttttataaacataattttatgtataacgtgaagctgtgaattaagaatatctgctccttgaggttgttttttttaatttatgcttctgcctaacttaaaaataaaagttataaagggaaattagatcattgaacatgaatggaaatactttatttaatattatttagagaagattttacatataataagaaacataattaaaagaatacattctacatggatgattaaaatgctggaacaagttcaagcagaatgcatagaaaaagattaaaactacccatacgttacttactaatgccattaaattgccagaaatatcagatatttatctaagagacaaaatgaaacatatatagtatataataaaaaatctatttgtaggttatataaattcatttttgttcttgtctctgtttgtgtcattttattatttccaaaaacaaaacaattaattataaatgtaattcaaagtagcaagctctgcttctattaatagctctgctaaaacctggaatgggaaaaggctaaaattgcatatgaaaattaagtttttaaaaccacataattactatttcaaattagtatgtaaaatagagagtataaacatagacataatactaccaagtaaattaaaaatatgcctcatatctggaacattcctttccattttagctaaaacattacaactaaggcataacaatataaaaagggagaaaaaaagctt

SEQ ID NO: 206115 - DNA, 1000 bp, Homo Sapiens
aggtcagcattgtccatggtccatactagaagggcatgtagaaaagcattagaggcattcaggaactaagcagtttttttctgcctggggaggggtcagtgtgtatacagacccctgcaggagcccagcagaggaagggggactgtccgagccaaccctcccaccctggagaggaacaggagtgcagcccagctggcctgactccatccccgagagtgagagcacctgtggagaggacagccagggcttcctggtggataaaccccctccacccacaccccagctgccttgacttacctgttaccgcttgtggttctatctttgaataactagtgattaatgtctgcttccgtcaaggatgactgttaggtttggtaaggcaagggttctgttgggttagataaggtttcatttcacacacagtcctatccctgtacctaacgctgttctggctacatcaggaccctgagtaacttctcataaatgaataaatctaaaacttctgtttgtcaatttcttcttgtagaccccagagatgatgttctctttcctcatcagttctctctgctcaactttttgttgtctgtctgatgggctgcacagtaagaaaacatccccaccttccttacaccccttttgccaaacacaagcctttttgttataagctgtttcttaaaatcactgcaagagacaagtggtaacaaacctaggcagtttgtaaaggtttaggcagcctcatgttcccatggcccttgtctcctgggcagagtatcatgttgtgccattggctctccagacactttgagagtctagtgatggtacctgtcacactgcattgccagggcttggtcattcctctgtctctctagttagtctgtgagctcttccaggttggggatcacatgattgatatttgcatgcctggcatcttccacacatttgttgaatgactgtgaaaatgaataaatgaatgaatgatctagctgtgcaaatgaagctt

SEQ ID NO: 206116 - DNA, 1000 bp, Homo Sapiens
gaaatggaaaaagggaatataaagtggaggggaagaggccggacgtggtggctcatgcctataatcccagcactttgggaggccaaggtgggcggatcacttgaggtcagcagtttgagaccagcttggccaacatggtgaaaccccgtctctactaaaaaaatacaaaaattagctgggtgtggtggtgggcacctgtagtcccagctactcaggaggtcaaggcaggagaatgcgtgaacctgggaggcagaggttgcagtgagccaagattgcgccactgcaccccagcctggacaacagagcaaaactctgcctcaaaaaaataaaaagtaaataaaaataaagtggaggggaagggatgaaattcaggtaggatggcaaaggaaggcctcaacgagagagtgactaaggaagtggaggccagagccatgcagatagcatgaatgtgaggccaagggaatgttagaatgtgaggccaagggaacaataagtgctaaggcccagaggcaggactgtgcctggtgtgttgtgtgttactcaataaaggaattgtttttctcctgaattacttagaagaagaaaaaaaaatgcttcaagcttctgttttactttgtctgttgaaaaccaacctgaagattccaggaagaaagcatagaagtcaccattcaaactgcaaataagaggcagcagcattcatgaacaaaggaaagctgcaggaacatttgagatacaggtaagggtcacccagcttcacttaactgtgaaagtaaggtaatcggccaggcgcggtggctcacgcctgtaatcccagcaccttgggaggccgaggcgggcagatcacgaggtcaggagatcgagaccatcctggctaacaaggtgaaaccccatttctactaaaaatacaaaaaattagccaggcgtggtggtgggcacctgtactcccagctactcgggaggctgaggcaggagaatggcgtgaacccgggaggcgaagctt

SEQ ID NO: 206117 - DNA, 1000 bp, Homo Sapiens
ttgggtgtgtgtttggggtgggggtccttcgggttccagatgaaaagcccctggcccagaagcctgcaagactgcttccagctgtcagtctgaacccagttctctgccctccccatcctctccgcagtgacttttgggtgtgggggaagaggggacagttagggaggtgggttgctggtctatccacaccttttctccctcctgcctcagtgggcccctcccccagcatttcctgtggctggtgccagcttgtctgcagctcagaccagcatttcaatccctcttggaacccactgaactggcttcacctgcctttcaaggtatttaaaggttctttgaccaaatgctttttgatcctccgctgatgggaaccaagcagaagctctttcgccaactgtcccccctccccccacatgattagtctctaagagctcttttgatattgcagaaaccttctgtggtttgttcaaagccctgggcctttcagccacctcccccggggactcaggccagtcagctccagcctccaccacccatacccaggggtggcctagttaatgggggcctcccagcgctgaacgactctggcctgagttggaaccccagacccgagcccagctggtagagcggtcaagccccgctcctctcagggagcccaggccgagtctggtagtgtggggtgggggacctgttccccagccttcagcgggccgttactcttcttcccgcccagctgaggctgcacagacaggcatgcaggcccacgatgatagcaattgacctgtttccaggtctgaggctgaggctgagaaggggaaactgaggctctgagaagtccagggttcaggccttggtgtgtgagagggcaggagccagaatccaccaacccaagacctgctccagcagccccaccccagccagcaccactcgccgcccgcgctcctggtcctccagggccgcgcagaaggcgcgcctgggctgagtcccagctgcagaattc

SEQ ID NO: 206118 - DNA, 1000 bp, Homo Sapiens
acagaatctctgggatacaagagctctcaggagattctatggtccaacatacctatatgaggtgcctggccaatgtcacactctgagtggcagactgggtctagatccttcttctctcagtctcataccctccataatgacaatgataatcaccaagattttcgttggccagaaaatgaatacacaaacacatcttggtatcaggacttttaaaaaaaatacatcaaatgacaccttttaaatcaatgacaatggtttctattcttgtctccaactcggaagttgcccttcaagaaacattaggcttggtaatgaggactccgaaagccaagagtcctagattctattgcaggaaccccagcatgactttctgtgaaactcctaataaataattcagtattgccttgaagccattgaatagctggaaataatttggaacctggtgtctcaaatcattaccaagtacacccatacgagagtactatttcccctgagaattgttaaaattccaccgagcaagtccacagtaaattggcatctggtccctgccaggtgactcacatcaaaattgttatcttttaaaggtccattttcagcctgccttcaccaagcctgtctagtagttgccttctgaaggtccagttcaaaccaactaggcctcctgatggacaacaaagagaaaaacagtggtgaaaacagagccacaagcacctaaaggatctattacactgtgtgtggcatgtccatttggccagtagagccttgggaagcaggccttcatttatattctgagtttttgaacacactgacgaaaagggaatggccatttatggggcctccataatgtactaggcacaaagtatgccattttcatatttcaatatatcctcccaacatcccttagagagtaaaccttacttcacagatgtggggcaagtgcggctcaggtcatggggcctgagtaacgtcattcagctagaaagcggcagaggtagaattc

SEQ ID NO: 206119 - DNA, 1000 bp, Homo Sapiens
ctatctttgtttgcagacaacacgatcctgtatctagaaaaccccattgtctcggcctaaacacttcttaaagtaagtaagcagaaaagtctcaggatacaaaatcaattgcaaaaatcattagattgcctatacaccaacaacagtcaaaccaagagccagatcaggaacaaactcccattcacaataaggtattttaatcacaaaaacattaaaatacctaggaatacagctaacccggatctctgcaaggagaactacccaaaccgctggtcaaagaaatcagaatgacacaaacaaatggaaaaacactccatgctcatggataggaagaatcattattgttaaaatggctatatcgcccaaagcactttaaagattcaatgctatttctattaaaccaccattgagattcttcacagaactggaaaaaaaagttaaaaattaatatgtaactaaaaaagaacctgaataactaaggcaatgctaagcaaaaagaagaaagctggaggcatcacgctaactgactttgtactacagagctacagcaaccaaaacagcatggtactggtacggatacacatagaccaaatgaacagaatagagaatccaaaaataatactgcacacctacaacaatctgatctttggaaaacctgacaaaaacaagcaatggggaaaggattccctattcaataaatagtgctgtgataactggctacccataagcagaagattaaaactggaccccttcctaacaccatatacaaaaattaactcaagatggattagagacttaaatgtaaaatctgagactaaaaaaaccctggaagacaacctaagtaataccatccagaacatagaaatgggcaaagatatcatgatgatgatgataaaaccaattgtaacaaaagcaaaaactgataagtgggatctaattaaactaaagagtttctgcacagcaaaagaaacatcaacagagtaaacagacaacctacaga

SEQ ID NO: 206120 - DNA, 1000 bp, Homo Sapiens
cctgtcaagatacagggctctggaagccaagtcaattactttattggaaactcaatatagtatgctatctaatgctgttagggagaaacactacctgtggttttccagtttttgtgatggtgaaagatgagcaaaagaggagagagataagtcagaatatagctgcagccatatttctaaatatatccctgccaagcacagagcagcaggcaaggcccatgccaaggcctgtcagacagatttagccagtaaaatacggcaagccccttttagattcaaacattttattacttggccagaaaaaggaagaacagcaaaaggagacaatgcactgagctctttgtcccccacactcaaaagtgtaaaactcagacaaaaagggctagttgacaatgcagtgaaagggacactgtgttcttgaggactcaatgccagaaggttgttacatatgtttatagactgcagctttaacctaaggggcacggagcagaaagcctcttcccttatcagaacctgggaaataatgagaaacggaggcatgactgcctcccatgtgatataagaaggtgagtaaatatgacctcatggcattttctcatatccttttatgagaaggcttttgtcttccagaaagcccgtaagttgttccaccaaggctcagattagctgtggttcaaacttttgcctacatggcctatatggacacaggcaaagtcaccagaatgccatgatgcaattgtccccctataataccgatgaagtctaaatttccaattgtatactatgtgtcttgagcgtgattttctttctcctttttttgtgatgtttcgtttattcctcactcatcaacacacatgcatgcacatgcattcacacacacagatatatgagaacaaaaaataataaaattgcttgtaaaatacttactaaaattaccatggtgccagtaacaatttttcccaggtagatgaatatatgtaactttacaaccctcaagctt

SEQ ID NO: 206121 - DNA, 1000 bp, Homo Sapiens
gtactggacataacaatctgcttctccccagactgttgcctgaagaggggctagccctttaaccatctctatatggatctcaaagcagtgctccatcagtccatttcctcggtcctctgcctattaaatgaaacagaaacactggtgagctttaaagagtaacttgcttagaatatttctgcttctctatgaagtctgagtatagataaagagataagtataattagttgatactaaaatagacacttaattttcattgtaactctcacaactactcactgtaagtaggctaaacaggatgtactcttgactatgagactgggttaatattaggaaatccataaatgtaattcagtgcattaatggaacaataaaaatgattaacacaaatgctgaaaaggcatttgataaaattcaacatttgttcctgataaaagctcttaatatactaagaatagaaggctgttcccttcataggaaaaataataaatcgtaaatttagaataaattctacatttagaacagcaaaggaatgagaagtgaagtggaagaagggtaacaccagaccaaactaatatcataatttaagaaaaaaaggaaaactaatagcctacagcagacagtggcatccacgattccagcaggactcctcagtctggccattcagaatagcaaacaggtactaattactatttcaaatcagttgggtataacaccaggactgtccaataatggtaaggactactttgggaggtagtgaagacactgttactaaaggtaataacaacaaataatcgtgtatttattgaggatttactatgaaccaggcactataccaaacagctcaccttcattaagtgatttaacatgcagagctagtaacagtggaaccaggtttagactcaacgtagtctgactccagagtcagtgttctttatccctattctatacagcagatcttagagaatgaattattcaggaaaattcaaagggggaattc

SEQ ID NO: 206122 - DNA, 1000 bp, Homo Sapiens
agataaagatgagggagctttgttcaatctggctgaagggctactggactgaaggggaccgggcgcaagcacccccaaggagcccaaggtcaggattacaactgggggcaaggacgttaagtttttggttgatagtggtgctgaaccttcagtagtgaccaccccggtcaccccctcatccaagaaaaccattgatataatcagagcaacaggagtttccactaagcaggctttctgtctaccacggacctgctcggtggggggacatgagatagctcaccagttcttgtacatgcctgactgtcccttgcccttgctgggaagagacttgcttagcaagttgagaaccaccatctcctttacaaagcagggctctttacagctaaagttaccagcaacaggagttatcatggcccttacggtcccccgggaagaagaatgaagactttttctaaccaagccaggccaagagataaaaccagctctagctaagcaatggccccaagtatggacagaggataatcctccaggactggtggtcagccaagcccctgtactcatagaagttaagcctggggcccaaccaattagacaaaagcagtatctggttcccagagaagctctcgaaggaatccaggttcctctcaggcgcttgacagcctatggaattatagttccttgccagtctccacggaacacccccctcctacctgtccctaaaccagggaccaaggactactggccagtacaggacttggtccgaggagaagtttacaaaccctctcctgagccagtgtttcaaactttctaagatgaactcaatgtgccagtaccacaaattccaggaaaaacaagaaatttgtttttgcaattagccgagcacgtagcccagtctctcaatgtcacttcatgttatgtatgcggaggaactgtaatgggaggtcaatggccatgggaagcccaagaattactacctacagacccagttcctgatgaattc

SEQ ID NO: 206123 - DNA, 1000 bp, Homo Sapiens
gccccgcgaccccgagcagccctgggacccccagcagggaccggtggcccagcccctctccagccagtgccccctacccctgcgcagacagagcagcctcccagggagcagcgtggcccagaccagcctgatctgaggacgctgcacctggagagactgcagagggtcaggagcgcgcaggggcagcccgccagcaaggagcagcaggcctcagggcagcagaaacttccagaaaagaaaaagaaaaaagccaaaggtaagtcaactaataagaacttggggcagtgtcccctcactggggtgctggccccacttggagcccacctgccaccatcaacagaaggaagggcttcctcctggtggcaccgtgcccgtgtcattttagctttattttcagtcatgccactcccagctccgtctgggctcccctaggtcggtgatcaggtcacgggcaccttcttttcccagaccctgtgtgggactcggcaagtaggcagcactcagagcatgtctgcagcagcaggaggggcctggaagagcaaacatggatggctccctggagcccctcgggaatggagcgatcacggggtcccatgcaacatgtggccctggagggtggaggtcttgcacagcgaaagggtgcactctgcctggaagttgtcctgggcaaaatgctcagaaccacaggggctggctgagcgcaaaaccattcttgcccttgggccatgtggagtccctgggtgggctctgccccgtttgccacatcctgcattgtgcccaccccgcaggagctggctaggcgtgcagtgggagttggccaggcatacgctggcagagcgtgtagcggtcttggggaactcctgctactgccattttcctcagcaagagcatgcaggagttccagcttgcattgattcattgaattcctgaagcgaagctacaccagcacatgggtggctttgaaaggggcctcccagagcctggggctccagaggaattc

SEQ ID NO: 206124 - DNA, 1000 bp, Homo Sapiens
ctgctgataccttcatctcagacttctaacttcaagaactgtgagaaaataagtgcctgttgtttaagcctcccagtctgtaacactttgttatggaagccctagaaaactaatatacacatgttgttagactcatagaagctcagaattgttagactttatttcagaacagttgctttttcattcttaagcccttacctctttcatcccttatttttttttacagaaagttcattttttgcagtacaatttgtaaatatatactatatatagtgacatatctatacaagcttattttagtatttacctaatatttttcagccaaatgttaattttaatgtttgtatctttatgattctgatgtgctcatatatatataatatatacaagaatataaatacatataatatataagtatataaaaatatatatttggattgttgaaattatatattcttatatattcatacgcataattgtaaaaatccaaactgacagaaatctacatttaaatgagcatatatttttcagccaactttaaatttagtcttcctctggccttacggttcaggtaggtttgttaaaaagaatatatatacaggcataataagcatatatgcctattatgcctattacaaataggaaatttgtccattaatacaaatttaatcgttttacatttattgtgattacaaatatatttcaaggtatttctcacatttttgtcatattttctaagcatttgcttctttccctcttccctttctctgagctctattaaattgatctaattttatctgcgtctggcccctagagtctctgtttcgctgcaatgtgtaccttgacacaagacctccttttcttttttaaatagtgaattgtgtggaccaatgatgatagtgtgttcttaaccaagtattattattaaccaagctatgtgcataaaataatataaaatgtaacatgtaaactataaaatataataaacacccatgaattc

SEQ ID NO: 206125 - DNA, 1000 bp, Homo Sapiens
agtgagcaaagagaaccttagaacctgtattggggctttaggagtctgctgtgggttgttttctttgtttgtttgtttttttgagacaagatctctgtcaccaggctggagtgcagtggcacaatcagctcactgcagcctcaacctcctgggctcaggtgatcctcccacttcagcctcctgagtagctgagactgcaggcatacgccatcacacccagctaatttttgtatttttagtagagagaaggtttcaccatgttagccaggctggtctcaaactcctgagctcaggtgatccacccacctcggcctcccaaagtgctgggattacaggcgtgagctcccaagcctggccctgctgtggagtgttaattctattaaggtgaacatttaatagtccctacggactggcagggctggggctgaggtcacatcatgtggcgctggtgcttagtgcaggccaccccagtgctggagggaggaggccctgagaaatgggaccaggctgggagccccctaaggggtggaggctgtttgactcagagcagggcttggtaggccacagctgggagatcgggagcagggtgagagccagctgtggctgatttggctgttgaaagccaggccctgcacctctctggggtcatgctctgatacaggatggctctgttgcagcaggtgaggctgacgggtggcctggacactagtggctcctgtccggctccctggccctgagcccctcagtggtgacaaaggactaggcagccacgtccactgaggatcgtagtgaggtctcaagccgccaagtgcaggcactgtggatggcgtggggcagcacatgcccttgaagttggtcatgatgtggaactgcccccgtgcctagctcgatgcctggcaggtgggccacacgggtgtcacatgtgggagctgtggggggaccgctcctgtggcggcccctctcctgaatgttggatatatgggatggggaaaggtggggt

SEQ ID NO: 206126 - DNA, 1000 bp, Homo Sapiens
attcctgggcctctgccatcactggcttagcctgtggcgatgctggggtccatcacctgattgccagagaactggaaattcagttctttgtttctggcttcggcctttctcctccttctatgtgcagtgttaagggttaaggaagaacacggggtctggcatgcagcagcctatgccctgttcattgtccctttaggagctgtgtgacctgggctcttcatccacaggaggccctgcttcgtgggaccacatggaaagggctcagcacaggactaggcagggtgcccccatgcactgaaaggtacccaaaccaccaagcacagtgtcattcatcagaaagacatccacatcaaggccttctttgtcgtttccctcccatttcatccttgtccttccctgcccatattaaatttgggccttattaaaatggagccattctgaacgtctctcattgccactgcctttttttcctgattttctccaccctttctttgcttctggatgtctggttaaaaactgttgaatacagcctggagaccgacagaatgacagcacgtggggagaaggctgccctctccaaatatacaatgccaggtgctaaagtccctgtatccaaaaaacagtggaagtccctttcagaatgcagctgctgggaggcaggaacaactcctccagtcagttcccctatgcttcagccagggttctccagagacacagacccacggggtgtgtgtgtgtgtgtgtgtgtgtgtgtgtgtgtgtgtgaatgtacacacacttacaaatacatatatatttacacatatatttgtaatatgtgtctatgtatatatttgtgtatgtgtgtactttacgtgtgtatgtgtacacatgcaaagagatttattttaagggattggtttaaatgattgtggaggctgacaagtccaaaatccataggacagggcagcaggctggaaactcaggcaggagttgatgctgcagtcttagggcagaattc

SEQ ID NO: 206127 - DNA, 1000 bp, Homo Sapiens
ttgaggtcaagagttagtgaaaatacaaaatcagcggggcatagtggtgcacacttgtaatctcagctactcaggaggctgaggcaggagaatcacttgaactcgggaggcagaggttgcagtaagccgagatcatgccactgcactccagcctggggaacaaagcaagactctgtctcaaaataagaaaaaaaaatagcactactaaacagaacagtcacaaagcttagcttttctctttatactactaatagtgtcataagatggttcatacatgtgccatacatgagtcctatgaggggaacctgtgaaatttcatactgagctaaagcccatgctgtgggctctgggcagcttgcaacacactttcccagcaggtcaagggcctctactccttcttttttttttttgagatggagtctcgctctgttgctcaggctggaatgcagtggcacaatctgggctcactgcaacctccacctcccaggttcaagcgattctcctgcctcagcctcctgagtagctgggattacaggtgcatgccaccaggcctagctaattttttttttgtatttttagtagagacagggtttcaccatattggccaggctggtcttgaactcctgacctcaggtgatccacccaccacggcctcccaaagtgccagaattacaggcgggagccatcacacccggcctctactccttcttaacaggtgaccagcctgggacagccagccaagctggacatggctgacaatgtgtttgatgaccagtgcgtgggttgtgttgaagaaatggagaaaagggtgccccagctgttaaaagaagaactgagagtgaatacaaatttaaacattgactagaaaaagtcggaaacatggaagcaactcaaaaacaaaataagctattctgaaaaactcagtgatttccatgaaacagctctagtggcctatactgggaacactgcaaatgattgtaacaaagctgtaagagaattc

SEQ ID NO: 206128 - DNA, 1000 bp, Homo Sapiens
aactcactgcaacctccacttccccccacgttcaggcgattctcctgcctcagcctcacacctagctaattttttgtatttttagtagagacaaagttttgccgtgttggccaggctgctctcaatctactgacctcaagtgatccttctacctgggcctcccaaagtgctgggattacagtcatgagccactgagcccgacctaattttcttaaatgtatgtagagcgcacatttatttcagtgtttaatattgtaagtgttttggggctttccaagtttggtgatgtttttgtgaccagaaatatgccatagaaactatttctatcaattaggctatggtaaaattggtttaattacaagtcacagttttcaagaacatattaaatcctcacactaagtaagaacttactgtattcagcaggcaatggagagtcagaaaagcttaagcaaaaatgagcagttcttttaccagaacataggtgataagacataattttatgaaacatcaggtttataacaaatttattacattatgtagatattattagggctgtgaagataaaggccacataggcccatttatttgcaagtcagcacataaacatagaaggatgattaacaatataagcttctagagcttatgctaaatgttggtgggaacagacaatcaattatggagaacttcagaggacactaagcttggatgggatcttggaagttttacaggtgaatgtcattccatctattggctggctttcactagattaataaatgaacaacaaaaataacatacatcagaagttataatcatttcattgagtatctgtcacatctatgccattgtagtgtactaggtgacttatagcacttatgagtcctctacttacaaaatgcttttcacaaaatatgaaactccaggcaaagattcagacatataatgtttgttttaaaatctctttttttttttttttttgagacagagtctcactctgtcaccc

SEQ ID NO: 206129 - DNA, 1000 bp, Homo Sapiens
gtaggcctgtgtgttgctaatgcagaaagatgtctccaataggttgtagattgaaaagtgattagttggaaaagatttttgctaatgtatatttattcataatgatgtgcatgcatacatacatgtgtacacacacaaacaaaactcacctgcaaaaatatatatttaaaaaagttaacactatttgcctcttagtactgggcattatgggtgattatccacaaatactgttttgaattcttttaaaactatgacattattccacagatgataaaagaaccccaaacatcagaagtcagatgcccaatggaaaaaagtccttctctcattctaaccccattctcactctttggggacaatagtttcttcgtatggctctagaaatgttctctctatagccatattttcttttcttttctttgtttttttttttttttttttgagacagagtctcactgtgttccccaggctggagtgcagtggcatgatcttggctcactacaacttcctcctctcaggttcaattgattctcctgcctcagcctccctagtagctgagattacaggtgcccgccaccacgcccagctaatttttgtatttttagtagagatggggttttaacatgtcggccaggctggtctcaaactctttacctcaagagatctgcccatcttggcctcccaaagtgctgggattataggtgtgagccaccgtgtctggcctgtattttcaagtaattccaattcaccaactaaccatggaagtaaggtttatcaaatctctgagtaaaaaaaaacatgatgatctaaaataatattctaaccaggacaaattcgtcatgtattatgcagggctaatctgtttctcattaaaattatggattaaaatttaatcctcacacttttagaaacaagaaaatacagtctttgtactctatttgtttacctagttgaaaggtgtatatttagctttgaaagagaaatcttaatgcaagaattc

SEQ ID NO: 206130 - DNA, 1000 bp, Homo Sapiens
acaacagaaaatagaagtgagaaatgaaatgttggaattggaaggaaaaaaggtaatgagtcattattatatgtatctgtttttaatttagcattgatcagaaaaggagggtgaagtgggccctgacaaagtttcagaatagaaggactgaacatggccagtaaaattttaagctactctataaataaaaggattcaataatatttccagtctctatctgctgcagataagaagccaactccaacaggtggaagagtaccataactctgagcaggaaagaatgaggaatgaaatctctgacctaacagaagagcttcatcagaaggagatcactatagcaactgtcacaaagaaagctgcccttctggaaaaacagttaaaaatggaattagaaataaaagaaaaaatgttagcaaaacaaaaggtatgcaagcaggcagaatagcacttgtctagggcacattcttgctcagtgccaatagtagccttcattattgactaatgaaaacattacatttcttggtattatttctgagactagcttcacagaaatgctttgtggtgttacataaaacctttcagagataacacaaagtgtcaccaacaaaaaggactagggaaatgacagtgcaagacaatttcattaaatctcatctttccattttcttgtaacctatattctgatcacctcccacagtacactctaatcaaatatttcttcctgagtatgtttttctgtatttctcttccattaacatttttatctttaaaaaaaagtctctattccagctcttcttcaacacttcctacccctcccccacacttcatgtatttctttcaggctttttacaaatggatgttgaaacatgaaaattagttcatatttactgaacatgcagtcaatgcacagcatggtacgtgaggaaaaacagcaattgtaacattcttctgttaaaatactacaagtaacttctacatccttcctttccttcctgcctat

SEQ ID NO: 206131 - DNA, 1000 bp, Homo Sapiens
tggcaaaacccaaaattacttttgcaccatgctaatacaccatccagattttctgtgtggttgatgcttgcacgaggggtttctgagttggccgagagagaaactgcatctggtacattgccacctttgcttgtggtcacactcacagtaattttccaggcaagcctcgtgggccctgctatctgtcccagggaaagaatttaggagagtaacattctctaccacactactgaggtcctgtttgaggggaaccagttcatatgttcattcattcagccaagttttacgttgcagattctgagtttttggctggacactggagaggcctacaacaagaaatgatccctccgggacttcctgagggagacagataagggaataacttgcaatgtaatggcaaaaagggataagagagattcgtggccctttgggaatgattcttacccagcatgtctctttcaggtgcatagcagcctggctggaagcattctgagtgctctgtctgccctggtgggtttcattctcctgtctgtcaacccggctgcattaaatcctgcctcattgcagtgtaagttggacgaaaaggatataccaaccagacttcttctttcttatgattatcattcaccttacaccatggactgccatagagccaaagccagtctggctgtaagtattttttagatgggatgttctaattttatgaggtttctgaaagccttgatttcttattattccatcctttgaaaatctctctgttaattctggtttgggcatctggaggaaggccaaggttatgtaaatcaaaggggggctgcatggatgagattaaggggattacatactaacagagtggaattgaaatgtcagataaggttgatgatgaaaaactaaaacttacggtttgtagagtttcttaattactcaactaatctaattttggaggcataaattatgagtttgtcaaactgagaatgttggtacatagagtggtgaattc

SEQ ID NO: 206132 - DNA, 1000 bp, Homo Sapiens
attctcctccatcaggagatggtcactctccctcctggtctatacccgtggggctgctcctccatcaggagatggtcactcccctcctggtctatacctgtgggattctcctccctcagaagatggtcactccccctcctggtctatacccatgggattctcctccctcagaagatggtcactccccctcctggtctatacccgtggggctgctcctccatcaggagatggtcactctccctctcggttgctcagtccaaaaacaacctctctggaaaactgcgtggaatttttttttaaagaattgaaactagaactagcatttgatccagccatctgcctactgggaatacacccaaagaaaaataaatcattatatcagaaagatagaatatgcatgtggatgttcattgcagcaccatttactatagcaaagatgggcagttgagctaagtgtccaacagtggtagactggataaagagaatgtgttacacacacagcatggaatattactcaggcatagcaaagaatgaaatcatgccttttgcagcaacatggttggaggtggaggtcaggagttagagaccagcctggccaacatggtgaaatcgtgtctctactaaaaatacaaaaattagccgggcatgggggtgcacacctgtagtcccagctactctggaggctgaggcaggagaatcgcttgaacccaggaggtggagatggcagtgagctgagatcacaccactgcactccagcctgggcaacagagtgaaatcctgtctcaaaaacaaaaataaaaacaaaaaaagcatacaaaccacaggagctcctcttggtccccctttgtctttcattccacctccagaaatcccagcagaatcaccttcaaaaactcctagaatccaatttttcccctccattgctactgccctgatctgagcctccataacccttacccaaatgcttcctaaacgtatcctggctggtgctgctgaattc

SEQ ID NO: 206133 - DNA, 1000 bp, Homo Sapiens
tacatacggacataaagaaggggacagtagacaccagggcctacttgaaggtgctttgtgacaggagggtgaggattgaaaaaccacctgcaaggtactatgctcattacctgaatgtaaaataatgtgaacaccaaaccaccgcaacacgcaatttacccacgtaacactctgaacctaaaataaaagttggaaaggaaaaaaagagaaatcagttcttagtctgtctttactcttaaggtcattctatttttgctgttctagagttttggtaaaatatgtctagatatgtattttactgtatctatttttttaaaaaaaacacacttttttagaaatggggacttactgtgttaatcggatcttactgcaggctggagtgcagtagtgtgatcaaagctcactgtggcctcaaacttctgggctcaagtgatcctcctgcctttgcctcccaagtagctgggattataggcacgagccaccatgcccagttttttgtatttattctgcttgtaatttgttgttctttctgaatctatgaattttgtgttaaatctggaaaattgtcttgccatgtcttttccctttcttcttctggaacttcaattaggcatatgttagacctacatgggagtctctttcagttgtctttgacattttccatttttttgtttctttattttacatccatggttctcaaactacaggtgaaggcatactgggaaaccagagtgaattcacaggaacactgtgggaatgttgcatttttgagagagacacagctgttcgttatataccatgcaaaatactaaaattaagttgtttgagcctaactacttaataaaagaaatgttgggaatttcttttgctttggggatactataaaaaaatcattcaggcactaacccatgaatggtgccatgaaccaaggaagtttatgaatctctattctagatttttggtatttattttctcaagattatcttccagtcatgaattc

SEQ ID NO: 206134 - DNA, 1000 bp, Homo Sapiens
aggtaaaaaaactatgacctgctgaagtgcttgctgaaggcaaagggaatacagaatggatagtagaagaaggtagtcatcaataccagctatgaccagttgcagaaatgacgactgtaattgtcatgagtatttcctccttattttgttaagaataagtttgtgcatgtgtacacttatacaagaaaatatcttttcctttcttcctttatcttgtgacataagatttattgactttatatcagcatttaagtgttgttaactttatgtaatagcatttaggttgaagattagtgcacttctggttgtatgaaggatagctgtattatgttaggtgtaattatgaccttatttttatctttgaagattatgtataattccaggagatgtgtatgggttccagttgacaaggggtggacttgtgatggttaatatcaagtgtcaacttgattgaattgaaggatgcgaagtatttttcctgggtgcatccgtaaggatgttgccaaaggagattaatatttaagtcagtgtgctggttggacaacatttaatcagttgccagcagggctagcataaagcaggcagaagaaattggaaggactagacttgctgagtcttccagccttcatcttttttctttcttccatgctggatgcttcctgcccaaacatcagactccaagttcttcagcttttggactcaaacttacaccagtgatttgcaaggagctctcaggcctctggccacagactgaaggctgcactctcattttccctacttttgaggttttgggacttggactggtttccttgctcctcagcttgcagacagcctattgtgggacttcaccttgtgatcacatgtgtcgattctccttaataaactcctttgtatatatacatatatcctattttatatatatatatccctctagagaacacttactaatacaccctgaatgatggttaggccaattaagaaggaaataaagaaaattcgt

SEQ ID NO: 206135 - DNA, 1000 bp, Homo Sapiens
ttgtctctcagatcacagtgcaatcaaactagaactcaggattaagaaactcactcataaccgctcaactacatggaaactgaacaacctgctcctgaatgactactgggtacataatgaaataaagccagaaataaagatgttctttgaaaccaacgagaacaaagacacaacataccagaatctctgggacatattcaaagcagtgtgtagagggaaatttgtagcactaaatgcccacaagagaaagcaggaaagatctaaaattgacaccttaacatcacaattaaaagaactagagaagcaagagcaaacacattcaaaagctagcagaaggcaagaaataactaagatcagagcagaactgaaggaaacagagacacaaaaaacccttcaaaaaatcaatgaatccaggagctagttttttgaaaagatcaacaaaattgatagaccactagcaagactaataaagaagaaaagagagaagaatcaaacagatgcaataaaaaatgataaaggggatatcaccactgatcccacagaaatacaaactaccatcagagaatactataaacacctctatgcaaataaactagaaaatctggaagaaatggataaattcctcgacacatacactctcccaagactaaaccaggaagaagttgaatctctgaatagaccaataacaggctctgaaattgaggtaataattaatagcttaccaaccaaaaaaagtccaggaccagatggattcacagctgaattctaccagaggtacaaggaggagctggtaccattccttctgaaactattccaatcaatagaaaaagagggaatcctccctaactcattttatgaggccaacatcatcctgataccaaagcctggcagagacacaacaaaaaaagagaattttagaccaatatccctgatgaacatcgatgcaaaaatcctcagtaaaatactggcaaaccgaatccagcagcacatcaaaaagctt

SEQ ID NO: 206136 - DNA, 1000 bp, Homo Sapiens
acactaaaacccaagttgtagagtcacaaagtctgagctgagtataccctgctacacagcagctttgctttcctgggagttacttgtgtctaccgagccaaactttaatcttgagtattccaaaatgaaagctttgtaagtgaagtgctatgtaaatgaaaaagtaggaccattttgatgacaaaagggtttaggaatttttttttcttttttttgagatggagtcttactctgttgcccaggctggagtgcaatgatgcaatcttggctcactgcaacttccacctcccagaatcaagcgattttcctgcctcagcctcccaggtagctgggactataggagccctccacctcgcctggctgatttttgtatttttagtagtatttaaccatattaaacaggctggtcttgaactcctgacctcaggttatccacccacctcagcctcccaaagttctggttttataggcgtgagccgccacacttgaccaggaattgagtgtagttctggttcttatttttggcacttctttccctcttttgtctttgtatttgttctaaaacgcctttttttttttttttttttttttgacagagtttctgtcttgcccatgctggagtgcagtgcgcaatcttggttcactgcaaccttcaccttctgggttcaagcaattctcctgtctcagcctcccaagtaggtgagattacaggcatgtgccaccatgcccagctaatttttgtatttttagtaggtacggggtttcaccatgttggcgaggctggtctggaactcctgacctcaggtgatctgccctcctcggcttctcaaagtgctgggattacaggcgtgagccactgcgcctggccctcaacacatttctgatgttggtgttaggcctttgagttattccagttgcattgttgtctgcttttgaattatgtgatgctagctgagaagacctcatctagcaggtaaactggattgcatgttgtaagctt

SEQ ID NO: 206137 - DNA, 1000 bp, Homo Sapiens
tcttacaagtacaaaaacttccccgtattagagactcagactaccagaagaaacatcaagacatagactctgctgcagctgaatgcaccctgatagccccagagaaaaccaccccaccaggaaagcaggtatacaggcatcccctcagtggcagactgcactatcctgcacaaaggtaacaccacttaaccatcttctttcttgatctgctcttcagaacacaggaatggctacttgtaagaaatggcctgaagtagagatgcatggctaaggaatagagacttaaatttcctttgttaaatcaaataggcaaaagtagaaaactagtgttaatgagggaaaaagaaggggacagtttattaagagaattaatacagtccaatgaaggcatggcaagatttaggatatatattactcagatgccttggagatggtacttattagacacttagaaaaaaagtctctattggactctgtgaaattcataaagaatgaatttgccatcccaaagtggattatatttttcaaaagagcacaaacaatagctttatagtgtggctgttctactacatttacaaagaatctacaagatatgcagattaagtaaatgtcatttagtctcattgctgaatgttttcatactctacaacgcagttacatttagagtacacatagtttatcttaatcattgaacatttatacaactgtaaggaacctcatccttccttgtcccatcaaaaaaaaccacaaaataattaattttaaaagatacataggtgaaggataaatctgtaattaattaacatgaactatatatacattaaagaagggagaaaaacactttataaacaagccaaaccgccactctctttatctatcatctattggggtacacaataaaataaatgtgttaaatcaccaattatttcactgacatttttgacctatgacaaattcaatgttgactatccaattgataattttatacatcttggaattc

SEQ ID NO: 206138 - DNA, 1000 bp, Homo Sapiens
acttttggtttctgcagagattgcttttagcctgcacatagtcagcatctccaacacccatccctggggcatcagacctgaaatgggaagggatgatgcaattctagtatccaaaggcactaagctctatggattccaacaagccccctcttctccgcaaccactgccactgtcttaatgtcttctgttcaggccctcatctctcaagacattactttaatgaactagtttctctacacctaatttctacttgcttcacttcaaaactccagacagccaccgagctacctttctagaatacaggcctgaccctctctgcctacaggactaagtcccaaccctggcacagcatgcaaggcccctgcctgcctttccagctggaagcatgggctttggagtcctacagatcattgcagtgacacttagataaaccacttgctggctatgtgaacacacatgtgtttctgcacccatttccacatctgtgtgttgggaatagcatgatcagcctcccagagctactgtgaggaccgaatccaagttctaaagagcctagatctcaccaacctagctccagggtcctctctctttcccatcttgctataccagctcttcataatcaatgagaattgactcaagggtaaaaaaaaaaaaatacatgcaagatctaaaaatgaagggtcataaatttaaaaattaggccaccacaatgtgaaagaaaccaaaattaactcattatcaaaataatgtaggaggacggaaggaacaggaagagaaggaaaacagtacatttaggaagaaatgcttttaaaatataagtctctatgatgttttgagcctcatttgctccaaagatttaggaagatgacatttcaaaagctcacaaagacgacacttctactttttaaaaactatttcctaattattatcttcagagaactaagaagtactttcacagactgaatgttaataaaattctcagaggaaattctggcatcag

SEQ ID NO: 206139 - DNA, 1000 bp, Homo Sapiens
atgaccgcaggcatgtgctccacttgcaggcctggcccataaaaatctccctgtttgaatgttcattccattcctgtttttccggctgaatggagaggattcccagggcttagaggcagtgaggtcataaaatgaagacagcctgggtccctggaagcctatgaaagcctgccccaatcattttggagtttactgagggataacttctattttaggccgccgcaattgagagtttatctgttaaaacagctagcactataatgtccgtgaaagtaattggcaaatctaaaagatgggaaagatttttttttaaatgaaagaaaaggggaggaaaaatgagagtaaggaaagggaaactgatcttttgataaaaggcagttgaaagaaatacaggccaagtgcagtggctcacgcttgtaatcccaggtctgtgggagggtgaggtggatggatcacttgagcccaggagttggagatcagcctgggcaacatggtgaaatcccgtcaatacaaaaaatacacaaaattagctgggtgtatgtgcctgtaaatccagctacttgggggggctgaggcaggaggatcgatcacttgagcctcggaggttgaggctgtggtgagctgtgattgcaccactgcactccagcctgggtgacagactgacaccatctcaaaaagaaaaaataaagaaaaatataagtattctcaactattctgttgacttctagaattgtgtccagcatgggtgggttcttggtctcactgacttaaaagaatgaagccacggactctctcggtgagtgttacagttcttaaaggcggcacatttggagttgttcattctgatgttcggagtttcctccttttggtgggttcctggcctcgctagcttcaggagtgaagctgcagaccttcgcggtgttacagctcataaatgcagcgtggaccgaaggagtgagcaatagcaagatttattgcaaaaaccaaaagagcaaagctt

SEQ ID NO: 206140 - DNA, 1000 bp, Homo Sapiens
gtgagccccccacaaggcagcagacggcgggggacccctggggcccatagctgaagctgtgctctccaagacctgtctacacggcccgtgtttctgcattcccgtcacattgggagccacagccacagctgtgcaggaaaaaacacttgtgaacggtgttaccactgcccctgccaagatggccccatggccctcaggccctggaagtcacgccctgtgcagacctttcctacatggaatcaggactggcttgtgtgaccaacagaatgtggcagaagtaacagtgcgacggcccgggctgtgccacggtggcctggtgcctccaccttggccttttccatagttccccatgggggaagccaatcgccaggctggcaagaagttgaacagccctggagggagacccccatgcagaggaagcaccccacggccacctgatactgccgccttggaaggggcttctccagccccagtcaagcctgcagccaacacagcccctgagctgtggcagccacttgagaccccgagccagaaccagcctgaggagtcactcccagattcctgacccacaaaactgagagtgatgaccattggcattttgagcctctgcatttggggctaatgtgtgaaggcagcattagaacattgtgatcagttgaattgtgtcgccccaaaattcatattttgaagtcttagcccccgtacgtctgaatgggaccttatttggaaacagggttgttgcagatgccatcacttaagaggaggctgggtccccaatcccataggaaggagaaaatgtggacacagacacagacaatgccacgtgaacctgaaggcagacatcggggtgacacatctgtgagccaaggggagccaaagactgacagccaccaggggagaggcccaggacacaggctccggcacggccctgcaaggaaccagctcggcccacaccttgaccttggacttccagcctccaggatggtgaggtaatgaattc

SEQ ID NO: 206141 - DNA, 1000 bp, Homo Sapiens
cacagatacagacacacagatccactcatacatgcagagacacctgcaaacacagaagcacacacacagacacacacaaacactggggtacttgtgaccactccctgtgtgggcaccatcacacacactggatcagagccatgggcattgtggctttcttgtggatgtggtggcatttgctgacataaaaagaaagagcgagagggaggcggcacccatctgaggagcacaggcactgatgaggagtgtggctgatgggacaggcagtgagtgagcggtcgggtaagcatgtttataaatcaagaggagcgcaagcttgtcctcgtgtggatctgctgtgtgcacaggggtgcagttcgtgtacacttgccctgggatgttggtcatgggtgctaatggcaggcatgtgttagacacaagtgctgcctgtgtctccttgaatacgggtgtgcctgtcctgtcgtatgtcctcggtgcttgctggaactgctgctcagcccctctcgcctctggcccagctccagtgcctgccctgagggtcctgcatcccgcactcacacttgcacctgcagattccccagggcagccggctccagtccccacagggctcctaatagccgaaggcatgggaaacacctggtcacttctgtctaagccagtgacctttgatccaattgataggagcgccttggagggctgcaggccagcagagagtggggatggaaggaaggtgggtgattccttcctcccccttcccacctccccagcagcaggtaaagatggtgatggatgaagctggaggaaaaggcagattggttttgggtcctgatgaataaagtctttcatgcttcctgaaattgctagaaggccgggggaacacagccattgcaggaagctgagggattttcctcctgatcggcggccccagggggaggactgacaagtggttatcttgtttattgttggagggagagaaacgagctgtctggcattgtccatt

SEQ ID NO: 206142 - DNA, 1000 bp, Homo Sapiens
taatagtatgtattataagtctttgttcaagtattttaagttctttatttaagagctgagatgggaagattgcttgagttgggaggtggagattgcagtgagccggtgtcacaccactgcactccagcatgggcaaccaagcaagaccctgtctccaaaaaaaccccaatttttctatcttttgctactttttccttttttgaatactatgttgaatattagcaacataataggcatcctctctaattactgagctctccgataagtatatcatttctcaaacaaaagcctagattcatctgtaatataatgacactcatagggacagtgagggggcaaaaatagtttttgtcctgaacaaccattaatggtggtgccacttgctaagacaaagaatacaggaaggccaggcatggtagctcacgcccgtaatcccaacactttgggagcccgaagcaggaggattgcttgaacccaggggttcgagaccagcccaggcaacatagaccctcatctatacaaaaaatacaaaaattgggctgggcgcggtggctcaagcctgtaatcccagcactttgggagggtgaggcaggcagatcatgagtcaggagttcgacaccagcctggccaatatggtgaaaccacgtctctactaaaaaatacaaaaattagccgggtgtggtggcgtgcgcttgtagtcccagcttcttgggaggctgaggcaggagaatcacttgaacctgggaggcagaggttgcagtgagccaagatcgcgccactacactccagcctgggcgacagagcgagactccatctgaaaaaaaaaaaatacaaaaattagtggggtgcagtggcatgtacctgtagttccagctacctgggagactgaggtgggagaatctcttgagcacaccactgcactccagcctgtgcaacagagcaagaccctgtctcaaaaaaaatacaagaatacaggaggaagagcaagaagatggaattc

SEQ ID NO: 206143 - DNA, 1000 bp, Homo Sapiens
tgtagggaatgtgtatgtgatcttgtgtgtgtgtgtttgtggagcatgtgtgagtgtgtgtatgtgtttgtgtgggacatgtgtgtgtttgtgggacctgtgtgtgtgtgtgtgtttgtatagggagtgtgtatgtgatcttgtgtgtgtgtttgtggagcatgtgtgagtgcttggtgggggaggaggtttctatctgtctatgagtgataggcgtgatggacatgtaacacttagcccaagtgaatgtgaagaccacagagggaaaagggaagagcagctactcaaaggggctgatgatttacctaactctcccctggtccaccccaagagaaggatcggttgtgaaagtaccaattactagaagtgtgatggccactccaccagccacctggagcccagtggaaggagcgtctgcagagaggccctgcctgccatttgttctggcccagccacgggcaagcatctcaggaaaaagggatttcctggaacagtgcagcagcaacaggactgaattgtgggttgagtcccgaggatctcctctggctcctctaggcccagaggcctcttctgctccagtctggggtcctttcctagggcacaatgactcgggtgcccctagctagtctagtcatggaagattgtaaatatagcttctcatgtcgtcgaacttttagaggcaactgtaggaaaacagtagcaggcaggtttcatcatgcaatgataatgctatttttatgtatagcttattgaaacctgattatgtggcagccaagaactagatgaagctcattatgcacactgtgtcatttaatgttcaaacagccctgtgcgatagatgctgtcatttcccttcctttagaaatgaggagaccaactaacccaaggaaggttgcacattggtaagtggcagagccagagtttgaattcagaaagtctgactcttcacagcccccctcaaacactaagcttccccttatgagcaaaggatcaggttaac

SEQ ID NO: 206144 - DNA, 1000 bp, Homo Sapiens
ctcttccctagacagataatttaagaggtattctctatgcctcttaggagcaatccccagtggaatctagtccacattgctcacagaggcatgaccttgaaaacgtactcgtacattgccctttcctccttctcactcttcactctcattcctgaccctgggatctccttccaagtaaactacctacacccaagaccttatctcagattcttgagaactcacaccattatatcatgtaaacatctagcactaaatacaccagtaaatatgattgtattagggttctccagaggggcagaaacaattggatctatgtatacataggagagagtttattagggagaattggatcacatcattacaaggtgaagtcccatgataggctatctgcaagttggggagagaagcctataatttctcagtccaagttggaaagactcaaaaccagaaaagctgacagtgcagccttcagtctgctgcagaaggcctgacagccctggggaagccactggtgcaagtcacagattccaaaagccaatgaacatggagtctggtatctatgggcagaagagtggaagcaagtgtccaaaacaggcaaaagaaaaagagccggcagatttagcaagccagcttatcccaccttcttccccctgctttattctagccatgctggcagctgattggatgatgctaacccacactgagggtgggtcttcctctcctagctcactgaggcaaatgtcagtctcctctggcaataccctcacaaacacacccagaaacaatgcttcaccagccatctaggcatccctcagtccaatcaagttgacacctaatattaaccatcacaacaaaacaaaatattgaatattttcatgagctattacaaagctaaaattttaaattattatgcagtaaagtccttgctgcaattagaaaacagtaccaattcaaactgcataaaaatacaaaatgacactactataaatgaaatgaattc

SEQ ID NO: 206145 - DNA, 1000 bp, Homo Sapiens
tatgttctgtcttatcctttacaaaaacagtttactgacccctgctctagacctccaaagacctggtatcctctttcctggtgttcaagttcagagaggtgtctggagtaggggctgagcctggcctggatgggcagtgctgtgacaagtgtctaggatggccgggtatcctgcacagagctagaaggctgcctggcacgggtgaaagcagagctgctccctgaccctctgcccctccctcctccaccctggcctgctttagctttccccagacatggccaacaagggtccttcctatggcatgagccgcgaagtgcagtccaaaatcgagaagaagtatgacgaggagctggaggagcggctggtggagtggatcatagtgcagtgtggccctgatgtgggccgcccagaccgtgggcgcttgggcttccaggtctggctgaagaatggcgtggtgagtggcaccctgggctagggcgctggggggctggggtgtgccaccctgtgagtcctgggccaatccctgagctgactgctaagctgcgtcctatgccctatgcctggtagattctgagcaagctggtgaacagcctgtaccctgatggctccaagccggtgaaggtgcccgagaacccaccctccatggtcttcaagcagatggagcaggtggctcagttcctgaaggcggctgaggactatggggtcatcaagactgacatgttccagactgttgacctctttgaaggtagagaggaagaggctgggggaggaggcgggcaggaggacagggtgctgggacagggagagggaatgaccagaatatgccacaactaggggtgtgcttgcccgcacacagcagggatgggatatgccgagaataacacgccacgctcacagggcccactgagaggcctcccttgaattggggacaactcttggccctggtttggccatttttttgtgagagacgggggcaggccctggcttggagtcttgttta

SEQ ID NO: 206146 - DNA, 1000 bp, Homo Sapiens
gcaggtccaaaatgttgaatagatagttcgactttcaagatttttagatgccttcttccgcccctttcaattggcaaatgcatcatagcaaaaatctgaacagaacatctaatttatgttcgtgtgcttcccttctttctggagtcttgcatcctcaagtctctgctgcttggtagctctcaggtgccctctaacacattatctttcatattttacccagccttactaattagtctagcaagagggatggtcatattcaagttcatgtactatagctagaagtaaatatccttgtgttagctattaagatttgacgaggcatgagaaataaagatgcaaaattgtcctcatttacagatgatatgattcaacactttcagtatacaggagccaagactgaaaaaaatgacttaaaacatgatgataaattattatgataggtgaataaaaaacaaaaataaatcgtttgtaatgtatacattatataattagaaaacaccctattttgcaaagcaaaaaacttgaaacagacctcacaatgtgtacgatttttaaagggaaaaattatatactattggaagatttaaagtaagttgttaacaaatagtaagcatgtaatgtcttgtaataaaaacacaacaccataatgatgacaattctgtcaatattaatatataaatttaaaagaacagtaaaatagaaatgttttctgcaatcactgtgaagtcaagcccaaattttatgtagaaagataaaacaaccagaaaattcctaataaggcggatggatagccaggaggaacaagaatgaacatataggaaaatattgtataaccttattaaagaattttatttaaagaagcaacttgatcctattcccattttagtaaaatcactgtaatacatagaaaggattatgaaccaacaacactgaggagagaagttagctttttcagagagaagttagctttttcagtgatactttcaaaatcatagaattc

SEQ ID NO: 206147 - DNA, 1000 bp, Homo Sapiens
tctctacatgtttattgttgttataactaactctactcgatctcttaattttgtgtttttagtcaggttagtcaggagtatgaaatctgtctctctttgttctatttttttatctttctttctttacaaagataatcaaatctctttgttcttaccttcctttatttccccatgaggattttacttttttctttttttaaataaagatgggtttttgccatgttgcccaggctggtctcaaactcctgagctcgagtgattctcctgcctcagcctcccaagtgctaggattacaggtgtgagccaccatgccagcccagatttcactttaaaaaaatcttgcctttgtcatgaatgaaatcacttttattttctagctttctgttgcttgtgtagaggaatgcaatatttttttgtgtatttgtatccctgcaaccttgctgaatatgtttgttctaaagattatttttactgcatttttttgagttttgaactcatatagccatgatttattaaactctttggataggcactatactaagattatacactaaactctattattcagaaaataaaacctctttgtcagttagcattgggctcaactttaattgccaaaattccaaaaggatagtggctgaaacaagacagaagtttatttctttcccatgtaactgtggaccagagttgggctgtccaggttgtataatagctccagggttatcagggaccagtcttcttctatcattttactctgccatactcaacacatcacttctacttcatggtccaaggcggggctgcttgggtgccagctatcacttccagaccaaacctgtctcattgtgcaatggttttataatgaatatttttataacttatggcctaaatagttaatagtagtccttgcctaagcaccaagttcatgactagacatcaatagattgcattcaaatttggttgtgtgtgtacttaaaataagcatacattcttggaattc

SEQ ID NO: 206148 - DNA, 1000 bp, Homo Sapiens
ttcaaaatagttggccgggcacagtggttcatgcctataatcccagcaccttgggaagctgaggcaggtggatcacctgaggtcaggagatcgagacctgcctggacaacatggtgaaaccttgtctgtactaaaactacaaaaattagctgggcatggtggcgcacgcctgtaatcccagctactcaggaagctgaggcaggagaatcactggaaccaacgaggcagaggtcgcagtgagccgagatcacgccactgcactccagcctaggtgacagaatgagactcaatctcaaaaaaaaaattaataaataaaacaaaataataaaaaataaaatagttaagagaggatgttaatgtcctcaacacaaataaataataagtatttgagatgatgaatatgctaattagcctgatttgctcattccacaatgtatacatgtatcaaaataccacattatataccccataaatatatataatagttattagtcagttaaaaataaaataaaaataatagaatactggaaaacatagataaaagttgctgatttcaacatttgataacatgtattagtgtaagatctctcatttcacataaggaaactttaggtgctatggaatcaactttacacaaggccagcctgttctctgttagggccctgaatgagggcctaaacacaaagctctcatcccacaatgagacgggatctaaacctttgcgtctctgcatctcatcccacaacatcctctcaccctacagcagtactggttccattaagccgtggcatccaccatgatttccactcaattttggacaaagaagacacaataaatcacttttggtaggacacaaacatccatgtttcattactcccaagcactctaaaaatccaactgggttggaataaatcctaaggatcacctggggacctttaagagggcagatgaccaggctcaacctcaaacttactaaatcagaaattatgggaatgaattc

SEQ ID NO: 206149 - DNA, 1000 bp, Homo Sapiens
gtttgtatcataagcaagagtgatttgtgtgctgggtgcagtctttagtttcttagattataaatttctaattgtgctaaacccattccgcaacttaagtaaaagtagggttaatggagagagaagtgtaaaatcttccaaaaatcaaaacctgaatgaagctccccaattagagattgtagtgttgtttccgtatggctactctgtggtaggaagcagagagaaacagtatattgggatatttaagtgctcttttgtcttgtaaatgaggaatttctgtgttgaattgtgtgctgagatgaggagattccataaattgttatggtgttagttaattattcagatagcattagataagaatacatttatcaatgtttcatttctttcttaagttttaaaaatgcttagcatagtcagattctatctggtaggagtaagagaaattattaaaccttaaccattgtagctggtttttaaattttttcttcataatttgtattatactgtttccacaagttcaatactcatggaaaattctgtattttaaaaaagacttttgttagaaaagggaacaggtacttttttcttctggggatacatgctattgagtacagggactggcctgggttagtagactgtgtactttgctgttttgtacatctttcatctgtttctcagaccccacatctgtatcctcgtggcacctttgtgcaggcagtctggtccctggaataagacctgctgttttgatttggtgattcccacagccctgagtggtggctctaaggagaaaggagaatttcccaatcctttctcttcctgtcttctttaaacctcgtcatctcctctatttagttgaataaattccatcattgttgtaaaagttttatcttaccatttgttgcaatgcaaacaatagctatggataatactgcctatatcatttgacaagataggcattgctttcaaatctgttattttaccactgccttatgaattc

SEQ ID NO: 206150 - DNA, 1000 bp, Homo Sapiens
ctgcaacatacataagagatgacaggctaatgttcgcactgtatgttaaaacctactgcaaatcacccaacagaaagcccacagccagactggaaaaatgaagagacagttcaaagacaaacaaatgcagataatttcttaatgtaagacaagattaaaatgtttgtcaactttgtgtgtggccctgggtgtggccatgaatgggtagtcactagtggtattcagatattcccttttttctcctcttggcacttggtgcaactgcgtcttcccacctgtgaaattatgtacagtcctgcatcttgctttggaggagaaagtgtgagcagaagtgggggaagccgcctgtgagtcctggttgcttcatcagtctggttctggggtaaggacaatcatgtagtgaaacgaagtcttcaggggacatgttgtgtttgagagaaataaacctctgtcatgttgagttttggggtgtgtatgtggtagaagcagaacctagcctattctgacagattcctccagcattgctggtgggttgacagtattaacataaaacatttgtgtgccttttatctcaaaattccacttttaggaatttatgaaacagacacactcacatttgcagagagcatggataaagagagtcattacaactttgactgcaatagcaaaggacagagaacagcctacacaccaatcaataggaaattagttaagaacattgtggaacatctatagaatgaaatgatctgaacccagaaaaataaagagagtagacgtttgtgcaccgatgtggtgtttatcccaagattagggctgggttaggatgttagagatcccagaagctaaaaagattaaggtacccttttaaattatatataatttaaaaaaacataggtacttcattaatttttaaaaatgggtttaaaagtacatttaaaatatttttattaaagtagattatctctgaaaagatatgcaataaatggatatattggaattc

SEQ ID NO: 206151 - DNA, 1000 bp, Homo Sapiens
tggtatctcactataccacttatggccaaactaatggatgtgaagtggtacctcactgtaattttcttaatgtatatttccctaatgaggataataatttttgaaaaagttaagtgtgaaaagaacacaacttgtactaccctttatgatcagaaaagtaaattattttgaatcttatgtaataaatgtccatgtattagttatactattcaagggagataacctaacaaaatacatatggcaaattaaaagtatctgttggttaagttgctatcattaacacatactttttgttagaaatctgcttaaaaacatcccagctccctcaatgctccgatctcaaccatcataggaaagtttcatgtttcccagtagaatcaactagagctcagcttgctgaagtcccaggagtattttcatttcaaagtgttattagtcaaaataaatacatctttaacgttctacttgtataaattatgccacacgtgcatgggcagagcaccgagtctagttccaatctgtgtttctcttcttcatagttgtgccattgtaaagtagtgacttaaccctttataagactcagttgtctcaggtaaagaaagcatgagcttaggaatcagagcctgagtcaaatccttgctccatcattcatagctaaacttccagagtctcagggcccttattgtaaaatgtgaaaataatccactcactctacattacactcagctctgtcagaattaaatgaggcaatgcagtgagggatgggcggggacagactgttagggactatttaagagacacatgatgatggaaggttgtttccacgatgatggaaggttgtttccaccttccatcatcaagtgatgatggtttagaggaagccagtagcagagcagataggtaggaagagtaagattctaaatatgttttcaatgccaagtcaacaggatttgcttttttattgaacgttgggcatgaaagaggagtagaggaagaattc

SEQ ID NO: 206152 - DNA, 1000 bp, Homo Sapiens
tttctgtccatacctcctgcctccccaaagaaaagaaaaaaacagacattaaaagtgaggctcagccagcaggaatttatagtcagagttgccccatgcatgtcaattatgcttaccttacaattttagaacacggagtatgtatttcaccctgtatgcccttgtctggaaaataaaggtaattaaatctcatgccgtcatgatttgaacccaaaacagcaatgtaaaacaaagccatacaccaaacaactaggttttctaggattatatctccccataaaacatcaagtatcctcagaggggttttgtaaaatcataatacattggcttttaggtcgaccagttgtccacagtagagggttggccaggggtgtccaggagtgggatgaaggccacagctgaagagaccatcttccctgatcccagacagcccctgtgacgggcctttgtgctgtgagggcctgaaccacagaagcgaacagccgttgccagcgccaagctgggccagggcccggccgtgctggcctgcgagcagcccgggcagacctccaggcagcaggacaaaggggcgctgcggtcctcagccacacagccagggtggcggggataacagccccttgtcatcgcagggttgtgacattggcatgagccgccctcacagctggaccgtcctggcgcttgtcttgggctgtggaacgagccagcccagctgtactgaaatgcccattcttttctcctttctcgtgcccctgtcaacaagcagacagacaaaagggttctattgtggctcatgccgtgagcataacctttctctgccatgggaaggagatgggtgtgctcaatggtggcagagctctgtacctgcacctcactttgtgtgtggaggggaattgggatttgtgttttgtagcctctaggacagagctcctccatgcttgcggggtcgcacattttggacggggccttaaggagtttgtgttgatattcaaaggaagaattc

SEQ ID NO: 206153 - DNA, 1000 bp, Homo Sapiens
tgtataagtaatattgcttttgagatctaatgcatttttggaaattgcaaattggttaagcaagttccaacgtgtgctcttaccattgcattccttcactcaaattgatttttatggatgggtaataacaatgagaaacgaagtatgtgtttaatggaggaagcagattaaaaacaagttgcctagactctgcaaattcatttattcaatctaatattaagtatctactatatgccaagcactgttctaggtgctgaggatagagctgttttcatggaacttatattcagaaagtggagatgaacaaatatatgtcaggtagtgatgatggctatgaagaaaaataaaacaaaataagcatttagaagaattagggtgctatattaggggaaagcctttctgatgaccttatttgaacagagccctgaaggaagaaggaaggagagcaggaaatgtgaaatatattactaaaatatttttatcaatacagttaaaataacattttcagacataaatgattatattctacttattttggatacatgaaatgttttaatttgtacattgacaaaactaagattggtttgttttacatgtttcgtaatttctttatctggcacttcaaaaagtaaattttagttaatatctaaatatggactcttattccaagctgtcagataaatggaagatagtagtacattacacaccaattgatagtcttaattattctgtaaatttaagtgttactaaaaccttatcttctttgtatattttaaaactgctactcttactgctaaagattactgaattagtaaactactaaaaataggtgtgatatgttttgtataaaattttagaaatgtcaattgaaaaaaacatatggaatggggctgctttaacatgtcttatgtgttctgttcttacagattgaaacacaattagcagagtatcacaaattggctagaaaattaaaacttattcctaaaggtgctgagaattc

SEQ ID NO: 206154 - DNA, 1000 bp, Homo Sapiens
aggaaaatcattaacttcatatttgaggaaaccttttggatgtttacttagggaatgagattcaaaattcgggctgctattgctttcttattctccttacactctgtatccaggtttggtccaatttcagaaaatgtccttcccattgctttgaatttctgtctagtttccttctaccatagcatctttaaccagaaggaagccatcttctcttactatcccactttccgccagtgtgagcttagaaatgtattgttctttttctccctctccctctgtttttctcctctggggaagcttggtaggaaaaatcagcgctataaattgcaagttttcctgctaagatccttggcgtatagctggctgctacttcacctttttaaaaacatgatcaacatcctgtgtcctgttagaattaggtaacttaaactttttatcaaggttgatttttgtttagaccctgggaatggctctgcatcatggcatatatgcaaaaacaaaaaacaaaaaacaaaaccaaaaacaaacaaacaaaaaatcctgaagaaataaattgtggagacaaatgtttataagtacaaatatgaactctgcaaaaaggattggaatccagtggcaggtagataagctgtaagactggacccataagtaatggaggactgtaccgaagaaatgtactctgtaccccaaagcttataaaataattgaacaggggatgtggaaagggaatctgatattggcaacacagcgtgtctctcctgtgagttactggaagtttgaggtaactgatgacaattctgtctgccctgataccgacattgttgtttctcatcagctccctcctcaggacccccaactatctctccactttccagcacagatgtctgtatttctgggcaccaggtcctttggaaataacactttagcaccttttaaacatttgcttcactactgagtagttatttgcacattattctgtcttccctcctaacgagaattc

SEQ ID NO: 206155 - DNA, 1000 bp, Homo Sapiens
attttattttgatttaacatgtattttatttactatgtaatatatgacatataaatatacattttatgttatattatcaccttatatttatagctttcttccgtaatgttgattaattattaccatgagtaaattatatttagagaatatgctgcagcaataaaaagcttaataacaaggaatctggactaaagtagaacagggtaagaccacatccaattaagaaagctctttggacacatatatattccaccaacagagctactaaaatgtaacttacattcttaagttttccacagtctgtgtacccatgttgccaaagatacactacagtaagaaataagagaattttatacctgaaagatttttgtctgtgctggcttgtagggaatattcttaaagactagcttcaactctgtctgttgttgttcccaatgaattatccaagtatctaagagtttagggttcatgctgccttcagccattgaggccattcacctggtgagatatgtttgccccaacaaaacatggaccccctggagaatatatacgtgcctgcagtcatgttccattatggttttgctttcagttagccaatcatatatataattcatagtaagggtatcaaggtctgtttttgttccaccagcaagcccatggcagtttgggaaccagaggcattcagagtatctgaaatcactccaagtcccaggatgggctggacctacctgagagctctacagggcaaaggcaagctgttctgtgtctattttctccttaagccatttcatacacacatctttggtgagagcacctaagtgtcataaaatgctgactttggacccaaagacagattaccttgaatgaaatgggctgggatttccaattagcagcagaaattccaggaatttccagattacttggcacccatattatcagctacatatagggagcctggacttgaaaattcaggagcatgggggtgcatggtagtgaattc

SEQ ID NO: 206156 - DNA, 1000 bp, Homo Sapiens
caaccattctgacatgtaccagattgtgtgtctgctgaacgattgttggacatacattgggctcaatctaaaagcaaacacatgaatattaccctgcacaccacagaacttaacagtgaagacacggtcactccttttctcaaggtagcccattcgttggtgaatttctctgtaacattctatgccttctttgccatctcatgcttatgtggactaagaaaatgttatttccatttttttgtcaacaactcatattattcgacacttaaaaaatttgtttgcatattaatgggacaaaactctctaattcctaatacggcgatttgcaatcccttgtcatcactgcacttttaagttgtcttcaaagtagtctgcatctgttcaccaggacttctaatgcaagcaagacatgtcattaaatatgtaggctgtttaattattgaagactgcctctttgttcattctgcatcatgttaacttaatgttttacattagaataaattctttaggagacagcatgttttcagttgaaagaatgaatgaaatcaaaagtagactgaaaaatcaagggaaagttgctgttacctccaaggcccgagtttatattaaacagatttctgctcccttgtggttccgaaggcatactctgtgcttggccttcacactattgcttagtctatcagtacttccatagacaggattgatccatatatatggattgttttgcttcttgattgaatattactgagatgctactaaaagtaaatagcatcacaatctctaagaaagttatctaaaaataactatgagaatgttatctttagtgctaattagacagatttggcattttcagttatagatttttgggtagggactggggtatgattatttcaagaatagttcatctctcattcatcaaacgaagacccctgcactattttgataacaaccaaaaccataccctctccaggttccatttattttttattaaagcaagctt

SEQ ID NO: 206157 - DNA, 1000 bp, Homo Sapiens
caaacccaaatggggtataagtggagcagataggggttgggtaggggtgagaaacattgtagatctttattttattcacctcaagccccacattaaatcccacatccgtgtttgctaaaacatataaggttctgcaaccccggtcatgtccttggagaccatttaaagtcataaaataagcaatgtgtacttttttggaatggtcagtcatttaaaactatcatagaaccagcaaatgcactatgaaacagaaagcaacattcactttttaaaaagctgaaacacaggattataaagacatttgatgctttttgcaggtttctttcaaatagttccctgtatctcaggggatagctttcaactctcctttgctattaggaatatttgggtgaaagtttgagaaaccgtgtgaaattctggcaaatctttttagaaaagtctgcttttgtatctgagaggagtattttcttatttcgggtgttcatggaataaggaatcatgtagcccttggctggacacttaaatgtgttcctggacttgccaaaaagacttgggttgagtcactggacttgacttcaaattcccattcagagaccactgggactgtaaaaccttttgctgctgagtccatttcttgtaactggctccacatatttaagaataaataattcagctctgttagtgatggttttgggatccccctctacagccccagcacagttatcctggtttgtaggagcagcacccagcattcacattttctctgttctgcatttgttggaaagtaaataagcagcagtaaagaagctgtattgtgcatgttttctgccttgggtggcacctggaatttgctgaatttgctgagtgcaactttaaaaggctcctgagccgcacctttttcatgccatgcaagtcaaatggaaaaccaaataatcagcataagcaagctgtgagtcctttctcttggtctcaacggactccagaccctgttgtggaattc

SEQ ID NO: 206158 - DNA, 1000 bp, Homo Sapiens
tgtaccctgggagcgacctggcactgtttggtgaactgtactaatgctgccacagaatggtgagatgtgtgtgggccacccccatgtccctgtgccatcagaggtgtgagttaagtgggctgctataaaaatttaggaaaaatatattagaaaattccagattgcttagaattatactgtcataagtaagaaaggtgagatgtgcaggtggatgtgtcatcttcactccactgttgccacggctgattctctcaatgttaataaaagaaaacgactctcacagaggaggtgtatacttttacaaaggatgtatatatgcggggaaggggaaaaatagagggttgatcatcttccctttaaagatagatacatattcatgtggtatataaattcagggctgtcatgaagcaaacactgatgatgaggtgagagaggcaggttatctatggggaagggggcaggagaaggccgtggagccttcagaccaaagctcaggtctgatcctgtcatgaaagaaagggggaaggaatgaggatcctcgtactgcaaggtgtttctaagaaaggtttgggcaggctgatgggtggcctgcaagccaaagtcactcctaagagcgctagcactgtttgctagctgtgcctgtcttcatacttctgatgtgcttagtcactggccagaagcggcctggggaaaacacaaaacttgacataaatgtggtagattcagaatggccagaaactagccctcagacagttatgatcccacagcatgagatctgggtggtacatttttatggctacaacacatggtttttagatcctgtcaattctgtattagcattggtcttccttggatagtacaattccaaaggaagctaacaagtggtgaactaataagcaaacaacctcaaaagtcaaggactgttacttcatcactgaaaccaaagtaagtcctgtcctctcaggctgtggtctgaggtcttatatagtctggagaattc

SEQ ID NO: 206159 - DNA, 1000 bp, Homo Sapiens
atttagaaaatattttgaggatagatgctaagtattttttgtttcctctaattactagattttatttcttgtctttgaaacatcttttctattttctataaaattttcacaatgttaaatatatttattttaggagagaaatacattcattatagttaaagatttgttattcaaatggaaaactattaaaacaacaacacttgtagttgcttattaaatactagagaaccaagatatgcagaaaattaggagaaaaaatccatatatgcttcaggaaaaaattggcttctccaaaaatctgtttagggctttataatgcagcgtaagttaggaaaagtactgtgctaagattggatttatgctaaattggatcattaatgataatgaaataataaatatgaaaagattatactggaaaaaaataaagttgatttaaataagtcttgaaattttgtttttatgcaaaaccaaatattcaagaaaatggactttttaggaaatgtttaattttgaaagatttgtggacagcagagtttttaaaattaggagctctgatttttctcagccataaaggtgacagagtatcctgattaagtggcacactggaagaattattaatttcttatgcctgctaataatatcaggttttaattagttttctaaacttgctagattaaaacatgcttttcttttagagtattttagctgctcttcatatctgcttgaaaaaagacactattttgactactaagcctttccttttcccatttttgctatttttgaatattctttattttacttatttatttttgcagctcctctttgcaggtaccctcaaacctggatcagtacattccagatatttgtatagggtttcccaagaaatagatggacaggtaatagccagacctctgcatttggttgcacagagcacctgccttaactcccagagaagtcttacagaaaagacaaacatctgtatctcttgcttatagaattc

SEQ ID NO: 206160 - DNA, 1000 bp, Homo Sapiens
acataccaacatttggtagtataagacttcttaatttttgtcactctataaatataaaatagtttaagcttttttttaaattgaatcacctagttatataggatcctttttttatttgtttttagacaggatttcactcaggctggagtgcagtggtacaatcatagctcactgcagcctcaacttctctgggcacaagagatcctcccacctcagcttcctgagtagctgggactaagaatgcaagccaccacagatggccaatttttttacatttctttgtagagatggggtctccctacattccccaggctggtctcgaactcctagattcaagtgatcctcccacctcagcctcccaaagtgcacagattacaggtgtgagccaccacggccagcctacataggattcttagtaacactgttaaaacaccacatcccaaggactgtaactggtttaggagcatgagcgctctgggatgtgcttatttctaactgcttgctttgtcagcaagtctggaaggcaagaatgacaaacaaaaagcaaaggagccccagagcaatcccagaggggctggaatcggggagcaactgttcttaaaggcagtctctgtcagagaggaatgactggcactgctccaccccacagacacccgctggggagacagcagactaatgccaaagagccagagggtcaggaggagctgcagctatggagaagccacctcgaggacctgccatcccaatcagaaggacggctgcagcccagtccacacgcaatgaccactgcttctgagcagcttctgagtgggagtccccactacatctgagaattacacatataagatcctcactttcataagataaacatgtttcaaaaatccaactagataaaaggactctggaagatggtggcataaggaagcaccaggaacccatctccctacgcacaggacaatggtacaggcaggatctgtccgatgtaagcattttggaattc

SEQ ID NO: 206161 - DNA, 1000 bp, Homo Sapiens
aggcccctgggctttgtaaatagtttctgtttagttttcagctcacaagaagcaagcacataaaagagttagtcatcgggccgattcagcagggcacacattagctagatattgacctgggctcctttcacaccaggtgagtgatgtgttgaatgttggagctgggtagaatctagcctgaaagtctatattaactttgcagggattataaaagagaaactgaggttgcctaaatgggaactattttcatgtgttcagatgggttgacctgtgtgagtaccccaggctaaagtagccaaataggagaagacactgtgagactcaccctggtctgtttcagccgaatgaactgaggtgggcagagaagtttatttttgaaatggccaaagtctcttcctgatttggttgatccagctggggcaactcctcacacatccgaggctctggctctgcagggtagctcggggtgcttggctgatgtttgagttaggggagagctttcacatctgtagggtgacagaagcccttatcacagcatgatgcaagccactgctaggaagacacccttgggggccagccatgctctggggaaaccagcaagtcactttgagttcacaaagagttggctttatccaaaggtcatgccaagggatactcttcatgttcctggagtctcccgaggcacgccctcctgcccgggcatttgttctccacggtccctggggaaagcaccagctttcacatactccaagtcctccaccttgtgacatcgaaagaggtatcaacagtttaaatctgtgcactgagcatgtgaaaaattccatttcccacccgccacaaattgtctaaaagacagactgattttatgacaagagtgtttctcttctctattgtttactttctttagttcctgattcttcattttcacacatttttatgtggcctgatacataaattcaacttaacagcagccattgtgtttaggaagcccagagaattc

SEQ ID NO: 206162 - DNA, 1000 bp, Homo Sapiens
atcttatatgaacttagctgtaatagctcataaacgcataggtgaccgtctcctatagattgaggctgaagaaggcaaaactctctcacctcttgctgggccagcatagctccattcctttctaagagaggtttgttaataagttggcattcatgttactctggtgagtttatttcatcacagactcactgagaaaaaaaaaaaaaacattgcaacttaccacaataaagtaaatatcacaagataaatgacaatgttggaatggaaactacttagggactcagaacggtcagacgcaaacagtttcaagactattagctgttaaaggttatgccttatgtcacccaaaagggttttcccctagatttatagcacaaactcatggaagatttattgccgtcttaattttttccccaattttaactttacgaacagtcagcctggaattcctcctaagtcatttaggaatgaggagctgccggttcttaagaaatgctttgtggcacattttctgcaactttagtgtctttcttatgaattcgattatgatcaaatcatctcatgtgcctctccagatataccctctgccctttgccacccaccctgttctctgtcccaggaagctggcctttaagagccacataacgaagtctcttgcctttggctttcagatgggcacagccacaagggggaatgaccagagattggcagaagggaagagacgggcttgggctgtttgtttccccagatcctttctgcatgctccacggctggctgcaccttggcaaggtctcagctcctgtcaggcagccttctcacaacgctctctgcctccaagttccagtaaccattccgtcccagtgacagagtgtacatttgttcacaatattcattctctctctcagggcccaccccacttattttggcttggccatttgatttgcattggtccatggaatgtaagcgggcgcgtcgtccatctcacggaagcaagaagctt

SEQ ID NO: 206163 - DNA, 1000 bp, Homo Sapiens
cttcggactcttaaaaactaagccacaacctgcttcttcccaacccattctcaactcaatggatagaagctccaatctgtccaacgtgcttcttcccaatcctaatcttagtatattttcctgaataaatgtttcttaatttggtatatacccttaggatcatttcaccggttgtgcttgtattgctggggagtgggtccacagactttctcaccctgccatcctcatagcccctaaaataaacttaagggaaatagagacatagataactttttaaagtggtaagcattcactttgattccctgataatcaatcaacccttaactctgccttatatatctcaagccaaagacactttgttttaccctctccagagaataagcctctaatcttctgacagtcatttgcctgaatagaataagggatcagaaggcctgtttctcaagttgactttcaaactctgttcctattccagcttcattttgcttccagtgccatctggggtcaccattccagagcctcttgaggacgcgtgtataaattgtgttgctttggggctttctctgctgtttttctcagctccttagcagtggagaggttgaagtttgttaccaattgttcatatgcttttctgctttcaaattttagttgtcgttgtctcttccagatattagttcttgtagatttatgctatttttaagatttctttattctcatttagtggaatttcaggagatagtgaatataaatgtttatgtccaactcaccatcttcaacaaagaaagattctacttctatttttaatctcaaaggcttcacagtttttcttcaaccttcactataaccctcacttgatttgcttttaaaatatactagacgctgtcttaactgaccttcacataactggcatgccagattaatgaatgctctccattccctctgtaaaatacattatggatgcccactgcaagaagcaaaaagggcaagaagcgaaaagctt

SEQ ID NO: 206164 - DNA, 1000 bp, Homo Sapiens
ctttattgctgtgtaagaagatagcacagacttagtgggttagagcaacagaaatgtgcagcaatgtactctcatcacgctgaggtcagaagtcctaaatgagtttatggggctaaagccaaggtgttgtcagagctggctccttctcaagattctggggaacaatccacttccttgcctttctcgcatgttggtggtgacctgtactctgacactcatggccccttcctccaatttcaaagtgggtcactcctatctcagcttccaccttcacatcaccatctcctcttctgcagccaaatctccctcttaaaaataatgacccttgtgatgacattcagggcccacctggataacccaagataattcctcccatctcaagatccttaacttcatcacatctgcaaagctccttttgccatatgaggtcacacattcagaggtaccagagactagaacctgaatatctttgggggccattaattagccagccacaaatatgttcaattgttatttgctcaataaaacaaggcgagaaaaaaagtgtttctttctacaaggcatcgggtacaaggcatgaagggacagacaaattagacaatgtaaaagttaagacttccatcagacacaacagcaagaagacacctcaggccgggcatggtggctcatgcccgtaatcccaacactttgggaggctgaggtgggtggatcacttgaagtcaggagttcgagaccagcctggccaacatggcaaaaccctgtctctactgaaaatacaaaaaaattagctgggcatggtggtggcacacctgtagtcctggctacttgggaggctgaggcaggagaatcacatgaacccaggagatgaaagttgcagtgagcctagatcgtgccactgcactccagcctgggtggcaggaaaaaaaaaaaaaaaaaaagacacctgaaagggacctttacaacataggacagagcgctgtggaaaatctgggaagaattc

SEQ ID NO: 206165 - DNA, 1000 bp, Homo Sapiens
accaaccatcagtgctcagaagaatagtaataggaagcattaattcaaagatttctctgcatactttcccttggtcacattgcatataaatgctccaacctcgatttatttgcattcattctctcttatcctaggcagacagcattttgacaaaaggattttcaggattacaaaaataatgtttgaaaagaactagttggggagtagtttagtttctagagaataataagccatggccactaagtcttagcaaatctttcaaataagcatgaagttgttccttctacctagactgaaaaaccgacatcaatatcagcaaaactcttagaaattacatatgctagagcataggatttagtcttaagggcagccattgttgacagtttgacatgccaaaatagagcaagtacattgggattttgcgacttccttccttgaggctgggataagaagcataactccagagcaccctgagaaagtataatagatgaggcaggtacatggaggtagcattcactttgacattagtagcaggtcattaataaggagaaggctgaagctaacaactgtgctcaacgtaccaccttgcaagggaagtgattattgacttgtgctacacaaatattttaagacagcagaaaaatgcatttatctcctataatttggggtcttctgaaacacaagaagaatagacagtgactcagatgtgcagccctcttattgaggtagtttcacggtaggacatccaatctaaactcttctgacttcccaaccatcaagatcactatagttccaatggagtcctttgacttaattaatgcataccacattttgtcatttcaaatgagcatttctggatcacagcaggctactggtgacatatgtcagactaaaactggtgttgaattacatttctcatctaccaaactaggtgggaagaatacataccttttattactagttcttaatggtctgaaagaatatggaaaaaatggaattc

SEQ ID NO: 206166 - DNA, 1000 bp, Homo Sapiens
ttttgctgtgggatataaattggataacctttaagtggcctttcagaagcaaaaacaaagattggaattccttttaaacattcatttgcactcaagccggctgcctgtgctaatcctactcctcgcacaggctgagcgatgagggctctaggatttactgggaacacaagcataaggaatttatactcagttttacattgctacctattatttaatattatcattaaaatattttaggtaaacacaaggggccaagagaattcttttcccttaaatattgaccatatagtactttgaatttcattccaggttgtaggttctcttggaggaaattccgaggtgcggtgtggaggcaggtgtctgtggtttacctgggacggcgatggtccactcttcacatttgaagcattcgcttactgcggagggcgcgcccagcccagccatgttcatggctgccacttggaactgatacaccatgttttccttcaagttgctaatctgcaacattgacaacatcacagatactgaatgttccaggtttgtttttttttttctacttgttgagcattttatttatttaccttccatgtcagacacaccctagggtgaccctcaatgagtcacaccccttttgtaatctcctgggtgtggatgaaaccgtgacctccttgtagcctacaatagaatgtggcaaagggattgggagatcaagtcctgtgattgtgtcaccccatatggcaaaggagaaaagatattatagattagggtccctagtcagctgatttgaggttaattaaaagggaaattatcctggatgggcctgatgttatcaggtaagaactcttacaatggggttcgggcccctcctaaagaaaaacatggtgccaatggccttgaggaggtaaatgtcacactgagagctgcctacccactcacatttggagaaaggcaacatctaggagtggaagcctcagccctacagctgcaaggaactgaattc

SEQ ID NO: 206167 - DNA, 1000 bp, Homo Sapiens
aatgtccaacaacatttcactagatacttaaaagctacaacagaaaaaccaggaaaatctcagtaaatgaccatccaggaaggtgggccagcagtcttacagtgtccacccctgttatcccttggccttttgcccagccagtgggacaagcccctattctagcctgagcttgctagggctcccctttccttgtggatgccctcctggctccctctccctcccctcagcatctgcctgtgggatgttccctgcggaacttcctcttgtccacgctgaattcctcacggtgctggaggaccagcttgcgctctcctgtccacggccgggcatctcctggggattgggaacagcaggacaatgtgggcccgcacccaaacgcggctcaggagcctctggcgaggtggtggctcttcccatggaactactgaaaatactactcagtagctgtcttgtatccaactagcaacaattattggtaatattaacactaaaaagcagatggggtgaaataatcatggtaaaattactaaaaactgcaagtaatcttgtcaactctaaatcagcaaaatttgccctaaaagaaagacatggtagaaattaaactcatagccatgctgcaaaacatcacatggactgaaagtggattattgatcatttgtcaagttttctaggaaaagaattaaagaactatttttttgagacggagtctcgctctgtcccccaggctggagtgcagtggcgcgatctcgatctcagctcactgcaagctccgcctcccaggttcacgccattctcctgccacagcctcccgcgtagctgggactacaggtgactgccaccacgcccggctaattgtttttgtattttttagtagagacggggtttcaccgtgttagccaggatgatctcaatctcctgacctcgtgatccgcccgcctcggcctcacaaagtgctgggattacaggcgtgagccactgcgcccggccagaaaaagaattc

SEQ ID NO: 206168 - DNA, 1000 bp, Homo Sapiens
gttttgtagatggttatatttacattggtagtagcattgaaactgtaagagaagcctctctaaacacttagtgaaaatgaatgaaggtcgagggctctggtcccagtgtgtgagcctgtgtgcacaagcaagtatcactggaaaaaaagagtattttgtcacagccagcacatgacaatcttacagtatttcttacgtgggttataccagagacgcatttttttatcccacagttgcctagtcaacgaaagaaaggggcaaaatactgtccacatgacacgtaagccccagatgaacttttagttttcccaaataagttttaaatttctttttttctttttaaatacctggtgcaaacagtgatctcctttgatactgcccagagtggccatgacatttcagaaaaacaggggaaaaaagccttctgtgataactcagaacttccaaggcctttaggcttttaaaggatgtcttatgatctctttcaaggatctaatcagatgaagagcaaagtcatgggttattcaataatctgcttgtccggaggttttcatagtagaacaaggcagtcctcaagaataaagattttgcactttaaatatatgataaagagttattttaagaccatacaaaaagcaatacataggctataacttcatagagaatcaaaaaggaaaatatgtgtgtgtgtgtatatatatatgtgtgtgtgtttgagtttgtgaatgtatgtgtgtcagatcagaaataagaagacagcttgtttctagaaagaaaagatgtttatatgttcaggtcactgagccaggccacttggaaagtttatatttttggcattccagcaagaggtcacacttagatcagagcatttctagcactcacattttctccttcctttgtcagctgacagtcctctttgctctttcttattcaaagaatgagaaccatgtgactcagagtgagtgcctacttttgggcaaagtagagacctgatgaattc

SEQ ID NO: 206169 - DNA, 1000 bp, Homo Sapiens
ctgagaattgagaattggttgaacccaggaggcagaggttgcagtgagccaaaatctcaccactgcactacagcctgggcaacagagcaagactttgtctcaaaaaaaaaaaattctgattatcaaagtaatgcattttaatgcatacaacttaaaaaataaaagataaaaatgtacgtgaatcagtaatgtgagaggtcatcaagaatcaatttttatgatatctttcttggtttgatttagaactatggtatattttctatgtgaatggaacattacattctgcctgctatgtgcttgggatacaaagataattatagcacacttaatttcatcaagtggattataatctctgggtgtaaaaacagataataagaattcggccctctgtcccctgctccctccgcttccactttcttcaacctgccagctcttccttctttccctgtcctgcctcctaaaaaacaaaaataaattttcatagggtgctgttagaacatagggaagggctactcaattctgtttttctttttctttcttttttttttcttttagggactcaaataaggctttccaatctgagattggaaatatatttagttattaggcaaatgaaggggaaagaaagggtattcatggtagaaggaatagacacagaagtaggcaaagaacatgatgtaatcaaagggactgggaaaaaagcacaatatatttagttttcttggcacataaagtgtgaggtaggtaggggtggtcaagaaatgagactggagaagtggaggaaggtgaggccatggggtccctgggtgtcatgctgcggagctggctctcatgctgtcagcagtgggaagaaattgggatgtgtctgcctcatgcaaagtgagagagtcagacttacattttctatttgctcactcttacatttctgtgaaggatagtcctacaggcaacagacttcagtcacagaggaggccagagtggctagaagtaattgaagctt

SEQ ID NO: 206170 - DNA, 1000 bp, Homo Sapiens
ctggagatcctggatggatgttacagggcaaggaagccaaaatgtggaagcacaccgactcacctctcaaaattcaccacccactcgttcatctcacaattatctatggggtgcttcccacgtgcttcaacgcaccctttctaggtgctggggatgcagaaattcaaggtgactggcaatgacactttctatcactgcgccccctgcaggccaggaaatctacgctcgttttctcaaggccccactcgcagcagcccatttcacagacgggaccctaagactcagagagggtaagcgacttgcccaaggtcacacagctagtaagcggcagggccaggaattaaacatagctgcaaagtgcatgtgacactcccccgcagccccagctctatccctccgcacccctccacctcttgcagcagggtgggtagcaaaggcacactccaagtagctccagcatggtaagacctcgattcctccttcgttccactcctgacacaggacacacgtttcaaaggacacacaggtttttcccaaccccagtgtgtgtgtacacagccccaggaaagccctgcaggctgcaagggcacccacccgctaacactgaacttccatttaaaaagaaagataatgaaaagataaaaggcgaagaggaagtgctctttaaacacaggcgggtggctaccccaggaggaagtcttgaggccagtggagattttgttcaccccctctagttcctcaaatccaatgcgactggtcttccaagcccctgatgggaggtggccgggggccagcgctgctcccggggtcagtccccgcaccgacacccggctcgcaggaagggtctgccagggaccagccaccccgacccgagcgccccctgcctcgaggcgcacaaggcgccggctccgcagctgggtggacccgggcggcggccccgctgcgcgctcccctcgcgtccgcccgccgccccccgcgcactcgaggcgcctcccccggg

SEQ ID NO: 206171 - DNA, 1000 bp, Homo Sapiens
gttatatacccagtaatgggattgccggatcaaatggcatttctgcttctagatctttgaggaatttccacactgtcttccacaattgttgaactaatttacactcccaccaacagtgtaacagcattcctttttcttcacaaacttgccagcatcagttgtttcttgacttttcaatgaaccaccattctgattgcataagatggtatttcactgtggttttgatttgcatttctctaatgaccagtgatgaaaagctttttttaatatacttgttggttgcatgaatgtcttcttttgagaagtgtctgttcatgtcccttgcccactttttaatggggttgtttaattttttcttgtaaatttgtttaagttctttgtagattctagatattagacctctctcagattattagattgcaaacattttctcccattctgtaggttgtctgttcactctgatgatagtttcttttgctgtgcagaagctctttagtttaattagatcccatttgtcaagttttgcttttgttgcaattgcttttggtgttttcataattaaatctttgcccatgcctctgtcctgaatggtattgcctagattttgttctaggttttttatagttttgggttttacatttacatctttaatccatcttgagttaatttttgtataaggtataagtaaggggtccagtttcaattttctgcatatggctagccagttctcccagcaccatttattataaagagaatcctttccacattgtttgtttttgtcaggtttgttgaagatgagatgtttgtaggtgtgtggtcttatttttgagttctctattctgttccattctatgtgtctgttttttgtaccactaccatgctgttttggttactttagacttgtagtatagttttaaggtgggtagcatgatggctccaactttgttctttttgcttaggattgtcttgactattcagcctctttgttccatacaagctt

SEQ ID NO: 206172 - DNA, 1000 bp, Homo Sapiens
acaaaaaattaattgggcgtggtggcatgcgcctgtaatctcagctacttgggagcctggggcaggagaatcacttgaacctgggaggcggaggttgcagtgagcggagatctgggcactgtactttagcctgggcgacagagagacccatctcaaaaaaaaaattggaacctgagaagggggtcgtggggtccccggggcccaccgtctgcacttggcatctgaagtcggggtggtcttgtgggactgaccccttaccctgtgggttctgtactagctccgggcaattggtgacagaatcgagttaaattgtaggacatcgcgttggtgtctgagagggagttggagagctggttggtgtggagggaaaggcttacacacatgtgatttcagaagcgttctgtgggtagaggaatcgttttctctttgagactgttatgagtatgtacaaatgttatttcctgtaaaatattttcattttttaaaatgttattttctagatagaaaagtagaagtgtctctttggggagcgtttttgggggcgtatagtaaagctctgtcatcatgaattaagcgaggtgggctttgagtttcttgggatgacagggaaatgtgagccgcctactggccgtgagcccctggggtgcggttgcaggattcgcccatcctggtctgggtgtggcttgtgaccacctcctgcagttctctgcccaggtaaggactaattgggaagaattctgggtcctgagctggctgccgcttccaagacagtcgctttgagggctcttggcaccgattttgttaaaatgcatgagcttagggttgtgcagcctgtaggggcaggggtggtctcagaatggatttggtggccccaccgttaattaagctcctgacccctgggccggtggtgaggtgggaagatgagcctgtgtctcccatgctgagccaagatcctcaggtaccagtagcggtcaaagcacctgctccctgaaggaagctt

SEQ ID NO: 206173 - DNA, 1000 bp, Homo Sapiens
ccgggcatggtggctcacgcctgtaatcccagcactttggctgaggcaggtggatacctgaggccaggagttagagaccagcctggccaaaatggtgaaactccgtctctactaaaaatacaaaaaattagctgggtgttggtggcaggcacctgtaatcccaattactcgggaggctgaggcaggagaatcgcttgaacccaggaggcagaggctgcagtgagacgagattgagccactgaactctagcctgggcaacaagagtgaaactccgcctcaaaaaaaaaaaaaaaaaaagaaaaagaaaaagaaaaaaaaagaaaagccagacaagttcatatgttgagtgagaagtacaaggaagagcacctgtaccatcttagaatgctttatattctaagtcatttataatactaagcaccagatacttctaggtcttcagccaacagagatttaaaaaatataaataaagttgtactacctaatattggtagtactttagttgacaaagcacatattacatcatgtttcgttgttcctatatcctacaaagaagacatattctacaagtgtagaacaaggtttttttcttccccctttgtccttccattttctaagtacttaattctattccattccaagttcatgcactgttgtctctgggcagcggcagtacttcgcttacaagttgagtactcatgacccacttttcatacagaaagactcatagcccacagcattcatttatcagttgaccattttaagaacgtttttgttctctgctgcatttagaactgtcaatgtacggatatattcctaagacagcaagtccctaacaatgcacttttcacataattacaaaagtagtttgggaaaaactactttttttaatcctgaatttgtttttcttttgcttgtttttatcctgctgctattgctgcctacagaaatgttttattctcttatgtttatagttgtccaagacttttattaaaagctt

SEQ ID NO: 206174 - DNA, 1000 bp, Homo Sapiens
agaggggcaggaaggcggaggtgtttgtgcaccacgatgctggacgtggagcctggggacttcccaacatggatgcaagctctgcagagggaaggggtgctctacaggctgaccactggcaacgactctgggcgttctgctggcacccacagggacagtggtggtgagttctgctccttgcaagaaggcagtgagcacagcccaggatgaaggggtgcgtgtagatggggccatgtgcacgttggtccccagagatacttccagggccacctgcaaccccctgaggacccccagacctgctggaagacctgagattggaaggatttcatgctccccctggccgctgcctcctgtctcccccactttggccacctatcaccccatccagtggtaccctcctttggtgggtaactccagcagagacctcaactttctatgcttttcaacctccggcctcagggcgcgttgcaggagtccccaaaccaagggcgtttctccttctcgccaccaacttcccacccctgggaaagtccacattcctgagccagacattcacccgggggaatcattacccagtgccctgtgtgcagatgccagggcagcgggtgtccttcctccccagggctgcatccttcccctgcagactgcacagggtgcccccagcctgcctccccaaaagtcttaggtaactgttgggtctctcactctaacacccacataagttgggtctggataaaccacaatgcgggatccttcaggggatggagacagtagctgaggaaaagaaagagaagtgggactcaggagagtggtagggagacacaggccatgagtgaggcagggagagagtgagaggtgtggacggaccctctgtcaatcccagaggtaacgctgaccacccccagggcagggcaggagccaagagacaagaagagaggaacccggggagcgtttcagcccaagctgaggaggccccaagagtccctgcaccccaggagtt

SEQ ID NO: 206175 - DNA, 1000 bp, Homo Sapiens
aggctagacaatcatctttctgagagaataggaatgtcctcaatttatctaatagaatcctaaatgcaaattttagatttagtttattgatattttattttatttgcattgtatagtactataacactggtttttccctatgaaaaatattataaagcaagtttagtgagttactatcctgagtaaacataggtggttatttcttcgataaattatgtatttcttgggaagttacttaacatttttttaaattaaaatagccaactttataatgatttaggtatatgtttctaattataatgttattattttgaaaaaatcatatttttagtaatggtaagcctgttggaaatcttgctgagtggcacgttagcagagcaaaataaaaataaataagaaactgaaagtgaaaacatttaaaaaataagacaggcatggtggtgcatgcctgtagacccaggtactcaggatgttgatgtgggaggattgcttgagcttaagaccagcctgggcaagatggtgagaccctatctcttaaaaaatatgtatttatatattgtcctattatatttagggttggatttgtgtgggggaaaggcaggaagtgtagggtatagggaatagactcaagattctttgcactttacatttgggacttttattttaatgttactgcccctccccccaacccatgaaacacctaaccttacaacaaaaaatatccagaagcttaataattatttatttaaccgtcactaaggtgtagggagatgtgcagaattccaggaaggagtcttttcctaattagacagtcagagcctcattccagatttattattcctttggtagggttccagcatgtatattttgatagagagctccccagattcagggatacgtccttgattcagaactgccgaatgaaatagcacaattactttatctgtcacaagtgagccatgattagatgtcttttgagaatatatttcctttagaattc

SEQ ID NO: 206176 - DNA, 1000 bp, Homo Sapiens
cactgggagctgcctattctctgaccaaactgttagtttgttaatctcacttaacaaaactagaatatgttcattaataatgtgtgaaagactgttacaccatttttaactcagttgctgcagttgtctagttgtaagcagcactgcttgcatggtgcagagggatatttcaaaatattatgcagcagcagttttgggtttaattgtctgcagatggtagatgatctattttccttactcgctgccacatttctaatagtacccaggctgttccatgtaaattagtaatctttcatgtaagcctgtccttaattttccaatatttttttgcatcattttccagctgtatcatgttagaactgatgttttaattttctattttttttaaatatctgtgtgtcattaatgttaaccacttaaacacaactgctgagctgtgcaggcaaactaagaagccagcctggtctgcttcaagactcttaatcatttctttgttcacatgttaaccatgataactatagcaaaggcaattcgtagtttctattcttttccaaccaatacttggagatgcattttttattctcttaaagtgaaaaaataaagttcctgaatggaaagctgcatgaaatttagatatcagagaaatttttctacataaaaacgtttttagtgaaagagtgtaatattcttctttacaaaagggatttagtaagaagagaaaacattgtgatttcaacaatagaatgttgaaaaacctaatacgttctaaaagcctaaagtttggatcaccagaattaacaatgaatctttcagcaccacactcaatttcaattggaaacactgctcagtcttcacctttatttaggatgaatgtttttggttttgttttcctttttttcttcttcagttgatctatccaagatctcagccaaaccttgcaactgtgtcatagttagaaatccaactgcctgactagagcttgtttaagggaaaagaattc

SEQ ID NO: 206177 - DNA, 1000 bp, Homo Sapiens
gagatgatcatactgtctctgtccaggtccctgtaacatgtagaacacaaccacggtagaggttcagtcccatttcatttacagaaacagcttgttcctcagtagtattctatatataaaaagtaaacacacgcactatagttcatagagaatacattcacatggattactaggaaaactaaagtatcctttaaaaataatttaaaaagagccaggtgcagtagctcatgcctgtaatcccagtactttaggaggctgaggaagatggatcacttgaggtcaggagttcaagaccagcctagccaacatggtaaaactccatgtttactaaaaatacaaaaattagccaggtgtggtggcatgctactctaatcccacctgctcaggaggatgaagcaggagaatcacctgaacctgggaggcagagtttgcagtgagccaacatcacgccagtgcactccagcctgggtgacagagcaagatgttgtctcaaaaaaaaaaaaaaaaataaagaaataaaaataaaaataataaaaaaggcattcttctcaaaaaactacctctctattagatattttttatctcaaaacataaaaggtaagttttgaaataactaatagttaataagaaaaacatgtaaatagtatgtaactagaattgttaatttcttgaaacttaaggtttgtttttatgttatgttagcaggatatgtaaatctaatggcattcaaaaaacataaagtgagaaaaaaagaggctggtattgaacatgcatgtatttactatattctaataatggtcaagttgtttaatttcttcatgaatgtctaggcttcattagaagtcttcagctaaaattttgcccattttggtgaaggaagtgtgtgtcacataaggagagcttaatgttagtatttgccacagccttactaatataatcctataatattgttctccgtgttcccaaaattaaaaagtagtctaattctacatatgaattc

SEQ ID NO: 206178 - DNA, 1000 bp, Homo Sapiens
agccccctggcaaattcaaaaagctaaacccttctttgtagcatgaactccattcaacccagtctttcaggcaatgacataaaatgtaattctctaattttcttttttctgagagttaagttttatttggggcaaaatgagaacttaagcctgggaaacagcatctcatgtaacctgagaaaactgctctgaggaggcaaggggggagctagaatatataggagttttgcaacaaagggcaggtggtagggaaaatgtaattttctaagcattaactttctgcagaactacagaaatatcaccatggtataccctactaaagcagaaaagagaaaaattcagctcttcaggatccaggctggaaaccctcaaggcaaataaaacaatagcctcttagttacaaccaaggagactctcctgatgtagcataagaatgctgagctttagcctgggcctgaattgaacttgacagcaaagatccatggttccaagagggctctgactccaactccctgctggagatctggcttcacatggtgagagcagaatcacgagaacaagcctccccagacttggctgtgctgtccacagcctcagagcatcttccatagaagaaaacactggggagtatgagaggagagggaagagaagtggcactcactgaaacagaaaggacactggcacagaaagtcatcaggctccctgccctccagggcctagtgtttcaggcccaaagggaaaatatcaacaatcagacactctcaaaggttagagtcacagtggaaaaaaaaagaaaaaaaaattttttttttcctggaaaagccgtttgcttgactgcaggggttagcaaacattttaagtaaagggaaagagagtaaatgttttatgccttgacgaccaacagaaaaaattgaagctattatgtgtatacatagataacaaaagagaaaaggctctgcctgaccctccctgcttgcctggtgtgggactgcctgagcag

SEQ ID NO: 206179 - DNA, 1000 bp, Homo Sapiens
cactgcactccagcctgggtgaaagagcgagactctgtctacaaagacaaacaacaacaacaacaacacacacacacacacacacacacatacatacacacacaaagaaaagaaattacaactttttgataaccaggtgtggccattttcacaaacactatcaacacaagatttgttgcatatactgtttctaattcaaagaaatttgataaactatcattctgtttaaaatggagatactcttccccattaagtaagcatttatgttgcagggaaaatatatcattatcagaataaaattgatctttcaactggcaccatgctagatatagcaaattaataaatactgaatagtcaagcaaaatgaccttagtttatggtgttttattacatatcacagagactcaagcaccatgttcttgctcttacgttatgttaaaatgcttttagtcagttattatgctcctcagaataggcaaacatttgctgagagcctatgatttgaaaaatgattgagaattcagattgatggatgtttcattagtgttctttagtgtttatgctaatggatgtagatattcatctgcattagatattacataagtgatatttttgttaatttgttgaccagaaacatataaaaataatgaagcacatgcatctttctatatctgttagatggatggatggatggataaatggatggatggactgattggacagacagacagataatagatagcctccatacaaaaaagcttgtaatgtatttaggaaaatagaacatatctcaacaggtaaataataataccagggaacctaggctgaatgcccagtgagtgatcaagacagaaagtagtataagttgggctaacatattgaaatctgaagtggttaaggggcagaatttacactgcaccttcatgttagattagtattttaagaagagcacaggggagaaactgagaagcagaaattcccctaatatacttaagaattc

SEQ ID NO: 206180 - DNA, 1000 bp, Homo Sapiens
tggggcaggttcatttcagatgagaaaatatttaaatgaatcatttaagaaatgattaatattattatatatcagtgaaaattatttctgaaacttttagtaggatacatcttttgaatatgtgcatatatttgggagattctgaactgaatcaaggtaatagttttcccttttccttgattacttactctagaaataagaatactaccggaaaacatttgccctatatctaatgtaatttgccatacctcaattttagattgtatttattcttttaaaatttttactttattcttattttaaaatttattttattttattttttatttttttcaagatgggctctcactctgtcttctcggctggagtgtaatggcccaattatgactcactgtagcctctacctcctgggctcaaggggtgttaccatctcagcctcccaattggctcagactacaggtatgcactaccgtgcccagcccagctgattttccgggtttgtttgtttgtttgtttgtttgtttgtttgtttttgagacggggtcttgctctgttgcctaggttggtcttgaactcctgcactcaactgatcctcctacctcagcctcccaaagtgctgagattacaggcatgtgccaccacatccgactcatcttaaattgtatttattcttaaattattttctttttttctcaaggtagaatttttcctatatgctgagataaagtctgagtggaagttgctcttgtatttattcatatagctattactttaatactttaaaaatattttagatttatattaagtaatatattcaatttggtcaacatgttttatctctaagccttggcaatgtagcaatatgtttttaaaaatactgtttgtaaaatgtattaaagtttccaaattaagaatgaaaacatggttttataatagcctttgctggctgttggcttctagttttcttttaaaggtataatgattcaagttcatagaattc

SEQ ID NO: 206181 - DNA, 1000 bp, Homo Sapiens
gtctataatgaattctaaatgcattccactttgttacaagtacttataactttaagaaatattttaaaatgtttaataatcaatgtgatcaatattcccaattgttatcaatgtctatgataatgttttcattaaaagagtcaaaatgggctgggtgaaggggctcacgcctgtaatcccagcactttgggaggccgaggcgggcggatcacgaggtcaggagatcgagatcatcctggctaacacggtgaaactccgtctctactaaaaatacaaaaaattagccaggcatggtggtgggcgcctgtagtctcagctactcgggagactgaggcaggagaatggcatgaacctgggaggcggagcttgcagtgagccgagatcgtgccactgcattccaacctgggcaacaaagcgagactctgtctcaaaaaaaaaaaaaaaaagagtaaaaatgatagaattttctgctgttaaaacaaaatgatttgtgaacaaagctggtacagataaggtgctggataataacacatattataatacataagtcccttatagaaacaaaatagtaagtatgtacaaagccataaattaatcttaaataaacatcaatttccattccaatgcaagtaatacatctgatgtatgtttagcactgacaacatttcagtaaataatgaaatgctttagatctgaaaagaagagtttgccatagaagcattaacaaatttttatatctgttgacaaaaccttgctaaatttatgcacataaaaaaatagaagtaaccttttctgtgatcacataactgggggctggcattgcgagagaagagcctgctttaccagttacgacacagcagcatgcctctgacttaaagttcagtttttaaaaatatggatatgatcatagcaaataattccaggaaatatgtcataaattagcagacactgtaataaactgtctggactgttttgtctcagtcatgtcattttatcctat

SEQ ID NO: 206182 - DNA, 1000 bp, Homo Sapiens
cggcgtttcggagattactgaggttccacccgtctctgcgccgcgccgccgtgacgtgagtttctgcgcgtgcacggcgcccccccgcccccgcccccagcccggcgccgtgcgactttgctcctgtaacacacgccccccccaaccccgcccgtaggcgtgcgtctgtgcgcctgcgccacgcctccaccccctggacgcgctagcatgtgtctctgcgcctgcggcagcacggcgcgcctctctgcgcctgcgccacgcctcctcccctgggcgcgctagcatgtgtctctgcgcctgtgccacgcctcctcccctggacgcgctagcatgtgtctctgcgcctgcgccggcgcggcgcgcctctctgcgcctgcgccggcggagttgcgttctcctcagcacagacccggagagcaccgcgagggcggagctgcgttgtcctctgcacagatttcggtggtactctgaaggcggagcacagttctcctcaggtcagacccgggcgggcgggccggctgagggtaccgcgagggttagggttagggttagggttaggggttagggttagggttagggttagggttagggttagggttaggggttaggggttagggttagggttagggttagggttagggttagggtagggttagggttagggttaggggttagggttggggttggggttggggttggggttggggttggggttagggttagggttagggttagggttagggtttagggtttagggttagggttaggggttagggttagggttagggttagggttagggttagggttagggttagggttaggttagggttagggttagggttagggttaggggttagggttagggttagggttagggttagggttagggttgggttagggttagggttagggttagggttagggttagggttagggttagggttagggttagggttagggttagggttagggttagggttagggttagggttagggtta

SEQ ID NO: 206183 - DNA, 1000 bp, Homo Sapiens
caccccctcctaactcataattttttttttttgagagagtcttactctgtcacccaggcttgagtgcagtggcacgatcttggcttgttgtaacctctgcctcctgggttcaagtgattttcatgcctcagcctcctgagtagcagggactacaggtgcagaccttgataatttttgtatttttagtagagacggggtttcaccatgtttgccaggctggtctcaaactcctgacctcaagtgatccacccaccttggcctcccaaagtgctgggattacaggtgccaaatcagtttctacattgggaaaagtgatactaacgtgggtaaccagcttccccactttctagattccctggcaggagctctgtccatgcctcaacccacaggaagtagcatgagtgcctaaaggtgacatattcctgaggacagcaagagacaaagtggggaggcaggattatcacccctggctctagaaaatttgctttgtaacttagccgaaggagatggcaaatgggagtggttgttcagcagcaacacactgtaggaggtacattccacaggtcctctgggcacagaccgcttgtcagcttttccacattgctgaatatcgcctttggagcctcttcctgactggcagctctctgattacttgctagagctgaggcaatcctgggcttaaggtgccatctagtgccaaaaaggaggcagtgacctagtagaaaaaaagaaattcaacaggtagattatgaagaatgtctaagtaaatatacccaataagaacgaaagcaagtcatacagagaatactggagtaagttactaatccttcaatgtgaaaacagttgtatacagggaactatgacctctgcaaatggacaaagcaaagaaacagtgactgaccctaatgagacagtgatatgtgagctctctgaccaagaattcaaaatagcaattttaaagaaacatagtggtcatcaagataacacagaaaaagaattc

SEQ ID NO: 206184 - DNA, 1000 bp, Homo Sapiens
aattgcttgaacctgggaggtgaaggttgcagtgagccgagatgacaccactgcactccagcctgggcaacagagtgagactctgtctttaaaaaaaaaaaaaaaaaaaaaaaaaaaaaggagtacttttccaaacagaaatttactttcattacaaaaaagtttcaaggaggagatgggagatgagaaggaccttgagaggaataaaagggtatctgtaagtagagatgagcttaagcagaggatatttttaaatagagcagcatgtttattttgtactccagtattgatttgtgaccacacaatactgaagaaaaaagatatttaagtgtcttaaaagcaaatcagttctgttaattgctttaaagttatttagatttttaacctacagctaagatacatgttacggaaatgaccttatataagcctgtttcaggcttagtattttttagatgagatttcctttagaaagaaaacacatagtaccataatgatagttactcttgctgatttgttggtattattgattaggctaatatatgtaaggtaactacattttcttctactattttttttggtagtccttgagccattttaggatacttgctttctaaaaagaatacatttaaaatatgaaattgtatattttgatagagggaggtcaaataaatgtttatatttcaacaaaatgaagggaaatacttgtagagcttaggcaatgcttggtatactttgtgttttccccacagacaaaaaacctcgtaaatggcctatgttggttcttcggaattggtggcaagaggacagagtgtaggattgtaagaatttacgtcagattaatttggcaggattctgatatttccttgatacttaattctaggcacactgtctgtctcattaatttctgtaaacgtcttggttaaggaattacactgagggagttctgatgtttcattcacactcatccctgtctgccatccatcaagtgcttctggaattc

SEQ ID NO: 206185 - DNA, 1000 bp, Homo Sapiens
agtggggagattcctgagagtcgatcctaattagaagcttcctgaaggaggagagatttccgttcagggtaagggaggcagttgatggcgtgggagtacagaagcaccacttggcagaactggtggacaaaacaagctattccgcagtgaaccagaacagggctgcgttcaggaccaactcacctgacattttccctatgctaaatgtaaactggtcacggtattgattctgctgcaagataaactgcagaatctcagctacatcataaaagtatgtggatctcagaagagcgaagcatttggatgttcgagatgagtccccagattaaaactgcttattttggcgcccccatgtgctgaggctctcagcctcaggggaacctccagtgtgaggatgataaatctgatacatctggatttgtgccacaatataatagaattaattaccattgaaattggctaatgctagtgtttaataataaatatgtatgcccctcttcatttcagaaagaaactgaaggggtttgcaaatatatttgccatgcaacaagttacaaaatacaaaagataaggaagaaaaataaaagaagaaataatagagtaaggtcagaggaaaagtcgaaatgcccaaaccctttaaatactttattagaagtgggctgtatgcatactttgggctcaggaccttatcagccaatgcgttttcttcctaaaagaaagtttttggttttaacatgataatgtagcatgtgtaagattctaagagttaatgcagagacttatctttattgatgaaagggattttggatattgcataatgctgtgtgctttcatttatgttgactgcttacaaacgattcatgagacacaggctgaaagcaaaacaccaggccaaggctttctggctgaacttctgaggctgcatagctattgcaccaatggttttacttaaggaaaccgcaggtctgaggacaattacattctccaagaagaggaattc

SEQ ID NO: 206186 - DNA, 1000 bp, Homo Sapiens
aggaggccaaggtgggtggatcatgaagtcaggagttcaagaccagcctggccaacgtggtgaaaccccgtctctactaaaaatacaaaaattagctaggcgtggtggtacatgcctgtaatcccagctactcaggaggctgaggcaggagaatcacttgaacctgggaggcggaggttgcagtgagccgagattgcgccattgcactccagcctgagcaacaagaatgaaactctgtctcagaaaaaaaaaagaagaaaacaatccaatgtccttccactaatggataaacaaataaaatgttgtatattcataccatggcatatttttctggcataaacaggaatgacaaactgatacatgctacaacatgagtgaaccttgaaaacattatgctaagtgaaagaagccagtaacaagagaccacacatattactccatttatatgaaatgtcaaaaacaggcaaatctatagagatagaaagtagatgagtggttgcctagggttcagggttagagggttgggagaaaatgatgagtaactgctaatgggtacaggttttcaggggagagtgattaatacatttcaaaatggattgtagtgtgattgtaaaactaattgtaaaaataaattaaaaatcactgaaataagtgaactgtatggtatacgaattatatctcaataaaattgtttatatatggacacacacataaatgataaagcaaatggggcaaaatgttaacaatcggtgaatctggttaagagatatactggagttctttgttctattcatgtcaatgcttctttttcttttttctgagaccaagtcactcaggctggagtgcagtggcgccatctcggctcactgcaacctctgcctcccatttcaagcgattctcctgtgtcagcctcctgagtagctgggattataggcacccaccaccacgcccggctaatttttgtatttttagtagagacggggtttcatcgtgttggcca

SEQ ID NO: 206187 - DNA, 1000 bp, Homo Sapiens
aagtctgaagtattttgtccttcatctcttacctattcaaaagatagtaatggaaatgctgtcttctataaattaactgagaagtaaatgacttaatagttatctattgaattttttaaaaacacgttaataaacaaggcagactttgtccagacttataaaaatataacaaattgtttattttgagacatagtagaatgtactgttcaggaaattgttaaaaatagaaccataaaattaaagcatgaagtaagacatttcatctaataaaagccctaaagctggagaataaataacctctaccggggaatttctggtagaagagctcatctggggggaatcagctaagccctgaactgtgccctcaaagccttactcatggagcctacttaaaatttctggataaatacagcacgtcagattagccattcttcaacttgttccacgtgccagtatctgaatatggctctcacatttgcagtacccttgactcctcctcagactgcagtttaggtgactcactttagaggccttgtcatcaaagaaggaagatgaatcagaggtacaaagagaagaaattggaggtagaatgagaggaaaaatggatgcagtcaaataaatagttagctattaataaattcacaattttgattccccttttttctcatccactactccatacaatccactaaatagtcctcctattttaaaaatatatattgacttaatttatgtctcttcatctctgctgccatctccctagacaaggcagttgtctaggctactaagacaatggctagccagttatcccaacaccatttattgaatggagaattcattttccattgcttgtttttgtcaggtttgtcaaatatcagatagtggtaggtgtgtggtcttatttctgggttctctattctgtttcttagtctatgtgtctatttttgtgccagtaccaaactgttttggttactgtagccctgtaacatagtttgaattc

SEQ ID NO: 206188 - DNA, 1000 bp, Homo Sapiens
atttgtaaaaaccttcttagtgggaacagcaggttattctgcctgggtgggagcctttttactagcttaagcagctgtttaaactttcataagcaaagtaattattaaatgtttcatgaacatattggttggaacgtttgttcacattttaaccttgagttggaaagtttcaggggggtggggttaaagagttttaagctggcaaattcattctttttttctttcttattataaactttttatggcttagaaccagccaacctaaatcatggaaggaaaaatacatgtgtggcaagcatgagacatttcattgtttatttttcaaatttctgaaatgtgctcatagctgtgcatgcctctgggctcataaagacagcaaatggaaatagctgaagccagacagactgttttagatagatagccacccaggtaggcaaggaaaaccttgtaggttactctttcctccaatcaagtcatattaatttgccaaaatgggattttcaagcaggaggatgtgatctttcataggtctgaacaccttgcctttttcaatgatggagccatttaataataatcataatcagaagatgaggaataatatacatttatagaatacttagtacatggcaagtgtatatgacacatagtagtctacgtgtttctcatacattatctcctttaatgttcaccacaaccttgtcaaacaagcaatgctgttatatccatataacagatgaagaaacgaaggcttagagaggtcacagaatttgcaaagcttctgagtggctgagctgggatttaaattcatctgtcctatccaagaacaattcattatcctgtacttcttagtgcctttttattctagtttgtgaagtgctgctacctaaagagtttcccattttactctaaatgaaaaagaaaaccaggacaaccatcagcatcaacagcaactaatgcttgttgaacaactactatgtgcaggacgctatgttataagctt

SEQ ID NO: 206189 - DNA, 1000 bp, Homo Sapiens
gaggaaacagtccttctgtcacattgcaaagccctagaaaaatgaagggactagaaaaatgaagctgtttgatcctgctctggttctcagtctaccagtgagtgaagggccggagggcccgggcaagcttgagcccaggatccagtgggcccactgaagtcagggcccacttttggggggctgggaaaaggaagggttgctgtgggaccactgggataggcctttaaacagcacttcaccattggcctgaatcaaacattgtcattcccagtgtcccgagcaccttccctgagtcttcataccttctgcctcctagcttatggaggaggagccaggggcttatcttttgggggaaatgagagcacgattaggcatcaagaagggttgatgagaaactggtaagggggactgtcaagaacagcagagtgctgaaatggtgacaaaagctctgggctccggccccagctctgtactgagaagctgtgagattttgggcaagtctcataacctctgaatgccaatttctcaatggaaaacagggagactacctaccctataggtctgtgtttggagaaaacaaagtgtaagcgctggacatacagtagcatcagaaatgctgaatccgttggccagggctcatgtgtaaggcaaacatttcttggccactcctgagtagcatggtcttgcaggaatatatgcttaagtgctgtgagagcacagaggaagctttgcccttccctagagggttaatggctaccaacgtgagaaggtcacggagttccttaatgagagggagcctagcctagaataggggatgaatgagaaattgttctgagaaccagaggcaaggctgcaaccagcacatagacaggggtcgttggtctagaaggggagtcttctccagatgagagacagccagcttgccctgtgctcaccatgtgcccagatagtgggggcttagcaggaggaaggtgtgaggaatcccaggcctttggaattc

SEQ ID NO: 206190 - DNA, 1000 bp, Homo Sapiens
tgtacagttactttataagggttaaaaaaaaagcctaaatgatctatccttatgcttagggagtgcagccttcagttaggaaattgattgtttttacttttttgtgtctgatttgatggaagaattatgtaagttacatgctatctgctcagaaactgttatacaataaaatatttaatacttgagcgaaatagaagtcaccttgagtctgtgaaatgtttaaaaagtcttgaatttaaaagaattacattttttaaagtgatttttcttaaatgtctaagatattaggaaatatcaatggtattttagttggctaaagtggctagtgacactcatttaataggttttccatttgaccttttaagcgctactagcatatctagagttacctaaatcacaacacttatcttgtcaccttgtgtaaaatctaaattgttccttctcactttacctgtgtagccctgatttaagtgatttcatttcatgaggaaatgaaataataaatactaatttagcatttcaaaaagtgtctgaggccagtaaagagtagaactaataatctgattttaattatttatgatgtctcatttcacttcagatcttgactttttttgtaggactgtagaacttctttgttaattatgcccaggcagcattacacccagtcacctgagttagacttcttgactctctttatgtcatcactagtgagtcaaaaatgtattctcctccttagagtcatcaatttgacttcactttcttctttctagtagcatgaccttaattcatattcttaccttttgcttagactacctgtcgtaataggcatgaagtgcatttttactaagccgtgtcctacccaaactccttagtcttcaagtggcttcactgctggatctggtgtgctttccccctctagctactctccatctaggtacattcacttcacattattcaacattttccatatctactgttactttttcacgtattagctgtt

SEQ ID NO: 206191 - DNA, 1000 bp, Homo Sapiens
ttggaaatgaatatataaattagaaatctatgaggaaaagcaatggaatgatttgcacagaaatcagaagagtggttactttggagggagtgggtgttctgattcgggtcatagctccaggtaaaaccacccattttagccatccctgggtgtccactttctgaatatgaatcaagccacctatataggtttggagtatttttatttgcatttatttcccaaaaagaaggagacatgtcacatatgtaattgttagaggaactgggcatgtttagcctgaaaaaaagagaaggcttaggggccatataacggttgtcaattacctagagaaaagaaagtacacttaccacctgcttctccacagggcacagctcaaaccttggagagagaatttttttttgttgttttggttttacgtttgtagagatgggatcttgctatgttgcccaggcttgtctcaaactcctggcctcaagctatcctcccacctcagcctcccaaagtgccgggattacaggtgtgagccatcgcacccactcattttttttaaaagtgtctgatgatccaaatacaggaaatggtactccaagctcagcagtccatccactggcctgtttcatctgaggctgaagttaagtttagtggcttcaacctctcttccagttctgcagcctcaaggtacaaagaactagcctggaagaggatgggctgatgggagtcaggaagccgttccacatataacagcaaagaatgaaggaggacatgtttttgtttttggattttggaggttttttttagacagagtcttgttctgtcgcccaggctggagtgcagtggcttgatctcggctcactgcaacctctgcctcccaggttcaagcgattcttctgcctcagcctcccgagtagctgagacagatgcatgtcaccacccctggctaacttttgtattttttgtagaggtggggtttcaccatgttgcccaggctggtcttgaattc

SEQ ID NO: 206192 - DNA, 1000 bp, Homo Sapiens
gagggaggaagcaaagactgactgttcctttttaaccatcctgcctggcagcggtatactttgaaaagggcgactacaataagtgccgggagctttgtgagaaggccattgaagtggggagagaaaaccgagaagactatcgacagattgccaagtaggctcaaccttccagaataccttgagtagcgcggagggtttgctgtccaagacttaagtttctctgcatggggaggagggctgctggccatagaatctgctgtgttaagaaagggctggcaagaaggtcaccagagacaagacaaaaggtgttgaaggcagtgatgcgggcctttctagctgcaggtgtgtttttctgcaggagctgactttatctctctgtcctaagcagtccttgtccctctttctttatcagagcatatgctcgaattggcaactcctacttcaaagaagaaaagtacaaggatgccatccatttctataacaagtctctggcagagcaccgaaccccagatgtgctcaagaaatgccagcaggtgcgtaggaaaagaataggggtattttcttgttttcctaataattgagccattgtttcttactgttttatttaataatgaacttgacttttttttttttttgagatagggtctcactctttcacccaggctgaaagacagtggcacaatcgtggctcactgcagcctcaacctcctgggcttcagtgatcttcccacctcagcctgagtagctaggattacaggcacgtgccaccacgtccagctaattttttttttgagatggagtctgtttgtcacccaggctggagtgcggtggcatggtgtctgctcactgcaacctccgcctcccaggttcaagcaattctcctgcctcagcctcccgaattgctaagactacaggtgcacgccactatgcccggctaatttttgtatttttagtagagatggggtttcattatatggaccaggctggtctcaaactcctg

SEQ ID NO: 206193 - DNA, 1000 bp, Homo Sapiens
gcactgaggaagttaaacgagctttcttctccaagtccaaagaggtacccgtacccctgaggtggggagggggagcaggaactttgagccagtgggggtgtgcttcaaattcccaggagtagaccagcatctctggcgggtgccacattttttcagccctcatagggagtggcaggtgctcaatggtaggggaaaggctgtgggcaggagccaggggtcctgtctgatgggctgggcttggttttcttgacctgcctgcctgctcttgagaaacctggaccagggcatatggtgaatgcagggggctggcaggtggggagggcttgaacacaggaggaagcaggagtccatgctctctggccttctgaggagtgggcaggcctgagtgagggtcactgaccaggcagggcctctgggtatgactggagccctggtgggtggatgtcatcagcatgggtcctggggagggacaggcaaagggagataaggggagtcctgccccaccccagctgcacccagaccgggaccctgggaacccaagcctgcacagccgctttgtggagctgagcgaggcataccgtgtgctcagccgtgagcagagccgccgcagctatgatgaccagctccgctcaggtagtcccccaaagtctccacgaaccacagtccatgacaagtctgcccaccaaacacacaggtacagtaatcctgccctcagcttgccccacccccaggtctcttgggtagtctcatttccacaatgtcccttcctctgcctcccagcagctcctggacaccccccaacgcacagtactggtcccagtttcacagcgtgaggccacaggggccccagttgaggcagcagcaacacaaacaaaacaaacaagtgctggggtactgcctcctcctcatgctggcgggcatgggcctgcactacattgccttcaggtgatgcctgttctccccggggtgatgggcagagggcaggagggtgggtgaattc

SEQ ID NO: 206194 - DNA, 1000 bp, Homo Sapiens
aaaatgcaacaattagccgggcatggtggggcacacctgtaatcccagctacttgggaggctgaggtaggagaatcacatgaacccaggaggtggaggttgcagtgagccgagactgtgccactgcactcgagcctgggcgacagagcaagaccctgtctccaaacaaacaaacaaaaagaaaatgatttgtgggttgcttttcattaaaaggtaaaccttaccaaggacttccttaccctcactatctgcctaaataatttcttaactcctgtaccatcagtgctttattttgatcttttgatgatgtcatgtttctctgattattcacgatcttttggacttgtattggtgtgggcacatttgaagaagtaagctcttcttgttctctttacaaactggcttcagcagggaaagccctttaccagttagcctgttcagagattctagaccaagtgtcttcaggatccatgggcaggcttgctgctggagtctgtgggtcagatggcttggtacctgggtcagtggatgagtaggcctgactcttgtgcccacaggggctggcatgtttccagcatatgtgtgtggcctgtagtctgcattcataagggctgatgacttgcagcctagggcatcatgggctggcctggtactgggtggatctagagcctgggactgtgggtgctggcatggagtctgtgtccacaggtgctggcctgatgactggagctaccaggtccaacctggagtctgaggctgtgggcgctagcctggtgatgggacttgcttggtccctgagccaacatgaaaggcttgaagtgtaggtctatagggtctagcccatagcctgaggccacagagctggcccagcactggaaaaggacaggaaccttagtgtgtaggggctggtcttatcctggtatgggcctacagcctgagttcactgtcggggagcctggagcctggggccaggagggatggcctggtgctaggggaagctt

SEQ ID NO: 206195 - DNA, 1000 bp, Homo Sapiens
ctgagtgtgtgtgtgtgtgtgtgacatataatttttaaaaatcattacttgatgattctttgctagatacactgtttcagaagtgtgactctaaagcttttggccttggtgtctttttatgctactgtaattaattgcctagaggtacaaaacagcctgaattaatttttgttgtcattcccatgcatgtttaaatcatgttacaacaggctgtgcacggtggcacatgcctgtaatcctggcaatttaggagaccaaggtgggcagattacttaaggtcaggagtcgcagacgagcctggtcaacacagtgaaaccccatcgctactaaaaataacaaacaatagccggttgtggtggtgggtgcccgtaatctcagctattctggaggctgaggcaggagaattgcttgaacccatgaggcagaagttgcagtgagccaagcttgtgccactttagcctgagtgacagagtgagactccatctcaaaaagcaaacaaccataaattcacaacatatgtgtgtggttctgactatgtgtagaatttgttttgacgtcttaaattttcttttttttttaaattttgatatggcgtctcgctgtctcgcccatctcgttgtcttgcccaggctggagagcagtggtgtgatcttggcgcactgcaagctccacctcccaggttcacgccattctcctgcctgggcctcccaagtagctgggaatccagacgcctaccacaacgcctggctcattctttgtatttttagtagaaacggggtttcaccatgttagccaggatgatctcgacctgctgaccttgtaatccacccacctcggcctcctaaagtgctgggattagaggcgtgagccaccgcgcccggcccagagtctttttacactagtaccatttattgcctagaagtaaccaatattctaaactactttttaaaagtattcttatgcatgtttaaacattttccaacatgtgtacgtggtcata

SEQ ID NO: 206196 - DNA, 1000 bp, Homo Sapiens
acaaactatggtacacgtatacattggaatattatttagcaataaaaaggtattgagctgtgaagccacaaaaagacaaggggaaccttaagtacatattgctaagtgaaagaaaccagtctgaaaaagccacatactgtatgattccagccatatgacattctggcaaaggcaaaactttagagatagtaagatcagtggttgcaagggccttgaggagaggagaaaaaggatgaaaagctgaatcacaggggatttttaaatcagtgaaactattctgcttaatactgtaatagtggatacacgatatacatttgtcagaactcatagaactatacaaagcaaagcgtggaccttagtataaactgatggtataaataaatattggctcatctattgtgataaatgtgccacattaatgctagatatttataatggaggaactgtggggggaaatggagattgtttatgggactctattatctgctcatttttttttttttttgaggcactctcactctgtcgcccaggctggagtgcagtggcgtgatctcggttcactgcaagctccgcctcccaggtttgtgccatttccctgcctcagcctcccgaatagctgggactacaggcacccgccaccacgcccagctacttttttgtatttttagtagagacgaggtttcaccgtgttagccaggatggtctcgatctcctgaccttgtgatctgcccacctcggcctcccaaagtgctgggattataggggtgagccaccgcgcccggcctatctgctcaattatttttttaaatctaaaaatgttctaaaatacaaattctactaatttttaaatgcagctgactttaataatataatatcattgagtgtagagaaactatttgtaccgacattttacattatttatttatgtcccaaatatatagaacatatgggatttgttattaattactattaaaaatgtctttggtaatggattaagatc

SEQ ID NO: 206197 - DNA, 1000 bp, Homo Sapiens
gtcccgaaatgtcgtctgccttgggaggccaaggcgggtggaacatctaaggtcaggagttcgagaccagcctggtccacatggtgaaactctgtctgtactaaaaatacaaacattagctgggcgtggtggtgggtgcctgtaatcccagtgactcaggaggctgaggcaggagaattgcttgaactcaggaggcggaggttgcagtgagctgagatcgtgccattgcactccagcctgggtgacagagcgaaactccatctcaaaaaaagaaaaaaagaaaaaaacaaaatgtcttgtgccttgccccaccctagcccagactaaaataccgggcttggccactcctctctctgcctccagaatgaacccggcccactctggcccttgggccagacctgtaacctgtgacctgacatgtccttgcccctctagcctagagtcctggggagcttctgtccacctgtcctgcagaggagtcgtttccagcccggctggtgagtgctggccagggtggggcagagcaggcggggcggcgaaagtccagacctggctgtgctgtctggaaacgtggcccagggcgctcagctgctgtctgcaccccacgccctccctggcttccccatgctcacagcttgcccactgctgcaggtcgggcgggcacggggcatctggggaggggcatagcctgtctgtgctgccccctcaggttggtgtgggtcgcctgtccaggaaaaaccctcccagtctgccaggctccacctgcctccacgctccattctccccaccccggccaggatgaaggaagggctgccctttaacagaccgtaaacaggcctggagagcttaggaaggggctgagctggggcctgtctgagcccctacccctctgctgtctgagtggcctcctccgcccttactgcaggcccataggctcctgccagcctgtgacgtgcggccccgggaatgccgtggggagcgggcaggctggcatgagctc

SEQ ID NO: 206198 - DNA, 1000 bp, Homo Sapiens
gcgtttattcttgtgactttcttgtctaggcttgtccttacttaaatgttttaaaagattaaaaaagttaaagaatgtagtttaaggccaggtgcggtggctcacgcctgtaatcctagcactttgggaggccgaggcgggtggatcacgaggtcaggagtttgagaccagcctggccaatatgaaaccctgtctctactaaaaatataaaaaaattccctgagtgtggtgctgggcacctgtaatcccagctacttgggaggctgaggcagcagaatcactcgaacccgggaggtggaggttgcagtgagccgagatcgcaccattgcactccagcctggtgacagcaagactctgtctcaaaaaaaaaaaaaaaaaaaggtttaagaagttaattataaaacattgcccctgccttgcccacatttctaaacctgagtgaattattttcattttatagctgtttcttcttaaaaatttactttaagaatgattgctttttaagtctaaattgtgtgttcctactatttatgggtgttctttcccccatttagtcattacttattgactttttttgagacggggtttcgctctgttgcccaggctggagtacagtggtgggatctcggctcactgcaacctctgcctctcaggttcaagtgattctcctgcctcagcctcccgagtagctgggcttacaggagcctgccacactcccggctaattttttgtatttttattagagacggagtttcaccatgttgaccaggctggttttgaacccctgacctcaactgatctgccctcctcggcctcccaaagtgctgggattacaggcgtgagccaccgtgcctggcctgtttattgatgccttactctagaagatgagtcttttaactcttgctcaagtttctcttctcctgtacttgtatatgtgtaatattttacctgattaatgtctatttcatgtctgaaagtactgttctcagccgagaataac

SEQ ID NO: 206199 - DNA, 1000 bp, Homo Sapiens
tattcgcctacacaattctccgatccgtccctaacaaactaggaggcgtccttgccctattactatccatcctcatcctagcaataatccccatcctccatatatccaaacaacaaagcataatatttcgcccactaagccaatcactttattgactcctagccgcagacctcctcattctaacctgaatcggaggacaaccagtaagctacccttttaccatcattggacaagtagcatccgtactatacttcacaacaatcctaatcctaataccaactatctccctaattgaaaacaaaatactcaaatgggcctgtccttgtagtataaactaatacaccagtcttgtaaaccggagatgaaaacctttttccaaggacaaatcagagaaaaagtctttaactccaccattagcacccaaagctaagattctaatttaaactattctctgttctttcatggggaagcagatttgggtaccacccaagtattgactcacccatcaacaaccgctatgtatttcgtacattactgccagccaccatgaatattgtacggtaccataaatacttgaccacctgtagtacatgaaaacccaatccacatcaaaaccccctccccatgcttacaagcaagtacagcaatcaaccttcaactatcacacatcaactgcaactccaaagcaacctcttacccactaggataccaacaaacctacccacccttaacagtacatagtacataaagccatttaccgtacatagcacattacagtcaaatcccttctcgtccccatggatgacccccctcagataggggtcccttgaccaccatcctccgtgaaatcaatatcccgcacaagagtgctactctcctcgctccgggcccataacacttgggggtagctaaagtgaactgtatccgacatctggttcctacttcagggtcataaagcctaaatagcccacacgttccccttaaataagacatcacgatg

SEQ ID NO: 206200 - DNA, 1000 bp, Homo Sapiens
tattcgcctacacaattctccgatccgtccctaacaaactaggaggcgtccttgccctattactatccatcctcatcctagcaataatccccatcctccacatatccaaacaacaaagcataatatttcgcccactaagccaatcactttattgactcctagccgcagacctcctcattctaacctgaatcggaggacaaccagtaagctacccttttaccatcattggacaagtagcatccgtactatacttcacaacaatcctaatcctaataccaactatctccctaattgaaaacaaaatactcaaatgggcctgtccttgtagtataaactaatacaccagtcttgtaaaccggagatgaaaacctttttccaaggacaaatcagagaaaaagtctttaactccaccattagcacccaaagctaagattctaatttaaactattctctgttctttcatggggaagcagatttgggtaccacccaagtattgactcacccatcaacaaccgctatgtatttcgtacattactgccagccaccatgaatattgtacggtaccataaatacttgaccacctgtagtacataaaaacccaatccacatcaaaaccccctccccatgcttacaagcaggtacagcaatcaaccctcaactatcacacatcaactgcaactccaaagccacccctcacccactaggataccaacaaacctacccacccttaacagcacatagtacataaagccatttaccgtacatagcacattacagtcaaatcccttctcgcccccatggatgacccccctcagataggggtcccttggccaccatcctccgtgaaatcaatatcccgcacaagagtgctactctcctcgctccgggcccataacacttgggggtagctaaagtgaactgtatccggcatctggttcctacttcagggtcataaagcctaaatagcccacacgttccccttaaataagacatcacgatg

SEQ ID NO: 206201 - DNA, 1000 bp, Homo Sapiens
tattcgcctacacaattctccgatccgtccctaacaaactaggaggcgtccttgccctattactatccatcctcatcctagcaataatccccatcctccatatatccaaacaacaaagcataatatttcgcccactaagccaatcactttattgactcctagccgcagacctcctcattctaacctgaatcggaggacaaccagtaagctacccttttaccatcattggacaagtagcatccgtactatacttcacaacaatcctaatcctaataccaactatctccctaattgaaaacaaaatactcaaatgggcctgtccttgtagtataaactaatacaccagtcttgtaaaccggagatgaaaacctttttccaaggacaaatcagagaaaaagtctttaactccaccattagcacccaaagctaagattctaatttaaactattctctgttctttcatggggaagcagatttgggtaccacccaagtattgactcacccatcaacaaccgctatgtatttcgtacattactgccagccaccatgaatattgtacggtaccataaatacttgaccacctgtagtacataaaaactcaacccacatcaaacccccccccccatgcttacaagcaagtacagcaaccaaccctcaactatcacacatcaactgcaaccccaaagccacccctcacccactaggataccaacaaacctacccacccttaacagtacatagtacataaagccattcaccgtacatagcacattacagtcaaatcccttctcgtccccatggatgacccccctcagataggagtcccttgaccaccatcctccgtgaaatcaatatcccgcacaagagtgctactctcctcgctccgggcccataacacttgggggtagctaaagtgaactgtatccgacatctggttcctacttcagggccatgaagcctaaatagcccacacgttccccttaaataagacatcacgatg

SEQ ID NO: 206202 - DNA, 1000 bp, Homo Sapiens
aatgcaaacctgttgagaagatccaggagaacaagatgctagttcccatgtctgtgaagacttcctggagatggtgttgataaagcaatttagggccacttacacttctaagcaagtttaatctttggatgcctgaattttaaaagggctagaaaaaaatgattgaccagcctgggaaacataacaagaccccgtctctacaaaaaaaatttaaaattagccaggcgtggtggctcatgcttgtggtcccagctgttcaggaggatgaggcaggaggatctcttgagcccaggaggtcaaggctatggtgagccgtgattgtgccactgcataccagcctaggtgacagaatgagaccctgtctcaaaaaaaaaaatgattgaaattaaaattcagctttagcttccatggcagtcctcacccccacctctctaaaagacacaggaggatgacacagaaacaccgtaagtgtctggaaggcaaaaagatcttaagattcaagagagaggacaagtagttatggctaaggacatgaaattgtcagaatggcaggtggcttcttaacagccatgtgagaagcagacagatgcaaagaaaatctggaatccctttctcattagcatgaatgaacctgatacacaattatgaccagaaaatatggctccatgaaggtgctacttttaagtaatgtatgtgcgctctgtaaagtgattacatttgtttcctgtttgtttatttatttatttatttttgcattctgaggctgaactaataaaaactcttctttgtaatcatattttgggcattctcagctgatttgagtactctgcttgcaagtctaccaggggtgcattttttcccctatcatttaagcattgccctttcttgaagtgatcccattccaaattttgcagagttgctctttccccttatagtatttccaaagtcagtgtcttcctgagctcaggggatgtccctgtaatctgacaaggaaggatcc

SEQ ID NO: 206203 - DNA, 1000 bp, Homo Sapiens
  misc_feature (281)..(281): n is a, c, g, or t
  misc_feature (304)..(304): n is a, c, g, or t
gcacgctgtcctcctgttcgtctcgaccatcgcccggcgacgatgtgccttcgcgggtgaacttgatcgcgttgctgatcaggttggtcaggatctgcttgaggcgcagcgggtcgcccaccaacgccagcggcgtatcgcggtacaccaggctcaccaattcaagctgcttggcatgggcggcgggggcgaagatggtcagggtgtcttgcagcaagtcccgcaggttgaacggcacgctgtcgagcaccagcttgccggcctcgatcttcgagaaatcnatgatttcgttgatgatgcccancaggttatcggcggatttttcaatagtgcccaggtaatccagctggcgcggcgacagctcgcttttttgcagcagatgagtaaaaccgaggatgccgttgagcggcgtgcggatctcatggctcatattggccaggaactcggacttgatacggctggcctccagggcctccttgcgcgccaggtccagctcgatgttctggatctcgatggtctccaggttctggcgtacctcctcggtggcttggtcgatgctgtgttgcatttcttcctgggcgttctgcagggtttcggccatgcggttgatacccgatgcgagctggtccagttcctggctgcccaggggcggcaggcgtgtttccaggttgccgtctttgagctgggccacggcttgcttgatctggccaatcggcgaattgatggtacggctgatccgcagggcgagcgctgcggtgaacatcaggccgatggcgatcaacaacaggctggcgaacatgctgcggtagccgcgcagcaacatgccattgtgggacagctccacttcgacccatcccagcaggcggtctgcctcatccgggatcacgtctccggcgaagttgcgatggcggccgaataccggcagcagataacgggtggcatcgttgccggtgcgctgcaacaggcgcgaactgttgccggtgggtggtgggttgagcat

SEQ ID NO: 206204 - DNA, 1000 bp, Homo Sapiens
agcccccatacacagagcctagacaagagtcccatcacctgggtgatcagtgcagaaatatgtcacaatgcccctataggcagatccaacacaagtgttacatcacctgggtgatcagtgcagaaatatgtcacaatgcccccataggcagatccaacacaagagttacatcacctgggtgatcagtgtagagatatgtcacaatgcccccgtagacagagcctagacaaaagtcccatcacctgggtgatcagtgcagagatatgtcacaaagcccctgtaggcagagcctagacaagagttacatcactttgttgatcagttcagagatgtgtcacaatgcccatgtaggcagagcctagacaagtgttccatcgcctgggtgatcagtgcagagatatgtgacaaggcccctttaagcagagcctagacaatagttacatcacctgagtgatcaatgcagtgatatgtcactacgccccagtaggcagagcctagtcaagcgttacatcacctgagtgatcagtgcagagatatgtcacaaagcccccatacacagagcctagacaacagtcccatcccctgggtgatcagtgcagaaatatgtcgcaatgcccccataggcagatccaacacaagagttacatcacctgggtgatcagtgtagagatatgtcacaatgccccaataggcagagcgtagacaaaagtcccatcaccaaggtgatcagtgcagagatatgtcacaaagcccccataggcagagcctagacaagagttacatcacttggttgatcagttcagagatgtgtcacaatgcccatgtaggcagagcctacaccagtgttacatcacttaggtgatcagtgcagagctatgtcacaatacccccgtaagcagagcctagacaagagttacatcacctggttgatcagtgcagagatatctcacaatgtccctgcaggcagagtatagacaagagttacatcacctagatgatc

SEQ ID NO: 206205 - DNA, 1000 bp, Homo Sapiens
gtcctcattgtaaccctaaggagtaaatattgttgttatcctcttgtcaaagatgaggaaacaggccaggcatggtggcttacgcctgtaattccagcactttgggaggctgaggcgggtggatcacctgatatcaggagtttaagaccagcctggccaacatggtgaaaccccatctctactaaaaatgcaaaaattagccggtcatggtggcacatgcctgtaatcccagctacttgggaggctgaggcaggagaatcacttgatttgaacccaggaggcagaggctgcagtgagccgagatcaggccactgtactccagcctgggcaacagagcgagaccacatctcaaaaaaaaaaaaaaaaaaggaaacaggcacttccatcaagacttggtatttattgagaccaaatcaatgataatatagaggggagaggaagctcagacttaatcatgaaacctgatttatgtttctgaaggcccacatggcctccccataatgaattttctgcaccaaaatttatttaaaagtgttattatgctagcaagtcacaaaatttagtatttgcaattacatactatctttatatttgcaaaattttgaattttggatcctgtttcatggacttgtaaattaaaaacagaatgattacgcagctcctcaccagcaacggaacaaagctggacggagaatgactttgacgagttgagagaagaaggcttcagacgatcaaactaccctgagctaaaggaggaagttcgaacccatggcaaagaagttaaaaaccttgaaaaaaaattagacgaatggctaactagaataaccaatgcagagaagtccttaaaggacctgatggagctgaaaaccgtggcacgaaaactacgtgatgaatgcacaagcctcagtaaccgattcgatcaactggaagaaagggtatcagtgatggaagatcaaatgaatgaaatgaagcgagaagagaagtttagagaaaaaaaaaa

SEQ ID NO: 206206 - DNA, 521 bp, Homo Sapiens
taaataatttaattattattatattattaatactatataattagtcatattctgtattccaaaccctttctttgaaaactcctacgttccctccacaaattgaagagtggaattgctttctactcttcccctgctagcatggataataaagacatcttgctccctcttatcataactattattattttgacgtctttccacaagcagcaagcagctggactcttttgctggttatgcttgttaagtggtatgtgcagcattctgcagaatattattcagacaacaagtcctgcacttcccctaggtttcctcccaagttgtgggtgaggccttttctgaaaccctcctccaacctttctgaattctggggctataaattccaggaatctttgagttgttcagatagaatctgcagtgcctgaaatccagcctgctgcttactcacatcctcatactcagctgcagaccgcctgacagaagggctgccaaactgcactccagacagacaggtgcacagccag

SEQ ID NO: 206207 - DNA, 1000 bp, Homo Sapiens
gcttgaatactgcagctaggaataatggaataggaccacggttctattttgttggtttccggaactgaggccatgattaagagggacggccgggggcattcgtattgtgccgctagaggtgaaattcttggaccggcgcaagacgtacaaaagcgaaagcatttgccaagaatgttttcattaatcaagaacgaaagtcggaggttcgaagacgatcagataccgtcgtagttccgaccataaacgatgccaactgacgatccggcggcgttattcccatgacccgccgggcagcctccgggaaaccaaagtctttgggttccggggggagtatggttgcaaagctgaaacttaaaggaattgacggaagggcaccaccaggagtggagcctgcggcttaatttgactcaacacgggaaacctcacccggcccggacacggaaaggattgacagattgatagctctttctcgattctgtgggtggtggtgcatggccgttcttagttggtggagcgatttgtctggttaattccgataacgaacgagacttctccatgctaaatagttacgcgacccccgagcggtccgcgtccaacttcttagagggacaagtggcgtacagccacacgagattgagcaataacaggtctgtgatgcccttagatgtccggggctgcacgcgcgctacactgaatggatcagcgtgtgtctaccctacgccgccaggtgtgggtaacccgttgaatcccattcgtgatggggattgggaattgcaattcttccccatgaacgaggaattcccagtaagtgtgggtcataagctcgcgttgattaagtccctgccctttgtacacaccgcccgtcgctactaccgattggatggtttagtgaggtcctcggatcggccccgccggagtcggcgacggcgctggcggagagccgagaagacgatcaaacttgactatctagaggaagtaaaagtcgtaacaaggtttccgt

SEQ ID NO: 206208 - DNA, 1000 bp, Homo Sapiens
agcttacatatcattgtatagagactgtttattctgtaccaaactgatttcaaaagtactacattgaaaataaaccggtgactgtttttcttcataaagttctgcgtttggcatcttcactctttccaaaatgtatctgtacatcagaaatgtcactattccaagtgtctttttagtgtggctttagtatggcttccttttaatattgtacatacattgtatctttgttttatggtaataagtaataaaaatgtagacttcatattttgtacaaaatgtcctatgtacagaataaaaaagttcatagaaacagcaaatataggtaagtggcacaattatttttctttagaaaatatctgtaactttatgcattagtgaaatgttaagtaccgacatattttttaacattttgtaattcaaaactttttgttttgacattgtttatgaagagaaacttcatacacttgccatttaatatgctcttttatctaattttcaaaaactctaaaaaacggtgtatcatatggactaaataaagaacatgtgaattttattgctcatcatgaaactaaatttagccatggtgttgagcaagctggctctgacgttatcgggttcccgttaggtcagggccgcccacacacagggacgctgactgcagaggggctggccatctccatccagcccgcctggagcgctggctgcgccagatgctagccacagctgttcaaagctaagtctatccactgatttttttacttacttagtggaaaaggcagtgtgactttttatagaccacctcttggtttggtttgggttttggggctttttttgagtaagaaaaggtgaatcaatacaatttatagaaatgaaagtcttgaaaatagggaattgctgaaagtatgaatttaggatcctagttcgcccacctcctcctcagtggagagatcattatcctcgctgatgctcttgcgagaagcccgtggaaacaggactaaag

SEQ ID NO: 206209 - DNA, 1000 bp, Homo Sapiens
tgacatcccaaatgtgtgtggcaagttagatgatgatggcacaaaagacagaacaccttgcttctggccattgtcagctcttggaagagagcacacttttagaggagcagctgcaaggagcctgagaacaaaactggaaatgtctgttatgaaagccttcacaggaaattctgcaagtggcaacgtgggtccattccgtgtgtgtcactagagctggcgcaagcccatggccatggtgaggcagcgtttccactggaactaatctgatacctgcaccaactcttgcaactgtgcagtgttcccactgcaaactacggatggggtaaaagactgctcacctcctatttctcatctaatctcacacactctgtttgatgaggctatggagaaacaggtcttctcatacactaaaggtgggagtacaaacaattcaagccctgtgcaggacaattaggcaatacctatcaaaattatacatgatttttcctgctgacccagcaattccacttttgggaataattgacagatataggtgcatatgtacaaaatgatggaaagctctctggtatatattagtaagtgataaaacaaggtgtaaaatagtgtatatatggctactaccttttgttttaaaaatgggggaaaatggtggagcttgcggtgagccgagatcgtgccactgcactccagcctgggcgacagagcgagactccgtctcaaaaaaaaaacagggtggggtgggggggaaataatagtacatactcatatttacctgtatctatataaaacacactatcaaggattcacaagaaactaatacaaatgatccccttatagatggtatgtattgggggatactgaggtgagcagggtataagtggggcaagacttttcagtgtaaacttcttttaaattttattttgatttttgaataatgtaaattaactgtcaaataattaaattaaaaataaccaatttattaacaaaaaaaaaaaaaaaa

SEQ ID NO: 206210 - DNA, 1000 bp, Homo Sapiens
caaacctcacgtgacaggccaggaaactcctccaggcctgtggcagctgaacacagttccttggtggagaggtttactggaacatggtgtaggcagggcttatgaggaggccagccttggaggtgtcccacatgggtcttctgaagaaaagttataccacccctccccacaaaaagaaccccacaatcaaattaagagacccactgtggcccatgatggggagagaagagttctgcagcaattgtgggatgagagttgttcttcccggtgaccaagcctgggcacttggggcctcagctggcctaccagtgaaggcctgagggtggtgtcttctcatctttattgctttccagggagaagggaggaatccgaacatcaaagtgggagccatcaggtctttcaaagcggaacgtgcccctacagtcagaaagaagctggtttagaaggagccagggctgaggcctcctaaggatctggatggccccatgccctcagctgccagccacagaggacatgtgagcctgagctctcttctatctctagctcatgacaggatgactggtccagagacccaagagcccctcatggttatccatgaaaagaaaaacacagctgcagtggctcacgcctgaaatcccagcattttgggaggctgatgccagcagatcacctgaggtcacctgaggtggggagtttgagaccagcctgaccaacatggagaaaccccgtctccactaaaaatacaaaattagccgggcgtggtggcgcatgcctgtaatcccagctactcgggaggctgaggcaagagaatggcttgaacctgggaggcggaggttgcagtgagccaagattgtgccattgcactccagcctgggcaataagtgaaactccatctcacaaaagaaaaaaggaaaacacagctgtccagattctggcctttagatacatactgcataagctagccaactgcattttcaggtaaaggagtgaaacaccaagg

SEQ ID NO: 206211 - DNA, 1000 bp, Homo Sapiens
aaggactcgattaatataggccattgttattactgctgttattattggttgccccagatataagtaaaccccaagcatacctgaatgtatttgccatccgcagaaaaatccatctgaatgacaaagcttgggatatctttgcagtagccaatgcggtttcagatttgtgccctgagtgaggtcatagaagtcaactgtgtgttcagaagaaccaacggctaagaatcggttgtctgggctgattctagaaaaagcaatccgagagcagagtccatgaggagggctgtttggggctggtcaggcacgaaggctggtctgtgacaggccttccaggcctaaaggcaatgagagccaccttgtgactcacatgtggtcagcctctcctggcattctacggaattcaacaatttatctggatcgaatccccgggaaatatgtagaatgacatttacaagtaattttaaccacacttttatggaaattagcaaagacttgtctaagagtgagagtgggagaaggtattctttcataggtggcttgttgaaagtgaccctctcacaactgagttctttattccagccgtggctggaatgggaaccactggtaagcagaatgcttgcctttctcctccatgcccagaccacccacttaggtacctgatatcttggatagcagatttccggtctcgttttttcccccaaactttcaggctgttcaccaacaagatgacaaactctccattcttcatgccaatggccaccatctccccatcagggctgtaggctgcacacctggccgcatggcccaagctcaccttgtttaacagcttctacattgatgcaaaggaaagtcacctgagctcttggccccctcagctggtctccaggagacattctgcaccaggccagagaagtcaggctgcgctcgcagcacattctcacaactctgtgtgggtccagagcacagttcaagtacaggggtttgcagagtccacaatgat

SEQ ID NO: 206212 - DNA, 1000 bp, Homo Sapiens
cagctgaggtcttctgcacagctgccatttcactgtgggagccaagctgcctcgccagctgggcagggactggaacggctcccagcctgtgtgcctctcaaggctaatctctggtctcctattgtcactgccccactgtgtgccaatggggactcctgtttatttctggcagcttctctttgaggcaggacttacttggaacctacagtgggtcctatgtgacttctttgcaggtcctgaggaccagacagtgctgttggtgactgtccctgacttcagtgccacgcagaccgcctgccttgtgaacctgcgcagcctggcctgccagcccatcagcttctcgggcttcggggcagaggacgatgacctgggaggcctggggctgggcccctgactcaaaaaagtggttttgaccagagaggcccagatggaggctgttcattccctgcagtgtcggcattgtaaataaagcctgagcacttgctgatgcgagccttgagccctgggcactctggctatgggactcctgcaggggtgcccacagtgaccatagcccatgcacccaccagccggtctccctcctccccatccctgacacctcagaatgtgagcagtccgtgccatgagcttgttttattggagtgaccttggctccctccctctgcccctactccaacactgcagcaaccccatctcttacgagactggcaggtggagcaggagcctctacacagcctctggctcttaggtcccagtcatgtttgcaccccctcaaaggggcaggaccagcccttcctttcagtgtccataccaggggccttccatgtgctgatgggtgatgtgactgtggtcagcaggcttgggaagtgctgctgctgtagcttgagttgggctggggtcttggtaggacgctgatctcagaagtccccaaagttcactgtgtaggtctctactgttgtgaaggggaatgcctggccagtggctatctcctcctctttct

SEQ ID NO: 206213 - DNA, 1000 bp, Homo Sapiens
cccgacacacccagccagcctggccccctccccagggcggggccgggctttccccagggaacgggtaggcggggtgggttcccacgccaggtgacaggtgatatacggccagccatggccctgcacctcgccaggcacccgctgttatcggctccccccccccaccccccccgtgcctgctgagcaaacagcccgctgcgggagggggcgggtgggctgggcagcaggcggggaccaaagtcctgggaacagcccccacccctctcccaggctgggcactgggccttggctggtcctgaccctgcccctgcccctgcccccacccgcagccgggactgccccatcttctacatgcgcaagaaggtgcggaaggacctggaagaccaggagcagctcctgcggcgcttcggaccccctggacctgaggcctggtgaccttgcaagcatcccatggggcgggggcgggaccagggagaattaataaagttctggacttttgctatatggtgctttgtggtctctgggggacactgtctggtttcataagccctggccttggctgggaccctcctgaggcccgcaccgcccctcatcctcagcaaaagcccccggactcccacctgtgctgcctggttcatgtgggccaagcctgcctcagtttcctctctggccctgaaggaacccttataccagcgcttctctgccctgcttagggcccccaggtgtctggccccggcccagccctccctggtgatgaccctggggaccctggtggctgccccgccctccaggtgctgacctgtttcctccaggccctggggcagccccaggcgcaccggggcttccactcctcagcccggccaaggggaccccccccatcccccgccggaccacacacccacgatgtttccacgtcggggtcctggcaatgggctttgggtctgggtttccccccagcgactcccatctctatccccgcagcctctaactgccgtcagat

SEQ ID NO: 206214 - DNA, 1000 bp, Homo Sapiens
ctgagaaactcgagccgggaacaaagaggggtcggactcagtgtgtgtgtcggctcgagctccgggcagaggcatttgggcccgaggcccccgctgtgactccccgagactccgcagtgccctccactgcggagtccccgcgcttgccggcaaaaactttattcttggcaaacttctctttctcttcccctcctcctcgggcccccatcttctgctcctcctccttctctagcagattaaatgagcctcgagaagaaaaaccgaagcgaaagggaagaaaataagaagatctaaaacggacatctccagcgtgggtggctcctttttctttttctttttttcccacccttcaggaagtggacgtttcgttatcttctgatccttgcaccttcttttggggcaaacggggcccttctgcccagatcccctctcttttctcggaaaacaaactactaagtcggcatccggggtaactacagtggagagggtttccgcggagacgcgccgccggaccctcctctgcactttggggaggcgtgctccctccagaaccggcgttctccgcgcgcaaatcccggcgacgcggggtcgcggggtggccgccggggcagcctcgtctagcgcgcgccgcgcagacgcccccggagtcgccagctaccgcagccctcgccgcccagtgcccttcggcctcgggggcgggcgcctgcgtcggtctccgcgaagcgggaaagcgcggcggccgccgggattcgggcgccgcggcagctgctccggctgccggccggcggccccgcgctcgcccgccccgcttccgcccgctgtcctgctgcacgaacccttccaactctcctttcctcccccacccttgagttacccctctgtctttcctgctgttgcgcgggtgctcccacagcggagcggagattacagagccgccgggatgccccaactctccggaggaggtggcggcggcgggggggacccggaactctgcgccacg

SEQ ID NO: 206215 - DNA, 1000 bp, Homo Sapiens
ttttctgtctttgcagcctttgcacatctgccagccctgatgcaacatttggctgacaactacaaacactggaagacactagatgacctaaagtgcaaaagtttgaggcttccatctgacagctaaagccaagccacagagggggcctcttgaccgacaaaggacactgtgaatcacagtagcgtaaacaagaggccttcctttctaatgacaatgacaggtattggtgaaggagctaatgtttaatatttgaccttgaatcattcaagtccccaaatttcattcttagaaagttatgttccatgaagaaaaatatatgttcttttgaatacttaatgacagaacaaatacttggcaaactcctttgctctgctgtcatcctgtgtacccttgtcaatccatggagctggttcactgtaactagcaggccacaggaagcaaagccttggtgcctgtgagctcatctcccaggatggtgactaagtagcttagctagtgatcagctcatcctttaccataaaagtcatcattgctgtttagcttgactgttttcctcaagaacatcgatctgaaggattcataaggagcttatctgaacagatttatctaagaaaaaaaaaaaaacgacataaaataagcgaagcaactaggaccaaattacagataaactagttagcttcacagcctctatggctacatggttcttctggccgatggtatgacacctaagttagaacacagccttggctggtgggtgccctctctagactggtatcagcagcctgtgtaacccctttcctgtaaaaggggttcatcttaacaaagtcatccatgatgagggaaaaagtggcatttcatttttggggaatccatgagcttcctttatttctggctcacagaggcagccacgaggcactacaccaagtattatataaaagccattaaatttgaatgcccttggacaagcttttcttaaaaaaaaaaaaaaaagtttatatac

SEQ ID NO: 206216 - DNA, 1000 bp, Homo Sapiens
aaaaaagttattgaaacatgtaatatgatggtggtaattagccaactcacagggttggttgtgcagattaaatgtactaatgcataaaaaaatttaagcacagaggaagtactcaagtgttcattagcagttttattgttattctgttgatctaacttctttggttgttaacagtagtacattagtgactaattttgatagagttaaaataaacagtctagagtttaaaaataagtcacatattgtataaaaaatattcatattcataaaaatacctttaaacaaaatacaaatttatttttttttccagtagaaggggtagtgattacctggcattgttgtaaaaccaaagttaagcttgccattattgtagttatagtctttatttatttatttattttttgagacagaatctggctctatcacccaggtcggaatgcagtggcccgatcttggcttactgtaacctccgcctcctgggttcaagcggttctcctgcctcagcctcccaagtagctgggattacaggcacacaccactgtgcccagctaattttttgtattttaagtagagatggggtttcaccatgttggtcaggctggtattgaactcctgacctccccaccttggcttcccaaagtgctgggattacaggcatgagccacagtgcctggcctagttatagtctttaatataatttttgttgctgttatctctccgtgagtaactttttattatatactgtaattatgagtgtcaaggtattaaaaatacacgatcaattcaggattggttataacattttttaaaaagatatttacattgacttgttcttatttaaaatgtcttactatacagacacatcaccttcactttgggatatggaatttgataagcagttagccacagaatatgaacaaccccttgagaatgagattgaagaactgatccaggggacaaaagaggggaaactgagagttcccaattaataatgaagcag

SEQ ID NO: 206217 - DNA, 1000 bp, Homo Sapiens
taactacgtgccagcagccgcggtaatacgtagggtccaagcgttaatcggaattactgggcgtaaagcgtgcgcaggcggttgtgcaagaccgatgtgaaatccccgagcttaacttgggaattgcattggtgactgcacggctagagtgtgtcagaggggggtagaattccacgtgtagcagtgaaatgcgtagagatgtggaggaataccgatggcgaaggcagccccctgggataacactgacgctcatgcacgaaagcgtggggagcaaacaggattagataccctggtagtccacgccctaaacgatgtcaactagttgttggggattcatttccttagtaacgtagtaacgcgtgaagttgaccgcctggggagtacggtcgcaagattaaaactcaaaggaattgacggggacccgcacaagcggtggatgatgtggattaattcgatgcaacgcgaaaaaccttacctacccttgacatgccactaacgaagcagagatgcattaggtgctcgaaagagaaagtggacacaggtgctgcatggctgtcgtcagctcgtgtcgtgagatgttgggttaagtcccgcaacgagcgcaacccttgtctctagttgctacgaaagggcactctagagagactgccggtgacaaaccggaggaaggtggggatgacgtcaagtcctcatggcccttatgggtagggcttcacacgtcatacaatggtgcatacagagggttgccaagccgcgaggtggagctaatcccagaaaatgcatcgtagtccggatcgtagtctgcaactcgactacgtgaagctggaatcgctagtaatcgcggatcagcatgccgcggtgaatacgttcccgggtcttgtacacaccgcccgtcacaccatgggagtgggctttaccagaagtagttagcctaaccgcaaggagggcgattaccacggtagggttcatgactggggtgaagtcgtaacaaggtagccgt

SEQ ID NO: 206218 - DNA, 1000 bp, Homo Sapiens; identical to SEQ ID NO: 114805

SEQ ID NO: 206219 - DNA, 1000 bp, Homo Sapiens
ggatcaaatatattattaactaaccagtttttggaaactgctcatcacttaaagaaatgtaaaatattatatgattaaggtctaacaagtttcaacaattagcaaattatatcatagatgatagtgattccaatgagcaaagaggaaaaatttataatccaaatgctgacctaaaatatctgtgccaagccatctaaactcagctaaatagcactgcagtttcagtactaaaaccaccagggaagtaggaggaataaaatcaagcatggtttttagaaatagctgctgagtcttcagttatttaaggaagcaaaatattgggaaactgtgtaaagaaaacgtgtcagacttctcccatcagccagctaaggctttggatgtacttgaaagaatattatgcttacagacatgaaataggtttgattcaggactttgcagtattcctatagttgatttataacatctcctgctaagcaaagcccactgactaattagtcaccactacacaaggaaaaacagcattatttttagaggctgaattaatgttagttttctcattttctcatcttcattctctctgctgttgaagaaatgttcagtggccaactgattctgcttcttctcttgcaggtttcctatcctgggagcaggagagtgtgcctatttgaatgacaaaggtgccagtagtgccaggcactacacagagaggaagtggatttgttccaaatcagatatacatgtctagatgttacagcaaagccccaactaatctttagaagcatattggaactgataactccattttaaaatgagcaaagaatttatttcttataccaacaggtatatgaaaatatgctcaatatcactaataactgggaaaatacaaatcaaaatcatagtaaaatattacctgttttcatggtgctaatattacctgttctcccactgctaatgacatacccgagactgagtaatttataaataaaagagatttaattga

SEQ ID NO: 206220 - DNA, 1000 bp, Homo Sapiens
ccccaagccaggaggacgactgtgtctttgggccactgctcaacttccccctcctgcaggggatccgggtccatgggatggaggcgctggggagcttctagggcttcctggggttcccttcttgggcctgcctcttaaaggcctgagctagctggagaagaggggagggtccataagcccatgactaaaaactaccccagcccaggctctcaccatctccagtcaccagcatctccctctcctcccaatctccataggctgggcctcccaggcgatctgcatactttaaggaccagatcatgctccatccagccccacccaatggccttttgtgcttgtttcctataacttcagtattgtaaactagtttttggtttgcagtttttgttgttgtttatagacactcttgggtgtacctgagtctctgttatttatttttcagggcccagcagtcagggggaaacttctcagagttggtcctttcttcctccctcccttccttcctccctcccttccttccccccttccttcctcccttccttcctttcccttccttccttccctccttccttcccttgcttccttctgctagctctcagtatctaggccctatgcaaacgactcagctcagttcaccctcagagagctgcattctagtggtggagacttgaaaactgatccttagggcacagtggcatgggttacacggggggagtgacagtgcggtgggacacggtgaagagactttggaaaaactaacccctgttggggaaataaaattaaagacaaaatcccctgccaacgcagaaaacctcttcacaagggtagaaaagaaagaaaacagtgttattattgaataagcattaaaccggaatgtgatacactggtgatccactaaagagactgcaaagagacaaaaatcttactcttttatgtagcaaagtgaatacaacttactgtatccattttctcaagataaacaataactggtcctcaagca

SEQ ID NO: 206221 - DNA, 1000 bp, Homo Sapiens
agccctcagacagccagacagctcatgggggtttgagcctgtctttgccaaacaggtttttatttcaccctcctccggtcctggggtttcaagttttcagtgttgccttcaccccgcactttattcctcttattacttggaagtaccttccctccagcatggtgatcccctgcctgtgtgctggacttttgagtcctcagcaccaacctgtgaagtggttgccagcataatcccattatgcagatgaggagaccaaggcccagggaagggagaaccaccagcagcacgtaaaatagctgagctgggactggaactcacacctcctgactctcagtgaccaccactgacaacagcataagtccaggttttccaggcccatcccctctgtgccaacccacattcagattccttccccggctcccgtaatctctggcatctagaatatcctcaggactctgagaggtgatatcatgtggttgtggtgccattgccccctacctgtgtggcctggggccagtcatgtgacctcccagggtctcctcttctgtaatagggagatgaccgtcacatctacttcatgggtccatcgtgaggatgaaatgagatgatctatataaaatgcttggtacaacattaggtggccttatttttatcctgccgtctgggactgctcaggatcaatgcgccagagagcctttatttgtgtctttcccacaggtgggctggcccactttcctagagaatgggacagacctccttcccacccacacccatctctgccaaggctgattcactccagcaggcggagctcatttcacttcatggaaccaatgacccaaagatatatccccagcactactgctggtcagtccactgctgctgggaatacagcaatggtagtggcagacagaggccctctcttaaatagcttccagtctgaggaaagagagatatgacatcaatccattaaaatcattcatccattggttccacaaatatt

SEQ ID NO: 206222 - DNA, 853 bp, Homo Sapiens
ttagacagctggcggcatgctttacacatgcaagtcgaacggcagcgcgggcttcggcctggcggcgagtggcgaacgggtgagtaatgcatcggaacgtgcccagtagtgggggatagcccggcgaaagccggattaataccgcatacgacctgagggtgaaagcgggggaccgaaaggcctcgcgctattggagcggccgatgtcggattagctagttggtggggtaaaggcttaccaaggcgacgatccgtagctggtctgagaggacgaccagccacactgggactgagacatggcccagactcctacgggaggcagcagtggggagttttggacaatgggggcaaccctgatccagccatgccgcgtgcgggaagaaggccttcgggttgtaaaccgcttttgttcgggaagaaatcctctgggctaataccccggggggatgacggtaccggaagaataagcaccggctaactacgtgccagcagccgcggtaatacgtagggtgcgagcgttaatcggaattactgggcgtaaagcgtgcgcaggcggttgtgcaagacagatgtgaaatccccgggcttaacctgggaactgcatttgtgactgcacggctagagtgcggcagaggggagtggaattccgcgtgtagcagtgaaatgcgtagatatgcggaggaacaccgatggcgaaggcagctccctgggcctgcactgacgctcatgcacgaaagcgtggggagcaaacaggattagataccctggtagtccacgccctaaacgatgtcaactggttgttggtccttcactggatcagtaacgtagctaacgcgtgaagttgaccgcctggg

SEQ ID NO: 206223 - DNA, 1000 bp, Homo Sapiens
cttacccattatctgcttacccttcctccccacctatttaagatacaaagcaaaacaaaccaaaaatacagatgagttgcttggtagagctgcctaggcctccaaggcggggcccagaggattttttgactgaaccccctgttgtgttttccatatgtgcttccccagaccgcccaggtttgctgaatgtgaagcccattgaagacattcaagacaacctgctacaagccctggagctccagctgaagctgaaccaccctgagtcctcacagctgtttgccaagctgctccagaaaatgacagacctcagacagattgtcacggaacacgtgcagctactgcaggtgatcaagaagacggagacagacatgagtcttcacccgctcctgcaggagatctacaaggacttgtactagcagagagtcctgagccactgccaacatttcccttcttccagttgcactattctgagggaaaatctgacacctaagaaatttactgtgaaaaagcattttaaaaagaaaaggttttagaatatgatctattttatgcatattgtttataaagacacatttacaatttacttttaatattaaaaattaccatattatgaaattgctgatagtatttgaagactgagtcttgtgtgtttcccaccctagcccccaggctttcttttttaccccttttccttctcccctccctccctccatccctctcactcttcctccctcccttccctcctttccttcttcctttatttttcttttctttcttagacattttaaaatatgtgagtggaactgctgatacactttcattctcagtaaattaattttttactcaatttacaacttttcggaactctgcatctgctttaacaatcagaactaagaagggaaggggaacttcagaatcagaaactgctcagagcatgtgttttgtagcctggatgtgctgatatgcagcatatccctgggattacccagaattcagtctt

SEQ ID NO: 206224 - DNA, 1000 bp, Homo Sapiens
tgctttcatgacgctgctgaggaatctgaaaggagaaagtattatatttaaaaacacagacaacaatagcagacaaatgacttatataagctgttattcaatttaatttttctagtcatatctttggaagtagaacaatctgtatattctgacaatgttttagagtctgaatatgctatttatactatagagcctagtactagagagccaagtactaaaaattacactcaacttacaggctttgaaaacttgggagtttaatttattagcctcaatttgttagccataaaaaaaagcaaatgatttctgcttaccagttctttctgcagaggttcaagtgaaatgctttttgcgaaatgtgcaagttccttttgtacatttacaaaagctttatttactctgttaactttttcctcattcataatgtttatcttttaaaaagaaaaaaagcattaatctatgatctcataaccattaaagataagatatattcaaccttaacctgttaaatctaaaatctaaaaactcttaccaacaaattagggataattcactcaaaaattcttatagtcttattgggaaattacagacaaaaagttttggtttttaaaaaatgggatttatgtggatatgcctcacacttatggttcagaaggctaaaatatgtgactgtgatattgtgattcataataagatatatatatatatatttggtctttgtcctcatttcctgtcatacagctttttaaatcattgtattaagaaggataagagtgtcttttgaatgctaataagatggctggtagctgggagtctctagatagcttcaggaggagggctagtcagataaaaacacagggttagaggattaggactttctgctccagaggagtggggataaaggttaagcccatcactaatggccaatgatttaatgaattatgcctacataatgaagcctccggaaatctacaaaagaactgggttcaaagagcttctg

SEQ ID NO: 206225 - DNA, 1000 bp, Homo Sapiens
aaacaagacttgtggttacattaggatggactatccatctgtaacaactccatcttattttactaagcagttattaattaattttagcaatacatcttcatctttattgtacttctatctttgttaaatgagaaaaccaaggcatcaaataattgagtagacaaagatcatattcacaagttagtaaaaagccagaattagaatgcaggttttttttttcaaagtccagttccatctacattctaccagactgcatatcctattcctgtatctattaggtattcccgaactgaggattagtgtttttaagtacagtctataaatctgttcaaagaatagttagaacattgaatgtagagttaaggctttgcagcagccaattgcaaaaataaggaatccagtcttttgaaaagaaacactactgcttgttctcataccttttataaatgtattttaaaaagaatgaactaattaataaaacatatcaaaggcttttaaggcttgttttgagcctgccttattgtggaaattgcatgcacctggtttggcaaataaattccaaaacctttatacatttgtaaatattttgtagttgctattgctgtactttgttcaataggccaaatttagaagttaactgaccttatttgatcaaagggaatggtgaaaaataacttagtgacaattcactgaggtttagtgaattcactgaatttaccaaacaacagaaatattctaaattgatgtgcttatcccctaccatccaagtgatttactcttagagacaaaggctgtacatatctttcatctacatgagttaagtcttcaagtattttatgagtacagaagtaataattaacaactactgtattacctgtgtcccaggcactgcttcatgctttgtgtattacgtaatcctcaaaacagttctactagtattttccccattttaacagatgaggaagctgagacagtggttaggtaagttgccaacagtcat

SEQ ID NO: 206226 - DNA, 1000 bp, Homo Sapiens
ccaaaacagtcatttgggctgtagacaaggatcacacacaatgtgtcaaacaaacacacttgttttaacagtcagtggtttcagtagggcttacagtagtcacatggctctcttggctactggtaattacaagtgtgaaccaatggcaatttggcaatgaccaccaggttgcagactcataggcacttccacaaaagacaaagtttcactacatcaaaatttcatttttaaataattattcaatgactggctgggcgtcatggctcacgcctgtaatcccagcacattgggagaccaaggtgagcaaatcactttaggtcaggggtttgagaccagcctggccaacatgacgaaaccccatctctactaaaaatacaaaaattagccaggcgtggtggtgcacgcctgtaatcccagctacttgggaggctgaagtaggagaatcacttgaacccggcggggcagaggttgcagtcagccgaacccaggggacagaggttgcagtgagccgagatcacaccactgcactccagcctggacgacagagagactctgtctcaaaaaaaaaaaaaatcatacaatgactaaacatcttattttgtctcacactactcttcttgctgctgattaactgcttgaatttcattacaaaataatgcaaaacaatgaccagcctgtttgggaatttcagagcactagtatgtattgtaatataaaatcaatatattaatagagtcatcccttgttatcctcagaggattggttacaggaccccccaccccacccccaacagcaaaataaatggatgctcaagtctctgatataaaatggcatagtatttgtatactttaaatcatctctagttacttataataccgaatacaatgtaaatgatgtgtagttattatactgtattggttttatttgtagtatttatttttcaaatagttttaatctgaggttgagtcagcggatttagaacccatagatacagacggct

SEQ ID NO: 206227 - DNA, 1000 bp, Homo Sapiens
aaaaaaaaatcagctaaatccagccccaaaacatcagcctaatggctaccatcagcataaccagaaacattccaaccctaagataaacccctctctgaccagaaacatgccaacccccagatagcctcccttccgaccagagactttccaaccccacaataaacttttcctcacatgaaaacattccgaacctagataagcacccccttccaaaactcttaaatatccttagtctgtaaaaaaaaaaaaaaaaaagggctctctaacctaactcagccaaaagcccccctcaggttggttttctctaaaataaacctgtccttcaccgtcaagccacatttcatgtttctttccttttcctttttcttttcttttcttttcttttcttttctttttttgagatggagtttcactcttgttgcccaggctggagtgcaatgacacaatctcagctcaccacaacctccacctcctagttcaagggattctcctgcctcagcctcccaagtagctgggattacaggcatgcaccaccacacccggctaattttgtatttttagtagagacagggtttctccatgttgttcaggctggtctcaaactcccaacctcaggtgatctgcccaccttggcctcccaaagtgctaggattacaggcatgagccaccgtgcctggcctcctctttctttaattcttacaaatgcaagcttccagatcacacactgaacactaaccttctagtcttctcctaaacttcaaaggttgcaactattttgttgttctaaggagacatccccacatttcccagcatgctttgggaaaggagacggatagaagataacctgatggccagaactccctgcatgcactgcagtgaggaataaggacaggagtgcacttcccctgatgtgctggggaccggggataaaggctgggctctatttcccgggatgcctcaggactgtcagaaaaagagacagaactaccatttcaatggc

SEQ ID NO: 206228 - DNA, 1000 bp, Homo Sapiens
accacagacaggcccttgggagaaactgagcgagtccttccaagcagccggggctgatgagacacttgcagatttcttgggaatttggattacagcccccaacagaaggccccagctgttcttcaactgagcaatctccttcaagggcttttccaagctgaggaatgcgtaatgctgtctttgtgtgagctaatggaacttcctcttagtacagagagggggtaaatgggccaccattgagtgaagaggaaattcaataaactgtgttttcccaactttgtaaatagctatagtcagggtgtgccttgtctacccagcatatattcatcccccggcctcagtgttcacactttcacagaagacacacagtccctaggaagctgggtcccacccccagagcccatgctgctctgctgggtggaaggtctctgagccccacatgggaacagcacagcaagggaagctgtaggctgtgaccacctgggaccactgacaggtctgctgcctaagtggcaggtctgggcagtcagggctgatttgatcaagcctcaacctagaggaccctagatactaggaagcttgactcattcatttcctgttgtgctcatgggttaaaaaagcaaacccacagttttgggtttgaagtaaaccccaatttaaaattaaatgcattgttattaatgacacacagcacattttcccactatcatctcgatcctaacttcacttaatttcccataaacctccaaaaagggttgtgggacccaataaacactctgccgaagaaggactgggtaggataaaacttgtgttttaagaatatggctctatccaaagcatcagacatgaatcagaaaggatggggcaggaggcaaagagacctggctggagacttttattgtagtcagcatttcattttgtcaaaaaacattacgaagcacttgttatgtgttggacatggtgtgcagccctgggtacagagtggtgaaccaaacaagtg

SEQ ID NO: 206229 - DNA, 1000 bp, Homo Sapiens
ggtttggttatggagtcttgtgccaaacctactaggccattagcccttcaccatctacctgcttggtctttcattgctaagactaactcaagataatcctagagtcttaaagcatttcaggccagtgtggtgtcttgcgcctgtactcccagcactttgggaggccgaggcaggtggatcgcttgagcccaggagttttaagtccagcttggccaagatggtgaaatcccatctctacaaaaaatgcagaacttaatctggacacactgttacacgtgcctgtagtcccagctactcgatagcctgaggtgggagaatcacttaagcctggaaggtggaagttgcagtgagtcgagattgcactgctgcattccagccagggtgacagagtgagaccatgtttcaaacaagaaacatttcagagggcaagtaaacagatttgattgtgaggcttctaataaagtagttattagtagtgaatgtgctgtttatagcaattattgcagtgcaagctatttcaagacagggtttccataatctttttggcactgtataggggtgatcagtttctgttgcttcaagatttgaaaccagaaaggaaagtcccacttgcagatgattgtgcttaaaacctaatggaaaaataaaagaaagacataccatgggttgccttgtggcccccctttccttttttttttttttttgtttttgagatggagtttcattcttgttgcccaggctggagtgcaatggcgtgatctcggctcaccacaacctccacctcctgggttcaagcaattctccagcctcagcctcccaagtagctgagacaacaggcgcccgccaccacgccctgctgatttttgtatttttaatcgagatggggtttcaccatgttggccagactggtctcgaacgcctgatctcagtgatctgccggccttggcctcccaaagtgttgggattacaggcacgaaccaccacacatagctctacaatg

SEQ ID NO: 206230 - DNA, 412 bp, Homo Sapiens
atgaaacacctgtggttcttcctcctcctggtggcagctcccagatgggtcctgtcccaggtgcaactacagcagtggggcgcaggactgttgaagccttcggagaccctgtccctcacctgcgctgtctatggtgggtccttcaatgcttactactggagctggatccgccagtccccagggaaggggctggagtggattggggaaatcaatcatagtggaagcaccaactacaacccgtccctcaagagtcgagtcaccatttcagtagacacgtccaagaaccagttctccctgaagctgagctctgtgaccgccgcggacacggctgtatattactgtgcgagggatacatcaacagctgaccactttgactactggggccagggaaccctgctcaccgtctcctcag

SEQ ID NO: 206231 - DNA, 1000 bp, Homo Sapiens
tccaaactttttttaaacttaaaaaatctctttgtagtatgtcagttgcactttttttctgccataatgtaacgtagcttgccccgtcaaaaattcaattaaaattcatggccagcaatcctgttccccctcagcatcctgatttaattttcctgttgcttttgcttgcttctccatttaatagttactgaactttatgcatgttgatctatattgattttcactgcagttgaatgaacaaattatttcagtgtgacagccatgactcaagttccaattagtctgaaaagggtactttggaattgtcccatattaatcagagatggcaaaagaaaaagttctcatattaccaggttgattttgtgtctcatttcaaattttaatttaaaattatggttttcatttttgtttaccttaaagtgatgcttaaaagtggcatgtaattaggacacttaggtttgttgaaagcattttcgacatttgtataaaagaatttgtgataaatatatccaggtgctcaccaaagaaacatgtattaacaacttaaattagatttttctaactgatagttttcactcatttataatcagtaggagagactgtctagatgttggggcagctctatgatttaagtctgtaacatgttataactgaatttagtaccctagttttgttaagctattaggattttctaatagaacttactccccctgcctccccagccttatgtttcttttaatgacttctggatcctgagctccctttgcagtctgaaaaaggtattgcagtcagaactgtgtactgatgataaaagcctctggtagcaataaaaagttgtccttaacttttgtttttgtgacttttttctggttgtgaagaggtacaggttcctgattggctaggcactgctatttcaactagagaaaacaatagaaagaccaagaatacacttactgaaaataaaacatgaagaggatctgaatgtgatcgagggatatag

SEQ ID NO: 206232 - DNA, 1000 bp, Homo Sapiens
cgccggaatactccagctaggaataatggaataggactccggttctattttgttggttttcggaactggggccatgattaagagggacggccgggggcattcgtattgtgccgctagaggtgaaattcttggaccggcgcaagacgaaccagagcgaaagcatttgccaagaatgttttcattaatcaagaacgaaagtcggaggttcgaagacgatcagataccgtcgtagttccgaccataaacgatgccgactagcgatccggcggcgttattcccatgacccgccgggcagcttccgggaaaccaaagtctttgggttccggggggagtatggttgcaaagctgaaacttaaaggaattgacggaagggcaccaccaggagtggagcctgcggcttaatttgactcaacacgggaaacctcacccggcccggacacggaaaggattgacagattgatagctctttctcgattctgtgggtggtggtgcatggccgttcttagttggtggagcgatttgtctggttaattccgataacgaacgagactctggcatgctaactagttatgcgacccccgagcggtcggcgtccaacttcttagagggacaagtggcgttcagccacccgagattgagcaataacaggtctgtgatgcccttagatgtccggggctgcacgcgcgctacactgactggctcagcgtgtgtctaccctacgccgacaggtgcgggtaacccgttgaaccccattcgtgatggggatcggggattgcaattattccccatgaacgaggaattcccagtaagtgcgggtcataagctcgcgttgattaagtccctgccctttgtacacaccgcccgtcgctactaccgattggatggtttagtgaggtcctcggatcggccccgccggggtcggccacggccctggcggagcgccgagaagacggtcgaacttgactatctagaggaagtaaaagtcgtaacaaggtttccg

SEQ ID NO: 206233 - DNA, 1000 bp, Homo Sapiens
cttgtttattcatgcttaattattctgaagggccgtgatgacctgagacaagatgctgtcatgcaacaggtcttccagatgtgtaatacattactgcagagaaacacggaaactaggaagaggaaattaactatctgtacttataaggtaactatttgtacttctgttagttcaccaaaaacatataaaagatgccatttggttgggtgaagtggctcatgcccatattcataatgctttgggaggccaaggtgggaggattgcttgaggccaggagttcgagaccagcctcagcaacatagtgagaccccatcttgacaaaaagttaaaaaaaaaaaaaaagccagagatgatggcatgtgcttgtagtcccttagctacatgggaggctgaggtgggaggatcacttgagtccaggagtttgaggctgcagtgagctcaaactctgcagtgagccccagtccagcctgagcaacacagcaagatcccgtttaaaaaagaagaagaagaagaagatgccattatttggaccaggagtctacaaatgttttctgtgaaggaccaaataataaagatttattttctttgtaaaaagtatttattaatgttaattatagttaggtgtttcttatagtcaactgaagtattttttccttttttttctactcaacaatatgtcacagaaatctttctcattttttaacagctgcattgtgtgtatgtatgtagttttttatacaagtccttatcgatgggcatttgggttgttttcagtcttttgctgctacaaacaacgctgtattgtagtgaataaccttgaacatacaaatttcatacatgcgcaggcaaatctgtagcatggatttccaaaagttggattgctgggttagaggatacatgcatctgtaatctggtacatattgccaaattactctcaatgggagtgtacccacttacatttcctctagctatttgcctgagaagacaatcctcagtcaca

SEQ ID NO: 206234 - DNA, 1000 bp, Homo Sapiens
attcatctgttgagcacctgctggatacaacactgtatgcatactaccttttgctctcaaacctttcaaggtaggtattggcctcttgtattttgtaggagataactgagactcaagacgttgaaactatatgcccaagttctcaataatcataaattacagaggcagtatttgagccctggtgtggctgactccaaggtccatactccatcctttgaatcggtagcctccaaattgctgcacttggaaccatggtggcacagccttcccaaggagtacccaggcatgggatgtttagaagaatcaatgttctcaacacccatgggtactccttcataaaccgatttccgtgagcacacccctgagttcagacaactctcctcactctcccctttcacaatcatctgtcacacttctcagaagagggacacactcctccctctgtctgaatctaactgtgatgccctgcggtactgagtgtctcatactggcccggagagctgactgtgtgcctgtcatcccaagcgtgtgtcagtgaggtcaggttagtggcttgtaattggccttggtggccgggtgcggtggctcacgcctgtaatcccagcactttgggaggccgaggccagcggatcatgaggtcaagagtttgagaccagcctggccaacgtggtgaaacgccatctctactaaaaatacaaaaactagcagggtgtggtggcgggcacctgtaatcccagctactcgggaggctgaggcaggagaattgcttgaacccaataggtggaggttgcagtgagctgagatcacaccattgtactccagcctgggtgacagagcaaaacatgaacattaaaaaaaaaaaaaaaaaaagaaagaaaaagaaaaaaaaattggctgtggtggaagcctttataccatgtaaacgaacaaaagctataaagcagggctttcttttctttgcctttttcttttttccccagagagtaaatttacctacaca

SEQ ID NO: 206235 - DNA, 1000 bp, Homo Sapiens
gtgtttagggcctattattggattaattattttgggatgtgggccagctgtactaaaattggtccaaattatgggaaaatgagcacgtttttcagtgtaagtagtgttacctttttgatagtatagtttctgttttagttttgtcttgtatttattattttgatgggtacaattaactgtaaaggtcccctcaggggaccaattaatgacaatttcataggaattattttgtagtaccatagtgtgatcagagatgtaatttttttaataatatttaaatatttgaccattgtaaggttgttggcacctcttttttgggggcttaaactgttaattgaattgaactctgtgaatgatccgggctccatccagaaaataaatgataggatactggtctttgattatgacctggaattttaactagtcaatgttgtcggtagccttttaggcaaccgatagttggccttatgtaaagaggggggaactgataacctatggacacatttattaactttttttttttcctttgggtgagagggcccatgagtatttgtaggcttagggatccaaacgctattattaacataaacttcaactgggggttttaaccatgtgacaggcctaattaaaggcaggaatgggacacatgcccaataggtataattttgggctgttgtagccacaggtttgttaggcgaggaggtcactgtttttattttggctttgtattctaggattagtaaataacagaagacaaacatgagtataattagtaacttttttttttagtaaaagagtgacctgtagtgttacttggcatcttagtttactatatgttattaatgaggaaccccactgggggtatgttaatttattctagctaagcagttatgttattagaagctgagaagggggtgtttgttaaagtaacagggcagaagaaaggcggatttaagatacgagcttaatacagtgtagcaggtataggtagtaggcaaag

SEQ ID NO: 206236 - DNA, 1000 bp, Homo Sapiens
aagtaagtttatttctcacaattctggaggctgggaagtccaaaagcatggcactagcatctggcaagggcctgcttgtgtgttctaccatggcagaaggcagaagggcaagagaatgctcacaaggtgcaaactaaactcatccttctatcaggaatccactcccctgataaaggtattaatccatttatgagggcagagtcttcactcatgatcttaaaggttccactttgcaacactgttgccttggggattatgtttctaacacatgactttaggggacacattgaaaccactgtatcctttaaggtaggaatcaatgtcatatttgtcatatttcgaacgaagaaataaaggtttggagaggttaattaacttgcccaagatctcagagctaaagccaggatcatatctaggactgactacaaagtcctgtggtctccagtgcttggcaggtccagcttcactgatgagtctagagagtagtaactctcttggtgtaagaactaagggagatgatacattaaatctaagtgtaaattagattatgcttaaagtataagtcatatggttattattaatagatccccaagttagcctatatgtgaacttttccatagagaaatgaagcatggtttcaatgcagcatattttaaatggattatctcatacaatgtgttttttgtttgttttatattgtttttgttgttttctgagacagagtcttactctgttgcccaggatggagtgcagtgacatgatctcagctcactgcaacctccaactcccgggttcaagtgatcctcctgcctcagcctcccaagtacctgggagtacaggtgcatgccatcacacctggctaatacaatgtgttttttttagacaccagagggagccagtggttctttccacatcagcttttctgtgaaacatttttcttttttttgaaatggagtttcactcttgttgcccaggcttccatctcaaaaaaaaaaaaaaa

SEQ ID NO: 206237 - DNA, 1000 bp, Homo Sapiens
aggcctgttcttagcaatacattacacatcagacacaacaacagctttctcatcagttacacacatctgtcgagacgtaaattacggatgagttattcgctacctacatgcaaacggagcatccatgttctttatttgcctattcatccacgtaggccgaggcctatactacggatcctatatattcctagaaacatgaaacattggagtagtcctactatttaccgttatagcaacagccttcataggctacgtcctgccctgaggacaaatatcattctgaggagctacggtcatcacaaatctactatcagctatcccttatatcggaacagacctcgtagaatgaatctgagggggcttttccgtcgacaaagcaaccctcacacgattcttcgcctttcactttatcctgccattcatcattaccgccctcgcagccgtacatctcctattcctgcacgaaaccggatccaacaaccctaccggaatctcatcagacatagacaaaattccatttcacccatactacactattaaagacattctaggggccttatttataatactaatcctactaatccttgtactattctcaccagacctactaggagacccagacaactacaccccagcaaacccactaaacaccccaccccatattaaaccagaatgatatttcttattcgcctacgctatcctacgttcaattcctaataaactaggtggagtgctagctctaatagcctccatcctaatcctaattttaatgcccatactacacacatccaaacaacgaagcataatatttcgaccactaagtcaatgcctattctgaatactagtagcagacctcattacactaacatgaattggaggacaacccgtagaacacccattcatcatcatcggccaactagcctccatcttatatttcctaatcattctagtattgataccaatcactagcatcatcgaaaacaacctattaaaatgaaga

SEQ ID NO: 206238 - DNA, 1000 bp, Homo Sapiens
tgggcggtaggaagctgagaactacctgctaacaaccatggcagcaccgataaagtttccatttcggcccagaggaggtcagcccagagaggacacgaccccaaaaagggggcttcgacgctatctattggaattgaaagagagcaataaagagttctggctgtcaggacacgccgtgttcaagcttctgtctttgggctgcatgatctctgcactagactactttgaaacaatgctcccacatccggtcctgatcctgctcatctgtatggaagcggcaatctgcatattcttcatcttccttaacaccttagccatcaacagatacattcccttcgtcttctggcctatggcggatatcttcaacagcctgttctcctgtgtgttccttggaggtggcatatactttgctttcaaggctagaagattattgccaaagccctacttaactgctatgatcctcatgggcgctgctgcgatctgttctttcatcgacatgttacttcaattccaacacttcagaggccttaggttaaggaagtggtaactgtgacatctatgatctttttcatcgtgggacaagcccctgaaccatatatcgtcattactgggtttgaagtcaccattattttctgtttcgtagtcttgtatatgtgcagacgtgacaagataatgaaatctttcttttggcctttgcttgtaagtgatgaacttcaaccttaaaccttaactaactttcctgccttaggaagacaccttagtcaactacttgaatctcctaaatctttaaggtgatctctgctcactgcttgggggatgctctcagggattcaggatacccacagaacataagttctctttactctatctaccagtaggtatggctgacctttctcttaactataaatgttatgaaatataatctggtggccggccggggtacctggaggacccatgccaagctgtgcaactgagaaataaacaccatgaaacagaaaaa

SEQ ID NO: 206239 - DNA, 1000 bp, Homo Sapiens
gcctatattacggatcatttctctactcagaaacctgaaacatcggcattatcctcctgcttgcaactatagcaacagccttcataggctatgtcctcccgtgaggccaaatatcattctgaggggccacagtaattacaaacttactatccgccatcccatacattgggacagacctagttcaatgaatctgaggaggctactcagtagacagtcccaccctcacacgattctttacctttcacttcatcctacccttcattattgcagccctaacagcactccacctcctattcttgcacgaaacgggatcaaacaaccccctaggaatcacctcccattccgataaaatcaccttccacccttactacacaatcaaagacgccctcggcttacttctcttccttctctccttaatgacattaacactattctcaccagacctcctaagcgacccagacaattataccctagccaaccccttaaacacccctccccacatcaagcccgaatgatatttcctattcgcctacacaattctccgatccgtccctaacaaactaggaggcgtccttgccctattactatccatcctcatcctagcaataatccccatcctccatatatccaaacaacaaagcataatatttcgcccactaagccaatcactttattgactcctagccgcagacctcctcattctaacctgaatcggaggacaaccagtaagctacccttttaccatcattggacaagtagcatccgtactatacttcacaacaatcctaatcctaataccaactatctccctagttgaaaacaaaatactcaaatgggcctgtccttgtagtataaactaatacaccagtcttgtaaaccggagatgaaaacctttttccaaggacaaatcagagaaaaagtctttaactccaccattagcacccaaagctaagattctaatttaaactattctctgttctttcatggggaagcagatttg

SEQ ID NO: 206240 - DNA, 1000 bp, Homo Sapiens
gatgcctttttatatttaaaccccgagatagtgctggaacactgctgaggttttatactcaggttttttgttttttttttattccagttttcgttttttctaaaagatgaattcctatggctctgcaattgtcaccggttaactgtggcctgtgcccaggaagagccattcactcctgcccctgcccacacggcaggtagcagggggagtgctggtcacacccctgtgtgatatgtgatgccctcggcaaagaatctactggaatagattccgaggagcaggagtgctcaataaaatgttggtttccagcagtctctggtcctctctggggggttggcagcaccagcacgggcttcctctcgccccagggaggcacactgtgttggtggggagggcagggcctgtgtgctcctaatcagatccttccctgcaaaaggggaccgcaaatgctgccttggtttggcccgacggtttgccttctcccttgtcccggtctgtggcctaaaatccactgttgggggttatttcctttgggctttcagttcctctttaggggatgcctgcctctccctgcacagactcctcaccacagggatgcagccgtggctccgctcacagggagaggtgtggtggggattggggagcaggacaaggggcaccaggggcaggagggccaggaccctgctttgtacctttgtaggcttggtacctgccctgggccttggcctcgtgccatttgtagaccccaccaggcctccctcccaggacatcggctctgtgtctgccctccaccccaaatgtcaaagctgggctgggccggccaccattctccagcccccaacccccctcatccccagagctgggagatgcagctgttcatacctcccaggctggctgggcagaccctgcatcctgctcactcctccctccatcctggcctccaaaccaaaggggacctccaataggctttcctgcctccttatgtcttctctccggtctg

SEQ ID NO: 206241 - DNA, 1000 bp, Homo Sapiens
cagctctgaaacagaccacaccatgtagaagctcatcaacgtttatgaagtaggtgcatgctgccctcacttcacaaaccagtgctggggagactcatcttcctgcacactaaccctgcttgcccacagccaactgtttcagattgaagatgtggcatatagctctgtccctggtaagggacagagggactggagggccccagcaggtgtcgggggccttccctttcagggggccagcccaggaggtgtggtgaaggaaaagctgaggggaatccctgtgagggtgggaggaaggaaagatggtctgcctggatgggtctcaaaggtaacaggcaaagggacctagcctaggcacctgtgggtgtggcacccgtctcacctctgtagctgtgtctgttccgtgtttgtgtgtttcattgtggtagcattaatgggtgatgtattctcacattcctaactattgtaacttgacattaaaaaaaaaaaacaaaaacaaaccccacaaaaacttcctgccacaggcttgcagattgaagcactttcaaagttagacgctggcgtgtgcattctgggcaaccgttttgaccctgcccaggtttctgttattttatacacaaaacttttttttcataaatgttataattttgtgtccgtctttataaactattataagtactattttgttataattcaaaatagatatttagtataaagtttttgctgttaaatatttgttatttagtaaaatatgaattgttctttattgtaaacatggttcaaaatattaatatgcttttatcacagttgttttaatattgaaaaagcacttgtgtgtctcgtcttggtatgagctggtgcttgtgtgtgtgtcttggctgtcgtgtggttttgatgtatatataatattccacgttgcatattacaacaacgaatgtcctgcattttgtgaaatactcaatgtgctcttttattggcttccataataaactgtggggactca

SEQ ID NO: 206242 - DNA, 1000 bp, Homo Sapiens; identical to SEQ ID NO: 114842

SEQ ID NO: 206243 - DNA, 1000 bp, Homo Sapiens
ggcagagggtcttctccagctcttccagggcggggctcatctgttcctgggccagaggtggacctgtctgcaggcttgtaagggtggggagacgccagcctggcccatgggctgtccacacccaccccccgcagaccgcgctgctgtctgcaggggatgccaccacttcctcctggcctcgggtgcacaggtgaaacatgaagaagctattggggcggaaaatggctctcaccaggctgctctcgggttaatgaaaactcgtcaaattctccatgcagcagcagccagccgggcacatgctgtcctgccctgcccgactgtgtgcagggaagcaggtcccctgggcctgggcggagggactgcgtgcctgtcagggaaggccgaggctccggacaggcgggaagcagccttctccttaatcaccccatgtggaaaccaattaaagattcgattctctcagacccggggcattttagccttggttgaatcctcctggaattcacagggaagtggctttgccctctgccctcgctgctggaaggcaaggggccgttctcgccttggttttctaggttgtgttgcggcaggagctgactgcccctaggcctagatctctgcacaacttcgctcagggacacctgcctgtgtgcatgtctcatggtgtgaatgtgtttcctgctcacaggtaccgttttgtgtcatgcagttactggaatgtacaaaagcagctgtgatctttgtgagagctgcacagagcaggagtctgagagctgcacagagcaggagtctttatttggttcacttctggtctgcagcaaccacttgctactaaaagatggaaaagatgtacaaaaatgtcacagccctttagaaagcgacattatcagaaatgtatgaccttcagtcctccctccctctcctatgcccccaccagaccaggcggcgagaaggaacagggagtgaacatgtaacggaaaacaataaaactgaatttaactgg

SEQ ID NO: 206244 - DNA, 1000 bp, Homo Sapiens
atgccaagcacagaccctttcacctccacatagagaataaacgtgggacaagctgacaaggatttttagctaacagcagccactgttgctttgatagacgcatacaagccctttctaacattagcaagtcataaaaatccaaaaagtaaaaatctcagttgagaacttcaaacaatacttctgttttacaagaatttaataacaaagattaaacaatcaaaatgaaccatgggactcaaaaacatcctaagttgcaaaatcaatacataatggaaaatctgacgacatttaaaactgtaagattaattcttttcattgagttcttctacttgcatttgcaaacagagagaatgacgcgcctgtttcagggattctttagcctgtcatgggaaaaagaaaaagcatgtgatcagaaagaagagaaacataccaacattactgcttgagaggaattctataaacttagcgtctccttacagcaataaaatgtttaaactattagtggcaaatggctgaaatatatatatatttttcttgagatggggtttcattctgtcacccaggcaggagtgcagtgctaccatctcagcccactgcaacctctgcctccctggtgcaagtcattctcctgcctcagcctcccaagtagctaggaccacaggtgcccaccaccatgcccacctaatattttttggtattttttgtagagatggagttttgccatgttgctctggctggtcttgaactcctggactcaagtgatttgcccaccttggcttcccaaagtgacgggatataaatatttcaattttatatgtggatctttttaaaagatgagtttaagtttactaattcatccttatgccttaaaaaaaaatacagtttataccctttataatggttttccacttaatattcttaaaaaaaaaacccttaacctaccactttatctttttatctccactttattaccttaaacataattaacaaggtgttatat

SEQ ID NO: 206245 - DNA, 1000 bp, Homo Sapiens; identical to SEQ ID NO: 114844

SEQ ID NO: 206246 - DNA, 1000 bp, Homo Sapiens
tattcgcctacacaattctccgatccgtccctaacaaactaggaggcgtccttgccctattactatccatcctcatcctagcaataatccccatcctccatatatccaaacaacaaagcataatatttcgcccactaagccaatcactttattgactcctagccgcagacctcctcattctaacctgaatcggaggacaaccagtaagctacccttttaccatcattggacaagtagcatccgtactatacttcacaacaatcctaatcctaataccaactatctccctaattgaaaacaaaatactcaaatgggcctgtccttgtagtataaactaatacaccagtcttgtaaaccggagatgaaaacctttttccaaggacaaatcagagaaaaagtctttaactccaccattagcacccaaagctaagattctaatttaaactattctctgttctttcatggggaagcagatttgggtaccacccaagtattgactcacccatcaacaaccgctatgtatttcgtacattactgccagccaccatgaatattgtacggtaccataaatacttgaccacctgtagtacataaaaacccaatccacatcaaaaccccctccccatgcttacaagcaagtacagcaatcaaccctcaactatcacacatcaactgcaactccaaagccacccctcatccactaggataccaacaaacctactcacccttaacagcacatagtacataaagccatttaccgtacatagcacattacagtcaaatcccttctcgtccccatggatgacccccctcagataggggtcccttgaccaccatcctccgtgaaatcaatatcccgcacaagagtgctactctcctcgctccgggcccataacacttgggggtagctaaagtgaactgtatccgacatctggttcctacttcagggtcataaagcctaaatagcccacacgttccccttaaataagacatcacgatg

SEQ ID NO: 206247 - DNA, 1000 bp, Homo Sapiens
cttacagctgtgaacctgcctccttgttttcattaagtatatttgaagttaatggcaaaaggcagtgctgacaaccctgggaaatggcagtcctttgtcttcttcctggagcaggtaatcctttactaatccttcgattgttacaggtgcttccactcttatgacagtgcattcctggaactgcatcattatgcactctgctagaaattgaactaagtatgtgctaccacatttacatctgtttcaacatgttttagtggtaaaagtgaaatatatttctcttaggcaatgtagacagagtgaaaaatgggggttatgtatgtgttgacttataagatacaatattttccaaagcaccttcacaaatattctctcattttattcttgcaattatcttaggggttcctgtcctcattagttaggtgaagaaattgaaactcagatttgtgacttgcttaagatcagagttcatgacaaagcttgggtggaatgtaggtctgctggctgaagtctgtcatgttcgcagccctgttttcatcttgggtgctgttgggttgctatatatggggcggaagctatgttgagaatgccactacttaaatttagccaactaccgagaatgatgagtttcaagcttctccaacttggctgcacgttagcatgacttgggtaatgtaaaaagaaaatcccaacgtccaggccacaacccacaccaattaagtaaaaatctcttggggtggcttctgtagtttgtaaagctacccaggtgattccagagcacagcaaattggagaaacactgctctggattcttgctactcaaaatgtagtcattgactaccagtattggcatcgcctgggagcacaggcctcaccccaaacctacagaagcaacatcttcattttaacaaggtcctccggtgatttatgtgcacaataagatttgagaatctctcatctacagcagtggttctcaaagtttggcatgtctcaagattacc

SEQ ID NO: 206248 - DNA, 1000 bp, Homo Sapiens
gttttctcacccagggccatatttgtcagggagcaccagagagagcaccaggggccacattcagagccccggcttgggagtggctggagcccacgcctccaacaaccctggccttgcctggtgttgcctctgaagctgctgcttgtattcctgcctcctgtctcccatgctaagctgaggacaggaaccagggccatactcattttctgtcactgggcagagagtccattctcagtaaatacattgtggtggccagaaatgccaagcatccaacaagcatggaacagaaccacccccagggctctccacatcattcctgaacatcattatcctgtgtcagttttctattgctgccttaacaaagtcacaaattaagccacaaactgggtggcttaaaacaacaggaatgtattctctcacagttctggagaggtttgaaatcagtgtgttggccaggccacacgccctccacagactcagtgggagttcctggcctcacccagctcctggcggctgtggccatccttggcattccttggcttgtgggcagcatcactctggtctctgactccgctgtcatatggccatcccctgtctatgtgtctgtctccaaatctttcttgttttctgaggataccagtcattagatgaatgcccaccctatgccactatgacctcgccttcactaattacacctgcagagactctgtttccaattaaggttacattcagaggcactgagatttaggacttccacatatcttttggggaaacatcgttcacccaagaacatcacccatgtgctgaaaagccagaaacctcactcccagctcacaccatttgaagaacagttcacttagtgcatcacttttctgcaaaaactttgctgggagaaccttcacctgctgcaggtttcatgataaagcatctctagccgtgcagcagcccaagcctggctgcaggacgtacagagaaaagactggaagcagagacatgaagg

SEQ ID NO: 206249 - DNA, 1000 bp, Homo Sapiens
tggaaaataggtagtatttttgggtggttatttactaggtcctctgtgcagggagaaatcaaacatcacacatactggcatatctgacaaacagtgtcaatattttttaaagtacaatggagagtcagagtgggagaaaatgagaaaacgaagtttagaggaagaagaaaaccagaaatccttcctttaacttcaatttagggggtaacagattagatgttgctgtctctttattatatggtaattattggatttgggggtcaacttttgttggaatacatgggaagacctagatttttaacagaaaacttaggggaatttttttttttttaagactctcgctcttgtcacccaggctggagtgcaatggcacagtcttggctcactgcaacctccacttcccaggttcaagcgattctcttgcctcagcctcccgtaactgggattacagccgtccaccccacacctggctaatttttgtatttttagtagagatggggtttcaccatgttggccaggctggtctcgaactcctgacctcaggtgatccatccacctcagcctcccaaagtgctgggattacaggtatgagccgccacaccgggccattaggtgaaaattatctattgtacatatgccctttcaaaaaccaggtcccacagtgcaccaaaatacctttataaaaagttgaaacatgatttttaatgaacatatttgttgtgtaaaataagacatgttattctggatacgatgtccccacactcacaccatctcccataactctcaaagatcatctttaaattcctaagatccttgtgttaagtacaaattgtgaaacctggattctgccttttcttctgccaatatcatcctattttgcatgacccaaaatactgcttcccctgactctccatttccccttttataaatgtgaggtcctgctctgggagagctttctgggagtaatccttttaaattaactgggtaaactgagggaaga

SEQ ID NO: 206250 - DNA, 1000 bp, Homo Sapiens
acacatgtggctgtgaccattctcatgtacttacaaaccttctgttacaaaagggaactttcctatattttttgtcctcctcagtcctaaacttggcatgctatcttaaaaccagttataggagagagatgctggaggattcccaggatgaaacattcctcagcagcctcctgacttaactcagatccagcagctcttggcagatcctgaactaatgtcattacagtgaattgagccaaaacgattattgcttgctcacattttaggaacactttttgttgaagaagcaaactaacaataacaagttaggcattccttctgaatttaccatataaggattatgtataaacaattatattgaatttgtcattagattctatatttgtagacgatttaacgtagtctttcatctgtacatctttatcttgttcaaaatgggctgaggtttttaataggtggttttctaccacattaagtacttggttcttcattttaaaaaatatgaagaataacttcaactcttttttgcattattttgatttttgattttgcagtcattgctcctaactgtagatacatgttgcaaaagtgatgtttttctgaattttttttaaaagtagaagactattctgttaaacattaaaattcagagacaacagtgataacacctgggatataatgaaaatgaggtgctgtgaatcagtaaactaaagggatacctgctttaacctgcaccttaatggaatctggtatagagatgtacccacaataaatgttttataagatttaagatcataatagtaggttagaggaagagcatttattaagtctgttgtttctaatctatagctaagttaacatctcccatattattccattttaatttcccattactgaccaaggtgaaagtatatgtgactgtacttttatctttctgttgggatcatggatctaatttaactggcttaatttgatgcttctgtcactaggctctaagtgc

SEQ ID NO: 206251 - DNA, 1000 bp, Homo Sapiens
ttatttggagccgggtctagagggaaccctctatcagcctcaggaaaacaagacctctgtgcacctcacttttggctcactgcagcccttgtccttcacctccacacaggaccagctggaagcagaaagaagaaaggccaatttcacagggcaccaaacaagtatgaaatgtaaatcagaaatgcagacaccccagacgagagcctcacaggagggagggggccccacaggctccccaggaggctcgtgtctttggcccagagccagccttagtttgtccctgccatctactgtctgaggccatcgctgctacactttgtttttatttgtatttcatactgaagtttctctaggttgtcactgtgtatttgtgcagagcgcctcagatcggggactgggtaccactgggcacgtgtttggcccctggatgctgctggggccgcctgcctggagaaacctgatgcctgctcagatggaggagtgctgaggcctccagagtggagatcaaatcaaattagggcaagcaggggaggagggaggctggctgactaggcttcattcctggaagcgaatctggagaaccctcaggaatgaggagtgatggggccgggggacagccgctcgtcccccaggaaggccacctagcaggaccaggggtcgcccggtgcagccgtgggcgccagtcagcctgggttcactgtgaggctagctgcgggcatttgagtagtggtggaggggtcagaaacgggaagctctggccctggttcccaagcagcggctcaaccagaagagccagtttctccaaaaatgagctggatatttgtgagccacacagcatgtgcaggccgtggggtgacctgaggccgatgcccgaggctgggaggccacagtcaagggaaatggggcccatggaagacatgttctcgccacctgaacacagcgctgggatgaggactctggagttgtgctgagacctccaaactcaggctttagggtcaga

SEQ ID NO: 206252 - DNA, 1000 bp, Homo Sapiens
catagtgaattattttctgtcttgccttaggtttatttttattatcttcaatattagaataaatgctaaattattttcatttaaggatttatgtagttgaatattatcatttagtaatatttaatcatttgaaataaaatttaaagctttaattgatctaatagagatggttttctacttttccactcttcctccctcttatgccttcacttttgttttctgtgcccagaattttcttcacattctttactacctgttttgtctattatatccaacccattttctttttattataattttgatttggggcatttgaagaaaatacagcaaaactacaagaactggtaataagcatgcataatctcacctacttagtgaacctaatataaacctaatataaagaaccaccgtatttgcaatatatataactggtgaaaaactagtgtccagaatatataaatgatccctatgaatcagtaagaaaaagacagtcaatagaaatttggacaaaagactttatatggcatttcaagtgaaaggaaatccagatgaccaagaaacatgaaaatattcccagccatattaatatttgagaagtaaaaaataaaactacaaggaggtattacatctttaccttatttgcaaaaatgaaatgatctaatgatactaagttttggtgatgatgtcagctcttacattgaaaacaatcactgtggaaaaatttgtccctcagtaaatttaaagataaacatgctcaaaacctagcaattgcactctgaagtatacatctttgcaggttatctttcattacagttatttttttccctgtcaggaccctaactaatacaatgccttgggaaaactaatgaacatgtatcctaggaagcatgtacaagaaagttcttcccagtcaggaaggtggccaagaaaaaaattttttaatgttcatagcagcactgcaatatccaaaagttagaaatgaaccaaatattcagcaatg

SEQ ID NO: 206253 - DNA, 1000 bp, Homo Sapiens
tattcgcctacacaattctccgatccgtccctaacaaactaggaggcgtccttgccctattactatccatcctcatcctagcaataatccccatcctccatatatccaaacaacaaagcataatatttcgcccactaagccaatcactttattgactcctagccgcagacctcctcattctaacctgaatcggaggacaaccagtaagctacccttttaccatcattggacaagtagcatccgtactatacttcacaacaatcctaatcctaataccaactatctccctaattgaaaacaaaatactcaaatgggcctgtccttgtagtataaactaatacaccagtcttgtaaaccggagatgaaaacctttttccaaggacaaatcagagaaaaagtctttaactccaccattagcacccaaagctaagattctaatttaaactattctctgttctttcatggggaagcagatttgggtaccacccaagtattgactcacccatcaacaaccgctatgtatttcgtacattactgccagccaccatgaatattgtacggtaccataaatacttgaccacctgtagtacatagaaacccaacccacatcaaaaccccctccccatgcttacaagcaagtacagcaatcgaccctcaactatcacacatcaactgcaactccaaagccacccctcacccactaggataccaacaaacctacccacccttaacagtacatagcacataaagccatttaccgtacatagcacattacagtcaaatcccttctcgtccccatggatgacccccctcagataggggtcccttgaccaccatcctccgtgaaatcaatatcccgcacaagagtgctactctcctcgctccgggcccataacacttgggggtagctaaagtgaactgtatccgacatctggttcctacttcagggtcataaagcctaaatagcccacacgttccccttaaataagacatcacgatg

SEQ ID NO: 206254 - DNA, 1000 bp, Homo Sapiens
tattcgcctacacaattctccgatccgtccctaacaaactaggaggcgtccttgccctattactatccatcctcatcctagcaataatccccatcctccatatatccaaacaacaaagcataatatttcgcccactaagccaatcactttattgactcctagccgcagacctcctcattctaacctgaatcggaggacaaccagtaagctacccttttaccatcattggacaagtagcatccgtactatacttcacaacaatcctaatcctaataccaactatctccctaattgaaaacaaaatactcaaatgggcctgtccttgtagtataaactaatacaccagtcttgtaaaccggagatgaaaacctttttccaaggacaaatcagagaaaaagtctttaactccaccattagcacccaaagctaagattctaatttaaactattctctgttctttcatggggaagcagatttgggtaccacccaagtattgactcacccatcaacaaccgctatgtatttcgtacattactgccagccaccatgaatattgtacggtaccataaatacttgaccacctgtagtacataaaaacccaacccacatcaaaaccccccccccatgcttacaagcaagtacagcaatcgaccctcaactatcacacatcaactgcaactccaaagccacccctcacccactaggatatcaacaaacctacccacccttaacagtacatagtacataaagccatttaccgtacatagcacattacagtcaaatcccttctcgtccccatggatgacccccctcagataggggtcccttggccaccatcctccgtgaaatcaatatcccgcacaagagtgctactctcctcgctccgggcccataacacttgggggtagctaaagtgaactgtatccgacatctggttcctacttcagggtcataaagcctaaatagcccacacgttccccttaaataagacatcacgatg

SEQ ID NO: 206255 - DNA, 1000 bp, Homo Sapiens; identical to SEQ ID NO: 114882

SEQ ID NO: 206256 - DNA, 1000 bp, Homo Sapiens; identical to SEQ ID NO: 114857

SEQ ID NO: 206257 - DNA, 1000 bp, Homo Sapiens
ttacggtgaggatcactgtgttgtattcagaaaaacggggagagggatgcttaattggccctggcgcttgctatttttttctcatttcttcacaataggaccgtctttggcagcagcaaaatgtatttcagtatggcagtctttcctctcttacattattggtaagattatactaacaaaatgtttccccttgtacaattatgctgtgtttttaaaaaacattgacctgtgtgtttttataaaagaaaaagtatgttgtgccttcttcttaagaataaagttttctaaagggaaagcagttgtggtgaatccttaccaggtgcaaagagttgactagagaggcagcaaggagtaaaatgtgagtagagccagttgctgtggcacacacctgtagtcctggctactcgggaggtggaggcaggaggatggcttgagcccaggagttcaaagcagactgggcaacatagtgaggcccccacctctaaatacatacacacgtacatacatatacatatacatatacatatacatatacatatacatacacacacacatatatatatatacacacacatatatatacacatatatatatatatgactagaggccatccccttttcaaacctcagcccagtttcttcatagccacctctatcagaacccagctcaggagtgcacagcatgatatttggtcgaatgttctgagaagcattcagaatttctgtgactttaggtcatttaagagatgaagtatggtttcttacgtgctttgctgacttagagagccaagccaagagcccagcagcatctctttttgaagagcaaggcctagggctcctgagacaaaggcgccccctaaaaaaggtccccctagtgaaggaatactgatgggttaagcagtggagatgaagctgccttttatgttgctttttctttttatttctcctcctcacctcccctctggctcccatccctctcctttctcctcctgctcttaga

SEQ ID NO: 206258 - DNA, 1000 bp, Homo Sapiens
cacgcaagtgctgcgctacggcacggcccgcgagctgtgcctgggcctggaagtggtgacggcccaaggcgaggtctggcatggcctcacgtccctgcgcaaggacaacagcggctacgacctgcgcgacctgttcatcggcagcgaaggcacgctgggtgtcatcaccgccgcctcgctgcgattgttccccaggccggccgggcaggccacggcactggccacctgccccggcctggacgcctgcgtggccctgctgcaaaacgcgcgcgcggtgctggacgccggtctgaccggcttcgaggtcatgcacgcctggcccatcgccctggtgcgccaatatctgccagaccaggcccgggccatggccccgctggtgagcgacgcggccatcggcgagggctcggcgcaggggcctgaatggacggtgctgatcgacacggtccaccccacgtccgacctcctggccaacgaggccctgcaggtcctgctggcccaggctgtgacaactggcttggtgctggacgccaccgtggcccgcaaccagacgcagtcccgggccatgtgggccctgcgcgaggccatcccgatggccgaacggcaggaagggctgatggtcaagcacgacatcgccgtgcccacctcggccatcccgagcttcgtgcgcaccacgcagacccacctcgcccacgccttcccgggcagccgcgtggtctgttttggccacctgggcgatggcaatctgcactacaacgtgcaggggccgcccggcaccccggccgccaccttcctggccgagcacgaaaccgaggtcaacagcctggtttacaacaccgcgctgcacctggggggcacgctgtcggccgagcatggcatcggccagctcaagctcgatgagctggcgcagcggaaatcaggggtggcgctgggtttgatgcgggcggtcaagcgggcgctggacccatcgaacctgatgaaccccggccgcctgctcaatccc

SEQ ID NO: 206259 - DNA, 1000 bp, Homo Sapiens
gcgccactgtactccagcctgggcgacagagtgagactccgtatccaaaaaaaaaaaaaaaaaaaaaaaattgttggccccttcattgagctagtggaccttcagggttcttagctctatagaaagttctgtatcttaattcctctttacataagctcaggtcttgtctcttgtcccttgaatcgggtcctagacgtctagagatcagcaatggcccttaaaatagcttccaccttaaaaatccccttaccactctatagattcaaactcccacatcatttttggttcctgcaaattttacttttttgagagctcagcaacgtaactaaaagaatgttttaaattttacatccagaatgttcgggtattttgtagctgacttgttttcagtttagtctgttataatccctgaaatggaactgggaagtatccaatccttctttagactaaaaaagaaaagatttgggaggtttttttttttttttttttttgagacagagtctcgctctgtcactcaggctggagcacagtggtgcaatcttggctcattacaacctccgcctccaggttcaagccattctcctgcctcagcctcccgagtagctggaattataggtgcctgctgccacactcagctaatttttgtatttttaatagagatggggtttcgccatgttagccaggctagtctcaaactcctgacctcaagtgatccacccgccttggcctcccaaagtgctgggattacaggcgtgagccaccgcaccttgcgtgggagaaattttaagatttctgaaaaacaattgaacagggctttataataaatgagtaagctaatacagcattgtctagtagaacttcctttgataatgaaaatgttctccatctgtgctcatacgatagccacaagtggatatcaagcacttgcaaagtggctagtgtaactgaggaaatgaattttaactactaccataaagattcctttcacactgaggtctgg

SEQ ID NO: 206260 - DNA, 1000 bp, Homo Sapiens
aatcagacagacagaatgaaagctgagtgtgggggtggccagaagccctggggcactgaggcaggataagggcggtgggcagagggagactgtttccctaagtcagcattctctggccccccagaggctgggcacagctctcctcttgtgatgtatacagattaactcatcttccatccaaataaatctctcagcacactgcacagttccttctgcatcccagattacccttcccatgtcaggacttgccccccttcccctaccgctcaccctattccaattagctgggtgtagatggagatttcacttcacacttcttcctcctccacaccttggcctcctggcctagacatggctccctgaccgcagaaactccagtagccaccaggccttttgcaggggcatctaattatgcaagatctacagaggggcagggcagacccaaagcctcgtacaaagatcaaggtttctgtgcattttctgcccttctcaactccttccctactgtatactcagtctccacccctattcctctatcactgaactcaatttgaacctaaatgaccaaattttcagcagatttgatctttgagggagaataaagcccagcttgtcagaccctttaccctggaatcagtgatgagaattctgcccatccgtactccctattttccactgggcaagtaggaatgcccacttgaagagggcagcagttcccatgaccctttcctggacaatgatctttttaagttggaaaaaggaagaagaggagaccatactgattgctggccccaactcccataccaagacttccattagtgctgaaggagaggggaaagtgtcccacttggcctcattttaggacccagagtgtaaatggatacagtgtgtttgtgtgtgagtatgtctattttctttggtatgtctaaccttccctgcagagccatcacagaggacagctcaggcttggcacaggaagctccacatgtgtcctatctac

SEQ ID NO: 206261 - DNA, 1000 bp, Homo Sapiens
ctactttttttttttttttttgagacagagtctcgctctttcgcccaggctgaagtgcagtggcgctatctgcaagctctgcctcctgggttcacgccattctcctgcctcagtctcccgagtagctgggactataggtgcccgccaccatgcccggctaatttttcatatttgtagtagagacggggtttcaccgtgttagccaggatggtctcgatctcctgacctcgtgatccgcctgcctcggcctcccaaggtgctgggattacaggcgtgagccactgcacccagccctcttagactactttctactcgcgagatgcaacccctattcctggctgctgtctggcagcttttgttctcactgacatcctagttccaagaataaatcggatgctgcaatgctgctgttggggatatgctgacacagctcctcagagaggagaaaggtggtcgtctctctggtggagttgtcagaactgctcagtttagaggttcttggaacaaaagtcgtttaaactcacaaaagaaagagattctttaactcccaagagcttgactggggtgggggaggcagcgggggacatccctgaagtgttgaagtacctaggccagtaaataaatgcaggtcacagagacttaagtcacagatttcttgacttcagactgctcacttgcatgttctacagtttttagacagatgtgtgtctcagccatttaagaaaaacattgtttgaggccaggaacggtggctcatgcctataatcccagcactttaggaggctgacgtgggtggatcacttgaggctaggagtttgagaccagcctggccaacgtggcaaaaccccatctctactaaaatacaaaagttagctgggtgtggtggtgcacgcctgtggctccagctacttggaacactgaggcaggagaatcgcttgagcctgggaggcagaggttgcagtgagctgaaattgtgtcactgtactccaccctgggcaca

SEQ ID NO: 206262 - DNA, 1000 bp, Homo Sapiens
tcggggtgtggtcctgttcatcaaaacaatgaacatggagtttagagtccagtgagtcaataaagcttttttttgtgcaacctgatctaacatggagatgttttctcttgagtaaactcactgagttttccatcttaaattactcagcagtgactgagagctacctgcatggaagcaggaagttactccagtgttataaacaaacttcttagactcaacatcctattctccatccctttttttttcctgtagagtccaaaaacctcaaccgtctcatttttaaattatccaattggagttacctttttaaaaaagttattcttaaggactttccaatacctctcctgaggaagacatgtcaggtcttctaaaagtttacattatgaccaaagaaagatgctggtcctcaggcattctacccagggggctgttctccaggccattcccacctcctgctaagaccatggggagccctctctgtaaggaggggcatatgcagggacctgcccatccccttggtaagctggatggcaaaaaggcatgttgtctgcaccactggctgcctgctaatgtcgctgtcagtggggaaggagaagtgacaacacgtttgagtgcatttgctttgactcttagaaacccaagcctctgaaaaaagagtaactacttgccagctgttgttacagatgatatttttaggaaaacatcccgtgacagcaaatcagaattggactctttttcagagaaatgattttattgatggagtacaacctgggtatttagcttcctttcaacaaaattttttgtgcccctttcttgagactgtccatgaatgacagagacatagaataagaactggggtgctaaagatggaataggcaaaccccacaccaaggaaatccacagtgaagtggaaatctggttcttatgaacattttaagagcatctgaagcctgtacttcaccaaccctaaaataatacgtaacacgagatgattcctcag

SEQ ID NO: 206263 - DNA, 1000 bp, Homo Sapiens
cagaaaaaattatctaagaattttaaaaataagatcctgaagttgtttaattgcatccatttctgtatttatgtgaatttataaactgcagtaagttttgaatgaggttaatcttgtttaatataagtaaatgagtctgtagactgtgatctccccaaactaaaaagtacagtacttggaattgtgttctttatggttgtagtgttggtaaagcactaatatgcagaaaataaaggaattacacagtgcagtttctcacgttatgttactcgcttgaactagataagtgggacgtgtggtgtgtcgggccatgttattctccagggtatatggtaaaaagtgacttaatttggaagttgcctgacttttgtaagaaaaaaaaatcaatttggttcttgtaaatgctggctgtttgaggtaatgcgccctgttttagttccaccaacttaatctgattgtatgataatttagaataccacagttaaacaatttttaaaatttgaggtcccatagcagtctttattctgctgttttttccaaattacaaccttagcatttttagaagtagagaattgtgtctaaagaattggccttaagtcttaagttcaggccttaattctttatagacttttggatttcaaagtttcttttagaggtcaaattgtttgtcctatcgaaatggcaaaactgtattcatttagaaagtaaaatagtatcatagaggataaggttggaagaaagaaaagtaaaagatgaataacttgttggataaaagggtttgaaagacattcttgtaagcctttcctcctatatcagcaatttttatagtgtgattttagaatgtcttcatgtgatctctagtatgatttaaccccatgttaatatttattaatatatttagtactgtggttaagatactgtgacaaagtatcaatttttcagtgctagcagtagaaaatattttccccatgaatgggtttttatgttttaatataagctt

SEQ ID NO: 206264 - DNA, 1000 bp, Homo Sapiens
cgatgaagcctccgttatcccaggttccttgggtttgttgccatctgcgtccttggcctctttgccagacaagaacaccgcatttggtttgtacgaaccatgccacggttctgctccagatttgccaaagaataaggtcaaccctatcgccactatcttgtctgctgcaatgatgttgaaattgtcattgaacttgcctgaagaaggtaaggccattgaagatgcagttaaaaaggttttggatgcaggtatcagaactggtgatttaggtggttccaacagtaccaccgaagtcggtgatgctgtcgccgaagaagttaagaaaatccttgcttaaaaagattctctttttttatgatatttgtacataaactttataaatgaaattcataatagaaacgacacgaaattacaaaatggaatatgttcatagggtagacgaaactatatacgcaatctacatacatttatcaagaaggagaaaaaggaggatgtaaaggaatacaggtaagcaaattgatactaatggctcaacgtgataaggaaaaagaattgcactttaacattaatattgacaaggaggagggcaccacacaaaaagttaggtgtaacagaaaatcatgaaactatgattcctaatttatatattggaggattttctctaaaaaaaaaaaaatacaacaaataaaaaacactcaatgacctgaccatttgatggagtttaagtcaataccttcttgaaccatttcccataatggtgaaagttccctcaagaattttactctgtcagaaacggccttaacgacgtagtcgatatggtgcactctcagtacaatctgctctgatgccgcatagttaagccagccccgacacccgccaacacccgctgacgcgccctgacgggcttgtctgctcccggcatccgcttacagacaagctgtgaccgtctccgggagctgcatgtgtcagaggttttcaccgtcatcaccgaaacgcgcga

SEQ ID NO: 206265 - DNA, 1000 bp, Homo Sapiens
caggtttagaatagttgttcgtggttgaaagacttggataaatgtggatgagatagaaggggaaggcaagagctgttaattttcgtgggcaatcctggggagaggcggggctcagtggcttcactggtgatcttacactctacatcttttctggattcctgccttttacagccgaggtgctcggtggagtcatggcagtgccctttgtggaagactgggacttggtgcaaaccctgggagaaggtgcctatggagagtgagttcttttaagcttgccttcgttttctgagtgcatattcattgttttggagtctcacactctggtgatttagaaagtagatgtttgagatccaagggttttggcaactgaagttacacagccttttgctaggattaaaaattttttccttccctttaaaaaaaaaagttttctttgtagagagctggaagggacacgaagttattgtttccatgcccacaaattgcttctcagggtttaagcattgcggttaatgagcaaatgagcagactctggagattgcctgcctggtttcagatccttgctctatcacatactggtcattgttttgtgatcttaggcaagcttcttaatgtcattgtgtacctctccttcactacctttagggtggcaataatcgcatctaccccataagagcttaggacagtcagttacacaagcacatatagtatgggattaatgctcttaaaagtatatgagtagaacatgtatatatgtgatgtggcttagaattatctcaatctattttatgaagcgtttattaaatgacttgtgtgacagcataatgacgtctttggagggttagctattgtatttcacattttagaaaagagtagtgtgtgttgagaacatagcagaaaccacttccttggtttctcctttgtggaaaaagtaatagaggtaaaatcgttttggatgagtcatgtttaatctttggaagttttagaagaaatggaattc

SEQ ID NO: 206266 - DNA, 1000 bp, Homo Sapiens
tttttttttttttttgagacagggtctcactctgttgcccaggctggagtacagtggtgtgaccatggctcactgcagccttgacctcccgggctcaggtgatccttccacctcagccgccctagtagctgggactacaggtgtgcaccactatgcctggctaatttttgtatttttgtatagagggagactcaccatgttgtcccaggtggtctcgaactgcaggcctgaagtgatccacttgctttggcctcccaaaatgctgggataacaggcatgagtcaccatgcccggcctcctctgtcttaaatgactgacaattgtcaacagtgcagagagccacttgatggcagaccaagtctcttgtactgaaggctcctcccgcacggggtgctctccctgtgtcgagggctgtgtctcccccacccagttctcaccacttcgcttacttcttgcacatgatctacaaaacaacacatgaagacaggtcctcaaccttgttgtccttaagttatagatgagaaaacggaagagtctagagaggctgaggacctcgcctaagctcacacagttaacaagggccagagccacaccggagtcagctctggctgccgaaatgtgccctaggggaggtgactcaaacagcagacttatttcttatagttctggagcctgggaagtccaagatcaagggctggctgactcagttcctctgctagatcacactgggcattagggctttatatgtgaattttaagggaacacaattcagtctgttacaggctacaaaggaatttgggagaaaatcctcaacttctcaaaggtcatctcctcccactcttgaaaaaacatacaatagcttataaaaacctcactttcccttcatgaaggcctggatttaagaaaaaatgaataaaacctcaattccagaatagacgatgggaaaatattgaataatggatttatttgtatttagaagggtagaagagcatactcatgc

SEQ ID NO: 206267 - DNA, 1000 bp, Homo Sapiens
aaagtgctgggattacaggtgtgagccaccgcacccagcctcagattttcaaaatactaccttctgcttagaataagggaatggtttggtagctagtttttctttttcttttctttctttttttctttttttttgagactgagtctcactctgtcacccaggctggagctcagtgccacaatctcggctcaccgcaacctccaccttgcaggttcaagtgattctcatgcctcagcctcctgagtagctggaattacaagggtgcgccaccatgccctgctaatttttgtatttttgacgaggttttgccatgttggccaggctggtttcaaactcctgacttcaggtgatctgcttgccttagcctctctaagtgctgggattacaggcttgagccaccgtgcctggcctagagagtttttcatcatagcagctcagttttatgtattccctccataatacgcctcaagaaaatgtctctcccacttgtgtctctcaagtgtcttgcccacccctagcagagtgctcttgttacctgacatttgctaacatggcagagaagatgcggaggttggggaagcattctatgttgttgtcgtacaaattcagtcttaggcaggtgttgtatccctgggtctcaggagtgtggaattttcactgttcctcttccctgactctcatcagtaggggagatgtctagtgatcaggactcaatatgttttcttgctccttctgcatgatagatagctttttttgtttgttcttcctaatctgtagttgcaatgagtcttcatatgtgtcctaatgacaaggtttgctgcctttctcctggcttgaaaacttgtgttgtgtagaggagaccgagaaggatctagatggggctttgtggcttccctgtagctggtgctgctttcaggaccatattaagagagaggctttttcggatctccttccctgcactctgttttctcttgagtgcatggtaaggtctgtggagaag

SEQ ID NO: 206268 - DNA, 1000 bp, Homo Sapiens
catgtaaacacacatgaaatatgcattgctacctcttttttctcagagaaggaaattgaggcatagtgagggtaagtaacgttatcctcaagaccgcaaagcaagtgaagaaacagctggtatttaaacccagtcctttctggctccagtacacatgttctccctcgtacgttgctgcttgtaagtgagagatcaacactgcagaggaaacaatttccttttctgcccctctggtaagggcagaggcagactgaccatgaagctaatgaagcttcagcctcagggctcctcacttgcatgggcccctccatagccctgtgcctgattttttttaatgtattttttatttcagtgacttttggagtagaaggggtttttggttacatgaatgagttatgtagtggtgaattataaaacttcaatggacccatcacctgagtagtgtatgttacactcaatgtgtagtttttcaccccacacacctccccccctttattttattttttttgagaaggagtctcactctgtcacccaggctagagtgcggtggcatgatcttggctcactgcaacctccgtctcccaggttcaagcaattatcatgcctcagcctcgataatcccagtagctgggattacaggcatgcaccaccatgcccagctaatttttgtacttttagtagagacggggtttcgccatgttggccaggctggtctggaactcctgacctcaaatgatctgcccaccttggcctcccaaagtgctgggattacaggtgtgagccactgtgctcagccccaccctcccccattatttcactctgtatgcctttgcgtattcatagcttagctgcctgtgcctaatttcatatcaccctagatcaggcccaacaaaacttggacctgctcttggttaaaggtatacagcttttgataattttcatgagatactcacatagtcaatatgaattgagttctagttaacaaattccatttggagaa

SEQ ID NO: 206269 - DNA, 1000 bp, Homo Sapiens
cagccaaggcagactgcaagggccatgtagccctattaggggtggcatcttcatgagggaggcccccctgccacaaaaaaggggcaaaaattgcaattactttttcaacaacctgatagttagctgcagtggcgcactccttcagctacttgggagactgatgtgggaggctcccttgagcccgggagtttgaggctatagtgtgccgtgactgagtctgtgaagagccactgcactccagcctgggcaacacagtcagactgtctcttaaaaaaaaaaaaaaaaaaagagagaaattagacaatgctttgagtccctgctttttggctcctaccttggcccactctgcttctctcactcagcatttggagtttataaaaccagttctgatctactctcattccctcccacagttctccaagtcagctgaggttaagatgaggtgttctgtttgacggatgaggaaactgaggctcacagaagggccacgccttgccccaggtctcctgatgagtgaggggcaggactggaatttaaacccaagtcccctgagtcctggcctaggctccttccactgccccggctgccctaccctcagggaggccctgatacgtcaccattactcaagagtaatggtgaccatctcagggaaaggaagaaaaggggaacagaaggagggacccaggaaagcagggggttgacaggggaacattagcgcataaatgaacatgagtcagaatgttgatcttcttcaacttggatttatgtccatgattcgtgcaaatagctatccagggatggacagccaccctaatctgggcttctggcaccacaggcctccagctatggggtccagggtctgaacctcagggcctggcagcttcaggctggcgcccctcggcggacgtggctggcatggccttctcccatctgtgatggcttcagcaaggctactgtgagtggtggtggagagggccccagagccagaatatccatcatt

SEQ ID NO: 206270 - DNA, 1000 bp, Homo Sapiens; identical to SEQ ID NO: 114875

SEQ ID NO: 206271 - DNA, 1000 bp, Homo Sapiens
aggtcctggcttggggtaggttggaatgggcttgtggagccctgatgtgccctgtctgtcacttctgcagccatgtatgagcacaagatcttcgttcagggcatcatctgggacatcaacagctttgaccagtgggggtgagttgctcacttaggggagggccgggaatacctttgtgtcggctcagggatttcagtagcaacgttagagccttcctcataccactcttcccttcccttcccttcttggcagagtggagctgggaaagcagctggctaagaaaatagagcctgagcttgatggcagtgctcaagtgacctctcacgacgcttctaccaatgggctcatcaacttcatcaagcagcagcgcgaggccagagtccaataaactcgtgctcatctgcagcctcctctgtgactcccctttctcttctcgtccctcctccccggagccggcactgcatgttcctggacaccacccagagcaccctctggttgtgggcttggaccacgagcccttagcagggaaggctggtctcccccagcctaacccccagcccctccatgtctatgctccctctgtgttagaattggctgaagtgtttttgtgcagctgacttttctgacccatgttcacgttgttcacatcccatgtagaaaaataaagatgccacggaggaggttgtaggctcagcctctgattttttttttcctgtgatggtgctttatgtagcagagggcaggagcgctcagcaggacgcaggctgtgcctctgcggacacttaacactaagtggtgagcgggtctagagtggagcaaggtgccctgagaagacaatagtggggtgggggcacaatcagtcaggacggcaacttggcctgtgtcaccaaatcccaagactgttttccactcctcacctctgtgactggagaaattggatactctgttcactcgatggttctaaaaactgcattgagattatgtttgtttcgggtgaatt

SEQ ID NO: 206272 - DNA, 1000 bp, Homo Sapiens
gccgggggaaggtggtagacccgctgcggtgcatacccttcccgaatggtccccccggtccgcgaatgctcaagaagaccccggagaaagagacctttgccgataccgcagaccccccaccagctggcgcgtggtccttcccgttctgtcccgcgcctgttgctcgtttcccgttgcgtgcacggagcccttggctgctcgtcggtgttgggttcgtcccgccctcacgtttgctctctcgcctaccgcgacccgcgcctccccgctccgagtacgaggagggatcacgcgggacggggctctgtcgacctgccgctgtgcggagcttgtgggggagattgggtttctggtggcagcgttcccacggccggtggagatcgcgggagccgtcctacccccccttccccctccgcggggctctcgagggtccgtgaaccgcggggttggcctcgctctcgggggcggacttcttatttgggggaaccggtggtcggccgcgtccggcgcgtcgtcggacgttgggacccgctgccacgcgggggtcttcgtcgttggtggagcgatttgtctggttaattccgataacgaacgagactctggcatgctaactagttacgcgacccccgagcggtcggcgtcccccaacttcttagagggacaagtggcgttcagccacccgagattgagcaataacaggtctgtgatgcccttagatgtccggggctgcacgcgcgctacactgactggctcagcgtgtgcctaccctacgccggcaggcgcgggtaacccgttgaaccccattcgtgatggggatcggggattgcaattattccccatgaacgaggaattcccagtaagtgcgggtcataagcttgcgttgattaagtccctgccctttgtacacaccgcccgtcgctactaccgattggatggtttagtgaggccctcggatcggccccgccggggtcggcccacggccctggcggagcgctgaaataaa

SEQ ID NO: 206273 - DNA, 1000 bp, Homo Sapiens
tccaccattgcttcagagcagaatggaaagaaaaaaaaatcagtctaagtgttgatttccctagtaggcactttctggggataagtgttgttgaagccaacacttctatttgcatgattccagtgttgttgagacaacaagcgatttatttagcttatagtccaaagtttggaagagcattgaggatggtgtgcttccctaaaagccaacagtcctcaaagagtgatccctggacctgaagcattagcatcgcctgagactctattagaaacacagattctcaggagccaccccaattctgtattacatacctatggctgctgtaacaaattaccatgtatgtagtagtttaaagcagcataaaggcatgacctttcagttctggaggtcagaattctgaaatgagtcttgcaatgctaaaatcaagtggtcagcagacctgtgttcattctggagactccagggaagactccatctgttgccttttgcagcattcaaaggcctgcattcctttgcttatggcagcaccactccaatctcctcttccattgtcacatcttttctgatagactctcctgcctcccgctcataaggccctcctcattacattgggcttccccagatagtccagtggaatctcccaatgtcaagatcctcaatttaatcacaactgcgaagtcctttttgccacataagataacggattcacaggctttgaggattcgtacactattatcattgttaaggactatattagtccatttgttcactgctataaagaaatacctgagaccgggtaacttataaagaaaagaggtttcattgcctcacagttccacaggctgtacaggaagcatggatagggaggcctcaggaaacttacaattatggcagaaggtgaaggggaagcgggcacatcttcacatggccagagcaggaggaagagagagtggcggggaggtactacacacttttaaacaaccacacctcacaataactc

SEQ ID NO: 206274 - DNA, 1000 bp, Homo Sapiens
cttttttaggtgtggtgaaactggtcatgtagccatcaactgcagcaagacaagtgaagtcaactgttaccgctgtggcgagtcagggcaccttgcacgggaatgcacaattgaggctacagcctaattattttcctttgtcgcccctcctttttctgattgatggttgtattattttctctgaatcctcttcactggccaaaggttggcagatagaggcaactcccaggccagtgagctttacttgccgtgtaaaaggaggaaaggggtggaaaaaaaccgactttctgcatttaactacaaaaaaagtttatgtttagtttggtagaggtgttatgtataatgctttgttaaagaaccccctttccgtgccactggtgaatagggattgatgaatgggaagagttgagtcagaccagtaagcccgtcctgggttccttgaacatgttcccatgtaggaggtaaaaccaattctggaagtgtctatgaacttccataaataactttaattttagtataatgatggtcttggattgtctgacctcagtagctattaaataacatcaagtaacatctgtatcaggccctacatagaacatacagttgagtgggagtaaacaaaaagataaacatgcgtgttaatggctgttcgagagaaatcggaataaaagcctaaacaggaacaacttcatcacagtgttgatgttggacacatagatggtgatggcaaaggtttagaacacattattttcaaagactaaatctaaaacccagagtaaacatcaatgctcagagttagcataatttggagctattcaggaattgcagagaaatgcattttcacagaaatcaagatgttatttttgtatactatatcacttagacaactgtgtttcatttgctgtaatcagtttttaaaagtcagatggaaagagcaactgaagtcctagaaaatagaaatgtaattttaaactattccaataaagctggaggaggaagg

SEQ ID NO: 206275 - DNA, 1000 bp, Homo Sapiens; identical to SEQ ID NO: 114876

SEQ ID NO: 206276 - DNA, 1000 bp, Homo Sapiens
atttgcctattcatccacgtaggccgaggtctatactacggatcctatatattcctagaaacatgaaacattggagtagtcctactatttaccgttatagcaacagccttcataggctacgtcctgccctgaggacaaatatcattctgaggagctacggtcatcacaaatctactatcagctatcccttatatcggaacagacctcgtagaatgaatctgagggggcttttccgtcgacaaagcaaccctcacacgattcttcgccttccactttatcctgccattcatcattaccgccctcgcagccgtacatctcctattcctgcacgaaaccggatccaacaaccctaccggaatctcatcagacatagacaaaattccatttcacccatactacactattaaagacattctaggagccttatttataatactaatcctactaatccttgtactattctcaccagacctactaggagacccagacaactacaccccagcaaacccactaaacaccccaccccatattaaaccagaatgatatttcttattcgcctacgctattctacgttcaattcctaataaactaggtggagtgttggccctagtagcctccatcctaatcctaattttaatgcccatactacacacatccaaacaacgaggcataatatttcgaccactaagtcaatgcctattctgaatactagtagcagacctcattacactaacatgaattggaggacaacccgtagaacacccgttcatcatcatcggccaactagcctccatcttatacttcctaatcattctagtattgataccaatcactagcatcatcgaaaacaacctattaaaatgaagagtcttcgtagtatataaaataccctggtcttgtaaaccagaaaaggagggccacccctccccaagactcaaggaaggagactaactccgccatcagcacccaaagctgaaattctaactaaattattccctgc

SEQ ID NO: 206277 - DNA, 1000 bp, Homo Sapiens
agtgctgtacccttccacctcctagaggtgggcagctgggccccacctacttgtgactgaaggggcacaccactgccctgcctgcccacttagccgtccatggcaccagccccctggatgggcattgggctgacacctaccatgctgctttttggcacagttgtctattctgagccttgagagaaaaagtgccccttaagggttgaaggcagtctgaacccttgtgcttggtggggctcgtggccttccccttttgcctggctgtggaggcctgatgctgccccgttccctgtcagaggctaagatgagatttgccagcacaggggccccagatctgcctgggcctgtgcagcagcccagcttcctggtgtatttttcaggtaggcccttgtcctgccagctgccttcctcatcccctcgtcctgtcccagaggttatctgcctggcctggctccccacgagtcacctgcaagccccagggcctgggggcagtgactggcaggtgcagatgggctgtttcgtgtagtggaagagcagcctgatggccaagggggtggacgcaattgtgggatgtcctctttactcccttcctggcctcactggctggggcagaggggcagccgctaggagagactgaaagcagcagctaggactgaggagtgggttttattgtccttcagagctcttcaagctgtcccctctgtcatcactccctggatgtgtggggcatggttccttccctgggaaggctaagttcagttctgttttttattctatgagaacaagtcacagctgcagctgggccccatgctctgccccaagcccccaaccccgcggtgctccggcggcttcctgtccactctcggggcccttggggcctggcttgctccagggtcttgggctactggcagctcctctccttgggctcctggctgccaggcgttggtgccacttcttaaaggcctggaaccagggaggagaggaaatgctattgttgtgg

SEQ ID NO: 206278 - DNA, 1000 bp, Homo Sapiens; identical to SEQ ID NO: 114878

SEQ ID NO: 206279 - DNA, 1000 bp, Homo Sapiens
tattcgcctacacaattctccgatccgtccctaacaaactaggaggcgtccttgccctattactatccatcctcatcctagcaataatccccatcctccatatatccaaacaacaaagcataatatttcgcccactaagccaatcactttattgactcctagccgcagacctcctcattctaacctgaatcggaggacaaccagtaagctacccttttaccatcattggacaagtagcatccgtactatacttcacaacaatcctaatcctaataccaactatctccctaattgaaaacaaaatactcaaatggccctgtccttgtagtataaactaatacaccagtcttgtaaaccggagatgaaaacctttttccaaggacaaatcagagaaaaagtctttaactccaccattagcacccaaagctaagattctaatttaaactattctctgttctttcatggggaagcagatttgggtaccacccaagtattgactcacccatcaacaaccgctatgtatttcgtacattactgccagccaccatgaatattgtacggtaccataaatacttgaccacctgtagtacataaaaacccaatccacatcaaaaccccctccccatgcttacaagcaagtacagcaatcaaccttcaactatcacacatcaactgcaactccaaagccacccctcacccactaggataccaacaaacctacctacccttaacagtacatagtacataaagccatttaccgtacatagcacattacagtcaaatcccttctcgtccccatggatgacccccctcagataggggtcccttgaccaccatcctccgtgaaatcaatatcccgcacaagagtgctactctcctcgctccgggcccataacacttgggggtagctaaagtgaactgtatccgacatctggttcctacttcagggccataaagcctaaatagcccacacgttccccttaaataagacatcacgatg

SEQ ID NO: 206280 - DNA, 1000 bp, Homo Sapiens
ataaacattactctggtcttgtaaacctgaaatgaagatcttctcttctcaagacatcaagaagaaggagctactccccaccaccagcacccaaagctggtattctaattaaactacttcttgagtacataaatttacatagtacaacagtacatttatgtatatcgtacattaaactattttccccaagcatataagctagtacattaaatcaatggttcaggtcataaaataatcatcaacataaatcaatatatataccatgaatattatcttaaacacattaaactaatgttataaggacatatctgtgttatctgacatacaccatacagtcataaactcttctcttccatatgactatccccttccccatttggtctattaatctaccatcctccgtgaaaccaacaacccgcccaccaatgcccctcttctcgctccgggcccattaaacttgggggtagctaaactgaaactttatcagacatctggttcttacttcagggccatcaaatgcgttatcgcccatacgttccccttaaataagacatctcgatggtatcgggtctaatcagcccatgaccaacataactgtggtgtcatgcatttggtatctttttattttggcctactttcatcaacatagccgtcaaggcatgaaaggacagcacacagtctagacgcacctacggtgaagaatcattagtccgcaaaacccaatcacctaaggctaattattcatgcttgttagacataaatgctactcaataccaaattttaactctccaaaccccccaccccctcctcttaatgccaaaccccaaaaacactaagaacttgaaagacatataatattaactatcaaaccctatgtcctgatcaattctagtagttcccaaaatatgacttatattttagtacttgtaaaaattttacaaaatcatgttccgtgaaccaaaactctaatcatactctattacgcaataaacattaacaa

SEQ ID NO: 206281 - DNA, 1000 bp, Homo Sapiens
gagctggggaatgggactgaggctcccacctttctcatccaagactggctcctccctgccggggctgcgtgcaaccctggggttgggggttctggggactggctttcccataatttcctttcaaggtggggagggaggtagaggggtgatgtggggagtacgctgcagggcctcactccttttgcagaccacagtccatgccatcactgccacccagaagactgtggatggcccctccgggaaactgtggcgtgatggccgcggggctctccagaacatcatccctgcctctactggcgctgccaaggctgtgggcaaggtcatccctgagctgaacgggaagctcactggcatggccttccgtgtccccactgccaacgtgtcagtggtggacctgacctgccgtctagaaaaacctgccaaatatgatgacatcaagaaggtggtgaagcaggcgtcggagggccccctcaagggcatcctgggctacactgagcaccaggtggtctcctctgacttcaacagcgacacccactcctccacctttgacgctggggctggcattgccctcaacgaccactttgtcaagctcatttcctggtatgtggctggggccagagactggctcttaaaaagtgcagggtctggcgccctctggtggctggctcagaaaaagggccctgacaactcttttcatcttctaggtatgacaacgaatttggctacagcaacagggtggtggacctcatggcccacatggcctccaaggagtaagacccctggaccaccagccccagcaagagcacaagaggaagagagagaccctcactgctggggagtccctgccacactcagtcccccaccacactgaatctcccctcctcacagttgccatgtagaccccttgaagaggggaggggcctagggagccgcaccttgtcatgtaccatcaataaagtaccctgtgctcaaccagttacttgtcctgtcttattctagg

SEQ ID NO: 206282 - DNA, 1000 bp, Homo Sapiens
ctcttatcaagcagttactcggataaagtctcataggaaagcccaccctagaccacaaatagcttataaacaacctaattatcattcatattattgtcttggtctgctctttattggtgaggtgacttttttgaagactatttttgtagagcagttttaggttcacagcaaaactgtgaagaaaacacagttttcccttatgcctcatgccctacacatgcgcagccttccctgctgtcaacaccccccaccagagtggtgcatttgttatacctgatgaacctgcttggacacatcattatcacccacggtccatagtttacattagggtccattgttggtggtgcacattctgtgagtttggacaaatgtataatgacctgtgtccatcattattgtatcatagagagtggtttcattgccctaaaaatcctctgagctctgcggaattcatcccttcctcctttgcccctaactcctggcagccatggatctttttactgtatccatagttttgccttttccagaatgtcctatcgttggaatcatacagtatatagcctttttggattggtttttcacttaataatatgcaattaagtttccacaagtcttttcgtggcttgatagctcatttctttttagtgctgaataatactccattgcctggatgtaccacagtttatccattcacctcctgaaggacatcttggtttcttccaagttttggcaattacaaataaagctactataaacatctgtgtacaggtttttgtgtggacataagttttcaactcctttgggtaaataccaaggagcatgattactggattatatgttaagagtatttttttttttttaagaaactgtcaaactgtagttcaaagtggctgtaccgtttttcatgtccatgagcagtgaatgagagttctagttgctccacatcctcaccagcattaggtgttgtcagtgttccagatttgggccattctaataggtg

SEQ ID NO: 206283 - DNA, 1000 bp, Homo Sapiens
gtggaccccgcagcagcaccagcccctctgggccccatgtggcacagagtggaagcatctccttccctactccccactgggccttgcttacagaagaggcaatggctcagaccagctcccgcatccctgtagttgcctccctggcccatgagtgaggatgcagtgctggtttctgtccacctacacctagagctgtccccatctcctccaaggggtcagactgctagccacctcagaggctccaagggcccagttcccaggcccaggacaggaatcaaccctgtgctagctgagttcacctgcaccgagaccagcccctagccaagattctactcctgggctcaaggcctggctagcccccagccagcccactcctatggatagacagaccagtgagcccaagtggacaagtttggggccacccagggaccagaaacagagcctctgcaggacacagcagatgggcacctgggaccacctccacccagggccctgccccagacgcgcagaggcccgacacaagggagaagccagccacttgtgccagacctgagtggcagaaagcaaaaagttcctttgctgctttaatttttaaattttcttacaaaaatttaggtgtttaccaatagtcttattttggcttatttttaatgctttttctcagtgtttttcttctgtttctgagtcacgaacagcaggcactgaaagcagtcccccagccactgccgaaggtcagtcccggaggtgctgcccaggctccaggcagatgcggcagccccggccacagccagcatgggctggagaaaggctctctactgcacaggggcctcacgtgactgcagggctctggggaggtggggcacctgtagcctgacccccaccttgctgcttccaaagcttccttgcccagggctgagccttgtggggcaccccccacactgtggtctgcctgcctgcagggtgcccagggagaccctccgcctttagaagtccaagttct

SEQ ID NO: 206284 - DNA, 1000 bp, Homo Sapiens
aaccaaaggctaaaatgtgtttcagtgggatgagatggacttaggggaattggggttagaacttgagggttattttgtgaaacatgaagggacttagagaaaggaaatcaacagctgcataaatgggcatgtctctggctggagaaatgtggagaatggagttctgatacactgttagaaggatcttatgtagcatttttatagctgacctagaagaacacaaaatttccaaggctgtgttataatgcgcttttccaggtaaaccaagaggaatataccccaggaaggttgcataattaggatcaagtgttttcaagttttcatattccaagctttggttctatgcctacactgttcaatccagtagccactagctacatgtgagtatttaaatgaaataaaggtaaacatctagcttgtcaaccgcacaagccacagttccagtatttgataacctcagggctaccgtaagagacagtgcaaatacacaacattttcttccttttttctttcttctttctttcttttttctttcttttttcttcttttttttttttgagacagagtcttgctctgtcacccaggctggagtgcagtggcacaatctcggctcactgcaacctctgcctcccagtttcaaaccattctcctgcctcagcctcatgagtagctgggattacaggcacctgacaccatgcctggctaagttttgtatttttagtagagacagggtttcaccatgttgtccaggctggtcttgaactcctgacctcaagttatctgcccgcctcagcctcccaaagtgctgggattacaagcgtgacattttcatcatcgcagaatagtctatggggcagcactggtctacacaatgcattcttatctggtactaattgtgaatgactccatgaggatgctggcgtcatgtgcttctgttgatctgtagggcagaatggccactaacttgacatcatatggaagtgctatagggaacatcctc

SEQ ID NO: 206285 - DNA, 1000 bp, Homo Sapiens
attatcaaagttaagtgtttgagaaaacatctagagaatcatattttgcaacacgtggcattcacacttcaatgtctataaaaaacgtgttaccagcacacagacacgtccccccctttacacatgttctgcggtgagacggaggccgttttctgcccattgcgggagccggccgcgcgtctggaggagggatattggttgtagcagcagggctgacagcctcaggcacaccggggagtcagcttgcttagtcctccccaatcctggggggcaggcggggatgcgtttactcgggtgttaacagccgaggaaacaggatcctctggctgagccatattctcacgggacagggagggagggacaagggcaggacggaggctgaggcctgcaggaggtggagcaggctctgcacctgggcaggtcactgggggtgtccccagggcacgggggaggcagctctggttacctttctgggggcagcgccaccttgggcgggctgtgcaggtactgcttgaagcgcagctcgaaagcttggcccacggtgctgatgatgctctgtgccaggccctcacagcactccaggatgtggcaggctgcgggcacgttggtcatgcagcctccgagccacacggccgtgccccccagccacaggacccccaccggcctccccgggggcctcacctctctggttgatggggtccttggcgacgtaggccacgtaatccgtcatgtcctgggggcggggaggggccagctggacctgcctgggccccccaccgggattcccagctgcccaccccagcaatgcagagagatggggcagtggatgtgggcacagggtacgttaggcgggctctggggaaggatgagagggtctcgcggccggaggggggcggcagggctgcaggtccacccccatccctggcctcaccgtgtctccgcctgacgcgaaggagatggacggcatgtggtggttggcgatgacatgtggcggcaggag

SEQ ID NO: 206286 - DNA, 929 bp, Homo Sapiens
  misc_feature (351)..(351): n is a, c, g, or t
  misc_feature (357)..(357): n is a, c, g, or t
  misc_feature (364)..(364): n is a, c, g, or t
  misc_feature (379)..(379): n is a, c, g, or t
  misc_feature (390)..(390): n is a, c, g, or t
  misc_feature (397)..(397): n is a, c, g, or t
  misc_feature (418)..(418): n is a, c, g, or t
  misc_feature (431)..(431): n is a, c, g, or t
  misc_feature (438)..(438): n is a, c, g, or t
gtgcttagtgggacctcagctccagaaaagaaccaggaattgctgggtatggtagcttatgcctgtaatcccaacacgttgggaggccaaggcgggtggataacttgaagtcaggagttcgagaccagcctggccaatacggtgaaacccggtctcgactaaaatacaaaaatttagccaggcatggtggcacacacctgtaatcccagctactctggaggctgaggtgggagaatcacttgaactcgggaggcagaggttgcagtgagctcagatcatgccactgtattccagcctgggcaacagagtgagaccctgtctcaaaaaaaaaaaaaaaaaaaaaaaggcccnggaatngttcaancaaattataaacccnccaatcccctntcccagngatttctgtaggggttagcanatgcccaagtttntccctgncttaaaaaaaaaaaaaaaaaagagagacacagggaaagaaccttaccctccacttccttcatgcttttggatattatcacatgaaaacgtgatatctggaactatggctaccactttgtgaccatgaggaagaagctgagaaaaatcccaaggaagtcaaccctgaaatcagccactagacttcccgttgtgtgaggcaatgaactcctactggttaagccactttagttagttgttatcttacttgcaaccaaaagcaccccaaatgataggaacactgaggtctgtgatgctcagcttcccaaaggtgtacacgaaccactttgtaaatactcttccatcaagggacaccataaagaatgtgtgtgtttgtgtgtttaatacaaagacagatacctgactccaggagccgtcactttacaacctgagattacagctccaagattgcccttgcaaggctccacctgctggtctttggaggtaatggcagg

SEQ ID NO: 206287 - DNA, 1000 bp, Homo Sapiens
agaggagctcatgcagaaggctaaggaagccctggacctaagcgttctcaacactggttatacattagaatcacttcaggagcattttaaattaaataccaatggctcggccgcagctcttaagagattctaagttaactggattggggctaaactctttttcagtgattctagtgtacacccagaggtgaaaaccactgaagagagaagggttcttaagtactggagtgatatttttaaaataaaattctgttgggttcccaacagaacatgggttcccaacaaacatgggtttgttgtagctataggcaattagcatttatcctctcctctctttggtaaaggaaatcccccaagtcccatcatcaattacatgaaaataattattgggcaggcaaacaaaaggaagccagttttatctctcaactaattgctcttgacccagttccctaatgcccttgttctggagtggttcaaaggctatgatgtcaatgacctctttctagagtcatcacagagctgaggcaactctacttcccccaattacccaatattgaacaacagacacattttacatctggagcatgaaaaagcaatcaaattctttgtacttatgatcactagcgttcttgtcttctgtgacactttacccctgcttatgaaattgcttcccttttataattacaaaggactaccttactgttgattgataattaccttttctgtagttaaaataatgtatatgtttttctaggtgaccaagatatcaacgtggtttctacatatatctccaaaatgaaagtaatttatccagcagttgaaggtcggatcaagttttccacaggaagtcactgccatggaagcttttctttaatatttctttcactttgggcagtgatctttgttttataccaatagccaaaaattctccttgcctttaatgtgtgaaactgcattttttcaagtgagattcaaatctgccttttaggacctggctttg

SEQ ID NO: 206288 - DNA, 1000 bp, Homo Sapiens
tgggggcagggttccaaggtgtggcctgtcagcaggaaggggcaggtggcatgggtccaggcgggactcagggctggggtgccactgctggagactgtccggaggcccctccagggcaccttgccattgccattgtcgctcatggccatctggtcccgtttcagggaacaagaggaggatcagatgctgcgggacatgattgagaagctgggtgactgggccggggatgctgagggctgggctggctggctgggtgggccggggatgctgagtgctgggctggctggctgggtggaccgggcctccagctgggggtggggggggggcgggtatcgggtccccccctcagccttggtgacaggacaggcaggttcaccctgagggtgagagctccctcccgcccctaagagagccaggggcagctggtgaccgtgtggtcatggtggggaccagccctccggggcacccagtcggggcaggttctcacgtgggagggcacagggcttcctgcaggctcggaggcccagggcggattgtggccagtggaagggaaggatgtttctggcagggggacttgtgtgggccacggctgtgcggctgcggcgttgagcacggcctcactgtccacctgtcccctaggcctccagaggaagaagtccaagttccgcttgtccaagatctggtcaccaaaaagcaaaagcagcccctcccagtagtagccagtagggccgtgggctcggcccggacctggcatccggacttggactcggggccatgggcttggcccggacccggaacccggacttgtactcggggccgtgggctcggcccggacccggcattcggacttggactcgggaagggcctcctgtccctacaaggggcatgtggacagcagggacctgcgctaccgtctgtggtctcaataaagaaaccgaccacatggccccggaaaaaaaaaaaaaaaaaaaaaaaaaaaaaaaaaaaaaaaaaaaaaaca

SEQ ID NO: 206289 - DNA, 1000 bp, Homo Sapiens
ccggcagtgccagcggctcgtggagttgcacacgtgccgatgaccgcctgcctagccctgcgccggcaaccacctagtggcccagggaaggccgataatttaaacagtctcccaccacctaccccaagagatactggttgtattttttgttctggtttggtttttgggtcctcatgttatttattgccgaaaccaggcaggcaaccccaagggcaccaaccagggcctccccaaagcctgggcctttgtggctgccactgaccaaagggaccttgctcgtgccgctggctgcccgcatgtggctgccactgaccactcagttgttatctgtgtccgtttttctacttgcagacctaaggtggagtaacaaggagtattaccaccacatggctactgaccgtgtcatcggggaagagggggccttatggcagggaaaataggtaccgacttgatggaagtcacaccctctggaaaaaagaactcttaactctccagcacacatacacatggactcctggcagcttgagcctagaagccatgtctctcaaatgccctgagaaagggaacaagcagataccaggtcaagggcaccaggttcatttcagcccttacatggacagctagaggttcgatatctgtgggtccttccaggcaagaagagggagatgagagcaagagacgactgaagtcccaccctagaacccagcctgccccagcctgcccctgggaagaggaaacttaaccactccccagacccacctaggcaggcatataggctgccatcctggaccagggatcccggctgtgcctttgcagtcatgcccgagtcacctttcacagcgctgttcctccatgaaactgaaaaacacacacacacacacacacacacacacacacacacacacacacacggacacacacacacacctgcgagagagagggaggaaagggctgtgcctttgcagtcatgcccgagtcacctttcacagcactgttcctc

SEQ ID NO: 206290 - DNA, 1000 bp, Homo Sapiens
atatcttttgatgcattttaattttaaatatgtatttctcaaacagtacttttaatgacatttgtgaattgttcatttagatgtgccactcaagagaaaagtcactgtgttgtattttaggtttcatagtttgagcaactctgaagtccataaacaaaacctattagacaattgactacgtagaattccatacaagtttccttttacttcttttcctaatgttaaaaagcagctttgcatgctgtggatcttggccttaggaacgctttgtggtgtaattgacagaaaagaccacgagctcaggagggaaaagtccgaaacccatgagttggctctgtgtgcatgaacacgcacgcgtgcgcgcgcacacacacacacacacacacacaccctgctctggagttgggcaactgacttatgctgtctgatctgcagtttcctcaaactttacaagattttttgaaggtcatatgcttttctgtatgtggagcaatttgaaaaaagtatattctaagccattaagtgtttcccatgtgtgaattatctcagtaatctctcaatcataaagattcagataactgagttcctcctggttttgggtcaggtctttgttgaaccattatcacgtctttcatcgttttcttaaattttcttctcacttggtgatgcttctctgagtagaagcagaatggattgtggttattgtagcagttatccatttagctactaatatttgatattcattagtagacaattattaggggaaaaggacgtttaaattttatattctcagaggtataggaactatgtatatgagcagaacacacgtaaggaaaagtgcaaaagtctagggattacccagttcagtttctaaatttaagtataagttgtaaaaacaatttagaatagtttctaactatacttttactcccaagagaagctttagatacagggggatttattagtgaaactgcttttatgaaggaaggtggatgaaggg

SEQ ID NO: 206291 - DNA, 1000 bp, Homo Sapiens
ggcgccttctgtatggtctcgtccgcccctccccggccaggagatggcctttgggatgaaacctcggtgtcctccatggcaggggggaggcatgacatggcccgtcactctccgcctctccaggggctagagagttcccttttgaagtggaaggaatcgggatctcacgaggagggctgaaaagcataaaaagattgggcatggcagaggcagattaaagcgatagttgaacaagtttctgacacttacgtttcggccaggggcttctccctttggaccctctccgggctgtgtttggacttcgagtccgaactatccgagaggaccaccctccccttcttcggcatcgccccctctaggttctcggaggttgtcctctttcccctcctcgtcttgaggggggagtcgctctccacttcctcttcctcgtcctcctcctcctcctcttcgtcctcatcttcctcatgggaggagacgagatcggtctctccagacatagcttttggaggatgatgacccacaagtataggttatctatcgtagtcctttcgataagtaagagtgtcgaacccaacgaggagcagaaggaagtgacaaccggttttcagtaaggtattctctacaagcactggaatcataggtaacagatagttttgtgataagataatttgtaacgagtaacaagcaatgaaagtaaataaagtgcagcaaggtggcccaatcctttttgtagcaaaggacaagcctggacaatttcttataatgagaaaagcgctcccgaggacacatgggaattatcgtcaagctagctttcatcacactcatatgattcgcgttcggtactttgatagtttgatatgtgggtggaccagtgcttgggtactgcccttacttggacaagcatcccacttatgattaacccctattgcaagcatccgcaactacaaaagaagtattaaggtaaacctaaccatagcatgaaacatatggatccaagctt

SEQ ID NO: 206292 - DNA, 1000 bp, Homo Sapiens
cactcgtaatactggttgatacaatcacaacccaatgtcgcgtttttgcgagcatctcatcaatgctccgcgacacctttactacattccatattgttaaagaacagccgagttatgactcgtcttggcaatgccaaacgcaaacaccgaaaactcgatgcttgcgtttggcaaccacaaggtattggtggaggatgacgggatcgaaccgacgaccccctgcttgcaaagcaggtgctctcccagctgagctaatcccccagtcacggcagagacttccaccgtccataacttggtgggtctggtaggacttgaacctacgacccccgccttatcaagacggtgctctaaccacctgagctacagacccttggctgtaacatcaaacaaaccgataagtgtggacgcctaactagaatgcacgctcttaaaggaggtgatccagccgcaccttccgatacggctaccttgttacgacttcaccccagtcatgaaccctgccgtggtaatcgccccccttgcggttaggctaactacttctggcaaaacccactcccatggtgtgacgggcggtgtgtacaagacccgggaacgtattcaccgcggcatgctgatccgcgattactagcgattccagcttcacgtagtcgagttgcagactacgatccggactacgatgcattttctgggattagctccacctcgcggcttggcaaccctctgtatgcaccattgtatgacgtgtgaagccctacccataagggccatgaggacttgacgtcatccccaccttcctccggtttgtcaccggcagtctctctagagtgccctttcgtagcaactagagacaagggttgcggctcgttgcgggacttaacccaacatctcacgacacgagctgacgacagccatgcagcacctgtgtccactttctctttcgagcacctaatgcatctctgcttcgttagtggcatgtcaagggtaggtaaggttgaagcaa

SEQ ID NO: 206293 - DNA, 1000 bp, Homo Sapiens
ttggttgggttaaaagtggcttgggcagtggacccaaatgctgccattaaagaattataggggtttaaaaactctcattcattttaaatgacttacctttatttccagttacattttttttctaaatataataaaaacttacctggcatcagcctcatacctaaaactcctgactcttaccactcatttccgtttgagtctgtatctgaaatcagtagcctagtcctactagatgagaaaggagccacaagtattgtgccctctcctcacccttccagcagatgcttctgtagtatgtgaggttgagaaaaagtctgattgtggtgatgtaggtatagtcatgccacagtgatgaaaaattaaagaaaaatcttctagctctcaggatatgcattatcacttgctacagatactccaaggccaaaggaatgcttgagcctaaaagttcaagaccagcctgggcaacatagcaaaaccccatctctacaaaaaaatatacaacagttagccaggcatgatggcacatgtctgcagtcccagctacttgggaggctaaggtgggaggatcacttgagcccagggtgtcaaggctgcagtgagttatgatcacactgctgcactccagcgtgggtgacagagcaagaccctgtctcaaataaataaaaattaagtttctattaaagattgtttctgttgcttaaaaactgaagcaatagactaaatgtaagatgaaggttaacagagatgaatgtaacttgctacatttagaaacaaagatctgactgcctacgtacaaatgaggaagacttagaagatttcagttggtttagagaacactgccaagttggcagaatgagatagttactccaaaacactgatgtggccataaactaccttaataggaaatatagtgtctagacctgcgctgcccaattggccacatgtggccatctaaatttaaattaatttaaataaaaaagcagttcttcagttgcactac

SEQ ID NO: 206294 - DNA, 1000 bp, Homo Sapiens
ggacataagtaagacaggcgtggttgttagaaactcacagaggttgtttcttcaacctcaacgccagtctgtttttctgcaccagtgcaacagaagttcactggctgttaactctccgttttttggctcagtgactctcacatgctctctgctctccagtttcagtctattagttataaatctcagaaagtgaaaaggaaagaagaaaaaaattaaatatattcaaatacatttaaaagcaatttttttaacttggaattatggaggaaaataatctagtttacataggtatggacacgctatgggtaacagctcatgcttgtagcacctctgctaagcgacatacaggctttgaggacaaatgctgtgctcttcatgcacacttttcaacatgtgtcagatatggagggaagaaatggaactaaaatatgttgagcacttacaatttttgcatcactatgctaaactctaatgcattattgcctaacagtcttcagagggatgcgataaagtaatgggccaaaattatatatttagaagtattctcatccagattttccctggagatgaactaattcaaagcccattatctttgtaccctagtttgtcccttcccagtgtgcctgtgtttggatttatagggtagtccgtctatttttttaggccataagatcctgggagtttcgcaagcaatttacttcctttgtctaaggcacattccacactacagacaggcagtaactgacattgtgcgggaatcctcaccacactgctctcttctgagaaaagcccctttaaactgttctttaggcaaaaccaaaagccaaacaaacaagcagtcatgctttgtcttataatcctaaaacttctgtcctagaacctgtctggaccaaggttccttgttggagccagggccatccttaggctggtccagtttcctgggacatggcctgtccatctgatagccatgcatcacctaagtgttggtgtatgtggctca

SEQ ID NO: 206295 - DNA, 1000 bp, Homo Sapiens
tttttggttgaatgaataaatgagtgtgtacccatcagggtttcatcagagaagcagaaccactaagaggtacttgtttgaagagatttgttgtgggaatttgaccttacacagtcactggcactggggctgcttaagcaggctctgcagacaatcgggaaggacagacggatataaagtaagggaggacaagcccaagtggaagcccttgaaggcagacacatccgtctgtgtcagttcttttttgtttttttgagacagggtctcactctgttgcccaggctggagtgtcatggcccaatctcagctccctgcagccttgaccttcctggtctcaagcaaatcctcccaactcagcctcccaagtagctaggactacaggcatgagccaccacacctggctaatgtttgtattttttgtagagaagggttttgccatgttgcccaggctggtcttgaactcccggtctcaagcaatccacctgccttggcctctccaaagtgctgggattacaggcgtgagccactgcacccggccccatgtcagttcctgcctctgctgaggtgagccagcagagaagccacaattcgtgtgagctgtaaaatgactgctgcttcacttcccacctccaaaccttccacaagtttctcctctgtgctccactctaaccggaaacacacgggaagggaattctgggaagtgtggttcagcttacccaggtggacagatcacaaagccaccgctgcatgggaggtgtgatccgtgcccagactgcactgtcgtgggcaattcggaggcaagcaggcaatgatggcagagtgggatgaacaggagaaaggtgaagtgcagaggcataagaaaccgatttttatgttccactccttgattccatttgggttcctccttaacattacaaaaagaaaaccaggaaagaaggatcaaaatgtccctgaatgccattacattcaaacatcagaacaccaaagttgatagcagcat

SEQ ID NO: 206296 - DNA, 1000 bp, Homo Sapiens
cagctactcaggaggctgaggcacgagaatcatttgaacctgggaggtggaggtcactgtgagccgagatcacgtcgttgcactccagactgggcggcagaatgagactgtctcaaaaaaaaagagactgggtctcaaaaaaaaaaaaaaaaaaaaaagttagaattaaaatctgggagtgacaaccattaatcagatcatttcactaatggaagtttaattactaatgaagctaaatgctctgagaaaagcttaggaagcacaagaggctgagcctttcaggtcagcaaagacttcccagaggaggcagtgcctacactgaggtcagagtgacaagaagagtaatggaccactgtaaagacttgggttcggccgggcgcggtggctcacgcctgtaatcccagcactttgggaggccgaggcgggtggatcatgaggtcaggagatcgagaccatcctggctaacaaggtgaaacccgtctctactaaaaatacagaaaattagccgggcgcggtggcgggcgcctgtggtcccagctactcgggaggctgaggcaggagaatggcgtgaacccgggaagcggagcttgccagtgagccgagattgcgccactgcagtccgcagtccggcctgggcgacagaagcgagactccgtctcaaaaaaaaaaaaagacttgggtttgacttgattgagcccaggagttcgagacaaggcctgggcaatatagtgagacctcatctctacaaaaattttaaaaattagcctggtgcggtggctcatgcctgtaatcccagcactctgggaggccgaggtgggcggatcacttgaggtcagaagtttgagaccaccctgaccaacatggagaaaccccgtctctactaaaaatacaaaattagccgggcatggtggcgcatgcctgtaatcccagctactcgggaggctgaggcaggagaattgtttgaacctgggaggtggacgttgcggtgagccaagatcac

SEQ ID NO: 206297 - DNA, 1000 bp, Homo Sapiens
tgctttctcatggcttcagtaaacaaaccaacacatttaccttttcacctacactagttaaatctggttttctgttgcttgcaatacgcacattctaagaccatctcatctaagttatcttgagttatattttgttgtcgttaacttaatagactatgttttttagagctgttctaggtttacagaaaaattgatctaaaattacagaaaattcctacatgccctcctttctccccccttctccacacaatttccccctattttttacaccttgtattagtgtggcacatttgttacagtaaacgaaccaatatggatgcaatattattaactaaagactatagtttacattaaggttcactctgtgcttgacattctatggctttggacaaatgtataatatcacatatccaccattacagtatcattcagaagagcctcactgccctaaaaatccctgtgctgcatcatttcatccatccctccatccccttcttgatttatctgttcactcaacacaaataccatgaacaaccatcatattacattgtgctaatagctgggaacaggaaatcagatgaataaataaataaatgcagtgacgagctttgtggtgactcaacagacgtcagcataggggctggtaaaggcacaaaggaaagagtagtcaaaattcttttaacttcagttggtgagcatcagcagacaagtatgagggcctttgcttccacaactctcattttactttgcatgaacattatgtcacctctaggaaaatggcataagaataagcaatatagtattgtctctacattgtgagtttttataaagtcagtaaatacatattattttccattcaaaagtaatttaaaattatcaaaataatgaaacacaattcctagatataattaggaaatacctgagacaaatgtcaatctttgactaatctattacctctattgttattcttaggagtatcactagtccatgagatagcatg

SEQ ID NO: 206298 - DNA, 1000 bp, Homo Sapiens
gggttgagggtcttctcattgtttgagtcacatggatttcaggaaactaattcattttcttgtccaagcattcccttggcaagttcttcaatccctgttttcaatggtttcctcatttctaaaatagaaacaagaatagcacttaccctatagcagtactgtgaagattacaagactggacatgtgaagtgcccaggatagtaccacacatagtcagcactcaatccacattagctatttttatcacaattattgttgccctgtctgagcatctacatttaatagaatgatggatatgtttagatttacatttttcacgttattatcgttttgtacatgcctcctgtctttgttcctctgttcttactgcctttcgttgttttagtgatattatggtacaataagaaatatatatttggtctctggccccagtttctgagacaatttctaaaactcttgtagacaggggtgctaggaggctcttttgttctaatatttggtctttgaccctggtttctaacacagagctcccaaatcccttggaatttcctgggcaatagaaacttcttttgttctaatgaggcagctcctggtgggctcctggataacctcaggatggggaatcagccatggcattaaagggttggaactttcagctctaccctttgacctctggagaggctcttgagaggctctggagaggggctgatggttgaatagatcatcagtggccactgatgtaattaatcatgtctatgtaatgaagctgccataaaaaacccaggaggacagtgttgagagagcttctaggttggtgaacacttgggggtgtctggaagacagcccacctggagaggacacggaggctcttcgcaccttcccccatacctggctctctccatctcttcatttgtccatctgtatctttttcattatattatccttgataataaactggtaaatataagtgtttccctaagttctatgagccaccatagca

SEQ ID NO: 206299 - DNA, 1000 bp, Homo Sapiens
aagagttaaaagtgggccctaggagcagccacagaagtgagctatgaagactccccagtttggtagcactgtgcatgcgttatcttgtttctgtctcagactgatcctctgagaagtcagcagggcaggttttattcctcatttagagacagggaaagcaggtgtcattgaaacagtttctgtagtttacataagcacacacctaaggccaagtggaatgtgaccacaattaaccaacctgggaaacaggtttcaggaacaaatgtggaaatatttttcatccttaacaataccttcttgcctttaatcctccatcagacacttattcccatgttgtttcacactggctttaacgatggtgggtgtgatcttttcttgcaactagactgtaagctttttgtggctattaccagcctaaactccctgggccctgttttttgttttttttttttgtttttttgttttttttttttgaggtagtgtcttgctccgttgcccaggctggagtgcagtggtgtgatccacttcctgggttccagtgattcacctgcctcagcttccctagtagctgggattataggcacatgccaccatacctcgctaatttttgtatttttagtagagatggggtttcaccattttggccaggctggtctagaactccagactcaggtgatccacccacctcggcctccataagtgctgggattacaggcatgagccactgtgcctggccgaccttggtattttatagcaggaaaacagaaatgccaaaatcctgctcactcactctaggtgtggctgctgaaggaagataaggattatgaaatagaaggccaggtaacactgatagtacacgaagttttgaccccaataccaatgcaaacaaatgaactcccagggaacctgggctaagccttataaaaagatcctttttcctaaggtggtgtcttagtctgttttctgttgctgtaatagaatacctgagactgggtattta

SEQ ID NO: 206300 - DNA, 1000 bp, Homo Sapiens
agacggtgacagacgccgcagaacaccagcctcgaagccggtcccgtcccgggaatctgcaaatacaacgccttgcgaggacaaaggcacctgcaggtgggacggagatggaggagcatccagggtggggggtccagggccccagtgtcctcacagggtcctcacgacaggaggcgggacggtgagagccagagagagatggggatgggccgcgctgtggccgtgaaggggaggaagggccctaagctgagggacgtgggtgcctccagatgctggggaaggcgggaacggttccgcactggagcccccgggagggaccggcctgctcctgccttgatatgagcccagtgggacccagtttggactctggcctccagaaccgccagaaaataaacgtagtaagccatcaactttgtggtcttttgttacagcagacgtcggaaatatgcacacggtgtctgaaactgttctcatgacaaaataagcctcagatccccccgggaagggcggaggccgacgcctcggtgctcctcggatcccccgggaagggcggaggccgacgcctcggtgttcctcggatcccccgggaagggcagaggccgacgcctcggtgctcctcagatcccccgggaagggcagaggctgagggcaggagccgtgctgggtgcagggcaggcctgggggcttcatgccgctgtcctgcgggacgcagagagggctggccgtcggtgtgggggcgcccccacctgtgcccagcgccctcctgacatcctgactccgctgggacttctgcctacagccctgggagtcaaactccagcctctcagagaaaaggtcagagccaagagccccacagcctggagccaggcagtgacaccctgggcccgtctccccttctgtgcgtggggcgacagcagcatcgccctggtgaagtccccggggacggccagggctccatccccagccgccgccttccacataaatacaggaagactgggcc

SEQ ID NO: 206301 - DNA, 1000 bp, Homo Sapiens
gtagaggcaccagccaccagccattatgaaacgcaagacaatttgtaagctgccaggaacaacaatggattagagaggaaggaagttgggggcggatggtggctatggcaagaaaacttgatgtgtatggtaagtgtaaatgaaggtctatcacaaatgcattaaaaattgttttatgtagccaagtttatgttttgatactttaattttaaaaaggatgatgactatgcatttaccatcaaggcatttagtttcttttgtttcacatttagaggaaagggaaggtggggggatctgagagaataaacttagatggggccaccaccaatatcaagcacccggtttggcagtgtctgcactgagctgtctcctgttggtagtggtgatgtcacactgccagggtgtggaaagccaccctccctcctctctcttgccttccacctgcccctttggctttccctgagagctggcctgacacctgtttcagagtcaagagcttttaaagggttctggcccaggacaggagttctggaatggaatctttccactttctgttaactaaaatactattttccatctgtatcctaatttctccccatgggctttgaataaaccctcaacactccaacccatatcaagctttctcctctcttccctgtcccgtaacctctggttgggttcatgtactgtttctttgtggcgtgaacagcgtttccaattagaatctgcctgaaaggaggtcccatttgcccactgagcatcctgtgttctcatggtggctctaactccagaagattttaacacagtctcatcaaacactgctttcagggaggaatttacactgaggttaaaaggactgttgaggactaatgctaacagaagctaacatttattgcgtaggacaatacactaaacacttcacatgtattatcccatttaatcctcacaacaacaactgctacccccattttacagatgagggagtggagagctcagtaac

SEQ ID NO: 206302 - DNA, 1000 bp, Homo Sapiens
aaatgagcattagctacttttcagaattgaaggagaaaatgcattatgtggactgaaccgacttttctaaagctctgaacaaaagcttttctttccttttgcaacaagacaaagcaaagccacattttgcattagacagatgacggctgctcgaagaacaatgtcagaaactcgatgaatgtgttgatttgagaaattttactgacagaaatgcaatctccctagcctgcttttgtcctgttattttttatttccacataaaggtatttagaatatattaaatcgttagaggagcaacaggagatgagagttccagattgttctgtccagtttccaaagggcagtaaagttttcgtgccggttttcagctattagcaactgtgctacacttgcacctggtactgcacattttgtacaaagatatgctaagcagtagtcgtcaagttgcagatctttttgtgaaattcaacctgtgtcttataggtttacactgccaaaacaatgcccgtaagatggcttatttgtataatggtgttactaaagtcacatataaaagttaaactacttgtaaaggtgctgcactggtcccaagtagtagtgtcttcctagtatattagtttgatttaatatctgagaagtgtatatagtttgtggtaaaaagattatatatcataaagtatgccttcctgtttaaaaaaagtatatattctacacatatatatatatgtatatctatatctctaaactgctgttaattgattaaaatctggcaaagttatatttactttaaaataaaataattttattgcaatgtatttatcttcattacttaaaatagatgctaatttattttaaaataagactaccttgaatgagtatgaatatatttttatttaaattttgatacaactgatagtttaatactattggttatagattttttatcctgacattgaaaagttaaagaaaaaacattttgttctactgcatgtcatggaat

SEQ ID NO: 206303 - DNA, 1000 bp, Homo Sapiens
tggtcactccctgactgtagctgtaggtgaatgtgtttttgtgtgtgtgtgtctggttttagtgtcagaagggaaataaaagtgtaaggaggacactttaaaccctttgggtggagtttcgtaatttcccagactattttcaagcaacctggtccacccaggattagtgaccaggttttcaggaaaggatttgcttctctctagaaaatgtctgaaaggattttattttctgatgaaaggctgtatgaaaataccctcctcaaataacttgcttaactacatatagattcaagtgtgtcaatattctattttgtatattaaatgctatataatggggacaaatctatattatactgtgtatggcattattaagaagctttttcattattttttatcacagtaattttaaaatgtgtaaaaattaaaaccagtgactcctgtttaaaaataaaagttgtagttttttattcatgctgaataataatctgtagttaaaaaaaaagtgtctttttacctacgcagtgaaatgtcagactgtaaaaccttgtgtggaaatgtttaacttttattttttcatttaaatttgctgttctggtattaccaaaccacacatttgtaccgaattggcagtaaatgttagccatttacagcaatgccaaatatggagaaacatcataataaaaaaatctgctttttcattatgtgactccaacatgcttttgtagaacttgtacagttccgattgtccaatctgatttttgtttactgaaagtagagttacccctgcttcaggaaccttaagataatatggtgggcatttaaatgtcagtgtggcaatgttcgcctgctaatatggcatagattcaaaataagcttaaccctggtgccaaagacctgaagattatcccatccatgcctcaaatggttgtgtgccaattactgcaaagggtactaagggaaggagaaattcactcctgaggctgcttcaaatgtatgtctt

SEQ ID NO: 206304 - DNA, 1000 bp, Homo Sapiens
tagtttagctactattttaggggattttttttagaggtaactcactatgaaatagttctccttaatgcaaatatgttggttctgctatagttccatcctgttcaaaagtcaggatgaatatgaagagtggtgtttccttttgagcaattcttcatccttaagtcagcatgattataagaaaaatagaaccctcagtgtaactctaattcctttttactattccagtgtgatctctgaaattaaattacttcaactaaaaattcaaatactttaaatcagaagatttcatagttaatttattttttttttcaacaaaatggtcatccaaactcaaacttgagaaaatatcttgctttcaaattggcactgattctgcctgctttatttttagcgctatcacaggacccagagcctatgcccttttaaacttaccacaaaagcagaagattaattcaatttaagatgatactctcatttgttacgtcctttttttttttttttggagatggagtcttgctttgtcgcccatgctggagtgcagtggcatgatcctggctcactgcagcctccacttcccgggttcaagtaattctcccacctcaagcctccctagtagctgggattacagggacgcaccaccatgcccagctaatttttgcatttttagtagagactgggttttaccatgttggccaagctggtctcaaactcctgatgtcaggtgatccatctgcctcagcctcccaaagtgctgggattataggcgtgagccactgtgcccggccaatatttgttactttcttaggtttaatagagaaaagggataaaacatttctaactgggagttaatagcatggagaaggtcttaaatcagatgttttaatgccttaaatgtctgtataatatcatgttttcaaatctaattataaatacgtttaaagccaagaataaatcttttaaaaaattgacttgtttccttccataactctgagccatgatt

SEQ ID NO: 206305 - DNA, 1000 bp, Homo Sapiens
tccagagcaacctccaaggcaaaggcctctgtaagttggttgtcctgacagccgagaggtgtctttggccagtcagccagtggatcagttgcgggaactgctcagaaactgaggtgctagcagttagtgaggacacagcgtaagttgtttgttctgtgaaagttgaacagctccactaagcagaggccttgaagagtggccacagccctggaatagagcacagagcctcacctagaggcgtggggaggtttgcaactgccccttcccagccatagcttaggacccatagtctagttcacatagaccctgggctccaaccacccactcaccaggaatgatcccaccccaggaacaatgcgttctcacatcccaccccacctggacaaaggccaggaaatcatgttctgaccaaaagatacaacaacaaaaacaacaacaacaaaaaacgcctattgcaattgaatccacgctaaaatgcctaaaaagctcaagagaagcgggtagttggcagagaacctagagtagggggtgcaaccagcaggcccaagggagggaggctgcatttgggtccagcagtgtttgggtcaccaagaagggccttctaggtggagcagagagagctcaccaggccagaatagtgcaaagggggtcagccctcagtgccacttaccagcggagtaaccctgggcaagttagccagcctcactaagcctcctcatcttcatctttccaggcccgaggagatctagcctctgcctcccaccccagcaccccctcatcagacacacggagcgccactgtctggacaggctgaattggtcttcgggtccctaatttctcatacgccattccctctgcctagaacactttctcacctccccttgatgtgaccccatatcacccttcgaggtgaattggatcggatgccatctcctccaggaggggtggggtcgtgcctcctgtgaggtcccagtgcccctgagtgtctgtgcccgtctgt

SEQ ID NO: 206306 - DNA, 1000 bp, Homo Sapiens
ccagcagcaaagtcctgcagccatctggtctccctgaggcaccacggcggctgccagcagcaggagataaagaacaaagtggtgttgagggttgcttcctcagccccagccactcttcacagagtcccctccttctggagcccaggccaaggcctgtggggatgggaggtggtgcacgctgaagattaagttttaggtttcaagtttagggaaagtatctctttccctaaggcatctttttcaacccccttgtctctagtccccttcccgatgctctaggcttgcacccttggcagtggtggtaggaggtcctttttctttcatgggcctcccaaaaaagccaaattggcttggaagtagctgtgtgcatggcctgggtgtaacttcgtgacatacgtgcatttgtggagtatgtgtgtgtgcatgcatgtgagtatgacgcagtgacacctgaaacgtgagtgtatgggctttttgggggtgtgcatgcctgtttgatgtgtgaagggaaggtgtgccatttgtgtggtgtgtatatgtggtgtgtgcatttgtgtggtgtgcatttgtgtggtgtgtatatgtggcgtgtgcatttgtgtggtgtgtatatgtggcgtgtgcatttgtgtggtgtgcatttgtgtggtgtgtatatgtggcatgtgaacacgtgtgcgatgtgaggagagagggagtgagacattcacggagcacgcctgtctctcctggctgtggatgactggactctcgctcattaggtgatcccacctcagggtttgtggggagatgtctgacactagagaatgaacatgtgctttggggagaggactttcacatcccacagaaacactgccctgtccaggcttcatgcccacaggatcctggagccaggtcctaagtaccaaaaagcaaataaaagcagcttcttgtttgcagctaggccctcccacccttgaaacggtgggaatacccaaatggtctctctagttgccacagg

SEQ ID NO: 206307 - DNA, 1000 bp, Homo Sapiens
aatccatagtgaaatatttcagtccgcacttagttaagagagtacttgagtttttaggcagaagagaaagtgcttttaaaaggaatggaggaggacagctcctgggatcctgaagggatttttccaagtagattaaataagatccatactttaatgaagacccacagaaaaatactgcctaagaaatggttttaaagccttatggaaatgcatagaggttaatataaatgcactagtaaaatctatggccaaaagccttcacttctgattttgacttgcctgaaatattacagcttgtgccttctgaatagtcaggtttcttgcctgagacattcaaatgttaaggtatttgagaatttaaacatcagctggcccagtcgtggatgcagttaaacttgtcagtgcaatgtaacgtgtgaaacataataaaggtgtgaggcttttgtggtgcaatcttgttgaacagacatctaaatccataggcaagatttacacattcccaagcatcaaccctgaagtattgctctccaacactggagtccaacaaattgcttcttatgcagagatcaaggagcaatattttatagatcctttcagtgtgcagggaagtagtatttgtccaaataagctcaaatgtgaaacagaacctagtatgggaaaacactgaatctttgggttattaatttcatcctagtaaatataatgagggtgattgaaagtgccaattccatttacaataagtgtgttcaattaataaagaagatgaatacaagcaaattatgtcttttgtttagctatagaaaaacctgaagaaattaaaagtagtggagaataaaattatgatatttagaacacgtaagttttacctacatccagaatggagctctgcccactttaaatattgagaaaacaaaccaaaaattatgcatctgcatatatgaaatagaagttacatatagaaatattcattataatatatatgtaccttcccatgcacagt

SEQ ID NO: 206308 - DNA, 1000 bp, Homo Sapiens
taataataataataataataatatacatatattctgttggttctaattctctggagaaccccgactaatacaatgggtgattcattcaggactctcaatgcaaacaacagaacattctctagcctgtataagcaggaaggaatttattataggacattacatagctcatggagccactgggaggaccagggaattaggcttggagggtttgcacctaggaatggtggccactgtccagtggagatgcctctactactgccatggacacagcatctcaaatgacacctttgctgcccaaaccccactactgctgccttccaaaacaggctgcttctacagccacttttgctggaaaatggaatctgtgtgatacttgcttcctctcttttctctacttagaattaaaattatctttattttgtgtcggattggtggagcccagctcatgtgtctgtactgcagctacaagaaagaatggaaagtgagttttctggtttgtgccttgaaaaggaggaacccatgataaggaaaattcctcatacatagggaaggtgttcaaaggggctgggaaacgtggaaagtctgcttcagtgaatctgaattttcttagttctgttctgcctctgtgggccctatccctagaatgttacaaagaccatcacaatggccttactgttgacctggtagcagctcgatatagttgcaagcaaagagcttaagaagtgaagttatgtaattatagaacaacagagaaacaaagactgttgggtacacacagtccactcttttagtaatttttgagttaaaaaaagtgtcagaaacgcaggaggcagagcaagaaggcagaatagaagcttctaccaattgtcttccccacaggaacaccaaatttaacaactgtctacacaaaaaatgcaccttcattagaaccaaaattcaagtgaatgattgtagtacctggttttaactttatattactgaaagaggcactgaggagggt

SEQ ID NO: 206309 - DNA, 1000 bp, Homo Sapiens
gtaggtctgacaagcttagttcatctcatctcttcaggtagacctgtttgttaagacttgtgttttggtcttttaaaaagtaaaagaaagaagtgttttgtctttagggagagctctttctgatttactgtttttattttgatgatgattgatagtgactattaattatgagaaaaacatacattcagttctttttcgttaaaaatcagcttcatctggggaggcctttttgtgaatgcccttgctttgcaaaaatgaattcattgtggtctaaaatgtaattagggtttgaaaagaaacattcacatagctgatgatgtggtaggtctcaggttctgtctcatgtgtgataaaccaaaccagccagtatttcaagaagcctagggctattggtaggttaacaccgtgaagatcttcagtgaattcagcttttaacataaagagccaccgcacggtgtttcaattacagaaagaacaactttttaaaaccagagaatgttttcagagctttgctaattcattgtattttatttttgaagtttaaaaacttaacttaatgtgagagttaatccagttcaacaaggtggctctggaagtaccaagggtgaataatagccaagacgcttaggaaaaatagcacttgctctagcagctgtcaaggcctaactacttaatacaaagctaaagttagttaaccctgttacaggaatagggatataaatacagattaatacagaataatacacaggcatttaaagactcttcagagacagcgttggagatccgagtgggaggagagcaactttttcataaaggtgtgaaacagccgttggaataaaacaatacagaaaaacatccatgacccaacaaaatatcaagattttaaataaaggcagtagtactgatttttcttttgcctcaagcgccagtaaggcttggtagggcacaacgctgacagtctacactggacgcccatgtgtccaacaatctctgttcacac

SEQ ID NO: 206310 - DNA, 1000 bp, Homo Sapiens
cgctcaggccgggccaggacacgtgtggcaggaggcttagagcacctggcctggggccttcctctctcaggcaccagatccattggttgctcctgcctagaaccacagcctagcaccctgctccctcccgcctaccacacccagcacagaaactcacaggaatgattgcgctcagggaaggcagagatgtgcctggcatcacagtttattgtttataaaccatgacaataacagctgttgctcagcacaggcctagcagagcccactgcagggggacggcagcgggcaccagaggccttgcctggcccaacccaatgggaacacccagactcagctgggtccccaagggagacttggcacattggcatgggtgtgggacaggtaaagcatgcaagagggagaagagggacataaggggcatgcggctgcggggtgttgggacccaaataaataaagcaggatgacagggtccccttcccctcaccaggaatgcctggacagcgtccagccccaaagcctgcctgtcccaaggctgtagttcagcatcaacagggcagggagcttggcagggcaagggcagagctggagatcatgcccagtgttccaggtgccctccctcccaatcagcctggggggcacaggacagggatggagaaggggctctctccatggcttgggtaacatgccaaaggcaggtcatagggcagactcagtgggggtgggggcctggctaacaagcaatggagagaacgggggccatccagagaggtgggcagaagagagcccctgggtcaagagaaaactgtgggaagacagacacgggagaaggagcagggccacatggtaggagagtttgggggagaagctgccagggggtaacaaccgggtgccaagaggtttgggggccagggcccaggaggaccccaggtctgcatgaggggcctggaaggctcagtccagcttggcgaagcccccaatggtgactttcctctcaggctta

SEQ ID NO: 206311 - DNA, 1000 bp, Homo Sapiens
tctatgagacacacagagtaaacaaacaggagagaagatgatgtgaagacagaggcggaggtggaagtcatatagctgttaagtcaaggaagctaagagcagccagtaatgggctgcccccactctgctggagcctctgtagggagtggggctctgctgacatctggattttggaattctggccaccagaactgtcagagaataactttctattgtttgaaaccgtgcagtctgtggtaatttgctgcagcagccacaggacactaacaaagatggcatccaagctttaaaaagagcagaatcaattatttttgggaggggggcggggagtggtggctcaaaatttttttattttcagagcttgcaacagttgcttagcaatactagctaagctgatacaatctgaaggccatcccacctttatctttaagcatttgaccaatagaatctcttgcaaacaagatcacagaccatttgggatctgtctcaaggagtgcatgggaagaggtcctctcccccatatacttttctaaacaagattgttttatagccaaatgcagttcaaacccataacatagcaactaatcatcttcaatatcaccggttccccctatccccagaataggaagttgaggtaagaggggagagactgtcttctgttgtaagaaaaacctagctacacctcaatgaggcaatgatggcaaggaggctggcaccggaggatggagacgagtaagtgctaaaacaggcctctctagaactctgggtcctttggggcagaaggtccaactcttcctcctagtcaaacatctttgtatcttttagttccaaatcccaaattcccaggaaggagactctaatgatcttaggttgagattcatgtaaagacatggccattgagggtctgtccttgtttaatagttgtacttcccaggaagatgatatcattgtgaatggggcccagtaactaattcctatcccttcctagtgtatattgcct

SEQ ID NO: 206312 - DNA, 1000 bp, Homo Sapiens
gagccaaatcatgccactgcactccagcctggtgacagagtgaagactctgtctcaaaaaaaaaaaaaaaaaaaaaaaaaaaaggaaagaaaaggggggatttaggggagggagagcattatgacaaatacctaatgcatgcagggcttaatacctaggtgacgggttgattggtgcagcaaaccagcatggcacatgtatacctatgtaataaacctgcatgttcagcacatgtatcccagatttgaaataaaattcttttaaaaaagggggggggatttaaagacagagacaggcatgtatacagagaggaaaccatgtgaacatggaagcagggattggggtgaggctctactgaccaagggctgccaaactattgccagcaaaccaccagtcatccgaaagaagaccttgatagcagaaggatcctgttcagaattctgtgttgcattcagtcgtagcttttttttttttttttttttttttttggacagagttttgctcttgttgcccaggctggagtgcaatggcacgatcttgggctcactgcaacctccgcctcctgggtttaagcgattctgctgcctcagcctcccgagtagcagggattacaggcatgtgccaccatgcccggctaatttttttgtatttttagtagagacggggtttctccacgttggttaggctggtctcgaactcctgacctcaggtgatctgcccacctcagcctcccaaattgctgggattacaggtgtgagccatcgcgcccagcctcggccatgtcttcttagtctcctccaatctcgaacggttcctcaatctttccttgattttcatgaccttgacatttttgaagcttacaggccagttattttgtaaaccatccctccatgtgggttcgtctgacgtctgattatgatgagattcaggaatcttacagaagcgatgctgttctcgtgacatcctgtcaggtggtgtgaaattccaacttgtcacatta

SEQ ID NO: 206313 - DNA, 1000 bp, Homo Sapiens
gaggaccaaagatgggccgaaagcaagggcagacttgaaatcaatgggcatcaggcaggagcttcacgctaatgatgatgacgatgatgatgaggcgaagcaggacacagaaagtcgtcgcaaaggcaaaaaggccaagaagactgaaaatgactacccacccgtgtgcttcactctaagtcaggaggagatcgagcagtttttcacctgcctcctaggagtaaaacttccttacgcttacgcggggaagataagcagatacctagacccagcgaagcagaagtttagcgggatgaagtctcacgactgtcacgtgctgatgacacagatacttccagttgcaatccgtgggatcatggacgcacacgtccgtgaaacgctatttggcctatgcaactttttcgacgtcatctcttggaagtcgattggggtgaggcaactcagaaggctacaggaagagatcgtggtgatactatgcgagcttgagatgtacttcccgcccgcattcttcgacgttatggtgcatctgctggtccatatcgtggaggatatcatccaactcgggccgacgttcctgcacagcatgatgccgttcgaaaggatgaatggtgtcatcaaaggatacgttcgcaacatgtcatgtccagagggaagtatagccaggggctttctgaccgaagagtgcatctcctactgcacgaattatctaggcatcgagaaccccgttggtctgcccgtcaacaggcacctcggcaggctcgctggatggggtcaccgtgagggtcgccgtgaaatgcatgtcgacttcgagggtcgactcgccgactttaaaagagcaaacctagtcgtgctacaacacatagacgtggtcgatccttgggtggtagagcacaaaacctttattgagaagacgtacaatgaccgaggccaacagaggacggacggagatatactcaaagagcacaactcatatttcacgcgttggttcaagcagaagctt

SEQ ID NO: 206314 - DNA, 1000 bp, Homo Sapiens
aaagcatggactagaaggacacctgtcaggttcatgactgtagccaccctgggtggaggaggagcgtgacccgaggggaatgggactaagacccaagtccgtttatcttgtgtatacagcatcctggccccgggaaggcttgtgtacctgcgtcgtgaacgtgtcagattcccaaagggaatgaaaagccagggcaggggcttggcccaggcagtgggggcagatgatgcagcctgggccacgcacaggggagtgtatctagacacctcagtccctcatcgtcccagacccccaggttgaaccggctctttgcgggagaggacagaggaaagctcctgtctcagagtgtaccccagaagcagagcctgcgatgaaagcaagggtgccaggctttccagtcattggctaggagctgctcagggagtgggagagggtggcttagatttgcaggcactgtgccaccccccgactgtgcaggcagtcgggagccggagggccatcagaggcagacagaaacggtggaggaggcaaccatgtggctgccccttccacacagcggccttaacagggagagcttctaacatacaacaagcgccccagagcccactgtgagtgaggccgtgttccagaggcaggggatgccagggtgcgggaaaagtcacccaggggcattccatttagcatgagaggttcttggtgacagctaacaaggcctgaggcagagagtggctgagcagagagggtgggggagggagagaagaagacaatgaggtcagaaggtggctggggtcagatgtgcaggcttagcaagtcattctgaggactccagttctggctgaatgagatgggagcccctggagggtgttggtcagagccgggcaaggtctgccttatattctttttttttttgagacggagtctccctctgtcgcccaggctggagtgcagtgacgcgatctcagctcaccacaacctctgcctcccaggttcaaacaattct

SEQ ID NO: 206315 - DNA, 1000 bp, Homo Sapiens
aaaaccaaatgtacaaggtaacaatcaattcacgtatcacaatcagattcttctttagtacccagtttaactcacggatggtaatcaatctccaaacaaaggaaacaatcaccgtcgtttacctctcgccaatgttacataaaaataacgctgagaatttagatgtattgtttgtcatgacgctgtggctggccgattacatgaaattaacttcctcagttgtggtgacaaatataatacacataatccatattgttatgcactagcgcatgtgcgtgtgaaatagatagattatggtcccgtacccaataagatggatatgtgtgtgtgttagagagagagagagagagaaaatgagaggggagagagagtgaggaagagggagggagagggtgtgtgtgtgagaatttgatggtaaaaaaggttgtcaatgtcacttaatatgtatgaaaatattaaatgtaatattatcataattgatattaaactcttaaaattaatgtggccctgttaccattggtataccaccgtatgtggccaatataaggagttgtagatggtggctaggccttgggattaacactaaaaactgtgtgatcttgcctatcagatgtgcacgacggtgacttcgtaaaatttcaaagtgatatgccggctcaatctttcggagacgcctatagggatagggtgtacgtgtgtgcgttcaaaaagataaaagatgaatatatgcgtatgtatataagcgtttgcgtctgtattatgttaaaaaatatatgcacgaggtggtggaattgctcgccaatgggcttgggtgccacctggggctaccattgtgcctgcagaaagccgtggctggccatttccaagagatggtggacaccatcgctaggaagcttccaacatgacgagctgcggccttggataaatctgcaaggctgattctagtgcactccgtcctatgcgctatgccgatccacacgagtctagccaacgtgataga

SEQ ID NO: 206316 - DNA, 906 bp, Homo Sapiens
tgttaaagggttcgtagttgaattgagggcctctaaggcgcaatggtttagtcccatccacttcggattggtgacccatgcccttgtggtccgtgaacagacatattcagaaacaaaaaacacgggagtggtaccttttctgattatcgcatgtcatgcatgccagagggcgcccgtgattttttactgtgactaaaaaagtgtgaccaaagcagtcattcgacttgaattagaaagcatgggataacaaaggagcagcctctgggccaccgtttcggcttttgttggttttaaaagtccattggagattatggggcagtgtgacaagcggctgggtggttattccacacacacacgcacactccttttttggatgtgtgtgttttctgtgtgtgtggcactcgtcgcctttgtgggaaatccgtgtggcacttgtttggtgttgttggcagacttcggtcttgccttcacacacgtttcacatgtgtcatgccttccctcaactcacggcatccaggaatgaaggagggtagttcgggggagaacgtactggtgcgtcagaggtgaaattcttagaccgcaccaagacgaactacagcgaaggcattcttcaaggataccttcctcaatcaagaaccaaagtgtggggatcgaagatgattagagaccattgtagtccacactgcaaacgatgacacccatgaattggggagtttttggtcgtaggcgtggtcgggcttgattatattatttttcatcccgttcctcgtctcgccaatgaatatattaaatttacgtgcatattctttttggtcttcgtttttttacggcgaggacctttaacgggaatatcctcagcacgttatctgacttcttcacgcgaaagctttgaggttacagtctcag

SEQ ID NO: 206317 - DNA, 1000 bp, Homo Sapiens
tattcgcctacacaattctccgatccgtccctaacaaactaggaggcgtccttgccctattactatccatcctcatcctagcaataatccccatcctccatatatccaaacaacaaagcataatatttcgcccactaagccaatcactttattgactcctagccgcagacctcctcattctaacctgaatcggaggacaaccagtaagctacccttttaccatcattggacaagtagcatccgtactatacttcacaacaatcctaatcctaataccaactatctccctaattgaaaacaaaatactcaaatgggcctgtccttgtagtataaactaatacaccagtcttgtaaaccggagatgaaaacctttttccaaggacaaatcagagaaaaagtctttaactccaccattagcacccaaagctaagattctaatttaaactattctctgttctttcatggggaagcagatttgggtaccacccaagtattgacttacccatcaacaaccgctatgtatttcgtacattactgccagccaccatgaatattgcacggtaccataaatacttaaccacctgtagtacataaaaacccaacccacatcaaaaccccctccccatgcttacaagcaagtacagcaatcaactctcaactatcacacatcaactgcaactccaaagccacctctcacccactaggataccaacaaacctacccacccttaacagtacatagtacataaagccatttaccgtacatagcacattacagtcaaatcccttctcgtccccatggatgacccccctcagataggggtcccttgaccaccatcctccgtgaaatcaatatcccgcacaagagtgctactctcctcgctccgggcccataacacttgggggtagctaaagtgaactgtatccgacatctggttcctacttcagggtcataaagcctaaatagcccacacgttccccttaaataagacatcacgatg

SEQ ID NO: 206318 - DNA, 1000 bp, Homo Sapiens
tattcgcctacacaattctccgatccgtccctaacaagctaggaggcgtccttgccctattactatccatcctcatcctagcaataatccccatcctccatatatccaaacaacaaagcataatatttcgcccactaagccaatcactttattgactcctagccgcagacctcctcattctaacctgaatcggaggacaaccagtaagctacccttttaccatcattggacaagtagcatccgtactatacttcacaacaatcctaatcctaataccaactatctccctaattgaaaacaaaatactcaaatgggcctgtccttgtagtataaactaatacaccagtcttgtaaaccgaagatgaaaacctttttccaaggacaaatcagagaaaaagtctttaactccaccattagcacccaaagctaagattctaatttaaactattctctgttctttcatggggaagcagatttgggtaccacccaagtattgactcacccatcaacaaccgctatgtatttcgtacattactgccagccaccatgaatattgcacggtaccataaatacttgaccacctgtagtacataaaaacccaatccacatcaaaaccccctccccatgcttacaagcaagtacagcaatcaaccctcaactatcacacatcaactgcaactccaaagccacccctcacccactaggataccaacaaacctacccatctttaacagcacatagtacataaagccatttaccgtacatagcacattacagtcaaatcccttctcgtccccatggatgacccccctcagataggggtcccttgaccaccatcctccgtgaaatcaatatcccgcacaagagtgctactctcctcgctccgggcccataacacttgggggtagctaaagtgaactgtatccgacatctggttcctacttcagggccataaagcctaaatagcccacacgttccccttaaataagacatcacgatg

SEQ ID NO: 206319 - DNA, 1000 bp, Homo Sapiens
ccattttgtttttggatgatatttattaaatagcttctaagagtccggcggcatctgtcttgtccctattcctgcagcctgtgctgagggtagcagtgtatgagctaccagcgtgcatgtcagcgaccctggcccgacaggccacgtcctgcaatcggcccggctgcctcttcgccctgtcgtgttctgtgttagtgatcactgcctttaatacagtctgttggaataatattataagcataataataaagtgaaaatattttaaaactacaaaatgacatcgtatccacgtggtggccgagctcttctagaatctggtagctctagctaatttcagagaaaggagttaaaagaaacaacttaacaaccagacatgttaagttattcactaggaaccgatgctaaccccagagagtcaacgtctattttggggggagctgggaatatttggagttctacatgcgacctggaggaatttatcctggggccggggtgacatctggggtcccctagtgagtggcagtgtgtcttcctgctctcctcctgccctcgaaggaggactgggaagatttccacgctgagattcccaggcgcaaactgcagctgatgcgttcctcgaggttctctttgagatggaaacgagccggctgctcgtgttcatttctgttttgcttttctactgttgaatgaataccaccacagtgaagggattattggaatgttttcgaaacacaaaataaccattttgtaacttctgctgtatagttttcttttcctgtggatggagtgtgtaactacagcacacatttaaatgaaatctctgttaatcgcctctgcactatcttagcaaatattttaaacctaaagctaaatgttgaaataaaggtgtagagcattactgagatgcaaatggagctctctctggctcctaattaatgacctacaactcgactgttgtttccaattacttttgaaacactgaaggaaagaatcactgctg

SEQ ID NO: 206320 - DNA, 1000 bp, Homo Sapiens
tgaaccaatgctctggaattaaggtaagcctttcaaacagttttcttcagcaatgtcctgggctttcctttcctagatcattccatggtatgcgttactaaaagtgcaccacagactcagcagcatgtggtatctagacattctctaaggcaaatgacagatctcagctgggctcaaaggttccctcttggcagtggctcacacctgtaatcccagcactttgggaggctgaggctggcggaacacctgaggtcaggagttcaagaccaccctggctaacatggcaaaacctcgtctatactaaaaatacaaaaattagccaggcatcgtggtggctgcctgtaatcccagctattcgggagactgaggcaggataatcacttcaacttgggaggcagatgttgcagtgaacaagatttttcactgcactccggcctgggtgtcaaagcaagactccatctcaaaaaaaaaaaaaaaaagttccctatctatagccttaggggggttttgacttttaagtcttttctccactccatttcacgtctcacaaagacaagttttaggatttaggatggttggaagtagagatttgtgatatatgaagataggaataaaacaaagcaagatccattagacttcaggaagattttttaactgtactcttctgcagtatgccagggtttcctttcttggagctttttaatatgaataggcctttatctgtagtaaggtgtggcactacttggtcttgggtggcagtagaactgactgaacattgtcattctctggtattaacctagtaggactgatagcccaggacggaacaggacgaagccctctacagcctaggctgagacagaacagagacaaacataccctcttcccaggctctggaacagagacacttttttaaagtgagtgggagggaaggggggttgtagccatagggcggcccatgcacgtgcctgagtggttggactggcttttaatttttttattt

SEQ ID NO: 206321 - DNA, 1000 bp, Homo Sapiens
aggtggagaacacccacagccacagacagaccctgtccaccccatccccaagactccagcccacacccacacatcagcccagccattgaaccagccatgcactcagtccaggagccagggtggatttccccatcctgcccagcgatgagcggaccccttctattctctggctgtgctcacgtccaggttggcagatggacagagctccctgctactcaaggtagcaattctcaggctgtgacgacacccccacacacctcttcctaaacatttgcgatcagagagggacagcaagtggtaagtatcagatggaagctgttgccttcaaagaaaagccattgtttcccaaggcacttttgtaggtggtaaaaaccattctacagttcacagaatctccacggctcgggtcagtccctaaaacggaacgaggggacctccctagagcgtctctcgctccatcacgacctcaccctccaacagtgaggtgtaaaagacccaaggctgggtcttggtcatctttgtcccatggtcactgggcactgattggttgggctaagtagaaatgaaaacctgtgtggggatgagaggcggctctccagccacagttcctcgggtgccttctctcttccccccacttcctcgatcctctgcagtgggggggcaagtgtggggtgggggttgcttgggccagaatatgtggggacatcagattcacagccacggcccaagagaaaagcttagtcaaggcgagactgttcagcttcaaggggggctccttgggctgaaggagaagctgctgaggacacctcaggcccctgcaccctccaccaggcccctctgccaggcacctcctcctaagccagcaccccatgctggccaaacaccctggaacccttgcccctggctgacccaggggagcaggtgttcaatgttggggccatgggtgtgagccaggcacagggcagagaggcttgcctgccattctctgcagctcagacac

SEQ ID NO: 206322 - DNA, 1000 bp, Homo Sapiens
atcacctcacccaggaagaactaagaaccagtctttccatatcatttttttctcattttgtctatttttatatctgaagcaaaggttcttaatattttcatagatggaattgactagacctagccctgtatatctgagcaagttacataagaattccctgtatgcttgttgaaaatgcagagtcccatgttccatttccaaaaatcgattcagtaggtgggactgaggaatctaaaatcatggtaagtcatccaggttatcctctttttttttgtttttgtttttgtttttttttttgagacggaatttcactcttgtcacccgggctggagtgcaatgccacgatctcagctcagtgcaacctctgcctcccggattaaagcgattctcctgcctcagcctcttgatgagctgggactacaggcacccgccaccacatccagctaatacttgtatttttagtagagacggggtttcaccatgttggccaggctggtcttgaactcctgacctcaggtgatccatccacctaggcctcccaaagtgctgggattacaggcataagccaccatgcctggcccatccaggttattctgatgtatgtggtcagttaactgtgacttaagggactgatctagtgacttgcttaaggttatagcctcaaagtggaacccaggattactggcttcaactccactggcagtaatactagcatggtgaatgtagacaatatgatgtggtgatcaccattttaagagagcattcatagaggaaactttatctcaaaggaatgcattgctttcaatagagtttgagataatggtaagtgataggttggtgtgtggtatctgggtaggagaagcttctcatcctgaaaatcatatgtaggtaatgctcaggttgctgaggcaggaagctagcccttaatttggggtcctgtaggtcacagagaatcccctggaattgccgactttgacttaagtgtcacttctagctacaa

SEQ ID NO: 206323 - DNA, 1000 bp, Homo Sapiens
gaaacaagacaccaagatatttaattatcttgttgactcctgtaaaatagctaaacactcatcattcgcggtgcaatactcatagacataagttcctgaaacaatagtttgcatgcgtaaggcattcgcaccaaagaaatctgaaaagaaaaaacaaatggtaattagcagaattgtattgaagtgaccccacttctctaccccagaaaaagacaaagatctggtactgtagataatgaataaatgagtggagctgagaacacacattctgctacctcagcttatggtggttctttctcctagtaggctttggtattttacccattctgccagacataatttatattcacccacctcaactaaaaggttttcaaaaactcattgtttaaaatcccttgtacaaagtcttattatttccaaaagatgaatagcttagagaaattaccacactaaaacctaaactggtttttagaaaaatcaaattatcttttccttatttagaactaggaatctcacagaagcatgctatcaaaattgtgaaaatgccaatctgttctgccacactaattctgcctggataatcagaccaacacagtttcctctaaacaaatatcaactgccagtaaagtctatacacacctgggttttattgcggcagcccctgcattcatatgtatgggtcctggtgttggcaatcgccattattccacaaagattgcaaacatgaacctgatatggatctgatgcctcaaacaatctttcccttaaaaactgggctgctccatgggcaatctgacaatctcgttccatttctccaaaacgcaggccaccatcactgttaagagaaaaaaattattactttgtacttattttttattataaacaccgccttgaataatggcaaaggtggagaataatatttgcaaagacggataactaggctctaatttttataccctagcattctctctattggtggggagaggagaagtctaccaac

SEQ ID NO: 206324 - DNA, 1000 bp, Homo Sapiens
atatatatatatatatatatatatgctattctaacaactaatatattacactaagtagtccaaagtattgaggactcatagctttgcacagtgagacttaaaatgatgacacacacacacatatatatatatgtgttttttatatatatatataaaacctgccacctcagcctcccaagtagctgggactgcaggcatgtgccactatactggctaatttttttgtattttttggtagaggcagggttttgccatgttccccaggctggtcttgaactcctgggctcacgtgatctgagcgccttggccttccaaagtgctggcattacaggcatgagccactgcgcctggccaaaatgacataattagctttgatttggtctactgctcttaatcaaaaagctttttcatccttgtcccctggacacaagggcaatatgaagcctgacgtctgtttcttacagctcaacaccatttctggttgatgtgctgccactattcctagcacttctcagccatggtcttcaaagttgtatttcactctattttcaaaacatttcttctgtactctcattttcttcctgttaattttcttcatgataacatctgaccccatttacttaagtaatccactgaggtctggtgtctactcaataattttgactaccctaggcagtttaatgatatcctaaggcttcctaatgtatgtcgtttcttgcctagacctgatatgggttaaatgctagtccctgaattattcaattcctgttagacggccttgattcaaatgacaaggaagaacatccagcttccgtgaatagttaaaaaaaaatttttttttccttaacccaagaaaatacacttgacggaggcagattactataacagcctaataattcagccaatagttttaccaaaaactattcagaatagaaaagtagctctagactaaatcgtggtgaatcagttgtctcaccatacagtaatgaaacaaacctga

SEQ ID NO: 206325 - DNA, 1000 bp, Homo Sapiens
tcaggtgatccgcccgcctcgacattcctatttctaaataattattacagatctgtcactcaccagttaaacatacaaacggcttttttggaggggatgacctatttatatttttaaatcttatatcctaccttattcaaaagtcctatcagttttcctagtttagagaagcaaagtgacatttttgtgtacatttaacaggactgcttaccttcacaacctgctcagtcggctttccctggacttctcctaaccgcccatttttcctggatttggcaccgagagttacagtatttcacgtgcgatgataaaatgttacttaggagaaacagttccaataccaagaaacttcagcaattttaaagcattttaaagccacaaaaccatgccggatccccaaaagggggtcctaactcctttacactgtcagaatctcaattttaaaagggaggagtagagaagagatagaaacgctctctgttggtgaaaatctgtcttacttaccatttccccaacacaggagagactaaggaatttcaggtaaaaatcagatggctccaatcctccgatactaagagcccatcgccccagttcccaggagttccgccagttagactttttcccccatggcctcgctaaggctagttcctcgtcacgtgacgtgacaggcttggtcacgtgacataccagctccttccattcccgtgtgcggggggagggggaccaacaaaccggaggccctcgctcttccaatactcacgccctagctacagaggtcaaggaaggtttccccaggagcagttttggtttcagacggcgccgtctcccgcgaaagtcctgagaggagcccagccttttccgcctgccgcccccggatgggatggttgaggccggggccacgccccctctgcccccctgcgagggcatcctgggctttctcccaccgctttccgagcccgcttgcacctcggcgatccccgactcccttctttatggcgtc

SEQ ID NO: 206326 - DNA, 1000 bp, Homo Sapiens; identical to SEQ ID NO: 114916

SEQ ID NO: 206327 - DNA, 412 bp, Homo Sapiens
ccaaaattcctccacagcgatgtgagagactgatcaacaactgcaggaagtatttggttgcagtcattgcagctaaaggtgacacaaccagttattgagtggaagaaggcaatttctttttcacacaggggaattgggtgatgcatgactttgttaaataatttttatttttattgttatttgtaaactcaggttccctttatctaaaattaggttttggttgaagatctgataacattcaataaaaaatatgcaaaaatagagaatctgaatgggggcaaatactttttcacggcactgtatgatatggtctttagagtggactcagcttgtaaattcaaggtaggttttccatgaaaatattacacaatacacactgcaccattctatgacatcaatcacctgaataggg

SEQ ID NO: 206328 - DNA, 503 bp, Homo Sapiens
aatcgacgacatcagctgctccataagttcccacacgaattgcttgattcattgaagaagacgaaaagaagcagcccgaaattgggtctgtagctcagttggttagagcgcacccctgataagggtgaggtcggcagttcgaatctgcccagacccaccaattttgtgtgggaaacgcctgtagaaatacggggccatagctcagctgggagagcgcctgccttgcacgcaggaggtcaacggttcgatcccgtttggctccaccattaactgcttctgctgttagagtttagaaatgaatattctgaagtgaatattgatttctagtctttgattagatcgttctttaaaaatttgggtatgtgatagaaagatagactgaacgttactttcactggtaacggatcaggctaaggtaaaatttgtgagttctcttaatcgagaaattcgaattttcggcgaatgttgtcttcatagtataaccagattgcttggggttatat

SEQ ID NO: 206329 - DNA, 1000 bp, Homo Sapiens
gcttggactccatccctgaaggtcttcctgattgatagcctggccttaataccctacagaaagcctgtccattggctgtttcttcctcagtcagttcctggaagaccttaccccatgaccccagcttcagatgtggtctttggaaacagaggtcgaaggaaagtaaggagctgagagctcacattcataggtgccgccagccttcgtgcatcttcttgcatcatctctaaggagctcctctaattacaccatgcccgtcaccccatgagggatcagagaagggatgagtcttctaaactctatattcgctgtgagtccaggttgtaagggggagcactgtggatgcatcctattgcactccagctgatgacaccaaagcttaggtgtttgctgaaagttcttgatgttgtgacttaccacccctgcctcacaactgcagacataaggggactatggattgcttagcaggaaaggcactggttctcaagggcggctgcccttgggaatcttctggtcccaaccagaaagactgtggcttgattttctcaggtgcagcccagccgtagggccttttcagagcaccccctggttattgcaacattcatcaaagtttctagaacctctggcctaaaggaagggcctggtgggatctacttggcactcgctggggggccaccccccagtgccacccactctcactaggcctctgattgcacttgtgtaggatgaagctggtgggtgatgggaactcagcacctcccctcaggcagaaaagaatcatctgtggagcttcaaaagaaggggcctggagtctctgcagaccaattcaacccaaatctcgggggctctttcatgattctaatgggcaaccagggttgaaacccttatttctagggtcttcagttgtacaagactgtgggtctgtaccagagcccccgtcagagtagaataaaaggctgggtagggtagagattcccatgtgcagtggagagaacaatct

SEQ ID NO: 206330 - DNA, 1000 bp, Homo Sapiens
cttagctgagcgcgtgtcatctggccctggtcgtatccagggacttgtctgcaaaagagcgacgccaaggcagtcgccgccgacatgcaaacagctggcttgaatattgcattaagcatattcattgcataaaaacaccatcgacagcgcaagtcaacggggagagcagcgtgggaatcgggaaaggtaggagcggccagggaagcattgcggccgcgtggtgcaatgcaggtctgggcatggtgttagcgataacgttgggcgtcgccgcaacagctgttcatgcggaagatgtgctgacgaagatccgcgacagcaagaccatcacgatcggttaccgggaggcgtcgttcccgttttcgtttgtggaccaggataaaaaaccggtgggttatgccatcgacctgtgtctcaagattgccgatgcggtgaagcaacaattgaaactgccgcaattgaatatcgtctatgttccagtgacttcatctaatcgcattgacatgatcgcaagcggaaaaatcgacctggaatgtggctcgaccaccaacaacgcagaacggcgcaagcaggtcagtttcaccattgcgcatttcatggcgtcgtcgcgcatgctggtgcgggtggaagacaagatcaagaactggccggacctgcgcgacaagaaggtggcgaccaccaagggcacgaccagcgtcaaatcgctggtcgaccgtggccaggtccgttccctgaacatgaccatagtggaaggacgcgatcacaacgaatcgttcaagatggtggaagacaaggcggctgacgcttttgtgatggatgacgtgctgctgtacggcctgaaggctaccgccaaggatcctgcggcctacgccattgtcggcgagcctttgacaaccgagccttacgctatcatgctgccgaaaggcgataccagctacaaggcagtggtcgaccgtgaaatggggcgcatcatccacgatggcgagatcaacaagttatacgt

SEQ ID NO: 206331 - DNA, 1000 bp, Homo Sapiens
aacccacagacctcacacctgggggacagaggcagataagaaggtgcgagggccacagccctgggagggggtcctgactcacacttactgcaaaggcttggctcccgaatgtcgcatttggtggacgagaaggtgcttccgctgcttgaaggtttgtccacattcgtcacagatatagttccgcacctctgagaggggagagtccagtgagtccaggcccctgatgctccaacctcccggggggacgacgatgacaatgtgaaaccatcacagctgggaagacatttctgcacatggttcaccatgcagtgggcccaagcaaggggcctatgagggcctcgtttattaagatctttaaactgctttatacactgtcacgtggcttcatcagctgtgtgcatttcaggatggtttttaaagaaacctcagaaagctatttccttaaccacagattcttgtctttttttttttttgagatggagtttcgctctgttacccaggctgcagtgcggtggcgtgatctcagctcactgcaacctgcgcctcccaggctcaagcgattcttgtgcctcagcctgccaagtagctgggattacaggcgcccccccaccacgcccagctgatttttgtatttttagtacagacagggtttacaccatattggccaggctggtcttgaattcctgaccttgtgatctgcctgcctcggtctcccaaagtgctgggattacacgtgtgagccaccgtgcctggcctacaaattcttaaaggaagccgtatcactaaggttgtatagaatactgattgtcacagctatggctgttctctagaattcatctccatatgagaggggtccatacccagggtctgggggtatgcattgctgtactggctctggaaatctttctcacacccttgaacaaagagatctcacttgctagtccacaaatgccacatgtggacatgcagacccactcaccctgtgctgcctccacatctg

SEQ ID NO: 206332 - DNA, 1000 bp, Homo Sapiens
acctgtcagaggacgaggaggacagtgaggatttccactccattgctggggacagtgacttggactctgatgaatgaggcttcctttgggcctccttggtcagccttccctgttctccagcctaggtggttcacctttccccaatttgttcatatttgtacagtatctgatcctgaaatcatgaaattaactaacaccttagcctttttaaaagtagtaagtaaatgataataaatcacctctcctaatcttcctggggcaatgtcaccctttgatttaaaacaaagcaaccccctttcccctaccactacggaaaagagcaagctcatttttccgtgtcctcctttatttaactccatttattgcttttggtataatttttccctggggaaggaggggaaattatgaaagaactagtaactttatgtcctcttgatgtattaggaaatttccggccaggcgtggtggctcacacctgtaatctcagcactctgggaggccgaggcgggcagatcacctgaggtcagaagttcgagaccagcttggccaacatggcgaaaccgcatctctactaaaaatacaaaaattagccaggtgtggtggcgtatgcctgttaatcctagctactcgggaggctgaggcaggagaattacttgaacccgggaggcagaggttgcagtgagtggaggtcacgccactgcactccagcctgggcgaaagagtgagattcagtctcaaaaaaaaaaaaatttccaagcatggtatcatctcacttttctaatttacaggctggagcagatgagagccctcctgctgggacagagaattgggttctagtggactctgtgctacacttaaacctgtgagacaaaccgcccattattttattatttaattatgcaatgcctagttcctaaatggattggaggcaaattaccgtaaattttgaaacagcctatatgtcagaaatgataatgttgccacctaaatgttttctgtg

SEQ ID NO: 206333 - DNA, 1000 bp, Homo Sapiens
atacaaaattaccatgcagatatggggggaaagtccatgtccagaaaaaacttggtttgcaaaccttagaactatgtcattgcaggattatgtgtgtgtgcccgtgtgtgtgctcacaggctttgaagagttttatgagtatccattatccaaaatgcttggaaacagaagtgttttggattttagattttgaaatatttgcattatacttaacaagttcagttcagcatccaaaacccaaaatgctccagtgagcatttcctttgagcatgtcagtacgcaaaaagtttcagattttggagcacttaagatttaggatttgggatattcagcctgcataatcaaacctccttcattcaggaatgtaaaaggaggtattaatatgagcttagaataaagaacaccttagacctctggcagcgtggtgggctgagatgacattaatgggtagctgctcaccctccccacctcactccctgctttaagcacataaaaatgctagatgagctgggtacagcagctcgcgcctgtaatcccagcactttgggaagctgaggcgggtggatcacgtgaggtcaggagtttgagaccagcctggccaacctggtaaaaccccatctctactaaaaatacaaaaattagctgggcgtgttggtgggcgcctgtaatcccagctactggggaggctgaggcaggagaatcacttgaacctgggaggcggaggttgcagtgagccaagattgtaccattgcattccagcctaggcgacagagcgagactctgtatcaaaaaaataaaataaaaatacaaaattagctgggcgtggtggcacacgcctgtaatcccagctacatggaaggctgaggcaggagaatcgcttaaacccagaaggtggaggttgtagtgagctgagattacaccattgcactccagcctgggcagaaagagtgaaactccgtctcaaaaacaaaacaaaacaaaagctagatgaaatatatct

SEQ ID NO: 206334 - DNA, 1000 bp, Homo Sapiens
ccgacgtttggaatttatgaggaaaggtacaagaattcttctaggccagtaagtgacagaactgcatgtcccagcctgtgcagccccttgagtgcatgttctagagccatcagctctagagtccttccggttgtcaaggtgggtgttgtgggtaaaacacacattccttccacctggagaacagagcagccctatcctcatggcacctggttcctaagagtgtgcagaagccgctgacagcaccatatggtggtgctggggggaagacgacaggcagctgggtgggactccaaagcctctccagggggcagagccctgtgcagcttctgcatgagctgcggtgggcagggtggggctggcaggagttgagcagggcctccgagggaactggagggcttacagctaggggcatctggaggaggaacccaggacagtgctgaggtgcagggcactggaggcaggagacgtggctgagttagcctctgtgttggaggcaggactgatgggtatccggggggaggcactcttgacctgccctggatttccctgtgagttgtgatgcttcctactcagctactgatacctgcaggagagctgcctttaggaggcttccaggagcagcctctggagcagctgtgttaccagggagcctgaggccccacagaggcacctgaggtgtcaaatgggtcccgctctcctcggaagctgggagtactggaaggtaagggctttctgagggcacagtgaacctgtccaggccactacgtgaacatcagcaagcccaccatgtagtctcgggaccccatgcgctggatctcgtggtaacaggtaaccccctcgtgaccagcttccgtgtgttccttttgatttgcccagggtctcgagtgccacctctctaccctgtgagatacgcagaggaccctgtaaatgccgtgccccgcatgcctcggcctgggcgtgagccgtacgcgggggaggtggtgacgtttgtaatccagac

SEQ ID NO: 206335 - DNA, 1000 bp, Homo Sapiens
ttaacttaaattttaagcttgaagattaggtactatctgtgaagttacacttttttttttttttttaaaggtagagatgtgtgtgtgtgtaggtattaaagatgtgttgttggtttccaaaaaggaacactggaaaataaattttgaatgtttatgttctcagaatcaggttgacagtcccttgctgacatggctttgctttgtgtaaatacagtggatctcaatcttcggggtgtgatgaatagcgaatcatctcaaatccttgagcactcagtctagtgaagatgttgtcattatgtacaatacataactagtttaattaactatgtgatgttaactattattaataaattttaacattttccaaaataatcaaatgtgattcatgagtgtttttaagagagtagtcatcttccggtcgtatcagtacttcctggccagcccgatgagtaatttatgggtgtcttgattttgagtgtgtgtgtttgagaggcatgtggcttttccagaaactcagtcccagtggaattagaaggcagcttttcctggactgccttggaccccttagatttcaagccactgaagagctatggctagtcctgcagtctactgtttaaatagcttggctgaaattagcaccaccctgagggcctctggctggtcttggttggcaaatgtgattcatattcaggatatatagctctcgtgaacatccaaaaagcacttgcctctgtcctctccctaccaagcttttccttctccccagtaagcagaacacaggtctggggagtaaattcatcaaaagtccctagtgatacccattaacattcacatggccctgtttgacaataaccgagggaagaagatgaccatggctaagaggataatggagatagccaatgggtgagggaaagtttaaaattagaccctattttttctgatatcaaactggtgagattatgggagcattctcctacactgttggtggaagtatgattgg

SEQ ID NO: 206336 - DNA, 1000 bp, Homo Sapiens; identical to SEQ ID NO: 114949

SEQ ID NO: 206337 - DNA, 1000 bp, Homo Sapiens
cttgcttccacagcataaatgtaatttacatctgcattaaaggataattttctctgtgaataagagcaaaatggtcttcagagaaacagactgttcatttgaagccatttctgtaaacatcttccaagatagaactgtaatggattgaggaaataacacagaaaagacaaaaacttttgatttcaggcatgcaaagtgcgtgggcagatggacagttcccattgtgcattgcctttgataaattgggccttaatttatataacgatgctgtgttcacatccctctcctacctaaagttgtctttattggtttatattgtgttaaaattagcttataattattacttttgtattgtgttcagttttttaagttgcatgtttatactatttgctacagtatttttaagtttggggtgaaggccatcagctgtatcaaaaagacaaaacaatcactatttattcagtattgctgctttacatctccagaataagctttcgatgccaggacagtgactgcctgaaagctgcaggagctcttttcaatgcattttatatatttttagaaaccaaataaatgcagaaaactatttagtatactaattatattaaaccagcagaaatataaaggcaataaagtatatacatatatatggggggaggggaaagattaaaaaatagatttacagccagacatggtgatagccctaaatgtatttctcaatatgtttttctttattgaccctaggaggatttgagttgctgcagctttaacagaaaattgccatgttcactaattgtgagcacataaatatgcttttagtactgctttgcttatgtacaaataaatctgtaatatgtattatatgtaattatccttttctttgactttcattttaaatgtatattttctgatcattatgagctgtaaaacaaagaatcaatattggatattctcccaaataataaattttcaggattcattggggcaaaaaaaaaaaaaa

SEQ ID NO: 206338 - DNA, 1000 bp, Homo Sapiens
taatcattttgttcatcaactgttctggtaacttatttttttttattggaatcttaaattggaacaactgttacagaatgtatattgctccagttctaaagccagttaaccctgtgccctctaacttatgaaccttcatttcaaaacagtatgtgggaagtcctgtagtttgataagagtaaaattattttaaagaggataatttaccattttactactataaaataagttgatatcagttgaccattttattttttgatggactctttttgttgggagaaagaaatgaatggaagaaaaaaatatgttgcttttatttgaatattgattactaacaacttataaactacattgcaggaaatgaagaaatattttgaaattagcaaaatagcaacagtattcaagtatctgaaattttaatatggtgagtcttagagctttagactttcctataagtgacagtatctaagttattcttaatagtcacacttgataattctgctgaccataagcagctaacctacagttgaagatatttatgtgacatgaatagcctgtgttttaaaaattaaatattttatataaaattgaactgtgtttggatagtttttctaatcaaacatttcagttatatatttatgttgggagagtggctgggaggacagggaaattgttgctttgacattgaaaatttgaactagaacttctaatattatccttacacagcactactgtgagacatactagtcttttatatgtcacttagaagaaaaaatgttgccaattaagccacaatacaatgctaagacgtcatcaattgtaagctgcatcccagattcagacatattatatgaaaatatgtcttataattgatgaaatatgatagtaaaaaattttaatgcttcccttcatagcatttaatattttaattcagtgaatttggattaatagaacaaagttgggaaatcactagttctgtaggttataacagcagtcatcg

SEQ ID NO: 206339 - DNA, 1000 bp, Homo Sapiens
cccaggctggagtgcagtggcgtgatctcagctcactgcaacctccacctaccgggttcaagtgatcctcctgcctcggcctcctgaatagctgggattacaggcatgcaccaccatgcccagctaattactatatttttagtagagacagggcttcaccgtgttggccaggctggtctcaaactcctggcctcagccagtgatcctcctgcctcagcctcccaaagtgctgagatgacaggcatgagccactgcacctggccaaatttttgtattttttgtagagatggaatctcgctattttccctgggctggtctcaaactcctggcattaagggctcctcctatctcagcctctcaaagtgccggggttctaggtgtgagtcaccgagttgagcccctaaacacatgtttttctttttagagacagggtctcactcggttgcccaggctggagtgcagtggcgtgaccatggctcactgcagcctcaacctcccgggctcaagtgatcctcccacctcagccttctgagcagctgggaccacagacacacaccaccatgtcggctaatttttgtatcttttgtagagacaaggtttcaccatgttgctcgggctggtctcgaactcctgagctcaagtggtcctcccaccttggcctcccaaaatgctgggattacaagtgtgagccaccacacccagcccctaaaaacatttatgtgcatcgacatcagctttgatcagaagagcccctgctcctcttgggctgggaccccttcctggactgagtctgctcaccttggattaggccacctactgcttcttcctcttccttttctcaggctctgcaaggaagagctccagcttcctcttggagaaggagattctgggccccttttctctctcccaaacctaggtggtggccatgcccctcgagctctgcttggcacgtgtctgccagtctcagggggctccatgggagtgaggaagggctcggcgg

SEQ ID NO: 206340 - DNA, 1000 bp, Homo Sapiens
ttttctgacaaaaacttgcaggaatctcttaggtgtcttcagtgttggagtgatatgttgagaggcctttggagtgatgtgctgaggtctcaggcgcccacctccctggctgtcacttccatgtgtcagtggttctcccactttagcaggtatcagagtcacctggagtcttgtcaaaacaggtaccagccccacccgcagcgtttctgactctgggtagctctgggatggggcttgagaatttgcgtttccaaaaaggtcccaggtgatgctgcggttgcctgcgcagggactggactttgagaaccacttcactggttattcacatttctgcctctgcagtgagacagccttgaggtctgcctcctgctaagagtcacatgctcctgtcctttagaaatgtgggctcctgccatctccaggacgcaggcactgttcctgttgatgaaccctatttcacaggacccctgctaaggtgatttgaggggaaatgagaggaggctcaaataatcacccagcccctgccacttactgaaagtgtaggtccttgtgccccacaccatcagagtttctgcgttagcagatttgtggtttgcccagcagcctgggcgtgtgcatttctaatgggtgcctcaagtgatctgtttctgatttgtatttctattgtgaagagtcagcccagtactgcaggcctcttacctaagcagaatcccagtctggcatcaaagctttagaggacaagttgattcaggcagagaagaacttgggctatacaagcgctgttcttcagcattgaagtattttggaggcattagatagtttaaccctttctcagtcaaggaatatttacagaacatgatctctgggcattgtaactcctggtcttagtggggaatatagggaccccatgtctccatggggtgcacagaatgtctgtgagactgatggagtggagaacgccatcccccagcctctccagctactcgaggcattctgtaga

SEQ ID NO: 206341 - DNA, 1000 bp, Homo Sapiens
tattcgcctacacaattctccgatccgtccctaacaaactaggaggcgtccttgccctattactatccatcctcatcctagcaataatccccatcctccatatacccaaacaacaaagcataatatttcgcccactaagccaatcactttattgactcctagccgcagacctcctcattctaacctgaatcggaggacaaccagtaagctacccttttaccatcattggacaagtagcatccgtactatacttcacaacaatcctaatcctaataccaactatctccctaattgaaaacaaaatactcaaatgggcctgtccttgtagtataaactaatacaccagtcttgtaaaccggagatgaaaacctttttccaaggacaaatcagagaaaaagtctttaactccaccattagcacccaaagctaagattctaatttaaactattctctgttctttcatggggaagcagatttgggtaccacccaagtattgactcacccatcaacaaccgctatgtatttcgtacattactgccagccaccatgaatattgcacggtaccataaatacttgaccacctgtagtacataaaaacccaatccacatcaaaaccccctccccatgcttacaagcaagtacagcaatcaaccctcaactatcacacatcaaccgcaactccaaagccacccctcacccactaggataccaacaaacctacccacccttaacagtacatagtacataaagccatttaccgtacatagcacattacagtcaaatcccttctcgcccccatggatgacccccctcagataggggtcccttgaccaccatcctccgtgaaatcaatatcccgcacaagagtgctactctcctcgctccgggcccataacacttgggggtagctaaagtgaactgtatccgacatctggttcctacttcagggccataaagcctaaatagcccacacgttccccttaaataagacatcacgatg

SEQ ID NO: 206342 - DNA, 1000 bp, Homo Sapiens
tattcgcctacacaattctccgatccgtccctaacaaactaggaggcgtccttgccctattactatccatcctcatcctagcaataatccccatcctccatatatccaaacaacaaagcataatatttcgcccactaagccaatcactttattgactcctagccgcagacctcctcattctaacctgaatcggaggacaaccagtaagctacccttttaccatcattggacaagtagcatccgtactatacttcacaacaatcctaatcctaataccaactatctccctaattgaaaacaaaatactcaaatgggcctgtccttgtagtataaactaatacaccagtcttgtaaaccggagatgaaaacctttttccaaggacaaatcagagaaaaagtctttaactccaccattagcacccaaagctaagattctaatttaaactattctctgttctttcatggggaagcagatttgggtaccacccaagtattgactcacccatcaacaaccgctatgtatttcgtacattactgccagccaccatgaatattgtacagtaccataaatacttgaccacctgtagtacataaaaacccaacccacatcaaaaccccctccccatgcttacaagcaagtacagcactcaaccctcaactatcacacatcaactgcaactccaaagccacccctcatccactagaataccaacaaacctacccacccttaacagtacatagtacataaagccatttaccgtacatagcacattacagtcaaatcccttctcgcccccatggatgacccccctcagataggggtcccttgaccaccatcctccgtgaaatcaatatcccgcacaagagtgctactctcctcgctccgggcccataacacttgggggtagctaaagtgaactgtatccgacatctggttcctacttcagggtcataaagcctaaatagcccacacgttccccttaaataagacatcacgatg

SEQ ID NO: 206343 - DNA, 1000 bp, Homo Sapiens; identical to SEQ ID NO: 206317

SEQ ID NO: 206344 - DNA, 1000 bp, Homo Sapiens
aatttctaaactctagccatacctacctcacattggaacacaaacagggtacactccaggcatgcactcagataataagtaggatataattacgacaatatttggtctacttttagtaattgtttctggcacagaaaatccattttggaggaaaaattgcaatgccttatctttctgaggcaaatcacatttgttcaaggcaaattatagatcctgtgaagggaaataacttaattacttaaaatagaatccaatttggctgtacatttttgctgccgtctatggatctggggtaattcaaagtggtattcatattctacttgaggacacaattagatttcagataggaaattatcttgaggtttcttggttttccctgagaagcctaattggatcacccttcatttaagcatagttttacatgcactctctcaaaggcttagtcttaaagccacaaccattgagacagacttcacttgaaccctctctataaatatttattctccgggagacaatagaagaaatccttggaaggcatgctttttctttctcatcttggcttgaaacctccttaccccagattcctctcctttaccgtggagtcacaacaaaaggaactgagccaaaacaaaattcccagtgtcaccagtcttaatggatatttcattctcccttggaacaaagatggaatagctttttttccaaaagaaaaacaagccttggctctctccctgccccaaaagggtgccccccacccccatcattctctgtcccaaccctgccatgttagagcgtctccaaagccttccctgtgtcgtggtttgtctgacaatgtggggaaacccagtctgctggccagcccttgcatgaagtagctgattgttccctctcctcatcccttatgaatggggcccttgaagttcagtcatgtagattcagttgtataatgaaagctaaaatatttaaattgtatgcatgctgccaataacagcatacatct

SEQ ID NO: 206345 - DNA, 1000 bp, Homo Sapiens
gactgaggtaggggtcagccctccctcctgagctgctcccccagcgtctctgtcaccttcttcagttcgtctctcaagtgctccagctgctccacctccttttcctggtggggtcagaaacggggtagtcagcacccaccttcaaaggcaggccacctcggtcactgtgattgtgggccatgtcggttctcataagtggcatccagcagcggtcgttctgatcgtcgtggaccgcgatggtgaccatgctgattgccataaccccggaagagtggtgctggctaacgcgaccacagccaacagcagtagcttgggactggcaaaggtgcctgggatgagcacctcgtgatggcgctttatttttatttttaagatggagtctcgctctgtcacccaggctggggtacagtggcacgatctcggctcactgtaacctccacctcccgagttcaagtgattctcctgcttcagcctcccgagtagctgggattacaggcatgcaacaccatgcctggctgattttttgtatttttagtagagacagggtttcaccatgttggccaggctggtctcgaactcctgacctcaggtaatcctcccgcctcagcctcccaaagtgctgggattacaggcatgaaccaccgtgcccagccattttttttttttttttttaagatggttttgctctgtggcccaggcgggactgctgtggcacaatcatgactcaatgcagcctcaaactcccgggttcaagcaatcccaccacctcagcctcctgagagctgggaccacaggcgtgcgccaccattgctggctaattttttaaattatttgtagagtcacggtttcactatgttgcccacgctggtctcaaactcctggcctcaagggattctcccaccttggcctctgaaaggattaaccctccctaggattacaggtgtgagccaccatgcccaccctgttacggcacttttggtgccaccaatcatggtgacat

SEQ ID NO: 206346 - DNA, 300 bp, Homo Sapiens
acagtgccaggtggggagtttgactggggcggtacacctgtcaaacggtaacgcaggtgtcctaaggcgagctcagggaggacagaaacctcccgtggagcagaagggcaaaagctcgcttgatcttgattttcagtacgaatacagaccgtgaaagcagggcctcacgatccttctgaccttttgggttttaagcaggaggtgtcagaaaagttaccacagggataactggcttgtggcggccaagcgttcatagcgacgtcgctttttgatccttcgatgtcggctcttcctatcatt

SEQ ID NO: 206347 - DNA, 1000 bp, Homo Sapiens
agagggataaaacctgaatgccatattttaagttaaaaaaaaaaaaagcaaacacaaagatgcttcaagatcttcaggagaagtatggtatacaagtttcagggaccctatttgacaattttcagagtgctctctatgctgattccgagtcgagtgtgtcagctgtgattacagtgcctgtggatctaggccgggttgggggggtgtgggcgggggaagggaagtctggcccggagcaattgctcctgccggtaaccccagcactttgggatgcctaaacaggcgtatcgcttgaggccagtaattcgagaccagcctgggcaacatggcaaatctgtctctacaaaacaaaattagaaaaattaactgggcgtagtggcatgtgcctgttgtcccagctacttgggaggctgaggtgggagaatggcttgagcccaggaagcggaggttgcagtgagccaagatcatgtcactgcacttcagcctgggtgacagaaccagaccctgtctttaaaaagggagttggtggggagaggttctagaatgtcatgtagcaaccagtttaaggactgggactcagggatccaactcccacagtttccctgtgtgaccctaggcatttgacttagcctttctgagcctcaggttttttgtttctgaagtaaaaggattggactaggtaatctccaagatcctaggaacccaggagaaagatgagaaaatgtacaagaatgaacactcaggtggaaatgctgcaatcctgagaagctcccaggatgaatgaaaggcacaggacctcttacccctcacccctgcccccctcaagagctggtttctcaaacctttctcttaggccccttcaaagggggaaaactaaaaattatacaagttatagttcaaggactttaaatagattatttatatgattgctcataaggatgaggctgtgaggagggaacaccttatttaatctaatgaaattccataggaaagaggcctt

SEQ ID NO: 206348 - DNA, 1000 bp, Homo Sapiens
tcgggcttggtggggaagcgggtccgtgccaacgtgccgggcctgggcgaggcgatcgggcgttcggcgggataaaaccctccggcgttcgggaaccgagctcggtcccgtgccttggccctaccgcggaacttccttgctgcgaggtgtccgccgtcggtcgcgggctccgtccaccctttgcggggcggacgtcccgagggcgggcggtctacctcttcggccgccattcaacgatcaactcagaactggcacggaccgggggaatccgactgtctaattaaaacaaagcattgcgatcggcccccaacgggtgttgacgcaatgtgatttctgcccagtgctctgaatgtcaacgtgaagaaattcaagcaagcgcgggtaaacggcgggagtaactatgactctcttaaggtagccaaatgcctcgtcatctaattagtgacgcgcatgaatggattaacgagattccctctgtccctatctactatctagcgaaaccacagccaagggaacgggcttggcaaaatcagcggggaaagaagaccctgttgagcttgactctagtttgacattgtgaaaagacatagggggtgtagaataggtgggagcttcggcgccggtgaaataccactacccttatcgtttttttacttactcaatgaagcggaactgggcttcaccgcccattttctagtcgaaggtccttcgcgggccgatccgggttgatgacattgtcaggtggggagtttggctggggcggcacatctgttaaaccataacgcaggtgtcctaagggggactcatggagaacagaaatctccagtagagcaaaagggcaaaagtccccttgattttgattttcagtgtgaatacaaaccatgaaagtgtggcctatcgatcctttagtccctcgaaatttgaggctagaggtgccagaaaagttaccacagggataactggcttgtggcagccaagcgttcatagcgacgttgctttt

SEQ ID NO: 206349 - DNA, 1000 bp, Homo Sapiens
taggtcagagaatttatttatggccagctcttacatagttaggtgaggaaagattagagtactatctttaagatgtaagtctggcattgtggaaagatggttccagtttctatgacctaccttggggaagaggaattcaagtttctgtggcttgccttcagggagaatgaggctgagacaggagggcaggataacatcagagaaaaactttgcttctgaggccttcactttgggttttctgagccccaacatctgctagtgttgtaaagagaacaattagggaccaagtgaggggaggaaagcatccatctctgcattctgatgctgggagacttatttccttgaaatgcaattgattttgcctctgctaagaggctctgctggctacccatgtactagccagtgtcctgcatgggtgctaggctgaattatttgtaattgtgcttaggtgatttgtaactcaggtatagggtatttaaatagtaggcaccctttttgcaccatgtgtttttttttttatctagttcttgtatactacagataatatttgaactttgtcatctcactgtaaaacttttgttcatttctcattatggtaataaatagctattataaccaacccatttattcaaatatgttatttccctaagtgttattttgacattttgttttggaaaaaataaatcaccatagataataatggtaggatctatttgctgaccaaatgtcagatgttttcaggtgcttgacatgcattaatccatttgattgcctccaaccccacctaccagccaacgtggtcttcagtcattgggtttaaacctcaatatattaagtgtgatcatacaggactttgcagcaggcttaatttcatacttcagccatgctcattatagcttccattccaacctttctcttaatttccttatatcgcttgataccattagccattaagttcctttgtggtcacaggcaatgtgattgaaccatattcagctcc

SEQ ID NO: 206350 - DNA, 1000 bp, Homo Sapiens
ccagggcgggggagtgaaagggccaatttaatgagaaactacaaactgagactgggccacgattcacagtgacaggaggccatgcagtggcagtgcgagaccaggaaggacagtggcaggatacagtggtccaggtgagcaagttcacaaaccattcaggaaataaagacagggcgaggctggtgtccaccaaggcagttctaccacttgtggctgctccttcctcgtccctagcccagtgtgcctgcaggagcaggtgtgagcaggcacagcaacagcctgtcagctggggtgaggggcccggcacttacagggaagaaaatccatggagaaggctctgcacatccaagcgcacccacaagggggaccctctgccatctcttgcccagttgggatacaccagccaccaggcagaggtcatacccacacgcagtgaggacacagggcagacgggaaggggctaggctcaggggctccttccggccccagcaatacagggttcacagaggcatggcctgaaagggggtctgcacactgactcaaagggacaagttccttcttagctaccagggtctgatcattcacccaggtacagtgtcctctctacctgacaccaggcagctctcgggcactgggacagggtattagacatcctgggcttctatacctgagagttctgagggccagagttggcagttttacttccagccaccatgccccacctctagcaccccagaggcgcaaagtacccagaaacaaacccaggctttgtgaccctgtcctacgtgggcccacctgactccagacaacttacccattctcggcccagcaggtcagaaacgcctgtggccacaggcctggggactaactggctaactgctctggctgctgttggtcccagggggaaagagtctggactgaacctgtaccttgtttggaaacagaggcatcaggaccccagcaggagacccctcccagcttatcttcccgatcacacaca

SEQ ID NO: 206351 - DNA, 1000 bp, Homo Sapiens
aatcaagaacgaaagtcggaggttcgaagacgatcagataccgtcgtagttccgaccataaacgatgccgaccggcgatgcggcggcgttattcccatgacccgccgggcagcttccgggaaaccaaagtctttgggttccggggggagtatggttgcaaagctgaaacttaaaggaattgacggaagggcaccaccaggagtggagcctgcggcttaatttgactcaacacgggaaacctcacccggcccggacacggacaggattgacagattgatagctctttctcgattccgtgggtggtggtgcatggccgttcttagttggtggagcgatttgtctgggttaattccgataacgaacgagactctgggcatgctaactagttacgcgaccccgagacggtcgggcgtcccccaacttcttagagggacaagtggcgttcagccacccgagattgagcaataacaggtctgtgatgcccttagatgtccggggctgcacgcgcgctacactgactggctcagcgtgtgcctaccctacgccggcaggcgcgggtaacccgttgaaccccattcgtgatggggatcggggattgcaattattccccatgaacgaggaattcccagtaagtgcgggtcataagcttgcgttgattaagtccctgccctttgtacacacccgcccgtcgctactaccgattggatggtttagtgaggccctcggatcggccccgccggggtcggcccacggccctggcggagcgctgagaagacggtcgaacttgactatctagaggaagtaaaagtcgtaacaaggtttccgtaggtgaacctgcggaaggatcattaacggagcccggagggcgaggcccgcggcggcgccgccgccgccgcgcgcttccctccgcacacccacccccccaccgcgacgcggcgcgtgcgcgggcggggcccgcgtgcccgttcgttcgctcgctcgtacgttcgccgcccggccc

SEQ ID NO: 206352 - DNA, 1000 bp, Homo Sapiens
tgttaccacatgtgagtgcaatatccagaactcctgaatccccttcttcccctaaaatgtcagcccgctgaggtccacttggctaccctcttgaatactgcatccagcttcccactgctgaacctctttactctttttttttcagttgcacttaccaccttctagtaagttgaaccatatgaaattaccatttttgcaggtaaaaaatggccggtgataggcagtttggcgtcgtataacccaataacatgttatataatttacccacaagtggtgggttgctatgtcctggaggagtcagcttcagactctagctaaatgattgtataaccttgcagctctcccctaagtgaggaggcaatgttgaaagtcccatgtcttatcagaaccagggaggcagatgagaaactgccttatggcagctcccacaacatagggaggtgggtgacaaatggccttgggacagcttcttcccaagactggttatgttacagtgttcctgggaggatcacatggcattcctccaagatgggtcagactgctgttggccttgtctgtgtggcgtatgtgaagacattcatggcagagctgttcccttagaagcatctactaaattgatcttttcctttcttacttactgtctgtctcccttagtaggctgtcagctccgtgagtgcaggaccttgccagtcctggtcactgctatatccccagcacctacaagagtgcctggaaaattgtagtgctcaataaatatttgttggataaatgatagaatgataggaagttaaaaagcaattaaaatacttgaaaagaagcaaaacatttttcatgttaagcaaaaaaaaaaaaaaaacttattaaggatagctaacatgtattgaattctatatgcaatggaatgatacttagcgcctttgaatccttatgataaccctataaggtaggttgtttgggtttttttaattgtcccaactttacagatgaagaagtgcaggtc

SEQ ID NO: 206353 - DNA, 1000 bp, Homo Sapiens
agagccccaaccacagcagatgcttcctgggcagccactggccaggccgttgtatccatgtcacccttagttgtgggcattcatgaaagcaatgcgcttgcttcagcacattgggatgcacagaaacgtgagggcaggggggcagttgtggtcgcccctccccagttgtgcatgtacccggctacttaggtatgcttaggggagctggtggccaggggtgccccttcaggcctgctctcacagtgaaaccacttcaagacagggcaggaagttaccttcctggtgcacacaccgaagtgctcgagggagaggctgccgccccctctccccttccctggctgtggacactggcagccaatggggaggcggcctctcccctgttgctgcccgtgtccacacaggaatgtacactggtggcagaaacatgcatttgccataaataattcagaaacacttgtatggtcctgtaaaacttctctggtgtttgttgacttctgcctgtgggtctgaggaagggagaaggcagaacccataggcagtccctgggcaagggaggattttcccggccgcagcacagccttccattcatgtgcacgtgagtctggtgaaaatggccttgtgaagtccagtgtctgtcatgcccctgagttcttttggtcccagagaggcagcctgggcagtctgtttacagctggcaaacagactggctggcaagttgtggggctgggtcagaaagtgtctggacttgtaatcgggtgccctgctgtccacaggtggactctggggaagccaggcccctggatcccaagtcctttgtgtccggagcctttcctggcctgtgcctggagggtagcacatctttccagcctcccagggctttgcagcctgcagatgccacctgtccctgagagaagttagcgtccctggccctggccggtggtctctcatccttgtgtgctgctctgctaagagatgtccaaggcggagccggggcaagatc

SEQ ID NO: 206354 - DNA, 1000 bp, Homo Sapiens
aaagtttgcagcctatacctcaataaaacagggatattttaaatcacatacctgcagacaaactggagcaatgttatttttaaagggtttttttcacctccttattcttagattattaatgtattagggaagaatgagacaattttgtgtaggctttttctaaagtccagtactttgtccagattttagattctcagaataaatgtttttcacagatagacttgattgtgtcttcctatttgcaaactgcctttggagctttctgtctacttttgtgcactattttacaaaaatcccaggagaaacatgaggcaggtggcttcagccccactttacagatgagaaaactgagacccaggagatgacggtgacgggctgaggtcctaaccgcagcctgggaggtgctgggctgttcactttgcagcgtcaagttgcaggggtcagcaaacgacagccaatgggacccaagtcaggacactgcctgtctgtaaataaagttttattgacaccaccacacccatttctttatgtatatagtggcgtttacgctaccatcagcagaactgagtaggtacagcagaaaccatctggaccacaaagctgaaaaatactcactgcctggccagcaaagcttgctggtctcttctcttgggaggatgacttgactgtaggagtctgagaccagcctgtagaccccaactctacaaataaataaaaatattagccaggtgtggtggtgtgtttctgtagtcccagctactcaggaggttgaggcaggaggctgattgcttgagccccagagctagaggctgcagtgaactttgattgcaccacggtactccagcctgggcaacagaatgagatgctgtctttaaaaacgttttaaaaaaaaaaaatcgggacggtaaaggggctgcgtcttgcagattaattaattcacatcaacctattactggtgccttttattgatggttaagtaaccatatgggcagatttgttt

SEQ ID NO: 206355 - DNA, 1000 bp, Homo Sapiens
caatgaaaaggggatgagttaagcacaggacagaaaataccttccatttcaatggcaaacatcactattactatgaatccaaggaatttctggtggctcatgtgcctcctgtcatcttagcaagatcttttccactcttctgcaaactctcccaggaaccactttctatcaaaccctttatcccctcctttggaaagaacttataagaaaattatattgtattcttatgcagggcaatctttccccatcccagctttgccagtggtgggggtgggggcagggctggctcaccttttgttactgaatatgtacaaaaggtgttctttcctaaaggaaataccaattctatccctaagaggaattctatcttccttccaggtcatctacgtcaaataacagcctctttttttaaaagaacatctttttcttctgtaagatctttattggagataattaccaccactccaacaataagggtggttaatatttactgagcacttactgtgagtcagtcattatgccaagtggtttacctatattatctcattcatccttccaacaagcctatgcatcaggcactattgtaaacactgactgataaggaaatggaggctcaaagacattacttagtttactgaaggtcacagaccagcagagaaggcttgaatctgggtctgaggacatcaaatctgggtctgaagacacttgcttttactactccaccacttacacccaatccaggcatgaggacagctcagaatactgactgatactttcttgttcaaaattggctttacacgctacaggcagacacatggctaatggcacctttgagtgatgacctattattgagtatgatattatcaggataaagaagcatttctgcacggtaaccaatgtatccaataatgtgtcattccccactgccgttcttccacatgtgcatgtcagttctggatagtacttcatgctatgcaggtaacacccagggatatagagc

SEQ ID NO: 206356 - DNA, 1000 bp, Homo Sapiens
acataaggctcagaagtaaatttgcctaagcagtataaagctatcattagaatccacattcctaagttgtgttctcttaggggatcatggaaccagtcattggtactacaggctattatgttctggagaactgtgaagaacatttaaattgtctctgattttatctatcaatgttttgaagtattttctaccagtgtctgtacttcacaagaaattcggcactattttttcaggcaaaactagtgagggacaggttggcttgaaaatcatgagactgttgttaaatcagatgctggttgatcacagaggggacttccagggaaagctgttatcaggtggctgcttcctggtgatgcagcctggctgatgagataaccctggctccacagatggcttagcaggtgctgtgatgatttggttttcttctcaattagactgagctgcacatggtgtttatattgcttggcacatggtaagggcttaatatttgaggtaattatgtagggcgtacactgacaagtatctgacccccccttcctttttgactcataaattggtcatcttaaccatttaagtgtacacttctatagtgacagagttagccctctgtccaagggatttgcatctgtggattcaaccaactttgggtcaaaaataatcaaaaaggatggttgtgtgtgtattgaacatgtagacttatttttcttattttcaaaatactatattttcttgtcacttattttcttgtacactgcagttgtaacagctatgtagcatgtacattaggtattaaaagtaatccagtgaagattgaaagtctaaggatgtgcctaggttatcttaggtataaatactctaccattttgtataaggagtttaagcatctggggattttggtatttgaagggggtcatggaaccaatcattggtactgcaggaagactgctctatattctcattgtgcatcaatctccagaacttcatcttgcagatgtgctgc

SEQ ID NO: 206357 - DNA, 1000 bp, Homo Sapiens
ctcgttctcccaaagtgctgagattacaggcataagccaccgtgcctagcctctaatgtttttttaatagacatagaatgatgacaaataattgtttaatgtgtattaaaagttggtgtttatgcattattaatcccttttatcacttagattcatcactgctatggatgctatccttaatatatatttacttttagtttcagcccacttgaagttttgtgccagccttcttacctaattaaacaacacttcagcagcgtggttgctaatgccaggtaaccaccatgtgttatgttagcctgcttggatcaattgtaattattactggaattgaattaattaatatgattttgaacagttcatgttcaaactaacatcctgtaaagtagacactgcaaggagttactgatgaaagaaaagttgttcataaaagaagcctccttttataattgacttgccttagacttatttaataatgtttcatagtattttttaaaaagtatctgaaccttgtacatatttacaattatgagacatcctatctaaaaatttatattttcgatttaacatttgtggctggcagtgataatttttactctctggtactatgaatcatctcattaaaatcctctcaactgaatgacattatcccaatttgcaaatgaaagagagacagagaacctaatgatttgcccctggtctatacctggtacttggaggtaggattcaaagccaggcagttctgactccagaggctgtgctcttaaccactctatacattacctctcaaaataaaagattaattggactcaagtgaaattgcttgtataatttttaatcaaaactatatgctggccacattaacttctgtgctgtcatcatgatcatagaataataacaacactcaatttatttctctatactaataactttgataaaatgttattatttattaaatctatttttcagaaaccaaaaaacagtaaacatgagtcaagat

SEQ ID NO: 206358 - DNA, 1000 bp, Homo Sapiens
accccccttcccttcctgcctccacccagcccaccctgggctccagcccaaactccctccgccgcctgccttgcagagtcctggccccatctatgccagtcagtctatccagctgctattcagggctggttagtgtgattgctttggcagaaggggtactccaccttcctgcctgccaggaaccctgaccctacgcctggcctcctgcgcctccccctgccaacagctgtttggcagtctgtgtgtctcggtggaattggacaccacctcaccaccacccttaccggaggggatggggaccttgataaggtggcaggggaagtcaggggcatctgagggtggtagggtctgtgcgggtggcaaggaactcaaagatgagctcatggcccctttgtgtttttgtggtccacatctggaggcaattacagatgttatccagtgggagttttgcaaaacacagctggagccagtggaggagcctggggaggggggactgccagagagaagaggagggggagcctagggctcccgcgctggagtgcggtttccccatcacgaggaaattgtttggccctgattctggaatcacaagatgctctctggagccaagggggagaaatgggaatggaggaccagagacaaaggggaaagaggtggaagatgggcttataaaaccccccactgctaaatttgactggtttaaaaaaataaaataaaaattaaaacaagcttcacaagcggagagaatttcagggtggaggcggcagggtcccgtgcttctgacgtgcctgggcctgcctgatccaccccagtgaggctgcccggggaccctgggaggtgccttagtgatcacaagttcccgctgagtgaaccgccaggtcaggctggggtgaggggagagcagagggctctgtggcttccgaaagacctgcaaactcggctttcactggccctaccccgatctgtccattgggcctgacccagtttctatggttccaag

SEQ ID NO: 206359 - DNA, 1000 bp, Homo Sapiens
cctcttgccacctgtctcccaactcctcttgtctttaaaccccactccttctcacttccccagaaactcattttcctgatgtccttcagctcaggtcctccctttccacacgtagaaacccactgtgtttctctgggtgaagcactctctatgcaaggtttaaccttttagcagaacacggagctggcaagggctttgctgtttcagccttctctttcttcctccttctccacactcccaacacccatgaatggctttctctatagggagatgaacaattgaaatttactttcttactgataaaaattatccttcccacacataccctaaaagcagatcaatatcccgaaattcggaactatcctgcagccttaggaagccattccaagaatagatcaaatgagaggagaatccacaatccaggcaaaaaattaagtatatgtgaacaagcgttcaaagacccttttaaaacataaggaaatatataaatatgatgctagaatgaaaaggaagttatgtcattaaattcaagttcttcattttgtagaagacaaaacagagattaaatgatttccctaaggttcacagtaagcaaaagtggtgatttaagcattttgttgtttgtttagctctttgtattttgattttagacagcaggaggcagtatctaccttgcagctaaagtggatatctattgttcttacctgcccagcatcccatcaccctacttctggggacaagaaactgcctcttccctttgtgtacaatcttcatgagatgtcacataggttgcctcaagctgcctgggctgagagaagagtacaggacccaagcttggcctatcagacactctcccaaaaacactggaggggttataggtggattcatcctggccatggggctctggagacactgcctagtgaatcctgcacccagacagattccctgaagctgccctgggccctgtccttctcatagcttaggtgtagggcttctcttc

SEQ ID NO: 206360 - DNA, 1000 bp, Homo Sapiens
agcttattactgccaacggtcaagaggattagactgggagagtgtgtggaagaagctagcttttgagggacaggacaaagcccgcccctccaccctgaaagttccccattttgctccctctctccacctcctgtttcctgaggtccacagagctagaataagacccacatctgcctctgctgagccccttaacaaagctcagagaccaagggagcaggaagtgacctggaagctgagcctgcccctcagctaaaggatggggagaagtcactgggtcgcatcccctgtatctccggcacaccacactgctatcctagcactgggaatcgacaatgggccaacccttcaaaatgacctggcatcagaaagaaagcctgagccctggcatgcttgcattctcccctcatttacttggccaacaacagctgtgatgcctctcctgcaccgcaggagtgtggggagcaagacacactcactctaattccatgaagcctgcagtctggcggctgccgtgtgagaagtgggtattttcatagattgtggtgcattcaggcatcagggaagcgtaaaacagaaaagacccctaacttaggcatcagtaaggatttgcttaaaaagcgctggtgaaggtgagacctgagaaaagtggattctttggggaggtggtctactgagcccatgagggctggcatggagagcccaggtggtatcctcctgtgaattggaaagggggcttattctagaagccggaggtgtagctcacacagggagtctggcatggggggcacagggcactgggtttcagcttccttattcccatcacttgtgggaggcacaaacacagctgagaaagctggacccccacggtgatggggtcccctcagcacggctgattgcatggagtggacactggatgcatattgcaggccgatctgattttctgtcacaggagtacaaggctgtgattcaacagcatcgggctttgctccctttctctgtg

SEQ ID NO: 206361 - DNA, 728 bp, Homo Sapiens
gtccttcgggatagtggcggacgggtgagtaacacgtgggaacgtacccttaggttcgggacaacacagggaaacttgtgctaataccggataagcccttcgggggaaagatttatcgcctttggagcggcccgcgtctgattagcttgttggtgaggtaatggctcaccaaggctacgatcagtagctggtctgagaggatggccagccacactgggactgagacacggcccagactcctacgggaggcagcagtggggaatcttgcgcaatgggcgaaagcctgacgcagccatgccgcgtggatgatgaaggtcttaggattgtaaaatcctttcaccggggacgataatgacggtacccggagaagaagccccggctaacttcgtgccagcagccgcggtaatacgaagggggctagcgttgctcggaattactgggcgtaaagggcgcgtaggcggacagttaagttgggggtgaaagcccggggctcaacctcggaaatgccttcaatactggctgtcttgagtacgggagaggtgagtggaactccgagtgtagaggtgaaattcgtagatattcggaagaacaccagtggcgaaggcgactcactggcccgttactgacgctgaggcgcgaaagcgtggggagcaaacaggattagataccctggtagtccacgccgtaaacgatgagtgctagttgtcggcatgcatgcatgtcggtga

SEQ ID NO: 206362 - DNA, 1000 bp, Homo Sapiens
ttttatttaatgtcataatgttgtcagaataaagagaaagatgaaataatttcatttttttgtgtaacttggtatggggctggggcacagaccaagattgacatgaaaggatgtgagatcgcatgtcttgtgtgactatctgcttctcagacaagcagttaggaactgagatgagatagtatgtgagggcagcaaaggatgaagaagggcaaaatgatgaaaggtgaggtggaaagaggttatgagatggtaaagaaaagttaacttctggcacttgattgccacttccgtcaggctggtcctgcctctctcccttgccttctgattgtttcatttcctgtttatttgatcatatctgaattagttcactggttagcctcttccttagttcccacttccttaccaaagccctaattatatttcctcttgtttgccttttctctcctactcttctctaacatctgcagccacactctccattcactccatgctgacaaggcagtggcaaacacttttctctgctgccagccactccactgttgactggattgctgccagccccaggcaaacctgtgaagttgtttcatactctgcttctctttgagtgcctccttctctccttcctcttcctttctgggctccagtctttctcttcacttgtgcttgtcagaacctccctgtgatactgcctccaggcatttcccccatgttggctcaccgcactattatctttgcttatcaacttgcattcagctggctggcatgtttcaaaaccacactgccctcccaggcctgtgtgccttttgagaaagaccagtgctggatgagcctctagtaatgacaacattttagttgttagtggtataatacggaagagatattttgcacaggctgctttggagaactttcaaattatcctttgtttggtaactgacctacttaactgcccaatacaaagaaaaagcatcttggagtggctctgtctccttttttttttttt

SEQ ID NO: 206363 - DNA, 1000 bp, Homo Sapiens
tatgaataatagcatgcttttattttaccaaggttcaggttgcatgggatcatcttctctgactgatttgacatcaacagccaagcgctttgggggtctccttaacgcccccctacagaaatgaaaatgcatttcctgtctcaggatgctgaaacgactctgagggttctatcatagtccatgctgaaaacccccaaattatcatctttagcaaaatctggacttgaatctttttttttttttaaaatttttgtttcacttttgttgacaaagctgattttttatggcctgatctcagctcaccgcaacctccgcctcctgagttcaagcgattctcctgcctcagcctcctgagtagctgggattacaggcatgcgtcaccacgcctggctaatttttttgtattatcagtagagaaggggtttctccatgttggtcaggctggtctccaactcccgacctcaggtgatcggcgcgcctcggcctcccaaagtggcatgagccaccgtacccgtccacaatctaactttataactgctcacaggaaatacccactcagttaccttgttgtgtgatttcatgagatgctctcttgttgcttgtcttctggtttcttagttgagaagctttcaattcctccttctttcatttccatcatcaacttaatttcacattctctctattgttggccctgaagaccagacgcacattacccgaaagctgggtggctgggcagactcctatttggtctccctgtctctaaccccttcaaatccttcctatcaaatcccatgttgggcacataggtggtgtcccatttatgtaattaaatactgtgtaggctgcatcagtcaattctgcctacaaggttgatgagtaataggtaagagccccactgagaaatagaaatgccatcttccacacatttccatagcccactgggttgctcactattcaatttttattatcacatcaccaccacgagaaggtaggtcggaga

SEQ ID NO: 206364 - DNA, 1000 bp, Homo Sapiens
catgggacccatcctggtgccctgcaggagggcagttcctcaggggctgtccccgcagtgtgggcatgggccagacgggcaccttcgtggccctgttgaggctgctgcagcagctggaggaggagcagatggtagatgtgttccatgctgtgtttgcattctggatgcacgggcccctcatgatccagaccctggcccccctcgctcctcgctcctcgctcctcgctcctcgctcctcgctgagcagcctgatgcccttccccctggcagagccagtacgtcttcctgcacagctgcctactgaacaagattctggaagggcccttcaacatctctgagtcttggcccatctctgtgatgaacttcgcacaggcgtgtgccaagagggcagccaatgccaacgctggcttcttgaaggagtacaagctcttgctgcaggccatcaaggacgaggctggctcttccgcacccctgcctggctatgagcaggacagccccatctcctggtgggccctctggctgtgatcatatggtgctgactggcctcgcagggccagaggagctctgggagctggtgtggcagcacggggctcatgtgcttgtctctctgtgcccactcgatgccatggagaaggtcagttgcagcaagggtgcgacccagctgggcaccttcctggccatggagcagctgctgcagcaggcagggtctgagtgcaccgtggatgtctttaacgtggccctgcagcagtctcaggcctgtgaccttatgaccccaacgctgaagcagtatatctacctctacaattgtctgaacagcgcactggcagacgggctgcccctgagtcggcactggtcactgtgcaggagaggtttgtgccctgtgggatggggacagcattcctgacacatccacgtgggcctgggctccccagaagggcggcctccactgggccctgtgctgcaaaggtaaagggtcttggaataaagacctgtggccaag

SEQ ID NO: 206365 - DNA, 1000 bp, Homo Sapiens
agctggctgctggcagacatggtttagagggaagtggcggggatccatctttgcctctttcagtcacccctccctggctgggccaagggtgccccacctacccgctccagattgaggatggtggccatctgggagagccgggcaaacttgtctcggatggtccaggtggtcaccgtggtaaggtaggcaatgagcgacctcagctccttgtcaaactgcagaccacccagctgcaggagaacccaagcccagtcactacttaggcctggccaagcagaactggcctccagttgcccccagagctgggtggcaaggcccgccaggcctcaggtggtgccctgtggtttgtttgctctacggcttcagaagccagagcaggactggacccagacatgcagggcctgtgggcagcagacagaggggatgcaagtcctggggggggtggcatgacatgtcttcctcagaggagaaacgagagccgcagacccatgacccctttaccttacccggttaaaggtggatttcagcaccactttctccaactcgacggcaacaaggctagtcatgaggccggttaggctgtcgtagatgaccggggacaggctggcctgcacacagagggttgacatcagccgagccccacctaactcctctgcctctatgctggagtcttaggtggtgaggatagtagcgtgaggccacgggggagtttctacaggtgagggttggaagggctttcagggtccccagaaggaatgtgatgagaccctgcaggctgctggtttgggctgacgtgggtaattccctaagtggatccctagggcccctgctcaccttgaactctgccatttgctgctccaggttaaggatgaactgttgtacccaagggtcgttggcctcatagtcattgaattcttcctgttgtcaggaagcagggctggtcaccatgggcctcataagaagtaccattcattgccacccacctctatccctctaagaa

SEQ ID NO: 206366 - DNA, 1000 bp, Homo Sapiens
gatttcccaaactcggctcaaatgagttgaagttctcttgcttgctgagtggattttgagggcaaaggggaggctggtggccatgagagtgcaggagtcccaacctcctcgcatcggtgatttctctgtccagctgcacaggtggcaggaaagatgtgggagatgtttggactgactcaagattggaggtgggcaagggaagggtagctgaaggatcaggggacaagggaatggacagtggggactgaagtggttgcaacacaggaccccagggtccaggctgggagggggtgggagtgaaaggcaggagggatcagctttcgattctgaggaagagagtggtctccagagacgaggtacacagtggagcaggaaggaggcccctcccatccgcagaggccattccaaacctggactactgtgctgacggccctgcatctcctggtgcactttcatctgtgggactgacctagtctctgagataacattaaataaataaggtatatgcttatcagagcaaatttagaaaagactgaacaagaaaagggaatagagattaccaagcatcctgagttttcccatctagtgtaacgtttgctaatgcctgttttacagcgggcaaaaataaatagatagatacgcaaatagatgataagcaaagtaaagctcaactttctgagcctgtacgaactcaccaccccccgcccccccgccgccaccaaccctcactacttcttccctcctgggtctctgctctgaattgcagtctcaggcccatcagtcagtcagccctctatcaattaactcctctctctctctctcttcccctctcctgtttttctttccacagctcttccctcacagcatgtaaacatatataaatacctaccacatcctaaagtatactcaatactcttacctcccctgctgcggcctctccttcctccagagccaagcttctgcttccggagaagctgtccacactggatctcaattcatt

SEQ ID NO: 206367 - DNA, 1000 bp, Homo Sapiens
atgtgcatataggatggtcccaatactttaaattggaaatacaggctgtaagtccttcaagtctggatgttgggtaatcacgttttcttccagaagccatttgttaggactttaaaacttctcagtgggccagtgtaaaattaaggacaagttttataatttaaatttacagataaatataaaacaattttctctcattttctaaaggcaggaatataaggacattgccctagatatattctccccatcaaaccaaaggtcttgctgctgagtattatttaaaaaccagagtaataaagcagcttcgcctgaggatgaaggcaaagacaaagttaactgctcagcatactgaaaccaggagtttgaaaaagtaattcaaaacaacttcaaggccataaatacttggatagtgtgacatcaggtcttggcactggatttcctgcaatttcagatgaaggcttgacttggctttagatgttttcatgtgataattcttggataacctacaacgatttttcctatttaacccaccaactttaagcaaaagaaagaacgtatatgtgggggaaaagttcgtttacctctgccccgcaggggaattaaaacgctggtgaagaaaggcaacaggcaaggcttatataaggaaacagtagtaggctgcactgaagtcctcaaacacaacaaaaagctcttaggttgcaaatgttaaccttgattcttttacccttttgaaaaattcaatgggatggttggaaaaaaaaaaaaccacagacacacacacacacacacgcaaccttctaacgtaatacccaggcagtccgataatttatagtacaacgtgtaacactgggatccaacttttcacccagcaaaatctccttacaaattagggcaacatataccacaaagccaatggaaaaaaaaagaaaacctcgattgaattgcaaacacagcttttcaattgacattaaaacaactaacctttaccttatgactgagc

SEQ ID NO: 206368 - DNA, 1000 bp, Homo Sapiens
gataactcgagctcaggagttaaaaagtccagcctaggcaacctaaagtgaccctgtctataaaaaataaattcattatagagatgtgtacaactcttggaaacccccaggcttttgtttaattaatttattttaacccaagtattgagccagtccattgtatctttttcagcttataaattatgttgaatttacaattcctacacagggcagctgtcagattcttgattagttataatcattatacctgctgatgttgatagtatataaagaaaaggtgtacatttagcacatccatttcaaatttccagttccagtttttaaaatgccttctattagaaggtaaacagttcttataagaaacaaagcaatatctctaagtcctgaagtatctatgctctatatccctccctacattttctaaatcaattctggtgcagattcctaacatgtcatgttctgctctagccctgagtctcctctcatagacatgcatggccagggggttcccttcagctttctaccctcacctgcagatagaacttcctagctaggaagagacaactaagtcaaagagaaagtcctcatactaatgaagatcaatgaaataagtcatcctcggagtttcaacctgtacctcggtaactatgctcagctttgtgtagagctagtgcctaattaatcaaagaaaggtgaagccatatgaaaaatgagtcctcactgaatcaacagggtctttccttggtcactgacactaagtcgaattttcattgggagaaacaacctaaagaaaaaggttagaaagtatcaataacatatattaaaacaatttaagagtttgatttcattctgagttgatctgaatttcatggaagacttggaagcaagaatgtctggggctcagtcatgatctgattagagtctcatcagatgtggaataagctgctgaaaagatcattcatagattgaagttatatcacataggatatctggcaacata

SEQ ID NO: 206369 - DNA, 1000 bp, Homo Sapiens
caggtatgggaagttagggaataggagaaattgctggatgatgccatttcaacatgaaggaatgcatgtggcaaaagttggtagtagagtataaccagagttgtttcaaacatgtatcccaaagataactggctataaaaacccgaagtgtgagacagaagttggaataggagccagatatttgagagcagtaatacaccccatgtggacagtaatcaaaaccgagagtggattaaattacctagggagaatgcagggttacagaaaagtaacccaaggactaacttcttgagaaaaccaagtttaaggagtaggcagaaggagacacccaaaacaaaaaggaagaaatagagaacgtaatccaataaaaatgatgtcagggaagccaaaggaataaagactttcaagaaggaaggagatgtaatcaggaaaaggactgaaaagtatccactggatctggcatttggtggctcttgagagaaaagtaagagcagtgatggcagaagtcaaattgctggcttgaagagcttcaaaagctaggcagagagggctgagggggctggaggtggaggcacagacaacaaaaacttgtattaggatgaaatattttatagactatgggagaggttgactatataggaaatcaattcattagaaggttattgagggggagagaattcaaagcataaaaatttgccttcatcaaatagtataacctcttatgggctgcatagcgggcttaacaatgagtacagctgtagattattttaaaggcaggaagcagcgaatgaaataggaattttaagctagcactcacaaggtcaccattcccaagactcttaacatccatgaggacagagcctggccagtcttcactggtatatctcaagcatagaagaggtaaagaagttactgagtatggaaaaggtagagagaggacaggggcttaaacaggaaagtctaaaaattagagtccacgaagagaatgtggaccactgaa

SEQ ID NO: 206370 - DNA, 1000 bp, Homo Sapiens
accgtgtatcctgtagttatgaggttgagtggttttatttttgcttaagataacctctcctgtgagattttactttgattgcaaaggttgtattgcttttcctcttgagactgatgtatttgttacagcaagttatacctgctcactgtagaaatttgagttttataatatttagccccctatcactgtcacttttctgggaatacttgaacatgaataatttttgtcttgtcacaccctagccctgtttgctttggttaatgtccaatgtgcaaatgcctcattttcctcccacccatcctgagtgttttcttcctccttaccgaaactaaaaacagccccttccctgaaggtactgcttcctttgcagcctattccagtggtggctggtttattttcatccatatgactcattgttaagaggtggcggaggtgttttccttgttcctttgtcatgtcttccatctcaacccccacacacatctctttaaaaagagtaactgtccattcactctggtagggtaatttactaaaatgtcaaatgtttttcctataattctccttggtgaaaagcatggattctggagacaaatcggagccctggcatttatcagctgcaggactcaagggatgttccttgtcagtgtaccttagttatctatgtgtaaagtgggcctaaaatcagtaccagcctcataggatttgcaatgagaattaagttaatacacgtagagcttaaaatagtgccagccatgtagtaagtgctcagtaagttttagctctttttagtgcacaggtggagagattgccttaggtggaagcatgcagggcttcagtacatactaggagggaactgttgcaggtgggttggagatgcccatggtggcagcttttggaaattgatttcacatttcttctgttttctcagggacatatacatcaaggtcatcataaaaatgatgacacatgaggaggtgttatgtttgaagacaggcagaga

SEQ ID NO: 206371 - DNA, 1000 bp, Homo Sapiens
ggacatgaattcatccttttttatggttgcatagtattccatggtgtatatgtgccacattttctttatccagtctgtcactgatgggcatttgggctggttccaagtccttgctattgtgaacagtgtcgcaataaacatatgtgtgcatgtgtctttatagtagaatgatttataattctttgggtatatacccagtaatgggattgctggctcaaatggtatttctagttctagatccttaaggaatcaccacactgtcttccacaatggttgaactaatttacactcgcaccaacagtgtaaaagtattcctatttctccacatcctctccagcatctgttgttccctgacattttaatgatcgccattctaactggcatgagatggtatctcattgtggtttggatttgcatttctctaatgaccagtgatgatgagcattttttcatatgtttgttgactgcataaatgtcttctttggagaagtatctgttcatatcctttgtctactttttgatgtttttttttttttcttgtaaatttgtttaagttctttgtggcctctggatagtagccctgtgtcagatggatagatggcaaaaattttctcccattctgtaggctgcctgttcactctgatggtagtttcttttgctgtgcagaaaccctttagtttaattcaatcccatttgtcaattgtggctttgttgccattgcttttggtgatttagctatgaagtctttgcccatgtctatgtcctgaatggtattgcctaggttttcttctagggttttaatggttttaggtcttacatttaagtctttaatccatcttgagttaatttttgtaaaaggtataccagtataagggatcccgtttcagctttctaaatatggctagccagttttcccaacaccatttattaaatagggattcctttccccattgcttgttgttgtcaggtttgtcaaagttcagatggttgtagatgtgtg

SEQ ID NO: 206372 - DNA, 1000 bp, Homo Sapiens
aaaatctacacccccacgattagatgagttattactgagaagttattgcacccacaaaaaagctgccatttttttccaaagatgtcaaaagctagaaggccaggtcttctcaaagtaaaatacactgtgtattggggaaaaaagggtaagaggcataattaccaagttaggcatagtctgtcaagttgtatttagctattatcatggaatagtgttattccctgataatgaatgttggcatcataaccagaatgattattctcatctccatatcttcgtatttacatctaggaaatataaagcttatttatagtgaacactgagagtggtctctctccaaggagtaaagtaaatatgccctggctaactagtgtaagtttgtattctacataattaaccattataagaagtcactgagtagatcctaacttaagggatatttgtttgtgtttgagtatttctcgtgtggtgtttctaagtttgaaaagtgttttataagcatagagcttatgtgtgctactggggacaaatgtctcattttaaaggaaagagggttttctgagatggcatgaaatgagtgaaatctatttattgcctgaaagctaaagtggaatatgaaggcaagtctttctgaacagagcagtcctgtcactgactaacccagggaaaggacaggaaaaagctagaaagtgttttgaaaactcttctgcttaccttttgaattgggacattaacaaagtaaggaccatttatgtgactggcttcctttggttagttatgattcattcattaattaattcatcagatttatatagagcacctgccatgagccaggcattatactagatgtttgggaaacattggtaaacaaaagcaaagatccctgcttttatggaacttaagatattctgagacactggatcatacattctagtgcagtcaccttattaaaacttaagattttgtgatgcaaacaaacagccagaagctacaaataatg

SEQ ID NO: 206373 - DNA, 1000 bp, Homo Sapiens
accagagtccaagatcgtggcaagctctgtcaggcactaagtaacacctgtggccctccttgagctctagatataaaatggatctatccatatgattccacttgggaactgaaaacatgtgtgtatgtgaatcctgcttcttcccctccaaacactccccattcatttcacattttcccagcaggaaattgatcttgagcattggatctgcttctgcccactgaccagacagacccaaagccaatatttctccactccagctggggctgccctctgggaaagtcccctgacgcacaaagcacctcttgagttttaaacttcttgtaactcagctggcatctggttctcaaagcatgaagggagagaaatatggtctgggagccttttccatatatatatatcagggtgcagtggctcacgcctgtaatcccagcactttgggaggccaaggcgggcgggcggatcacaaggtcaggagatcaagaccatcctggctaacacagtgaaaccccgtctctactaaaaatacaaaaaatagttgggcgtggtggcgggcgcctgtagtcccagctactcaggaggctgaggcaggagaatggcatgaacccgggaggcagagcttgcagtgagccgagatcacaccactgcactgcagcctgggcgacagagtgagactcgtctcaaaaaaaaaaaaaaaaaaagaaaaaagaatgagggtctttgcagatctaattaaagtaaggattaagatgagatgagcctagattacctacattaggatgggtcctcctctgaagccatgcatttttgtacaggttcatgacatggcaggagcctggaggcctaagccaccgccatgtcgatgtcagcctgggaccagaaggagagacaaacctttgctgtgctaagccgtggggatttcaggtttatttgttgctgcacgataacatacgctatcctgactaaactagaccaagcttggcaatatttttaacctctc

SEQ ID NO: 206374 - DNA, 1000 bp, Homo Sapiens
agcctgagggaaggaaggagagcatctggaattgttggtctcctctgaggatgtgagtaagggtttgcaggtcctgtgtccttcaggactagaatgagcagcacctcatgaggaagagtgtaggaggggccaaattactcctttcagctttggattcttggctctaagctttataggtttttttttttaacctgttattgcttttgtttctgtttgaaaggagatactgtatttttttgtatttccttacgtgtctgggcaagaggggaagataattctcccattagatgcttagaaattgttgagaaattggaccattccccttaaatggagcaagtttggaaactggattctatagggggttaatctaccaaggtagattgaaattacactagtcacagccagtcacctgcaataggagggcaaggagtagccccactgagcccttggtatccgaccctggatgctggagctagtgaagagcagccctggggtgagctccaggctggctttgctgtgcacactatgcccaagcctacgctcctttgcctcctacttccaaaatggagagaatgagagttcagaggtcaaacacctaccagagccaggcaggtatgtgaatgttagacaaatcacccgaggtctgtgataaacagcaacagagtgatatttctctgtaaatcaatgatgccttctctgcctgctgagtcccccacccaggagagaagaaataccatgttccagtggaattggttaggcctttggaagctcacgaggctgatttagcaaatttacatcttagtgccatcatatatacaagtgaccttgggcagtttatgaggcattttgagccttagcttccacattcttataataacgtcacatggtgaaaatgagaaaatatgtaaaagaacatggcactcaatagatacagttggccctctgcatccgcaggctccacatcgatggattcaacctacatggatcaaaaatatttggg

SEQ ID NO: 206375 - DNA, 1000 bp, Homo Sapiens
tgcaatcaatactgttttcgtcagaggaaaatcaagcgcaaacatcaaggcagtgatttgccttcatatttacataatgtgagcactctgttatcaccctgatatttaaaattcctgcaagagcaaaagcctggtggcaggggcagccccgaggcaggcctgaggaacagtgctgacctaggctgctgttctgagaaagaggcccagccctggccaggcccctgagtgcagtagccaataataaaaaaagaaaatgggaagtgtgtagtaaagactttcaccctgccccaacagaggtgtggcctttgcttctggaaggcagtctctaagtcctttgaatgctagacctgacaggagtgtctttgtttgcctgggggtcttgggccacccagctagtaacaatgtgatttagggtgagagctttgagccacaccagcaatgtgatactgggtgagagctctggttcacgtggtatcagctcaactctggagggagtgaaaacagatcacctgttgggcagtcagccaggcctacctgatggaccccccagtaaaaaacctaggctccaaggcttgggtaaacttctccagttgacaatacaccatgggtattgtccttcgaatgaatcatgaatcatccaacctaagggtggttcccctcaaacttccctctaaactcttcagggaagataaacattttacacacatttagagactatacatgagaacaaacagttgacttgacaatcctcaggggtctgtattacaggtggagcagcccaaatctgaaatccgaaatgctcagaaattcaaaatgctttaaaatccgaaactgagtgccgacatggagctcaaaggaaatcttcattggagtattttggatttgggattttttggtttgggatactcagccagtaaatataatgcaaatattccaaagtccaaaaatgttctgaagtcagaaacacttctggtcccaagcatttcggataagggatact

SEQ ID NO: 206376 - DNA, 1000 bp, Homo Sapiens
tattcgcctacacaattctccgatccgtccctaacaaactaggaggcgtccttgccctattactatccatcctcatcctagcaataatccccatcctccatatatccaaacaacaaagcataatatttcgcccactaagccaatcactttattgactcctagccgcagacctcctcattctaacctgaatcggaggacaaccagtaagctacccttttaccatcattggacaagtagcatccgtactatacttcacaacaatcctaatcctaataccaactatctccctaattgaaaacaaaatactcaaatgggcctgtccttgtagtataaactagtacaccagtcttgtaaaccggagatgaaaacctttttccaaggacaaatcagagaaaaagtctttaactccaccattagcacccaaagctaagattctaatttaaactattctctgttctttcatggggaagcagatttgggtgccacccaagtattgactcacccatcaacaaccgctatgtatttcgtacattactgccagccaccatgaatattgtaccgtaccataaatacttgaccacctgtagtacataaaaacccaatccacatcaaacccccccccccatgcttacaagcaagtacagcaatcaaccctcaactatcacacatcaactgcaactccaaagccacccctcacccactaggataccaacaaacctacccacccttaacagtacatagtacataaagccatttaccgtacatagcacattacagtcaaatcccttctcgcccccatggatgacccccctcagataggggtcccttgaccaccatcctccgtgaaatcaatatcccgcacaagagtgctactctcctcgctccgggcccataacacttgggggtagctaaagtgaactgtatccgacatctggttcctacttcagggccataaagcctaaatagcccacacgttccccttaaataagacatcacgatg

SEQ ID NO: 206377 - DNA, 1000 bp, Homo Sapiens
tattcgcctacacaattctccgatccgtccctaacaaactaggaggcgtccttgccctattactatccatcctcatcctagcaataatccccatcctccatatatccaaacaacaaagcataatatttcgcccactaagccaatcactttattgactcctagccgcagacctcctcattctaacctgaatcggaggacaaccagtaagctacccttttaccatcattggacaagtagcatccgtactatacttcacaacaatcctaatcctaataccaactatctccctaattgaaaacaaaatactcaaatggacctgtccttgtagtataaactaatacaccagtcttgtaaaccggagatgaaaacctttttccaaggacaaatcagagaaaaagtctttaactccaccattagcacccaaagctaagattctaatttaaactattctctgttctttcatggggaagcagatttgggtaccacccaagtattgactcacccatcaacaaccgctatgtatttcgtacattactgccagccaccatgaatattgtacggtaccataaatacttgaccacctgtagtacataaaaacccaatccacatcaaaaccccccccccatgcttacaagcaagtacagcaatcaaccctcaactatcacacatcaactgcaactccaaagccacccctcacccattaggataccaacaaacctacccacccttaacagtacatagtacataaagccatttaccgtacatagcacattacagtcaaatcccttctcgtccccatggatgacccccctcagataggggtcccttgaccaccatcctccgtgaaatcaatatcccgcacaagagtgctactctcctcgctccgggcccataacacttgggggtagctaaagtgaactgtatccgacatctggttcctacttcagggtcataaagcctaaatagcccacacgttccccttaaataagacatcacgatg

SEQ ID NO: 206378 - DNA, 1000 bp, Homo Sapiens
tattcgcctacacaattctccgatccgtccctaacaaactaggaggcgtccttgccctattactatccatcctcatcctagcaataatccccatcctccatatatccaaacaacaaagcataatatttcgcccactaagccaatcactttattgactcctagccgcagacctcctcattctaacctgaatcggaggacaaccagtaagctacccttttaccatcattggacaagtagcatccgtactatacttcacaacaatcctaatcctaataccaactatctccctaattgaaaacaaaatactcaaatgggcctgtccttgtagtataaactaatacaccagtcttgtaagccggagatgaaaacctttttccaaggacaaatcagagaaaaagtctttaactccaccattagcacccaaagctaagattctaatttaaactattctctgttctttcatggggaagcagatttgggtaccacccaagtattgactcacccatcaacaaccgctatgtatttcgtacattactgccagccaccatgaatattgtacggtaccataaatacttgaccacctgtagtacataaaaacccaatccacatcaaaaccccctccccatgcttacaagcaagtacagcaatcaaccctcaactatcacacatcaactgcaactccaaagccacccctcacccactaggataccaacaaacctacccacccttaacagtacatagtacataaagccatttaccgtacatagcacattacagtcaaatcccttctcgtccccatggatgacccccctcagataggggtcccttgaccaccatcctccgtgaaatcaatatcccgcacaagagtgctactctcctcgctccgggcccataacacttgggggtagctaaagtgaactgtatccgacatctggttcctacttcagggccataaagcctaaatagcccacacgttccccttaaataagacatcacgatg

SEQ ID NO: 206379 - DNA, 583 bp, Homo Sapiens
agctctttcttgattcggtgggtggtggtgcatggccgttcttggttggtggggcgatttgtctggttaattccgataacgaacgagactctagcctgctaaataggtgacgggttttatcaattgaaaccgaagggagtacggaggcgtcgggatcaggtggcggcgattcgggtctcggtgggactggttcctttagcgaggcacactctcggcttggatttcgttgtgctttgcatttgttgggtgtacggccttcacgggttggttgcctgatgggtgtgaggtatggcggggtctttgtcgggaatgtctcgcgggggctggctctattgttattcggtcgtcgtcatccccggcgataccttctgctctcgcgtccgtcacgcagtcttcttagagggacaggcggcgtccagccgcgtgacagtgagcaataacaggtctgtgatgcccttagatgtcctgggccgcacgcgcgctacactgaaggaatcagcgtgtttcactctccctgtccgaaaggaccgggtaaccgctgaacctccttcgtggttgggattggggactgcaatgatcccca

SEQ ID NO: 206380 - DNA, 1000 bp, Homo Sapiens
tggaagtttcactgttcttgtttcatggagaaattaactaagtgtcagctgtcaggcacactgaactcaggtgatgttcattaatagctgttgtacaatatgtttgtatttggattgctgcttattacttaacaacaggataaacctgaacaatggaaaagaccaacattagagagtattatctttccaaatacacacacctgtaagagaactggaaatgtgagaactacaacttcttcttatttaaacatttgaacaattgccggccctttcaccgaatttacctgtggaatgccttttgagagttagagaactgagaactggtattacttttcaggtcttttgctttccctaatccttgtgatactggagatttatcatctattaaaatggacctagtatttttaaatctgcatatcaaaagcaaattgaatgtctcttgcttccttttaatttcttttaacatataaatttctcttttagcatgtaaatttgttgaattaacagccctttgataatataattcctagttatcagcaataagtacaccagtttcttttttaaattaggagtatgtaattctaaattaattgattctctcattgtacatattatatgcaaggttacaaaaaaaaatcaatggttaatgattttttagctcaaccaagctaaaagtaagatgtgaacaagaaattgaactcaaaacaacttaagatacaaagctcttgttactgataatgtctaataatattcatcaatttaccatatcttgttcttatattaaaatgttctatcattttcctaattattttaaagtcgattacaaaaatatatatatatattcttgtagtgccagaaaattgaatacattaataaatggggtagaatagatgaatctcccatgaagaagaattccaaataatttatgaactctgccctcaaggatatggagcagaacttcctacttctctagtgtgagctgaatagtgacttccttcca

SEQ ID NO: 206381 - DNA, 1000 bp, Homo Sapiens
tcacctccaggaaaaaaaaataggaaaggatataatcaggtaattctcaaagaagaaatgcatgagaaaaatgtatacagtttcaacaatcaaataaatgcaaattaaaacaaaatatcatttttttgccttgtaatttaatgatgaataaaaaaatctaatgtgacattccttattagttgaattggtcattgatataaacttctttgttatttgataatgtaagtaaaaaatgtaaatgtatatccttcaagacagcaattgtaattataaggatttaagagatatgtaaaaggatacttttagtagcattacttataatattgaaaattggaaagatctaaatatttaacagtaagaaattatacattaagttttggtgcattcacaaaatggaataccatataatcattagaaaattatgttgaagaatattacaaaatataatttgtataaagaaaaaatggttgccaaatggcttgaacaatatggtggctttttaaatattatatatataatataaatctatatttatgtatctatagttatctatctatatttatgtatctgtaactatagatacagtctatatataattatatataattttatatatatataattatatataattttatatatatataattatatataattttatatatataattatatatataatatatataattatataatataaaattatatataattatatatataatatatattatatatataatatatataatatatataattatatatactatatatatatttaaacttctgagagacaatccaaaataaaccagaattagaaacaattttatctcctaagttttcagcttttgttttaaaattttaaggctttaaaaagtgtgcttagtttaggaaatttcgataaatttatgtgaatagaagcataaaaccatgtcacttggtttgacttcttaaagatttttccctcaactctttgtatgtctgctgtaag

SEQ ID NO: 206382 - DNA, 500 bp, Homo Sapiens
atgggggtggaactcatgatggaattggagcctttacaagggaatgaagagacaagagctctctttatgccacgtgaggatacagcaaggccccaatctgcaagccaggaagagtcgtcacgagaaccagaccatgcaggaactctgatcgtggacatttcaacctccagaactgtgatccaaaatgcatatgtatctttggaagaaactctgaagtaaaggccggaatattctttgtttaaaacattaaaaacaaaacagaccaaagcatcaagcaagaagtttcctggcaataaactaagcacagcattattttttaaggaacacaaattaagtgttcaacctgtggcaaatttgtactttctccctgaattatgttgttatcaaagaaaaaaattgggaagcatggcaaaatatcatcaaaactgaaactagaattaaacaaaactaaattaaaatgaaataaaatgatgtccattcttaaaaaaaaaaaaaaaaaa

SEQ ID NO: 206383 - DNA, 1000 bp, Homo Sapiens
tcgtgactacacaagcagtaaaaagcagccagctgtgcttttacaccatggtttcacacaaagcagctaaagaaatatcagaatgcctaattttctattttataaaagccctaaaggcatatggcagaagaatgctggaaaaatcactgtgggaagaatatgcataaataaagaagtatttcttacgtcaaaaaagtcccaagaatcacaaaatctgcagaagcttggttaatcaaatactgcagtactgatttaatcagtataaaatcgaaagagctttagatctgtaataaaaatccaaatttggggaagggcaaactttaaaacagcagccaagtagagaagggttggggaagggagaggtgagtgaacaggcacattggaactgtggggacatgtaactgaccactgtcaaaccagtgtaagtttcttggtttctcatggaaaacattttatacacctatttttcttccttccatacttaagtccatcagtgtccaaatacgtctgttccattttttgtctgatttttgttgggatattacaacacagtattgcatttactccagttcctgctccatgtgaaaaaattagatgatttcaaatactttcttcagctccacaataagctgccagtcactcttctgcatttcatctctgaaccagtctttgagtgcatcaatggactgccggctgatctgcaatgcccgaggcacaaacagggtaaacagaacataacaaacgtgccaaagaaagctgtggccccagatgcccgctctcactgtactaaaaagcttaagcagaaataaaaaacagggcttgcctgcctaagggagtagaattccaaaatcacatctggtttgcatgtcaggcacgaggggacctaaaagtcctagctttctctgttggtgctgctttcctgatagagcaacttcctcaacagacaaggcccagctagaggtcaagccctaatgggggatccagtcccatcagattctac

SEQ ID NO: 206384 - DNA, 1000 bp, Homo Sapiens
gccaaggtgggtggatcacttgaggtcaggagtttgagaccagcctggccaacatggtgaaaccccatctctactaaaaatacaaaaattagctggggatagtggcacgcgcctgtaaccccagctacttgggaggccaaggcaggagaattgcttgaacccagaaggcagggttgcagtgagccgagatcacaccactacactccaggctaggcgacaaagcaagactcttgtctccaaaaaggactcagatggaattagccttgtcacatatgacttgagggaccagaaataggattagaggacttaatctataggaagatggtggcataggggcggactcatagaacttccctgaaatagcaaaattaataaaatgaaataaaagcaaaatatatgccatataaaagaaaataacgtaatgggattattggagactcatttttctgtgttatttctataaagtttgattatagtatttttactgggtgaaatgtaaaatttagaaaagcatacaaagcaagtttacagtatagtgaataactacaaaataagaacatctgaataaccattaccaaagtgaccaagcagaatattgccaggagtacattccttctcaatcatacgccacctgtaggggtatccattcttttgacacttaatttccttttccttaaagtttgcaacctaatcaagcctaagtttcgctttgcctggttttgaactttatcaatgtactcattaattcttgggtcttgcttcctttccttaacattgagattttatccatgtttcatatagctgtagttcatttattttattaccttacagtgttctgttgtattaatgcaccacaaccttgccaaccgaacttggtcatgctgtattattgttattgctaaacttggttttctaatattttgtttagggtcttcttttttatcaatgttcacaggagagattggcctataatttttcccttgtcacattgtatttgtca

SEQ ID NO: 206385 - DNA, 1000 bp, Homo Sapiens
gcactccagcctgggtgacagagcaagactccatctcaaaaagaaataaataaataaaaaataaaagtaacttttaaatgattgtgaggtagggatcaagtttaatgtttttccatagggatattcaattggcccatcccaaaaagaccggcctttctccactacacagcagtgttgactttgtcatctatcaggtgacccttcagcctgtctgtggactctttgttgtgttccattggcctgtttgtctattgttggaacaaaaccacactgtctgaattgccacagctttataatagggcatgctatcaagcagtcagtgtcattttacaggtttgttcttctttaggtttgccttagctattctttggtctttgcattgccatctaaattttagaatcaactaagtcaaaatgttgtatcactttccacaccaaaaatctgctggaattttgattgggattatattaaatttgtagatcaatttgggaagaaataagatctttacaacattaactcttccaatctataaatgtggtatttattttttctttatttttttctcagtggtttgtagtttctagtgcaaaggtctttgacatcgttagatttaatgttttttgatatattttggtgttataagtgatacttttcaaaatttcattttctatttgtttcttgttgacacagcaacacaactggttttagtgtaataatcttatatttagagcccttgctaattaaacctattaattataatagttcttctatagattctttcagcttttttgcatatacgatcatgtcatctgtgagtaatgacatgaacccaggaggcgttctttccaggctttctttttatagtcatgtactgcttaacgacgtttttgtcgatgatgaactgcatatacaacagtggtcccataagattataaagaggctgaaaaattcttactgcctagtgacactgtagccatcataatgtagcacaattcagtac

SEQ ID NO: 206386 - DNA, 1000 bp, Homo Sapiens
ctagaagtcatagtttgaatttgaaagggcctgcccccctgccagaggccagctttaatgaggcaggcaagcaacagtctccacattgtgattattttaaaaatttaatcctagatgggagcgctgactataaggtgtcataatcagaaagacagaatgtggtgggatgatcattctggggcacttttgtggtctgacctgcagctgctgagacctgctattgagaagaaggttgtcaatgacttgtcttgaatttggaagcctgtggagtccttgctatgttttgctgattttttgttttgtacactcttgggtgtattcactcgggattgaattccaactttggaaactgatgttctgctgccatactcccacatcccctcttaaacaccattaatcacctctctaggggtgaaaggttgtctttggagcgtggctgtagccaactggaacagctccattccatgtaggcgctgatgaactagcatcactccaggcctctgcacgaagggacctttgggagaataatagaaacactgactcatcacatgaccatttgaagggatcacaagccagaggctgtcattctgcagccaacaacaacttggatcctccaccctcggtggagggtcccttttgttactgagaaaccacaagccacagaagtgggaagaaacacaggaactgcaatcaagggatatgcccgaactagtcttgaacaatagtaagttagagactctgtgtccaaactgagaaacctcagggtcaaacaaaaagacaagaaaaacaaaaaccaaactaaaggggaaaatgttgataggagcaaggtgaatgccataaggtcacagaaactttatggggaaatgaaagaaatgccaggggcagtttggacgttgtttggagattcactaacaggaatttactgtgtactaagtatcctaaattccttagggtagatgtgggttttcttcaagcacaaagttgcatctcagctattcca

SEQ ID NO: 206387 - DNA, 1000 bp, Homo Sapiens
caccaaacttacagtaattcagagttattaactctttctacctcctcactcccctcaaagttataacatctcccatcgacatcagctcagaatggcagtgatgcttatggtttgtgggggtgcaggtgagctgctggatgcactttagatggcctagtatgccaggccgtcctttcatcctctactctcgtctttctttttcgacctcatgttgaggattactggtctagttgaaaaaagaattcatacacataagaccatgtatataatagagggaggtatgcctttaaaaacaaaattacatggtaaagactgatgtgtcaacagggatagacaacatagagaaggctagaactgtttctggaaaaaaacccaaaaacaatggatttcaaacttcttagcatccgataaaagaaagtagcaattattcaaatgagaaacacttctgtctgttatgtacatattatgaaagtatgaacataagagggaaaaccacaaccattacattttttaccatttcagtaatttttttttggtttttagtctgtttttagacatccttaagaacaactatctgaggctgtaaacaagtatttacattaacacccatgatactgactttatactccctacctgcattgagaccttaaagggggcatttctccattccttctgtgtatttctgggtatccccaggttcagatattcagaatacagatacaagtccatgcttgcatatgttgctgctccccccgacagacttctaccagcatctgccctcctcaccgctgctctgtcacgtgcactgcggctggccctgctggaaagtcctaccttgcctaggacgccatccccgatatagccccaagatgcaaacctgccaagtgctagggcagccctgccttcctgtccatttcagtctcttggccttgctgtgttccaagtggaaatgggagtgtgctttcctggtttgctagtgtactatcacccggaccacagc

SEQ ID NO: 206388 - DNA, 1000 bp, Homo Sapiens
catgatcatagctcactgtaacctctaacttccgggatcaagtaatcctcctgcttcagcctcctgagtagatcttatatactcttaaaaatttttgaggatctcggctgggtgcagtggctcacgtctgtaatcctagcactttgggaggccgaggcaggtggattacctgaagtcaagagtttgggaccagcctggccaacatggtgaaaccccgtctctactaaaaatacaaaagttagtcgggcgtggtggcacatgcctgtaatcccatgtactcgggaggctgaggcaggagaatcgcttgaacccggggggtggaggttgcagtgagccaagattgcaccacttcactgcagcctgggtgaaagagtgaaactctgtctcaaaaaaaatttaaaaattattatcaaacagttttggttatgtgggttatactacattagaaattaaaacaggaatttttaaaacaaaaatacccaggcacacatcccattagtcattaggactagatgaagtcactgcattcctttagactctagaaaactttaccgtacaattgttaaggaggaaaaggcatcttacagaagcttttaaattgaacctcatgtgccttctgaaaggctcttgggggtcacatgttgagaatcaccactttagccatttattgggcacttactggggacccagggctgctggagactggaataagatctggctctgcatttgaccagctcagacatggaagcagccacctcatctatctcatggacagtttcctcatctgcccaatgcataattgctgcacctcggggaactgagtagccagaaataacactttatttcaactctaaactggttgcaagcataatttccatccctttctatcccattatgaaagtactaaacaaatctcagggccatttctgccttcgtggcccctccggggtgcagggactccttcccagcccaccaggtaaatgtgtttcttgaccaccag

SEQ ID NO: 206389 - DNA, 728 bp, Homo Sapiens
  misc_feature (38)..(38): n is a, c, g, or t
  misc_feature (442)..(442): n is a, c, g, or t
ccgcggttctattttgttggttttcggaactgaggccntgattaagagggacggccgggggcattcgtattgcgccgctagaggtgaaattcttggaccggcgcaagacggaccagagcgaaagcatttgccaagaatgttttcattaatcaaggacgaaagtcggaggttcgaagacgatcagataccgtcgtagttccgaccataaacgatgccgactggcgatgcggcggcgttattcccatgaccccgccgggcagcttccgggaaaccaaagtctttgggttccggggggagtatggctgcaaagctgaaacttaaaggaattgacggaagggcaccaccaggagtggagcctgcggcttaatttgactcaacacgggaaacctcacccggcccggacacggacaggattgacagattgatagctctttctcgattnccgtgggtggtggtgcatggccgttcttagttggtggggcgatttgcctggttaattccgataacgaacgagactctggcatgctaactagttacgcgacccccgagcggtcggcgtcccccaacttcttagagggacaagtggcgttcagccacccaagattgagcaataacaggtctgtgatgcccttagatgtccggggctgcacgcgcgctacactgactggctcagcgtgtgcctaccctacgccggcaggcgcgggtaacccgttgaaccccattcgtga

SEQ ID NO: 206390 - DNA, 1000 bp, Homo Sapiens
cttccctcctgttttacctagagggctggagatatgagggcccaaaggggccacaactgttatcttaagtggactgaaaggaagacgaaattaaaactagcttctactccacttgtaggaaatgtgcttttaatctttggtgtagcccagccttctaggaacaaaagtatcctatgttggcaactgcagtaacaaaacagttatggagagtatggaggagagccagtaactcctaaaggtcttgttcctttgacttttcttctcaaacaaacatgagatattcatgaattgcaatggcaaacgttttttaggttcgccaatatgaaaatgtaaagcagttttaagatgattaatattaaaataggccaagtgcggtggctcacaactgtaattccagcactttgagagcccaaagtgggaggatcacttggcctccgaagttcaagaccaacctgggcaacacagatgtcatctctagaaaaaaaaaaaattttttttttttaattggccgggcatggtggcatgtgcctgtggtcctagctactaaggaggctgagttagaaagatggcttgatcccaggaggtcgagactgcagtaagtcataatcgcagcactgcacagcctgggcaacagagtgagaccctgtcaaataaataaataaaatactactctaatttttgtagctagcctattattgaatttgcttttcatttctggcacagttaagtacatactcttgagccagctgattaagtttagtattagcatttcctggctgaaagcacaactatctctttcagagatccagtataaagaatcagttttacaaaatctgtgcttgagcccgggaggtcgaggctgctttgagctgtgattgcactaccgcactccagcctgggtggcagagtgaaaccctgtcacaaaaataataaaaataatcaattttacaaaatctttactattagaattcctgggtcatgagactcggctatagttgtc

SEQ ID NO: 206391 - DNA, 1000 bp, Homo Sapiens
cgttgcaaggctcgacgctgaaagaacttggccttccatttgtagatgctggcgtcgctgacgccgccgatcttgttgacctgcgacgaacgccttgttccccacgcagaccaagggcacgcccgctgcagaacctggcacggcagcgctcgacagggccggcctcagaagcgcggtcggaaagtggataagtgttcggtgtgagattccgccctgctgatgccacgcgctttggtgttgcggggcgggcgtggcgggaaaggtcggcgccgatctcatgtggtcagcgattagctggctggtgggggtatgggtcgtggccatatgtccactcgattctaaattggtggtttccctttgaacgagaacctgagcgacgtgccctgccgcggcgtcgacggcgacgcggtcgcctcttcctcagtggcgtaggggccggagtactcaaaattgagcgcaaccttccaccggcctttatggcgcgacacgaagtattgaacgccagccataaagcttgctccggcctcgcccctgtgatcgacagatggccttactctgcaaatctgccgcggtcgcctcaactaccgaatttggtgggctcggaaggagcagcgccttgtagtgatagggctggactgttgctgtgaccggggagaccaactgccgggccttggtcgcttcccttattcacgagcgatcgcggctgcaatcggcgagatcgagtgtcgagagcgagatgtcgcctagctgctagccagtcttttctctctcgttagagtcaaaggctggattgatgacggattgggagacgatccacttttccattatgaccgtgatcccaagctcttgttccgtctcagccctcgggaaaacatgcgttcgatcgtcaaactcgtcagggtccctcacggtagcagcacgatttgagccgaaccgcgttgccgcgccctttctattgcccccctgcacgccctggggaacgtcattgggatctccgttc

SEQ ID NO: 206392 - DNA, 1000 bp, Homo Sapiens
ccattttttttgccgcgtggagcattttttcaagccgaatgcgacggttggcctccttttttcagccctccggatttccggagcacatggattaaacttttttttacttccgcataattcatctccgccaccggctgcctagcgataacgacatagtctttgccaggggcaatctcctctttcaattcgaggaagcattggcggatgtagcgcttgattcgatttcggacgacagccttgccaagttttttgctgacagacagcccgatgcgaaaataaggctgctccgggcggtcaagcgtgtagatgacaaactggcggttggccgttgaagcgcccctctgaaacacttcctggaactcttcgtttttcttgatccgatacttttttttcattctccccaaacactccatttgcctaatttcccggcggcaaaatattgagaaaaaagaccactgaaacttcagtggcctattatgcagacaaaacttttcttcctttgcggcggcggcgcgccaacacttttctgccgtttctcgtgctcatgcgcgcgcggaatccgtgcactttgcttcgtttccgtctattcggttgatacgtccgtttcatctatgacacctccctagggaataacagttacgggcagtctttctcattatattgaacaatcttagcaaatgtcaaccgcctcttcgtttttccaactctgatcagcgctgtggataaattttttctccctatcaacaatccacaacatttatcgacatttttttcacatgttcaatggtgtggataatgattttttcacatcccgtccattttgtggataatcaaaaaaatcccgttgcaacaagccgctttatttgctattattattgtgttttcactatggataattatgtggataagaggagtctatccacattttgtggatagattgtggatagttttttcacaacgcgttaataatgttacccacagatggtggattttgtcgaaa

SEQ ID NO: 206393 - DNA, 1000 bp, Homo Sapiens
ccctgagaccagcagcatcaccttaggaatctgctagaaataaaaattcttgggccataccccagggttactgaatcagaaacttggttggggcctagcagtgttttcatgagccctccattgatcttgatgcagctgaagtgccgggcaccagtgaaagggaagggctgcggtagtgattccattgattcctgctttgatggaagttatggcctcacaggttagacgttgcaagttgagttggccctcttgcctaggtgtgcctccttgccttgggattctgacatgaacaggtgaagtctcttcatgattttttttgttgttgttgttaatggtatgcttgctattatggccaatatgtaaatgttactctgaatacatatttatataccatgttacttagtgacattattcaaacatttgtatgcgtatttgtgaaattgtttgcatcagtcatttaaaaaatatttcagcctaagttttctaagaggtatgttgaatacatttttaaaagccagcttaagggtcacagcagccttagtttaggagaagagctaatcacaggtgaccactcaagttctttcaatgaagacctgatgatgtatttagttcccattttccacggtgattgactcaatttaagtgtattgtggctatatgtaatttacaggctgctttgcgttgcaggtgggaaaatctcccaggctggtgtgaggctgaactggggtaaaagaccccctgacccctcctcattcttctaaggtcaccacctcttagagggtctcttattttctttcagagatcaaatgcacagttatgctgtacaactaaattctgcagtcttgggaatccttacgagtaccaactattagtcactttttaaagtccccaaagtggagtgaggatagggggagtggaagcagtgtttggttcttactttacccaaactgtgtataaagaataaagttagcagaatgatgccaaaaaaaaaaaaaaaaaa

SEQ ID NO: 206394 - DNA, 1000 bp, Homo Sapiens
gcagactttggacttgctcgattgtatagctcagaagaaagtcggccgtatactaacaaggtaattactttatggtaccgtccacctgaactgctactgggagaagaacgatacacaccagccattgatgtatggagctgtggctgtatccttggcgaactcttcactaaaaaacctatatttcaagcaaatcaggaacttgcacaactagaattaataagacatgaagaaaatgaagtttctgataaacaaatctgactataatgaggcaacggagtataccgaaaagtgtgtggcctttagaatcttacagggttgggttctaatgccagctcagctacttcctgcgcttatggtttagggtcccatatgctcttaagtttttttcttcaaaagtaaaagaggactgataacatgcttagggttgtgagaattaaatgtaaataagttttcagtacatatttcttccctcaccttatttacagtaatgctaggttgtttataggctcaggaatgatgagacctagtgtcagtatagtacagatacatgtaaaactgatcaagagtgataacactaatttgctttaaatggctttacaccatagtgaatgagttattttatttataatttgctttgttccagaaagtattttaggcagattacaaatattttataatagaagtagcatagattaaaaagtgatggagggaggccgggcacggtggctcatacctataatcccagcacttcgggaggccgaggcaggtagatcatctgaggtcagcagtttgagaccagcctggccaacatagtgaaaccccgtctctgctaaaatacaaaacaagccgggcacagtggctcatgcctgtaatcctagcactttgggaggccgaggcggacaggtcatgaggtcatgaggtcaggagatcaagaccatccgggctaacacggtgaaaccccgtctctaccaaaactacaaaaaaaaaaaaaaaaaaaaaa

SEQ ID NO: 206395 - DNA, 1000 bp, Homo Sapiens
cccacgcccacctggcctctgaggactccttctatggctggacgcccgtgcactgggccgcgcatttcggcaagttggagtgcttagtgcagttggtgagagcgggagccacactcaacgtctccaccacacggtacgcgcagacgccagcccacattgcagcctttgggggacatcctcagtgcctggtctggctgattcaagcaggagccaacattaacaaaccggattgtgagggtgaaactcccattcacaaggcagctcgctctgggagcctagaatgcatcagtgcccttgtggcgaatggggctcacgtcgagtttatttcacagagcagtgtacattcttgtcttccaggggaacttcaacatggagttacttttgatccctcagttttaattcagtgtctaaagcctgagaaatgccagtggcctgacagcagcagacattgcacaaacccagggtttccaagagtgtgcccagtttctcttgaacctccagaattgtcatctgaaccatttctataacaatggcatcttaaatgggggtcatcagaatgtatttcctaatcatattagtgtgggaacaaatcgaaagagatgcttggaagactcagaagactttggagtaaagaaagctagaactgaaggtgagaccgctttgcgggtgggaagagcacacttatttttcctttctgtaatatgttttctttttatggctgagcgcaccttcgagatgagaccttcacttcaggtggtaatgcgcctggtggattgtgcggtgacggtggagatttctcctgtactgccactgcgaagatgggacacttaacaaaagggaatgtgagggaaatactgatggcccaagtgtaaatgtctatgtggaactttttgagcacccatgtttacctgccgtgaattagattttttaatttgttgtatctgtttgaaatatatctattaaagaaaatctgccactgtgaaaaaaaaaaaaaaaaaaa

SEQ ID NO: 206396 - DNA, 906 bp, Homo Sapiens
cggacgcgtgggctcgagaccagaactggatattaactgtccgtatccggcggtgtccggagccgggtgaccgggtgtccagcagaaggcgcgaatgaaggcaaagcctcccacccacctgcaatgtgtcgactgagggtcttgctgctgctgctccccttggccttcgtgtcctcctctgctctccccatccatgatgtcgactctcagcagaacacctccgggttcctgggccttcagaggcttctccaaagctttagtcgactgttcctaaaaaatgacctgctacgagacctggacaacttcttctcctcccccatggacttccgagaccttcctaggaacttccatcaggaagagaaccaggagcacagaatgggcaaccataccctctccagccacctacagatagacaaggtgactgacaaccagacaggggaggtgctcatctcggagaaagtcgaggcctccattgagccagaacggaacccggaaggggactggaaggttcccaaagtagaagcaaaagagcccccggtgcctgtgcagaaggtcaccgacagcttgcacccagagccccggcaggtggctttctggatcatgaagatgccaaggcggaggacccagcccgatgtccaggatggaggccgctggctcatagaaaagcgacatcgcatgcaggccatccgggatgggctccgtggaggcgcccgtgaggacagcctggaggatggggtccatatcccccaacacgccaagctgcctgtcagaaagacacactttctctacatcctcaggccatcccaacagctgtaagtggggaccagatgtcccacaccctaccccaacaccatatggaaataaaggttttcttacatctaaaaaaaaaaaaaaaaaaaaaaaaaa

SEQ ID NO: 206397 - DNA, 1000 bp, Homo Sapiens
agctacggacactactgctagatggaaatccattccgagttcctcgagcggccatattaatgaaaggcacagctgctgtgctggagtatttgagagatcgaatccctgcctgagtaccgctggtttcttactctgggcatggtcactcgggataggacagagccagcctccagtgtccaggtgtcactagacagtcactgtttgggctatggtcgttcctactaaatgtctacagtttgtgaagtgatgtgaacatttataatgtcaactgctacagattttaaatgttttataaattcattcctttatgacactgcaagaacttttcatatgatttttataatgaaaaagcaaccatctttgtaaatctgggttccccctggtatcttttcattttccatcttatatgaactgagcaagactatataaggtgtaaagtcagcgaacttttactaaatattattttttggcatttaaaagaaaatcggacttttcgttgtccaggataggacttgctatgtggtcagtgtcagtgcgtgtttatgtttagggttttggttttgactttacatttttttttttaatgttttcagtgtcctttattccaatgtgatacatcttattatttccacaacgttgattctgaaatctccttacagtctgattaaaactagactggtagttttacagtaattttctaaaaaggagttagatatagccaagcttgatttaataaaagtccaaatataaacattgttgtttacactgaaattatcagatgcagcttttcagccgtcctggttcatcatgtgattgagtcgagagtagccagctcagtagaagcatgtgtcagctcagtgtcagcctgcgtgcggagggtggaggtagagaacctataggcggttgaggttgttgatcttaggaaaatcagtgctaataaagatacatgcttcgtgttcataataaaagctacatttttaaggtaaaaaaaaaaaaaaaa

SEQ ID NO: 206398 - DNA, 1000 bp, Homo Sapiens
gtatgctggaaagaggttgtactataaagagagttctttccttctactccagagttgttgtgtagctttgccattgaaccgatcaatttttaaactctttaaagaagcagcagctatttttttgaaattaaagaaaattctcaggccaggctcaatggctcatgcctataattgtagtgctttgggaggctgagctgggaggatcgcttaagaccagcctaggcaacagagtgagatcctgtctctacaaaaacaaaaattttttttttgttttctttttgagacggagtttcgctcttgttgcccaggctggagtgcaatggtgcggtcttggctcaccgcagcctccgcctcccagattaaagtgattctcctgcctcaacctcctgagtggctgggattgcaggcatgcgccaccatgccgggcgaattttgtatttttaatagagacggggtttctctgtgttggtcaggctggtctcaaactcccaacctcaggtgatccgcccacctcggcctctcagagtgctgggattacagatgtgagccactgcacctggcaaaaaaaaaatttttttttaatttgtcaggtgtggtgatgcatgcatgtagtcccaaatacttaggaggctgaggtggaaggatcacttgagcccaggaggtcaaggcaacagtgagctgtgatcatgccactgcactccagtctgggtgacacagtgagaccctgtctcttaaaaaaaaaaaaagaaagaaaaaaaattattctttaggtaatttcacttggacatattcatgtatatggagtttgtcagctgactcaggcatttaccctaaagatcaaatctgttttcaaaaattggcattggccaggcacggtgacccacacctgtaatcccagcactttgggaggccgaggcgggcggatcacgaggtcaggggttcaagaccagcctggccaacatggtgaggccccgtctctactaaaaaaaaaaaaaaaaaa

SEQ ID NO: 206399 - DNA, 1000 bp, Homo Sapiens
attaatggctacatagcaaggcatcgtcttggaactggagaattttctctagactattaggctagacagtctcatgattatactaaccaaacctggagtaaagtggttgaaaaaaaagaaagtataaaggggcttattaaagtggttaataaatatgatttaggttggtttttgatatgtttttcttccaactgttatataagaaactactaatgtaaaatagtaggctatatgttgggatgtgtatagctatgtcttcaagactaatactcagagaatcaaattgtagattgtacctatctgtgagcctatttctttagccagttttctgtctactgccaagaaacagaattctctgcctcatgcaaatgccctatcgtgtttacttttcgctctagatttttaaaaatgtgattgtgcccttgactgtaccaaagtgctgttgctataacagtgaacatttgtgaacagaggatgtttgtagtttcaaatgcagtacccatatgaccttgatcatattttagctatttaaaaattaagttggaggattttggcagaagtagtcacatgcatgattgctctgatagattggttggcgtgtgctgcagggggcttgtccttttaactctcccacaggatggatgtaggcagtgtcacattcattatgctgagagtgaaggttcatcactcctgtatcatggtagcaaatctcaacaggatagcttctaggatgttaagtgagcagttctccagcagaaatgatgtagaaggaaaaaattgaataattaaatttccttgtcttcacagtttgtattctacagagtacagtaatgtattacattccatttgcacccttccttagggaagaactttgtggttatctaccttctgagtggaatgttacagaaaatattttaaaatattggaataaacctatgattttattaatattttttgttttagaataatattccttaaaattaaaaaaaaaaaaaaaaaa

SEQ ID NO: 206400 - DNA, 1000 bp, Homo Sapiens
gctgccaggtcctgtacaagaccgaactgagcaaggaggagtgctgcagcaccggccggctgagcacctcgtggaccgaggaggacgtgaatgacaacacactcttcaagtggatgattttcaacgggggcgcccccaactgcatcccctgtaaagaaacgtgtgagaacgtggactgtggacctgggaaaaaatgccgaatgaacaagaagaacaaaccccgctgcgtctgcgccccggattgttccaacatcacctggaagggtccagtctgcgggctggatgggaaaacctaccgcaatgaatgtgcactcctaaaggcaagatgtaaagagcagccagaactggaagtccagtaccaaggcagatgtaaaaagacttgtcgggatgttttctgtccaggcagctccacatgtgtggtggaccagaccaataatgcctactgtgtgacctgtaatcggatttgcccagagcctgcttcctctgagcaatatctctgtgggaatgatggagtcacctactccagtgcctgccacctgagaaaggctacctgcctgctgggcagatctattggattagcctatgagggaaagtgtatcaaagcaaagtcctgtgaagatatccagtgcactggtgggaaaaaatgtttatgggatttcaaggttgggagaggccggtgttccctctgtgatgagctgtgccctgacagtaagtcggatgagcctgtctgtgccagtgacaatgccacttatgccagcgagtgtgccatgaaggaagctgcctgctcctcaggtgtgctactggaagtaaagcactccggatcttgcaactccatttcggaagacaccgaggaagaggaggaagatgaagaccaggactacagctttcctatatcttctattctagagtggtaaactctctataagtgttcagtgttgacatagcctttgtgcaaaaaaaaaaaaaaaaaaaaaaaaaaagaaaaaaaaaaaaaaaaaaa

SEQ ID NO: 206401 - DNA, 1000 bp, Homo Sapiens
tacaaacacttaagagatgacatatcgccctagctggatctactacagggaagggaagagggtgctgggtccaggcaggctgagtgtctcatgtcttaatgcttctctgcccaatctatttccggctggatgtggagtctgaaggcctggcacccactctggctctgtgatttaccagctgtgagccttgggggagctgcttactctcttggtgattcttttctcatttctatgatggggtagaggataatgcctatgcttacaaagtggctgtgggaagtaaaccggatgggataagaatggcttgctgtggaccacaggcaccgcaggataaccattcctcagaactcctcgtactgctctagtgcttggaggtccgtgtattacctcagctattccaaccgcaccaaccacgggagccacgtgtctacgtctgacagataaagatgctgagtttagagtctgcaaggcttgacaaccacagatcagggacaggagctgaggtctcctgacctggagcccagggccacccggagctgcaagaaacctgcactcacaactgcctcctattttaaaatgctgagtcgatcccacaggtggcaaaccagttctgggcttcaatttacaagcagtcagaaaagctgggttgaaatcgccactgtccttctatgtggctgatgaggaaggatgacggtgcccaccgctccatctctccagctgaccccaagctggcactcacgggtgggcaggctcagacaggcccagctccaccaagtgcacttgaagccggaatgcaagacatccgatggtatacttactcgaacccgtccttttcacaacagccgcgggatccgctttctttggctgactgctcagagtcttcccttttcctgtgaccccattagacgccatggggggctttttacccttgagctgttgaaataaacatataagaacattaaaaataaacacaaagtcaaacaaaaaaaaaaaaaaaaaa

SEQ ID NO: 206402 - DNA, 1000 bp, Homo Sapiens
ttttagtagagatggtgtttccccacgttggtcagtctggtctcaaattcctgacctcaggtgatctgcctgcctcggcctcccaaagtgctgtgattacagacgtcagccaccatgcctggcctgaaaccttttttaggtaaagttgaattccatccttaaaagtttctgttatatcctatttagccattttctattgtctcccaaagaattcacatcaaaaaaacagctttgaactcccccttcaaaggaaacagtcgactttcataattagcatctaccattatccccaaatcttattttattcattgacttgaaattttttccaattgctttttttttttttttttttaaggttaagagcagaggtttactaggccaaagaaagagaatagctctctgttgcagagaggggtcctggagaaatgggttaccccagttgtcttatttaaatggttacccatcagattttaattttatcttctctttgagagcttggtaataagaagcacttaaatcactccaaagaagactttaaaaagggagcagtgaaaaggtcttaataatttattgattgaattaagaaatactagctaattaagaatctgagtctaaacagcacagattttttctttctgcttttaaattgtgttttaaaaaaagagacagggggctgggcgtggtggctcacgcctgtaatcctagcactttgggaggccgaggcgggtggatcacgaggtaggagttaaagaccagcctggccaacatggcaaaaccctactaaagatacaaaaaaaaaaaaaaattggccaggcgtggtggtgggtgcctgtaatcccaggtacttggaaggctgaggcaggagaatctcttgaacccagaaggcgaaggttgcagtgaaccgagatcatgccattgtactctagcctgggtgacaagagcaagactccgtctcaaaaaaaaaaaaaaaaaaaaaaaaaaaaaaaaaaaaaaaaaaaaa

SEQ ID NO: 206403 - DNA, 1000 bp, Homo Sapiens
gggaacctctgtcttcaggtcaccccttttcaggggcctgggttgctcatgtcacaagccacttttaaggcccgtgtcacctgtgtccctgtgtcctcagggcctgtgttacttcgtgccccacttctgcccagaacactgacttgttagctggctccctcctgcacaccccagagcctcctcccagggcagaaagggtggcccatccagggaaccaacgagtacctcacttagtgaccccagcatccaggctggcgtcgcgggtgctgggcgggaggggctctggcctgggtcctcagccctggctggacgcgggcgtcccaaggccacgtggctggccacgaaggtccccgtgccagacagccccagccgcaacccggcctcctccggaggcaccttctcctggtactcggcccagagcctgcgcataaagccactttgccactttgcagccctcatctcatgttctttgtagcggaccgagtgggtttgctataggcctcgtctgactttgtcttgcgtcttttctctgtggactcttgaggacgcctgagccccagccctgcccctgaccagcctcccccttgggtccaggggtctttcggctcatattgcagggcctgccaatgccttcacgcaccccttccccaaaggtgcccggcagggaggcagggcctcccccactcagcgcaggtcaggctaaggccagtcggctggtcactatgcaatgctgccctggggaggctccctgagggcacagtgggcgctggacccggccccccaactctcttgcctgctgcctgtgaccctgaagaacagaattgattcttgcccctctccctgtgtgagcttggccccgcctcttgccccaggcccctgctggcgggtctcaccccccacccctcgctttgaataaagcacttgcgcccaaaaaaaaaaaaaaaaaaaaaaaaaaaaaaaaaaaaaaaaaaaaaaaaaaaaaaaaaaaaaaaaaaaaaaa

SEQ ID NO: 206404 - DNA, 995 bp, Homo Sapiens
aggaagctgcatgcatgagacccacagactcttgcaagctggatgccctctgtggatgaaagatgtatcatggaatgaacccgagcaatggagatggatttctagagcagcagcagcagcagcagcaacctcagtccccccagagactcttggccgtgatcctgtggtttcagctggcgctgtgcttcggccctgcacagctcacgggcgggttcgatgaccttcaagtgtgtgctgaccccggcattcccgagaatggcttcaggacccccagcggaggggttttctttgaaggctctgtagcccgatttcactgccaagacggattcaagctgaagggcgctacaaagagactgtgtttgaagcattttaatggaaccctaggctggatcccaagtgataattccatctgtgtgcaagaagattgccgtatccctcaaatcgaagatgctgagattcataacaagacatatagacatggagagaagctaatcatcacttgtcatgaaggattcaagatccggtaccccgacctacacaatatggtttcattatgtcgcgatgatggaacgtggaataatctgcccatctgtcaaggctgcctgagacctctagcctcttctaatggctatgtaaacatctctgagctccagacctccttcccggtggggactgtgatctcctatcgctgctttcccggatttaaacttgatgggtctgcgtatcttgagtgcttacaaaaccttatctggtcgtccagcccaccccggtgccttgctctggaaggaggaagacctgaacatcttttccctgtcctttatttcccacacatcaggttggcagctgctgtgctttatttttgccctgtgttaaagtcctctcccaccccagcacctacctgttcctcaactagcaccaccacatctctgttctaaatgttgttctcctgcaataaaggacgtttgaattaaacattcaaaaaaaaaaaaaaaaaa

SEQ ID NO: 206405 - DNA, 1000 bp, Homo Sapiens
agaggaggagggtgaggaagaggaggtggccgcagtggcagaataagccaggctgttgtacagggactacaccatctctcaagccatagtaaggcccttgcctgaggcagagctatccaggggacctgcagaagtggtctcctgtggggagggcctctgactgctgggactgaccaaagagcttccattccctgagcatggtgggacccagggtcctcagttctcaaccctccaggggtcaggagtggtaccaggaaacctcttctggccccgagagagcacttgggggacacggtatgtttaatggaggggaggctgagggaaaggctggtagctggtgggttccgtggggcctgctgtgtgggtcagggtggaggtcctgggtgggctaaggcgtgagccccagcactaggtgggaaggctgctgaggtctctcccacccctgaggagccctggtttcagccccctcagtctgatgaattgcttagcctgttgcctttgactaggggcctgggtggcctcattaactctaggggtccctttgggctcttgattctccctgaaggagggatgcatttctctcttgctcttcctgtacccacatttgggggaagctgaggagggaggaacagtcagccacagctctcttccagcactgtcctctccaccccaagctttgaggaagagcatccccttcctcctttccctggccactgctgctgcagccaatatcctctctgggcctgggaccctctccacagaggggatgtggtccctggtcatgacataacctagcagcagtaggaaaaactcccttctatgaaggggaagcagactgggccataaggaaacagcaggactggctcaagtgcccaaggtttgtttagggcctgggaattggccatgtgttaatttattgagtggagtaggtggctttttttccctccctcttcccccaacaagaataaagtttattaaattaaaaaaaaaaaaaaaaaaa

SEQ ID NO: 206406 - DNA, 1000 bp, Homo Sapiens
gaggattacttgagccctggaggtcaaagctgaggtgagccatgattactccactgcactccagcctgggcaacagagccaggccctgttgcccatgattactccactgcactccagcctgggcaacagagccaggccctgtatcaaaaaaaaaagaaaagggaaaaaagaaagaaagcagcagcatgatcctgacatgacagatgtgggagacccacagcctgcagacactgtgggctggaaggtgggaagggaggggccggtggaggtggagctgtttgaaagtgacacagcagcagtagaagcagtggtgggcgaagcccaggtgaccctcagaacgttgcacaagaacatcagggaaaagaaccagaatcctttaaggaaaatgttcttcatgtatgagagactaaagtgatttttctaagaaagttcagcccttctctgacttacctggacatttctagatacttccaaaggaccctctgggaatccatagcttcctaatctggagatgggaggtcataagggagacgctgtggggttccttgaagtttcttgggttcacagaggagccccctcacttggtgttctcccgtgagccagcctccacctgccaaagacactctggtcctcgtatagtgagtaatggggctcagggcctctccaacaacagagaggagctgatgctgtagggctgaccccgtgacttcctgagtcctcaccctgtccagtgctttgagattcttcccacctccccatcctcaccagccggatcgggcgctgtgcagtgtggtcagcatggtgaagaaagtcatttccttggtggacagtattcctctttatctctcattacactggaaatgttatttctgctgtatcatccgtgctcaacgttttagtctgtcaggctcaccttctctctggaaagaatttgcttaacttgacattccatgtgccgctaataaaatatattttgaaagaaaaaaaaaaaaaaaaaaaa

SEQ ID NO: 206407 - DNA, 1000 bp, Homo Sapiens
atgagactcttcattttgtccactttgacaggaaaagtgggaatgtatgcagagctctcaaaagaaacaaaaaaggccaaaacggtgccttcagccacatcctctgaattggccctgacttggactaaatgcactaatgcaaaatcccttgacaaaagcgcataggttatttcaaaccagcattgttttttatgtaacctgttttaccgcatcttctcagcagcttctgaccactgctcaattttctcctttacagccattgttctggtggacaaataacctaggtactccaaatcctggcaggaaaaatatacagcattatgaaacagcactcagtaatcctaaaatgatttccaaagctggttacacatgacctgcaaagtctattaaattaaaagactttctcattacagagtttagtcaacgtagcaaaaccatgggaaattaaatggaaagataattaaatatgtaaattcataaggaacaaaagacgagaagttaattatacaataggctggtgacaccagagttcattgttatgtgccacaagaaaattaaattttttaaaaaactagaacgctcttcttttagtgttttgctgaaatcctgttttgtatttgtttctttacaacaggtgtaggtataggaggtcaagaaaaggagttcggtaaagggcatagctaataacaaccacacattgggccaggcgcagtggcttacgcctgtaatcccagcactttgggaggctgagacgggcagatcacctgagatcaggagtttgagaacagcctggccaacatggtgaaactccatctctactaaaaatacaaaaattagccaggcatgctggtgcacacctgtaatcccagctactcgggaggctgaggcaggagatcgctggaactcaggaggcagaggttgcagtgagccaagatcatgccactgcactccagcctgggcaacagagcaagactctgtctcaaaaaaaaaaaaaaaaaaa

SEQ ID NO: 206408 - DNA, 1000 bp, Homo Sapiens
accatgtgcctgtgtcccacgagcagccgagaggcggggaggacgctgctgtccaggagcccaggcagaggccagagccagagctggggctcaaacgagctgtcccggggggccagaggccggacaatgccaagcccaaccgggacctgaaactgcaggctggctccgacctccggaggcgacggcgggaccttggccctcatgcagagggtcagctggccccgagggatggggtcattggccttaaccccctgcctgatgtccaggtgaacgacctccgtggcgccctggatgcccagctccgccaggctgcagggggagctctgcaggtggtccacagccggcagcttagacaggcgcctgggcctccagaggagtcctagcacctgctggccatgagggccacgccagccactgccctcctcggccagcagcaggtctgtctcagccgcatcccagccaaactctggaggtcacactcgcctctccccagggtttcatgtctgaggccctcaccaagtgtgagtgacagtataaaagattcactgtggcatcgtttccagaatgttcttgctgtcgttctgttgcagctcttagtctgaggtcctctgacctctagactctgagctcactccagcctgtgaggagaaacggcctccgctgcgagctggctggtgcactcccaggctcaggctggggagctgctgcgtctgtggtcaggcctcctgctcctgccagggagcacgcgtggtcttcgggttgagctcggccgtgcgtggaggtgcgcatggctgctcatggtcccaacacaggctactgtgagagccagcatccaaccccacgcttgcagtgactcagaatgataattattatgactgtttatcgatgcttcccacagtgtggtagaaagtcttgaataaacacttttgccttcaaaaaaaaaaaaaaaaaaaaaaaaaaaaaaaaaaaaaaaaacaaaaaaaaaaaaaaaaaaaaaaaa

SEQ ID NO: 206409 - DNA, 1000 bp, Homo Sapiens
gaggcccaggagaccaaagggaggggctctgccgcttagcagagaagaaagggcctgggaggtggtgggagggagaaggaagggaagaaaggggaggaagaatagatagaaatagggattggagacagtaaccttgaagctcaggaaactgtcctggctgggctgagtcaggaccttgccaggacgggctgtacccctggcttctagaagactgcctagcacacagtaggcattcaatacttgttgaataaataaactggctttcacctaaggactcaaccctaaattcctgctgcctcatctgttaagaactgacactttccccttgctgggcaggtagtacacacctgtaatcccagcagtttgggaggctgaggtgggagaatcacttgagcccaaaagtttgaggctgcagtgagctgattgcaccactgatgcctcccaaccttgctctgggagaccaatgcctgaaccagggtttgtttaccttctgagctgcagagatggggcttctggaatttaaggtaacaggatgaggcaggggtatcttgatcatccggatggggcaaatactgctgtgtggcatggtggtacccacccctatggaggggcactcttggacagagcccagacctttgtgccctggagggagccaacccaccctgacacggagacactggcagaatagaccagagacagaaggtgctctcatggtatccagcctggatgccaagcccaagtcctggtggatagcagaggccagctgtttgggaaaagggcaggatgctctgaggcctggcagccacatttccatgtgtctttttaccaataaacggcttctcttctgaggcttggacagtgtgtgtgtacacacaggcatgaaaaaggtggagaggggtctctgcgcgcaaaactcagactgtaaattttgtgtggttcccttgctctctgagcccattaaataaagaggttgtcttggcgtaaaaaaaaaaaaaaaaaa

SEQ ID NO: 206410 - DNA, 1000 bp, Homo Sapiens
cccaggtcaggggagttggacaagtagcaggtgtttgtttttaaagcacagccctttgggaaagcaacacattattgagactcactgtgattcccccgggagtcagactggctttgtcctcttcctctctggagggccatgggccatcagcaggagctccacatcgagccccaggccagaaccccctccctttcacagagagggaactttattgcacaattgggtgccttttagcttttgtgtgttgaaatgggcgttttggaagcaagggtcaggggacagcttctaaaggtgtgagtctctgacctgagcatctgggcctcgcctgggcccttcttcctccccaggggtggaaacgtggaggggccagcagcaccccggggtctgcccaggggagtcaaggccccgaggtgggggggcctattccaggaggagtgggatctcggccctgtccagagcgagttaatgtgtccatctgcccaaccctgtcctgagaaaggacctggttttggccaggacctgacaaatacccaatggcagcagtgtcaacagacgggagtccagccagggtgggtgcccttgtcattgaggttagggacagctatccccaggttatgcctggccccacccagcagggagttggggtccccccacaggctgtgagctctgtgggccctgggatgtgatctagctcagatgccctctcatccttgatgtcatagttgagtgcacccaagtggcacccactggcggccaggggcacagcctggtggtggtggcaatagaactgtgcccctcctcagctcctcgcttcccctcccacagccccagccttactccaccatgcggacaatcattttgtacggatcacgggagcaatgctgtacggttttgtacactggtggtttgtttcctagaaaacccattgtgtctctggatttctagcacattactaaaagagcctctgctttgtaaaaaaaaaaaaaaaaaaaaaaaaaaa

SEQ ID NO: 206411 - DNA, 1000 bp, Homo Sapiens
tagcccactctgcagtggcaggaaatggcttggaccacagaggcccagtcaatcccagcaccatgccttgaggggctcaggcgtgaggccacagcggtgccccaaacatagccgctttctgtgccttacaaaccagcgtgcctcatggccgtacacccaccctctaaggccaccagttgtctctagacctgcaggtgagccaggtggcctatacataggctccccaatgctgtgcaagagctggggccactcccctacacccttataatcaagtgacatgattctcccatgtccctggccagcccggagggtccaggccatcctcagctgccgagcctcattgtgacctttgtattctattccgtgtggtcacagacacctgtgcctagcaatatttccacttgaccaaatacccgaatcttttccatttatatgcaagagatatagttttaagtaactttttatagcaatgatacaattgtatgtgtgtattctgagcttctatgtcccctgagctccttccagtgaccaacttgcaggtgggcccaggccagggctggagaaaaagctctgagacttgtgggtttctaccttcaaaattttggaccaaagtttagctttctgcccgcctctgactgtgcccagttgaggggctgacctctaggccttaatgtcctcctgcacagccacctctatcctagcctgttcctgtgggaggggttccctgcaccctggttctgtggaaggcgtggaagagtgtaaatatttatgattttatacctgtggggctgaggcggtgcagcagttttttatggtgacagatgtatattttggtaacgactacaggctcagtattgtcctggggccagccctggccacatctaccccatcccagatggtgtattggggaagggggggggggctttccattaaagcagttttataacctcaaaaaaaaaaaaaaaaaaaaaaaaaaaaaaaaaaaaaaaaaaaaaaaaaa

SEQ ID NO: 206412 - DNA, 1000 bp, Homo Sapiens
gcccggggcagcccctgcctctggggctctgtggtgtaggctatcttaccatggctttggctgccctgccccaaagccattggcttggatctgagggtctgagttggcagcaaggacccccagctctcactgggctctgtgggctccccctgggctctgtgggctccccctgctccacaggtagactgttgtgggctctttttgcctgggcctcttctgaggcaggagctttcttgagggatgccacaaacagccttccctactccctgccagagcagttccctccctgatgagctggagaagggccctctggcctcctgacagtacagggagggcaccagctagatcctcccttgtggtgtgagatgttcctggaactcagccaggccctcctcctcctgggcttgcccagagcacccaccctattcccagcattgcccgaaggaccaaccagtttgggtgaacagtggcctcctcagcttcctccccatctgggtgccccaccggcggcggagggagctgtggcgatggtggggtgtggggagggacgaggagggaagcctctgtgctgctcacctgcccaaagcccagctcagcgggtacgcagtggaggcgacaaggaaccaatcacaactacagaggtttctctgatcctcctccactcccgctgcttcaacttgactaagcttaaaaaaactgcttttgccatggctcatcggagtttatacttatttcttagaaaatgtttcctgttatttgctggacaagtcccaaagaacaggcagatgttcttattaaaagatcagcctataagattggtcaggaccaggcgcctctggccacgtgcctctcccctccagcacctgcggtctgcggtggcacctggcagctggaccacagccaggagaagggtactattagccctgcttcaaacatgcagaaactgaggcccggggagattaaataacctgcctgaaatgacaaaaaaaaaaaaaaaaaa

SEQ ID NO: 206413 - DNA, 1000 bp, Homo Sapiens
accgccttttcatcaatcgcccacatcactcgagacgtaaattatggctgaatcatccgctaccttcacgccaatggcgcctcaatattctttatctgcctcttcctacacatcgggcgaggcctatattacggatcatttctctactcagaaacctgaaacatcggcattatcctcctgcttgcaactatagcaacagccttcataggctatgtcctcccgtgaggccaaatatcattctgaggggccacagtaattacaaacttactatccgccatcccatacattgggacagacctagttcaatgaatctgaggaggctactcagtagacagtcccaccctcacacgattctttacctttcacttcatcttgcccttcattattgcagccctagcagcactccacctcctattcttgcacgaaacgggatcaaacaaccccctaggaatcacctcccattccgataaaatcaccttccacccttactacacaatcaaagacgccctcggcttacttctcttccttctctccttaatgacattaacactattctcaccagacctcctaggcgacccagacaattataccctagccaaccccttaaacacccctccccacatcaagcccgaatgatatttcctattcgcctacacaattctccgatccgtccctaacaaactaggaggcgtccttgccctattactatccatcctcatcctagcaataatccccatcctccatatatccaaacaacaaagcataatatttcgcccactaagccaatcactttattgactcctagccgcagacctcctcattctaacctgaatcggaggacaaccagtaagctacccttttaccatcattggacaagtagcatccgtactatacttcacaacaatcctaatcctaataccaactatctccctaattgaaaacaaaatactcaaatgggcctaaaaaaaaaaaaaaaaaaaaaaaaaaaaaaaaaaaaaaa

SEQ ID NO: 206414 - DNA, 1000 bp, Homo Sapiens
tcgtcgccgaccgccacacacaggaaccgcttacccaccagctctgcccgcgtctctaccgccatagctgtcgctgccgaagcggccgctgcctcctccagtgcgagggaaccgatgaaacctcactcttaccggccgctcatgctgaggagagcggaccgggacacagcagcggacccgaaagagcgcagactcgggacgaaccggccgctctgccccggacacagcgacctcgggccctccccgcaaacactcctttggactcccagattcgcagccttgtgctgcagcgccacacaagaaaactgaaacaaaacccaacgcggccgtcgaagaccccgaggcagcccagccgccgccaccgcgccgcggccagtactgctccgtctccctccccgggcagcggcggcgcgcagcgcgtctccttccgccggcgcgggcggggcagcagccgcgggagggtcggcggaaccaccgcagacggaaagtagtgcccggccctgcggaggcggcagcggccactgggtccgtccagatccagaggcggcggcggcggcggcagcgggagacgaaaaaatgaagagggccgcgggaaagtaggcgacagctattcaaagcttttgggggtctacctttgtattcgttgctccctcagaggtggaggtgaggggaaagtgaagtgtagtggttccactctgatcacaaaataaactcctgggttgacgcctcacccgcggtttgatgttcagagcacacagcgcccgccgcctgagttagcctgaattagcagtcccgcagtaacagcagcagagcaggacaacacttctactgaaaactaagccccaaagtcacagcagaaccaaccgttcatgacttcaagggaaaacgagggggaaaatgtgatcctttcattcttctcatttgtggtgatactaattacatgtttaagctattcacagatttaaaaaaaaaaaaaaaaaaaaaaaaaaaaaaaaaaaaa

SEQ ID NO: 206415 - DNA, 1000 bp, Homo Sapiens
ctataattgccatctctttgctctctcaacatggtgaacaccatccggactccgtgtatgtctcaaattacaattctttctttgcaaatgaaatatgaaatttagaggctcttctaaacactttaaatttgatttgacattttcaaagcagatgtaagttttagagaatgagattctccataaaaatgaccctttcatgctgtggcctccatagaagatgtcccaggccaggtgcccacatggcaggcatttattttctcacagatctggaagctgcaggtccaacttcgaggggtgggtggggttgtttcctctgaggccgctccttctggctggcagggagtctcttccagccgtgtcctctgtggcctttcctctatgcacacgcacctctgggatctctctgcctccaaatatcatcttttttttttttttttttttgagacagagtgttgctcctcttgtccaggctggaatgcaatggcgcaatctggactcactgcaacctccgcctcccgggtttaagcgattcttctgcttcagcctcccgagtaaaaggcatgcatcaccacacctggttaattttgtagttttagtagagatggggtctcaccatgttggccagactggtctcgaactcctgacctcaggtgatccgcctgtctcggcctctccaagtgctgggattgcgggcgtcagccactatgcccggctgggatcatatgttccacacatgtttgttcaataagcatggactgcaaccacctacatgaatattcatagctcctcctgtagcctgttgaatatgtatgtttagccaacctcttcagcataaagctcctgcccaaacccctcctgctcctaaatgtctgtctctggtgttaaccagaggctgctcttcccaggctgctggatggctaccttgcaggctgtcacccttaacaagaaataaagtgtcctttgcaaatgcaaaaaaaaaaaaaaaaaaaaaaaaaaaaaa

SEQ ID NO: 206416 - DNA, 1000 bp, Homo Sapiens
taatcaaagaaccaaatttattagaccttttttgatgcactaaaaacaggaaatttcctatgaaatatttataaaaactgtattaggctaagctcactactgaagctgtttaatttttgcaatagccttgtgaagtaggtattatgtatcataatttttgcttattttaaaatgaaacactttagattagtcatattaggtatcctaattccttttaaggtctgaaggagcaaccaggggaaggcagtttcatagacacagggaatctgactttggaatatgttcctgttgctgtgtcagaaagtcattcatgtgattagttttagaatgtattgttttgttggaatgtaacctatctctcgttctctaaaccagcagaccccaacctttttggcactgataactggtttcatggaagacaatttttccatggaggaggggggtgccgtggggatggtttcaagatgaaactgttccacctcagatcatcaggcattagttagattctcataaggagtgcacaccctagatccctcgcatgagcggtttataatggggttctgctcctgtgagaatctaatgccactgctgatctgacaggaggcggatcttggtcagtaatgcttgctcgctgcttgctgctcacctcctgctgtgcagccaggttcctaacaggccacagaactctactagtcctcagccctggaggttggggactctcctctaactggctgttcgttatgcctgagagtaaggctttgcatttattccacacctcctgacacttgtttgatcattgcatatgttattaatgaatctacttattaaattattaattataaagcatctcttttaactctcctttggtctaatgatggattaaatcagtacccatgttggatctaaatttcttaatttctaaagtctactgtaaccaaaatacagtagtaatataccagttgtttatacaaaaaaaaaaaaaaaaaaaaaaaaaaaaaaa

SEQ ID NO: 206417 - DNA, 839 bp, Homo Sapiens
gaaaagaggatctaggatccagttggtgcagcttatggcttgtccctgtgtgtatagttgttaaattattcttttatttttatttttaagaagttattctttagataataataggcatgtagcttaaaaggaaacctcaaaagacacaaaggatttgtctcattttaaattaaaaaaatactgtatcagcatcaagtaattaaacatttgttggaatatcataacttcttttttctttattgtatgttccctttcctgtgcttacgtattttcagaaattttagttggtgtgcataccacaatttgtattttatacttaaatatacatttcatggttgtatatttatttgatcaagttcttttatatcaaataacagagcttggcatttggttgcttgctcataactcggcagtaagcatttttaagcatgaagttattctttggttgaattttattcttgatatggggcttaggagtgagatttctggtctacagaaatgatcatgctcatgaattttgacatttatcgtcatgatgctttgcacaagggctgcaccaatttagatcatctttagcggtgaatgagtggattaattttactacaactactgatggtggtggtggaatttcagttgcttttttttgcgaggttaataggtctaaaattttacttttgtttgatgactagtggtttgaatttttcgctgcctgttatattgcttgtatactttgcctgtttgtgtcactgtccttttggattggagtcatactgtttttttttgtttattttaacttatctgtataaaacattgtattcaaaactaaaaaaaaaaaaaaa

SEQ ID NO: 206418 - DNA, 1000 bp, Homo Sapiens
atggtgcaccccagattagaactctaaacccctgaaacccacacagcactctccatcttgcagttcacagcttgagcatccgaggggcatgggaatccacgtctatactcagcccatcttggcaggcaacatgcatttatcaccaccgggaaagtgccattcaacttaggtcaccttacatacatcagcttttggcaaccgggatcttaatttaaaagacagaggctccaaaatgatttcaggactgggctggaaaggatacttctcttttccttatgtcctcctttggctggtttgaagggtttgcattgcttctgatttttctcattgccccatatgatgggtttctgattttgatgttttccatagtgaggatggtgtataactaagaagcccagctttgagttaggaagattaggatccaagtcctaaccttaagcaagtggcttggctgttaaattcttggtgtcctcatcttaaatggaaataatagtacctgctgcacaggttattaatgagtaagtgagataattataacatgttgtgcaaagtgcaaggctgaacattgaatagcaaccacaatgatcattatcattattgcccgtggagcttctctgccgcccatacagcctctctgaggactctccctgcacctagtttttgtgatgataatgggtgtcatgctgacatgtccctcctggatggcttcttccagcacagccagcaagcctgtgctaggcttcaccaccgaagctgcctggccttggacaagccatgtaggttctctgggctttagttttctggaacaaataagagttttgcaagctgcaaaggactgtacaaacgctaggcatcagctagaatgttgaagaagatgcaggacccctggccagtctgaatagcaggaattgggtaggagggtgagactaagccacttttcttatgatacttttgttgaataaagggccactttccaagcaaaaaaaaaaaaaaaaaaaaa

SEQ ID NO: 206419 - DNA, 1000 bp, Homo Sapiens
cagcatgagggaccatattgattaccgctgctgcctgcccccagcaacccaccgtcctcatcccaccagcatctgtgacaacttctcggcttatggctggtgccccctgggaccacagtgtcctcagtctcacgatattgaccttatcattgacactgatgaggctgcggcagaggacaagcggcgacggcgacgacgtagggaaaaacggaagagggctttattgaacctaccggggacacagacctctggggaagctaaggatggtcctcccaagaagcaggtctgtggggatagcatcaagcctgaagaaaccgagcaggaggtggctgccgatgaaactaggaacctgcctcactccaagcaaggcaacaaaaatgacttagagatggggattaaggcagcaaggcctgaaatagctgatagagctacctcagaagtgccagggagccaagccagtcctaacccagtgcctggggatggattgcaccgggctggttttgatgcctttatgacaggttatgtgatggcctatgtggaagtgagccagggaccgcagccctgcagctctggaccctggctccctgaatgccacaataaggtatatttgagtggcaaagctgtacccctcacagtggccaagagccagttctctcgttcctccaaagcccacaatcagaagatgaagctcacttggggcagtagctgatgcaacttccaccttgctctcaggtggaacagaggtattttgggtctctctagcctgaaatgtcatcctcaactgctactgagtttaggggagggggaatgtcttgacagacatcactgcattgccctggaccgcctcctttatcccagtgtttgaggtacaagtaagaaggctgaccagcacctgtaacactgactttatttttaagtctgaaaatgtcttgggaaagttttacaaaaaaaaaaatcaacagaagcaagttatgaaaatattaaaaaaaaaaaaaaaaaa

SEQ ID NO: 206420 - DNA, 1000 bp, Homo Sapiens
ctgatagggaactttcccctgccggatctcaggagcatcagcactcccagcctccaaaatggggacaatgagctcaccaagtcaatgtttaatacattattgacagaacttacgatgattttaggtggctcagggatgtagtaaagtacttgtgttctgctggttaggctaagctgaagtgacaaatggccctcaaatgtctggtttcaacaaaagttcatttgcttttgttgaatgtctggcacatgtctgtcagccagcaggcacctgggaccctgctccgggttagcttcaccccgggactcgggctgccatgtctgacacgtggtggtccactggcagagggacacacgatcggggcaagttctgctggcccttaaagcttctacccagaagtgaccattaaccacttctgcctacattcactgggcaaatcaggtcccatggcaacgtgagagggcatgtactctccctgaggggcagcaaacagtaactaccaaaaccaatgaatattttcattttaatagtttaatgtatgtttatagtaatataaaaagtcttttcagtgtgtgaaaaaaagacatgttgtaggatgggatcctggaatggaaaaaggacattaggtaacaaactaaagaaatctgaggccaggcacagtggctcatgtttgtaatcccagcactttgggggattgaagcgggcggatcacttgagcccaggagtttgagaccaggctaggcaacatggcaaaaccccgtctctacaaaaaaatgcataaattggccgggcgtggtggtgcatgcctgtagtcccagctgctcaggaggctgaggtgggaggatcacctgagtgagcctgaggaggtcagggctgcggtgaaccatgatcacgccactgcactctagcctgggcaacagagtgagatcccgtttcaaaaagaaaaaaatctgaataaactatggactttagttaaaaaaaaaaaaaaaaaaaaaaaaaaaaa

SEQ ID NO: 206421 - DNA, 1000 bp, Homo Sapiens
atcatgcgggtgctcaacgtggatgctcggcggcgctggagcacccgctgcccgagctttgcagacatagcccaggccacagcagccctggagctggggccctacgtgggctaccaggtgatgcggggcctcatgcccctggccttctgtgtccaccctctactctacatggccgcagtgcccagcctgggctgctgctgccgacactgccccggctacagggacagctggaacccagaggacgccaagagcactggccaagccctgcccctcaatgccacagccgcccctaaaccgtcagagccccagtcccgtgagctgagccaatgatgtggcctagcggaagctgcctcctcaccctaggtgttgctggagaaccctgagggcagggcccgagccccgacacatcccttcccccaaaaagcaacacctgtgcttgcagccaggtcaggcccagctgcagcccaggcaggagcagtcgcctttcccacccacagcgctggccacagggctccctgcagggtcagggaccagaccacgcccagaggaggggaggcactggcccccgccacaggactggagacgcaagaacaaaaacaaccaagtagagagagtggagctgctttattgcccttggagcccgcgctctcggaggctgtcttctgtcgccaagggtcccggaccgagtacacagtggcagctggcttagttggtggacggcctggggtaggggagggtggcaggtataagacttctgggggcaccccaagaccccagacacccaagtggcatcttgggggtgggtgggcagaggacggggtaatgtgaggacgaagcgggcacggagccagatggccagtctccaggcctggtccacggactggcagggaccccaggcacaagagctgccacccctctgcccggttttggaaaaaaacaataaaggactgtcccctcaaaaccagccgggggactgttaaaaaaaaaaaaaaaaaaaaaa

SEQ ID NO: 206422 - DNA, 1000 bp, Homo Sapiens
taagaaacctacctttcctgatgctcagtttcctcatctgtaaaatgggaacaaaaataacctgttttgtggagttgttctgtgacggtggttctcatgtgtggtagctggggcagcaccagcagcagtggcggcctcagcatcacctgggaacttgtcagaaatgcaaattctcgggcttcaccctagacctcctgaatcaggaattctgggaatgactaggcaaactattttcatgagccctgtaggtgattctgaagcttgttcaagtttgagagtcactgacctatggattaaggtgagtgagtgcacctgtgacagaacaagtgctcactgctcttggtttccttattaaaagagggagggagttgaaatggggtagctctcagattgcctctctcctgttttattttgtgattctcccttttagccatggaattgggggaaggaaagaggaaccatttgtctatcacaaactgtcccagagtcttccagatttcacgtttggaatgaaagtctcaggaaggcacggactttgttttcttcctcatgtatggcatagagcagcggtccccaacccctgggccacagatcagtatcgttctgtggcctgttaggaaccaggctgcacagcaggaagtgagcggcgggccagcaagctaagcttcatctgtttttacagccgcttcccattgcttccgttactgcctgagccccacctcctgttagatcagcggtggcattagattctcataggagtgcgaaccctattgtgaactgcccacgcgagggatgtaggttgtccgctgcttatgagaatccagcacctgccgatctgtcactgttccccgtcaccctcagatgggaccgtctagttgtaggaaaacaagctcagggctcccactgattctacattttggtgagttgtataattgttatgtattgcaatgtaataataatagaaataaagtgtacgataaatgcaaaaaaaaaaaaaaaa

SEQ ID NO: 206423 - DNA, 1000 bp, Homo Sapiens
attaacttcacgtgagaaaaaaactgtagaaacgttaactcctgtagaatgatgactatctgtggtgtagtaagatcatacaacttctctacttgttactgtgagttgcttaataaatggcagtacaagtgtcaaatccataattagtcaatatcaagagctgcattttggattgcatgtactgtcccaaatatatgttgtgcaagttactttgtatcatgttaatggagaaaagagtggatattatgaaatcagcaatataaatcaaatgtatatgtggtcctgcaatgtaattgaaggtactcagtgttctcagacactcatgcaatatcttgtgttgctttctcagattttttaggtgtatcataggggatagctgggaactggtagagcagaggtactaagttccacctggaaatgctttagagtagctctttgaatatgtctttacttattatcttacagcgtatgtgtatatgattattttctagagggtcgtacccttttattaagctgtgagcttcttgagggcaaggactgcaattcattaatcattttggagaaaagtgaataattctgaagaattcggtggttcatgagcttgcctggtatttgtttctctatggcttatcatctaagtgagataacagatagtagataattgataaatttaatctgttacctaattactgagaggattcgattcttgctttatgttattactgaaacagactgcccagtaatcttctctagagagcaattaggtttgcaatgagttattttattgagaatgctacttgaaattaaatgtttatagcactatcttgatataatttaaatataatttaaatgtgctgaagtatcttcattcagataacttgttaccccttaacaaaaggctgcttgagtattgtttctctcccatttggcaaacaccagatgcagtgattaataaaggtcattatgctacaaaaaaaaaaaaaaaaaaaaaaaaaaaaaa

SEQ ID NO: 206424 - DNA, 1000 bp, Homo Sapiens
atcctgcgtgtcgtgtctgtgggcgatccggcctcccggcggtgggtggacctggattctaactcagaggacttgagcctgctgttaactccgatgattgtagggacaggcggggtgggtggggggtgggcgcgaggctgggtcccggcccaggagaaggaagtcgctgaaggcagtggccatgctggccgtggaaatgggaggcggttgcagggggtctatggggcccggtcctggatactcggcaggaagccgtgtctgcagaggctcctccctgcctcaggtggccccgttcaaccccagccgtgcccatctcctgccaccgcctgtcggtgggggtttaaattcggtgtggctttctggggtgcagctcagcacccccccttaatgcagactgggagggggtcgggcagtcccctcagccacgaggaccctggatgggttctagttcacttgggaccgtggggcctggctgcgtactgagtgggtgccccacagtcaaggccaacgggggctccccctgctctgagatgttgggagaaaggcggcttctggaaccttccgtgggacccgtaagtggctgtccagaaaggcgggagggtgggcacggggcacggggggcagctggggtcgtcgttaagggtcacgcatctgtacagttgaatttcctttctcttatcatgttttacccaccttgtcccttttttccccaattgtgcttttgcatttttttccttggcaaatgtaaactcagcctttcattcatgacgtgtgaaatttcagtttctctggagtttgtcagacggcgtgggaaccacgcctgaaactcaggtaataggaggagaaaaaaaaaaacttaaaaaaatttttaaaaaacataaaactactctctacctctggctgggcccagcctgtctcgccctggccgcggcagggtggcctgtaacaatttcagttttcgcagaacattcaggtattaaaaggaaaaaaaaaaaaaaaa

SEQ ID NO: 206425 - DNA, 1000 bp, Homo Sapiens
agacagagatggagagagacatagaggtggaaatatacagagaaagataaatgcagagaccaaggcagggagtgtcgggggaagtaaagagggtgtcctgaagaaagaaggatctgttcactcttaccagtctgtcctcgaatgatttgcataaaatgaggaggtgcctgtccacacccccaattcctctctcaggccccagagcctgagacctcaccatgcccccatcagagatgcaaaaaactaaacacccaactagaaatccttgggacctctctcggctgggatctcagagcctttctgtcccctacccctaccccatgtgctgtcgattttgcagatggggacaacctggggcctcccggaactctgccaccctggggaagttgggggagggccttagtcccggatcacaaccccgtctgctccccagaatcctttcctaagaatcgttgaggaccaaagttgtctttgctgacacgtgttgcttttctctttgccttttattgtttcagagaaaaatcaagttgactgtgtcaagtaacaccccaccccttacccccgtccagccatagtggctctctggagacacaggtcacaggcggagggtcccctgatcatccccaaccacacagccagggggacttgacccctgtccacccctgtctcgtgctccctcagacccccacaaaccggccaagcagtccggggaggcttcccctccacacaactcttagcatgtgattgcagatgtgaaatcaaaacgttgtttgttttttgttttgttttgattctaccccgtcggtccagtgtctgcacagacgccttcatttctctgtaaatatgtgacttggaacaaatgtttaacacaaacgagaagtggtcatgaatgcatggtgttgagatgttttgcactattctgactttttggtctctgtaaaaatattttattaacagcagacattaaaaaaagaaaaaccacaaaaaaaaaaaaaaaaaa

SEQ ID NO: 206426 - DNA, 1000 bp, Homo Sapiens
tctgagctcctctgtgtgacatgccacagatgactattgcacacctgggtcctgccccagcaggccatgcccctcccatgtgccgtgcctgttgctgcagctgccccccgaccccgccactggctgcaggaattcagcctttagaggcagaggcagctgcagcggcccctgaggtcaaaccccagtgtgactgcatagcagtgttagctggttggtttcaaactactggattccaggcaaaggcctacagattgaccttattatttttgaaaatatgttaagggttttttcatagagagagaaagaatggatttttttttaactgggaacctcctgattcttacggaaaattatccttctataagaagataccagagagatttattcaaggtaatttgataacctaaaatcaattctccattttttatcatatgtgggatttgttgctaagtcgtgttcaacaatagcttttatgttcctaacatatctgaaagcttatttatgaatggatatactggattattgatatactgattttttttttaatggggacatttgccattttcttcccagaaatatgtaatcccctggctgactaggactgttaaacatagtgtggactggatgatgccttcgacaaaccagagaagccaagttggggggagctggtgcctggagtgggccctgtgcacctcacctggcggaggctgggggggctctgtcagcaggaccctagaggagactctcattcgattttaaagaagcacaacgggtcattttcctttgtatgttcctagcgcagaactgtttctaaaacaacttgaagtatagttttgttatctaagcaatttttgttttaagtaagtaagtgtactagaatgcgaagccgttatggttcaggtttttaaaaactggtacagtattgtatctgtctcatctgttgcactgtatttcaatcatctgtaattaaaatgatcatatgtttaaaaaaaaaaaaaaa

SEQ ID NO: 206427 - DNA, 1000 bp, Homo Sapiens
aataacagtcaccctgctaactttccttagcatgagtgaacagtgagagataaaaatgaaatcttggttaaccttgccaaatctccaggacaccgaagagttaaaaagagagaaaaacaaaaagattaagctctttttcaaaaaaacaaaaccacttaatttttttctacctaaaaccataacaagaaaaaatgctaacacttatttatttgaatggcacatggagaccgggcatgtggctcacacttgtaatcccagcaccttggaaggcggaggcgggtggatcacctgaagtcaggagttcaagaccagcctggccaacatggtgaagtcccgtccctactaaaaatacaaaaattagccaggtgtggtggtgcgcacctgtaatcccagctactcaggaggctgaggcaggagaatcacttgaatccgggaggtggaggttgcagtgagaggagattgagccattgcactccagcctgggcaacagagtgagactccatctcgaaaaacaaacaaacaaacaaaaaacagaatggcacattgatgagcattcattgattgattctttagtttttttatgttctctaaagaatttttaagatttaaagaagcatgtgctatttatttgtaggaaatcctcagaaaaggtacaaataaaaaataaaaattatccataattaataccagagattataattgttaattattatggtgttttctttgctagtatttaagatcattattaagatcacatacacatttttgcttactatcattagcatttgatgatatgatttttttaatttttatacattgttttaatggctgcacgatatttcattgtgtacaaataaaataactactgttccgctttgaaaaaaaaaaaaaaaaaaaaaaaaaaaaaaaaaaaaaaaaaaaaaaaaaaaaaaaaaaaaaaaaaaaaaaaaaaaaaaaaaaaaaaaaaaaaaaaaaaaaaaaaaaaaaaaaaaaaaaaaaa

SEQ ID NO: 206428 - DNA, 1000 bp, Homo Sapiens
tgaatagtaaaagggatacggttaaatccagtgacagttttcagtattcttccctttgtttcatcaaagggaatatattcgactttagggttgggaggacctcttggcgcaggagctgaagttctgaaatcatctatcactttctccagtttgaaaataaaatagcctttaaattgggaccactgaatctgtttctccagtcttggctacatgacaaaggaactgatccaggacaggacagactttcttttttgcctcttctcaaaatcttccagcgcctcctggagcctgtcgacgtccatggcttcccagagtccctcacagcctccgtctccctccgcgggtctcttggggaccggaacgcctccccccaccccccgacatcctcccactccctcgcacaccctccagcacgcaggccaagtggggtgggggggaacgaagggagccaggggaagcgtgtgagagagtgagaccgacagagtgagcacctccccaagccgctaccaccagccctccaacatggcgcctggcacatcaccctaaaaagtcatttcttggagaagcgatggatgacagagattaatctgagagttactattaatggagaaacttagaacttaccatttttcctgtgaggtttcggtgctgatacttctattctgtgagttctggcaattgtgtccgttcacccagcctggtgatgcagcaggtgtcacagaaggaccctgtcccagctggtcctgctccactgctaggatggtgtggcctctgatctgtgaccgtgtcttgaggggagaccaggcccttgatcacaagcgtatccatggtgaggttccgtggatggaagctcatggatgttccttcctgatgttcatctgccaccatgctattgaatgcatcttgtttataactgtcttctaaatattgaatagaaataaagcatttgtacagtaaaaaaaaaaaaaaaaaactcgaaaatagttctctctctcctagt

SEQ ID NO: 206429 - DNA, 1000 bp, Homo Sapiens
cctgggtatatacaactttcttttgctctgaggtaacttaacatttattggtgattagagacttttttttgtattttcttcagatttgagctaatggaacactgggatgattgttcagtttatttaggttagatggcgatttcagtttcatatgatatagactttaaaaaatcttagtgcattattttaatgttttataacttattaccctaacaagttgtcataatcatttagtgtattcttttttcttggcatagctacttaatgacccttattttgttagattatttttaaatgttttaggagacctgatctctacgctttggaaacaacaaaatcttcataggcactgtgataactgctttcatactgtattatctcttaattcttcagtatctcaacaagatagccattgttcccattttcagatgaagtcactggtgctcagacagataaaagaaatttacacaaggcaaataggagctttggattatttggatggttattcaagtctagctaacttcaaagccagttaatttttttttttaatacaggaagcgtttggtgaaataacagtctttccaaaaatgattgatattgcattctcaagaaggtctttgatagccaaatttctagcacctttagtagatgcctttcttgcccctgaaactgtctcaagtatctgtattaaaccattgttaactttattcatgattctttagatagtaatgattaataatattagctaatatatatattgtttagcatgtgccaggaatcataccaaatacttcatatgtacaaactgatgtgaagccagtggcacagagtaagctctcagtaaagtattagttgctttattgttattaaaaacgtgtctggctcccagcacttcgggaggccgagacaggaggattgcttgagtccaggagttagagaccagcctaggcaacgtagtgagactttgtctctatttaaaaaaaaaaaaaaaaaaaaaaaa

SEQ ID NO: 206430 - DNA, 1000 bp, Homo Sapiens
ggctcgacagctggaaaatgaacttgacctgaaactagtttccttcagcaaactatgtacaagttacagtcatagcagtacccgagatggaagacgcgacaggtatagttctgatacaacaccccttttaaatggatcaagccaagacagaatgtttgagacaatggcgattgagattgaacaacttttggcaaggcttacaggggtaaatgataaaatggcagaatataccaacagtgcaggtgtcccctccttgaatgcagccctgatgcatacattacagcggcatagagacatattgcaggtaatatattgggctcgagatgttttcattatcacaggagtttgggtttttttttttaatccctgcattggatatgtgcacatatatttaaaaggacaaagagaaaaatctgagaaaataaatgccatgctaaagggacttgttttacttttttttggggtcaccattataaaattctgaaaatatctaatagctcttgctatttcttggcgaagttgagtaatattcatcactgggtacatatacttccactatgggagacctagctagctagctgtaacagtgaaatagccaatggtcatgtatagacaataacgtggtgggtaagcgtgtactttcagctagctttgaagataatatggagggggaattatttactatacttagtatattgtttaagaaaacagtaaatgtgtatgcaccaataaaactaaataaacttttaaagatttaaatggaggatatgttaaaaatatggtagtacaaatagaaaggactttctaaataagacttgatactggaaaccataacgaatggctaatttgcttactacacagagatataatagaaataagaaaaagacagtaggaaaatggacaaaggatataaaattgcttacaaaaaaatgaatggccaaaactataaaaacattttcagcagtatttccaaaaaaaaaaaaaaaaaaaaaaaaaaaaa

SEQ ID NO: 206431 - DNA, 1000 bp, Homo Sapiens
cagtacccccttcaaccagagcagctgcatttttatcccattcatatattggggttttgaattatttttatttgtacaaaaggattttcctagccactaaaaaaaatggcaacaaatctctctgctgtgtcacatttaataaataattgtgacacatagctggggggtggtgctggaggtttcagaccgcctcacaggcagagttccagggtcagagagcatggagtactgtgtgtgaccttcttccagaagcacgggcacaggagcatgttaaaggccctgaaaagaccagtggcaaagaaactcctttcattttgtttaatccagagtttttcaagcttatttaactatagaacacttttctgtgggtttcgtagcctctttctagcacagtatagtgagtgggaaaggccctgactgagagtcaaagattctgagcaggaaccatgatctcttcctgcctagtatgtgacttgagcaagacacttttcctctccccaggcctctgaggtctgcgagttttcctccaccctttcctctccctcagtttgcacatcctattgactcagctccaaatagcgggggcctgtcaggagcctgactctgttcagacaccagggaaacaacagcacgccaggcagatgcagttatgtccatcggggaacttacagcctagcaaggaaggcagcaattcaacctgtaagtctaaaagtgatgggtgtcatgaaaaggtaagtgcagggtgctgggagagtggttggcaggggctttagcctagtctagggagagcccaggggcacaccactgccagcggggatagaggcttcaaaagctttgaagtcactcatattaagagtgttgccggacacggtggctcatgcctgtaatcccagcactttgggaggctgcggcaggcagattgcctgagcccagaagttcgaggccagcctggccaacatgacaaaaccctgtctctacaaaaaaaaaaaaaaaaaaaaaa

SEQ ID NO: 206432 - DNA, 1000 bp, Homo Sapiens
catcctgtgccgaattgtcccagacagaccgtcgccattgctcggtcactgtgctttgcaggcctggggcgcagctctccaagcctgtcctgccccgccccaccccactgggcttaggttagcttcgtgccttagtatctcgggcccactgcaggagccaacaccctctgctgtccagggggggtctgtggccctaagattggccggcctctccatgcatctggccagcgtccccttggagacaccttcaccctcaagcgctgcagaagcatgaggtgagggcctgcagcgctctgtaccgtttagggtgttggaccagccgggagcctggcaggcctggcccagcggccagggtgagtgttctcagaccccgggcagctggtggttctccagggccaggtaccccttttgtgtgtgcgacctctgactaggtccctgtgggaatggggcagatggcggccatcaccactgggtcccagggcagaagcttagataccggccttgagcagcccgaccttccaccgctgcctggatcccaagcctcagccgacccaggggaccttggtggcaacggtgtgactgacagcaccacccctagcctttgcatgcccaggggtcgagagccagtatccggcccagacaatgccacccgccatggaagaaaagctgaccctgcccacctgctgcagacccgggccccgggccgaggttgctttctgtgacgaccgcctggtgacgctggacaccaggagggttatggcactgccctcccctcctggagcccctggcactgaccacctggacttgacctgactcctggtcactggccaaacacccatcctcaccccagccaccccgggccctggctggtgccgtgtgacacctgtagcccacctgtgtgtctttgctccgcccacccctgcgtggcgccggtcaggcgcaaacctggcgccagtgtctaaatgtccatcattctcagaccaaaaaaaaaaaaaaaaaa

SEQ ID NO: 206433 - DNA, 1000 bp, Homo Sapiens
tagaggtcttggggccgaaacgatctcaacctattctcaaactttaaatgggtaagaagcccggctcgctggcgtggagccgggcgtggaatgcgagtgcctagtgggccacttttggtaagcagaactggcgctgcgggatgaaccgaacgccgggttaaggcgcccgatgccgacgctcatcagaccccagaaaaggtgttggttgatatagacagcaggacggtggccatggaagtcggaatccgctaaggagtgtgtaacaactcacctgccgaatcaactagccctgaaaatggatggcgctggagcgtcgggcccatacccggccgtcgccggcagtcgagagtggacgggagcggcgggggcggcgcgcgcgcgcgcgcgtgtggtgtgcgtcggagggcggcggcggcggcggcggcgggggtgtggggtccttcccccgcccccccccccacgcctcctcccctcctcccgcccacgccccgctccccgcccccggagccccgcggacgctacgccgcgacgagtaggagggccgctgcggtgagccttgaagcctagggcgcgggcccgggtggagccgccgcaggtgcagatcttggtggtagtagcaaatattcaaacgagaactttgaaggccgaagtggagaagggttccatgtgaacagcagttgaacatgggtcagtcggtcctgagagatgggcgagcgccgttccgaagggacgggcgatggcctccgttgccctcggccgatcgaaagggagtcgggttcagatccccgaatccggagtggcggagatgggcgccgcgaggcgtccagtgcggtaacgcgaccgatcccggagaagccggcgggagccccggggagagttctcttttctttgtgaagagcagggcttgttagattgtggctacttaataaatgttttttgttatgaagtctaaaaaaaaaaaaaaaaaaaaaaaaaaaaaaaaaaaaaaaaaaaaaaaaaa

SEQ ID NO: 206434 - DNA, 1000 bp, Homo Sapiens
tctctccctgcttctcttaccacctgtgccaaacggatactcctgttatatatactgtgccccaggtaacctactgtgggacacattctgggttgtactgagtttgtgttgttaagagttaagtccttaaacttggctcaaaataaatttaactgtgatttctctaatttttagtgcctactgtttcaccagacacctagagtcaatagtgtcctagaatctacggtgtccagggcttgagcaagatactttagtgaatataaacactaacgagaccttgccttttctcaagcctacaggatatcagcctatttgaaaagtgacactggctttacacccagaagcccacaaaatagaatgatgtaactgaattttttggtagctctctgggtaatttatgtggtgttagactcttgggtttgaaagaaagagactcgtgatcccattctggcatgacagaaacttcattggaagatgaggatgtttctctgggaaaatataaacaataagtgtgagcgttttagcagtgaatgtattaatattatgttggaaattgtattgctaaagagttaaagagaaaatagtgtaattaatttaaagaaaccttcaagaatttcagggtgcttttataaatgcaagttcctgaatatggtcaaacccaaaacgtcagtgaatttagaagagtagatgttttaaaagacctgattttaaaagaatgaccaaaaatagccaagtaaatagtcaaggaaatatataaaagaatatcaaagtaaactagaaaataacaaatggaacaatttgtaaaaatgaaagctataaataatgaaatggagaacaagacatagtgcaaaggatatataaagccaaaagttcatttttaaatggcaaaaacagagagagaagaagaaagagagagataaacttctggtaaggcatttattaaaagaaatacaagagaaagagaaaaaagcaaaaaaaaaaaaaaaaaaaaaaaaaaaaa

SEQ ID NO: 206435 - DNA, 1000 bp, Homo Sapiens
attctctggcacagcctcctcccgtagggtcagcctcagactgcaggccacatcctgggcctcctatagggtcagcccgacctgccctgccaacacctgccttccctcctctaaactccaaaagcatttcccttcatcagatcattgaggcacaaagtccagcaaggctggagctgctaaccacctgctgggtgtgcgtcagctcctccccgcgcggcgagccatgggaaggccacagcctcttctctggaccgcccagggctctgaggcatctgaagcccccgtcccagcccaggccagtacaatctcaatctaaggagccagtcttccgtagtctaagcaccgggctggaagggaggccatgcgtaggtaagcggtgccaccccaggctcaggagctgagcgccagctcccgccagcaggaattgcacgcgcctggcccagggctgccactctggctgcaaactcagtttctgtgacttcagtccctctctggtgtctgtattccattagcctggcctcttccctgatgcatcccaagacagatgctgccttgctctcgcctgtcccttctcaacaaacgaggggctgcttctacccttgtctggacttctgaatattactgacccctgtgggctaccctctgtagagaaatccagctgatccctcctacccggtgaccagaatctactgcgtcctgcggatacaggggccatcctccagacaatctctgttgtcagcgccagaagccggaacaggtcccccagcacctcccctgcctcggtgagcagcgtgtgggtctggccctggcctctgcctgcacgccgcatgtttgaccacacaggcacctgcctcggggttaccagcaatgtttccaagccccaagaaacactgtgagataacccactcttactaaataaaatgacagccttggtgagcaataggtcctttgggcaaagcagaaaaaaaaaaaaaaaaaaaaaaaaaaaaaaaaaaaaaaa

SEQ ID NO: 206436 - DNA, 838 bp, Homo Sapiens
gcttgatgggaagtatgggcagcatgtacttgacacgttatcacccagtccccttgtaaaatctggaatggagcgtttaagctgagcgttagcatcaggtcagcaggcaaagcaaacctcccacaaactgggtgccgtaaggtgggaggtgacacatggagagcttcgtcctggccgagcaggcacccagccccatgtcccccgccagcattctggatgtcagaggagggtgcgtgtgatggcgtcacattcatctgaagcacactgattgattttccacaaggtggcaagtttgatcaaattgaccgcttttcatgagacaaccagatgctgtaaaaaaaaaaaacagcactgggatgtgttgaggagggggcagtttgctgtgctctgttctgtctgctgctctctctgggggccgcacaatgtccgcacacatcacggaggggagaaaggcatcagtaccaaacggaacaacctcttttttctacattgtccatacccggacatgtgaggctctattatcaacaggtggtgagaaaaattctgtttttattcgctttctggtaacttctgtaggccctggctcaaggacttagcatttcgtctcatgtacatctttttcttaagtgttctttgccatttctggaattgtccttggtttttccttagctcataggtcatagatgcagaaatatagtatttaaggcatccgcatccagcatcagatggctttgcatccagaaaaacattgataactcagtttgaagcaccaagcatgtgtaatatggctctatacaatataataaatgcataatgttaagctttttaaaaaaaaaaa

SEQ ID NO: 206437 - DNA, 1000 bp, Homo Sapiens
ggtgttccttttattgaaagggaagctgagatacggaagaagtgtcttgccagaggtcacacagctagtaaatttcagagctgggattcaaatctagctcttctagttcaaatcttttgtttcttccactctacaagtctgccttgttagaattcaatgaaagcttctctccattctactggccaccactgtaatccagaatctcatttcttctaatttactattctgtattagccacttaactagtctccttgctgtctaattctgttctatattatatatactgttgccattttattcttcttggaacattgttttcgtcctgagatttccctgtttaagaaccttctccctatctcttagaacttttcaggctaaccttgtgttagcattctttaggatcctcattgttcagctgaatgagagcctaaatccatcctattatgagtaattaatgggctatataatagtgagattaacggagtccctccctattcctagacttcacctttggcaagattttcatgtgtacagttttaatcaggcatgacaagaagatacaaaagaaacagaaaatcacagcccataaaaagcaagttacataataatatgaataatacaatcctatttatatctcacatgcatgcattttttaaaacaagaatgagatatatagaaattgcctggaagaaaacacatcagactgggcgcgatggctcacgcctgtaatcccagcgctttgagaggccaaggcgggcagatcacctgaggtcaggagttcgagaccagcctggccaacatggcgaaaccctgtctctactaaaaatacagaaattggccgagtgtggtggtgtatgcctgttatcctagctgcttgggaggctgaggcaggagaatcgcttgaacctgggagatggagattgcagtgagtcaagatcttgccactgcactccagtttgggcaacagagtgagactccatctcaaaaaaaaaaaaaaaaa

SEQ ID NO: 206438 - DNA, 1000 bp, Homo Sapiens
ctttggatgccctctttgatgtttttgcagatggtaaagaagccgaaagagcctcgattcaaattaaattattatctgctctgaaagaattccagccggtctttaaaatgaagatacgtaaagaagggagaggtaactatagcacagatcagctgtgtgttcttgacaatgtgaaaatgaatttgcgaagatttattgcttatcaagaaactgttgagaaaagactgacttcttaaacaatccaaaaaagaaaccaggttatttggggcccacgtgtgttccgctttctcacattcccacgagaaggttcagctcaccgcagtttaggacccagccgcaaagccgggctcattctggggagtgattttcttcacggaggctcgatacgcaggcgccgtctgcaggcaacagcttctgctgaagggcagccgtatttagaacagcggaaatgtgcagggtgagagtaagggggacacggctgaagggagcctatgggtggaatgagtgacggagaggcacaattttggaatgaagaagatatagatcatttgcggaaattacaaatgtggttgccaagagacagggtctcgctatgttgcccaagctggaggaagtggaattcctgagagcagcagagatcgagcttggggttacggtttgctgcgtctgagcaaaaggacctgcgagaacaggccgagcgcagtggctcacgcctgtaattccagcactttgggaggccgaggcgggcagatcacctgagttccagaccagcctggccaacatggtgaaaccccgtctctactaaaaaatacaaaaattagccgggcgtggtgtcgtgcacctgatattccagctgctccggaggctgaggcaagagaatcgctggaacccgggaggcggaggttgcagtgagcagagatggcagcactgcactccaccctgggcgacagagctagactccatcttaaaaaaaaaaaaaaaaaaaaaaaaaaaaaaaaaa

SEQ ID NO: 206439 - DNA, 1000 bp, Homo Sapiens
ttgaggaggacaagcagaggatcgagctgctgcgggcccagcgcaaattccgaccctactgagccgtgagagccgcagtggatggctggaggtgcagggccaggaggaacatgagttctcagcacgtggagtacagaggagaagcttcataaatgcagctgagtggattaattccgggaagctcccgtaaggaccagctcccctaagttacacccgatactcctgcaccattgtgaatataaaattgccatgaacacacacacacacacacacacacacacacaaattgctatgaacacacacacaccagtgaaaactcactgccctgtttccaccctggccctccagctattttctgcttctcagactaaaatgacctgaagtgccttccctgaaacaggggttcccatactgttcccaaggcctgcatgttctcatatgtcagctgccacatctcacagcggggtgtgaccaagctttttgggcctgcacacaggaggggcttcctgggcacaaggtgaacaggcaaacttgaccctgtctctactaaaaatatgaaaattagactgggcacagtcactcacgcctgtaatcccaccattttgggaagctgaggcaggtggatcgcctgaggtcagaagttcgagaccagtttggcaaacgtggtgaaaccccatctctactaaaattacaacaaattggctgggcatggtgtcaggcgcctgtaatcccagctactcaggaggctgaggcaggagaattgcttgaacccgggaggcagaagttgcaggcagccaaactcgggccaccgcactccaccctggatgacagagtaagacttggtctctaaataaataaataaatagaaggtaggtgctttgcttcagcagcacatatactgctaaattggaacaacaaagagatgattagcgtggcccctgtgcaagcgtgatacgaaaatttgtgaaatgttcctttacaagaaaaaaaaaaaaaaaaa

SEQ ID NO: 206440 - DNA, 1000 bp, Homo Sapiens
tggccttcagaatttctcctttggatcaattactagcctgtcttacattttctgcttcattcttttaaaatgtttagagatgatttgctaagttttcttcattgctgtcaatgatgcaatttaaactgtcaaaaaaattttttctcaagccgggtagtaatggtgaaccattcccttgctattcagacagcatggtttagatgaggcgcacctatccccagctttaggaatggaaacaggacccaagtctggctaatcagagactggtttagggtcggccccatggtctgagccagaccaatgagaattggtagagggacttccttttgcaacttctattttagaatcgggggtatatatgcaggcttgttacagaggtatattgcatggtgctgaggtttggagtatgaacgaatccgtccttcaggtaatgagcatagtacccaataggtagtttcaacccttgcccccttcctccttccccagtcttgtattccccagtgtctgttgttcccagacattgatctttttcctctatgttgctaagctggtagaaaggctggagttgctggcaaccatctttgcaaccatgcagggagaactactttggaaatgaagcaagacaaagaagaaaacagataaaaggagacaaatgtttgactttgtacagctggaaaccagcaatgctggaaatgagcactgaaggcagtttaatgggtttgtcacttgtaaccaagtgacccatggcaagctcacagatttgtattggcagaattcctccttttctttatttaaaatggtacttttggccaggcaaggtggttcacacctgtaatccaaagactttgggaggccgaggcgcactgatcacccaaggtcagaagttcgagaacagcctggccaacattggcgaaaccccatctctactaaaaatacaaaccattagctggctgcggtggcctttctaccagctttttgtctcaaaaaaaaaaaaaaaaaa

SEQ ID NO: 206441 - DNA, 1000 bp, Homo Sapiens
caacatttggaaagaacaggtcttctaaatgcaaggaaatcccccattacatatgcaaaagagatactgcggcttttagaggctgtgcaggagcctgagcgagtggcagcccttcactgcctgggacatcaaagaggaaactcctcagtgacattgggaaatgcaagggctgacaggaaagctaagagggaactccgggagcagtggcccagctagccttgttcccctgtgcccattctcttgacgtaaatccatcttaactacaaaagaactagcagctcagcgtggtggctgtaatcccagcactttaggaggccaaggcgggcggatcatctgaggtcaggagttcgagaccagcctggccaacatggtgaaaccctgtctctactggaagtacaaaaattagctggccgtgatggcatgcacccgtgatcccagctgctcgggaggctgaggcaggagagtcacttgaactggggaggcagaggttgcagcgacccgagatcgcaccattgcactccagcctgggtgacagagcaagactctgactcaaaactaataataattaaaacatcaaaacaagcataagctaaagaaagtcaggggactctaacacctgaaggttagtggctcataggtcaaaagctcttgcttcctcagccagaccagtagaaaatggttaaaagtttacatgattcccagctgggcacagtggctcacacctgtaatcccagcactttgggaggccgaagcacgtggatcacttgaggtcaggagttctagaccaccctggcctacatggagaaaccccgtctctactaaaaatacaaaaattagccgggcatggtggcacccacctgtaattccagctactcgggaggctgaggcaggagaatcacttgaacccgggaggcagaggttgcagtgagccgagatcgtgccactgcactccagcctgggtgacagagtgagactctgtctcaaaaaaaaaaaaaaaaaa

SEQ ID NO: 206442 - DNA, 998 bp, Homo Sapiens; identical to SEQ ID NO: 58248

SEQ ID NO: 206443 - DNA, 298 bp, Homo Sapiens
gggggcgctaagatggcgactcccatgcatcggctaatagcccggagacaagcattcgacacagagttgcagcctgtcaagaccttttggatcctgattcagccatccatcgttattagagacagtgttgcccaggctggtctcaaactcctgagctcgggtgatcctgccttggcctctcaaagtgccaggattataggcgtgagccactgcgtccagcctcatacctgagctttagatgatatttgtgaatgtcgtatttataacaataaaaaaaaaaaaaaaaaaaaaaaaaaaa

SEQ ID NO: 206444 - DNA, 497 bp, Homo Sapiens
ggggggggcggagcgtctgggatgcgctgggagcctaggatccccgacagttttgcagaacactgaaatctatggactctaaaatggacttcatttaaagaaacccacggaccattaatggacaaaaacatgagtcaatatgtattgtggcattcaaatcctagcactctgggagagcatcaagtaccacgtttttgaagaccatggcctatcatcattatgcattcaagatttgagtttgaataacctcatcaagacttagatcttcttcagaagcttcaagtctcatctgcattaaagctctccattgaaccctctcacaaaagtacaagcttaaaggggctaaaatccattaatacattccattttatatcccttcctctgacttctcttcaatttccttggcctctagggtccttcatattgcttacgttcctttagactagagccaaggagacagtgctttcaaaaaaaaaaaaaaaaaaaaaaaaaaaaaa

SEQ ID NO: 206445 - DNA, 1000 bp, Homo Sapiens
actgattttgtcacttgtaccagctaacgcatctgggaggcaacaaaacaatactctcctgaggttaatgtggaccaaaaactagatttcatataaaagagtttattccttctacttgaggtgtgacatgaaggaaagtaatggaaataattctgccctcccattctcaagggccagggggaattcaaatattgaacggaagtgattttggaattgcatggaattctcactgccatcccaaagaaatgctgatcttgtcactcttacctgtttcattccctgggggcagaacaaaaggacgcactccaaagatcggcatgaaccaagaactgggtttcatataaaatattttattctgtcctcttgagatgtgacatgagaaaagtattgagaatacttctatcacctcatcttcaagaatccgtaggaattctcccatggtggactttacggttaacctgaacaggtcttggaaaaaggactttaaacattctcctgttctgtggaataagtatacttttttctggacatacaccttgtcagtgagttccatgtgatactagagttgcatagatttttaacctttacgccaatgaagatctgaggcaaacattgccccttttttagaagtttgcatttgtcactgataactgtaataattgatcttgttgaaaagcctgggaaatgaagatctgatatgtcacttttaccggcttcctcaactgaaaaagaatacaatgaaacacgctgagaatttttgtgctttctcagtcttgctgatgatctttctatgggcctgaagcgtggagagtgccagagaggctgatcctcagcagtgtggcagaggaaagttgggtgcgactaaggggtatgcggtgcccacatgccactgggtcctcagcagtaccacctggtcaacaaagacaaggcacctagccccacatgaaactttattcctttcccttttgagatgtgacatgaaaaaaaaaaaaaaaaaaaa

SEQ ID NO: 206446 - DNA, 1000 bp, Homo Sapiens
aagaagaagcacaaaggaatttccaggacttcttcttttctcattttcccctgtttgaatctcacatgaacaggctgaagagtgcaattgaaaaggctatgatctcctgtaggaaaatagcagaatcaagtctccgagtccagttttatgtcagccgtttgatggaagctctgggagaattcagaggaactatctggaacttatattctgttccaaggatagctgaacctgtatggcttactatgatgtccggcactttggaaaaaaaccagctctgccagcgctttctcaaggagtttacacttctgatagaacagataaataaaaaccagttttttgctgccttactgactgcggtgttaacctaccacctggcctgggtcccaactgtcatgcctgtggatcaccctcccatcaaagccttctcagagaaacgtacctcccagtcagtgaacatgctggccaaaacacatccgtataatcctctttgggcacagctgggtgatctttacggagccataggctctccagtgagactgactcgcaccgtagtggtagggaagcagaaggacttagtccagcgaatactttatgtcctgacctactttctccgttgctctgagctacaagagaaccagctgacctggagtggcaatcatggtgaaggtgaccaagttttaaatgggagcaagatcataacagccttggagaaaggagaggtggaggagtctgagtatgtggtcattacggtgaggaacgagcccgctcttgtaccccccatcctaccaccaacagcagcagagagacacaacccctggccgacagggtttcctgagtgcccagagggcactgacagtagagacctgggtcttaaacctgacaaagaagctaacaggaggccagagcagggttctgaggcttgcagcgcagggtgcctggggccagcatcagacgcttcctggaaacctcagaatgcattttgtgggaaaaaaaaaaaaaa

SEQ ID NO: 206447 - DNA, 1000 bp, Homo Sapiens
ttaatcctttcactggagataattcttagtaattagcttcacccagcaccctccctaacctcccgctacttctactcccagccaccttcacaccatgacatcattccttggtgctgatactcttggttccttccaaggacttttctttcttcctggagtgtgagaaaaaggcacagtgggaaatttacacaaaagataccagtgatgtttattacatctcagtgaagtcattatttctattttaatactttgtttcatgtggaaaaattatctaaggtaattcctttgcaaacgccacttgtagtacttaatttggggagaattctcttccagaagccttgttttctgcaattaatttctcacattattactaaaagaatcagccaatacaagatttgatccacattttgtccaattaaaaaattcttgtagcttatgattctgtagctcaagttcaaatcctacctacctcagacatttcacactatctccctgctggtgtcatcaatttcagtctatcttctcatgatttcctggatgaagtttttcagtgggaaatcctaagcctttgcctgaacctaaattggttccttcccatcccttaggtataaattaaaaataatctcttctagggaagtctttcatcattattttatgaaggaaatttgccataccatgttttctcacttataagtcggagctaaatgataagaacttatgaacacaaggaaacaacagacactagggtctacttgagcggggaggatgtgaggagggaagcagaaaagataactattaggtactgggcttactacctgggtgatgaaatagtatgtacaacaggccaggcgcggtggctcacacctgtaatcccagcactttggaaggccaaggtgggcagatcacctgaggtcaggagtttgagatcagcctggtcaacatggtgaaaccccatctctactaaaaatacaaaaaaaaaaaaaaaaaaaaaaaaaaaaaa

SEQ ID NO: 206448 - DNA, 1000 bp, Homo Sapiens
ggtctcaaactcctgacctcaggtgatttgcccaccttggcctcccaaagtgctaggattacaggcttaagccactgcacctggcctgtgttacatattttgtatatagatatataaatgaggaacattaataacattttaaaataatgactacatctttgttttccaccaacaaccaacatgggtttcatttttattgcatcatcaacagagttggcattttttaaaaaatatatagtggccattctaatgggtgtgagatgatttcgctgtcattgtgtttttttttcatttctctgcaaatgagtaattttgtgcatcctgtcaaatgtttcttcccatttgtgtagttttttgatgaaagttttgtttgttcatttataaatcaagttattgaactttatggtttagtttttagagttgttgatatatttttaatattaacttttttcacatgtaatttgcaaatatattcacccattttctaaatatgttgtcattctcgaattttcttttgatgtacagaaattttgacatctactatagttaatggtttctattcttgtatttgttgctcatgcatttaatgtcatatctaagaaaatggtgccaagacaatgtcatgtctttttcctgtattttttctgaaagatttgttagttttttgtgtctaagtattttatttaaaatatatttttgtatcattcaagaaaataatccaactttattttatcgatgttgatattcagttttcaacaccattttttgaagagatgatttttctctattttgtactcatggcaaccttttggaagatcatttgatcatatacagaagggttcattccggagctctctattctgttctttcatctgtttatctttgtgccagtatcacattgtttatgttactgtagcttttaactgtaggttgtattaacatctttgaaaaataaagttttttgacccctgaaaaaaaaaaaaaaaaaaaaaaaaaaaaa

SEQ ID NO: 206449 - DNA, 1000 bp, Homo Sapiens
gaaagattccaggtgcggggacatgagctctcaaggcccagaagaaaaaagaaactaccaggcttgggatctacttagttgctgagtttgccactatagctcaaaggaggaatttaaaaatggagatgcacctctttcccccatggggtcgggcagtgagagcagaagaccaaatgcaccctctgcgaacccaggaggctggtctacgtgtcaggccaaccccactctcctgtcatactgtctttaaatattttggccgggcgcggtgactcacgcctgtaatcccagcactttgggaggccgaggcgggcaaatcacgaggtcaggagatggagaccatcctggctaacatggtgaaaccctgtctctactgggcctgaggtcccagctactcgggaggctgaggcaggaggatcgcttgaacccgggaagcagaggttgtagcgagccgagattgtgccactgcattccagcctgggtgacagagggagactccgtctcaaaaaaataaaaaaactaaacattttaagttaattgatatttaatattaaacatttaatatattaagtgaatacattcaaatctgcaaacaatacagctaggttgtagaagagttaaaaaaatccctccactcagtttttgccaaaacaccacctgtaagcactgagaagcctactgatgcacgcattatcctttgggccaatagaaacaaacgttttaataaaatgctttcccagtggtcaaattgtcttcctgagtaaagctaaacttgctgtagtgagaacaggtagtgtttatttctagctgcttctgggtcccaggttacctaagacccaagggtaatgacaatgggcagctccactttattaaaagccaacatttagcccagacattttattctccaaaaatcagcaagcatagctttacattcaagttgggtataatgactttattttcccagtaattccctaaataaaactattacaaaaaaaaaaaaaaa

SEQ ID NO: 206450 - DNA, 1000 bp, Homo Sapiens
gggagagggcagaagggcagccagggagtcaggggctccatggtccatgctatcattgggacttcctcctgtagtttctctgaatgttagacattgtttattaaattagtcttcagagattatgcagatcatccatacttaccacaaatagtgaagaaacatcaatacataaagaaaagaatctcccaacccccgaccatgaaccctctgaaaataaagggtctcgagtgtcctgatgcacgtcccctcatgtctccctgcacatcacacatgcataatcagggcctggggtcgggctctgtgtgtgtggtgtgctgtgtctgagtgcttgctgttcgaggggtgggtcccccaggctgtggttgggtctggttctttagttgcccagcatcgcgtgctcagcccatccccatcctagaggtgggctctctgccccttggagtgaagctgccctgacacctcctgacttgtgtgcccatatgtgaggctctgggcactgtgggtggactcctcaggaccactgggcaagtggtgtgtgagtttgacatttcacataaaatagaaacttccatgtggttttccagaagttttgtggctgttcattaccagcacggaaggtgcccactggcctggatacagcccagcactatgtggtgttgctttttaggatttccacgaaggccaggcacagtgcctcatgcctgtaatcgcagcactttgggaagccaaggcgggcagatcacttgagcccgggcattcgagaccagcctgggcaacatagggagaccccatctctacaaaaaatacaaaaattagccgggtccgcacttttagtcccagctacttgggaggctgaggtgggaggattgcttgagtccaggaggtggaggttgcagtgagccaagatcatgccactgcactccagcctaggtgacagagcaagaccctgtctttaaaaaacaaacaaaccaaaaaaaaaaaaaaaaaaaaaaaaaaaaaa

SEQ ID NO: 206451 - DNA, 743 bp, Homo Sapiens
ggggattgcgcatgcgggaaacccacgctgagggaagaatcatgggaaagagtggagacggggttccaccgtgttagccaggatggtctcgatctcctgacctcgtcatcctcccgccttggcctcccaaagtgctgggattacaggcttgagccaccgcgccccgctctttcgtgttccaaaggctttttaaataaacttccactcctgtcctggattctgctttatggccctcagtcgaattctttcttctgaggaggcaaggactgaagttgcttctgaccagtacaggagaaaacgaatacagcagggatgacttccaccagctccactttgcagctctgaggtgtattaaaaatgacctggaagaagtcatgccacgggccagaccttaacattcctttcggcttaccccaggatttcagacgaagcttcactttcctaaccagtcacaaatcagagaatttttgattccacctatgacctgtgagctcctgcttcaagatattccaccttttttaggccaaaccaatgtataacctccaagtgtcgatttacactttcgactgtaacttctgctttcctgagatttacccctgcctttaaaaacccttgcttgtaatccctcagggaggccgtgtatttattaatcatgagctgcccaattctccttgcttggtgccctgcaaataaacaccctcttttctcccactgaaaaaaaaaaaaaaaaaaaaaaaaaaaaa

SEQ ID NO: 206452 - DNA, 1000 bp, Homo Sapiens
aagcagttctgcctcagcttcctgagtagctgagattacaggcatgagccaccacccccagctaatttgtgatttcgctttctgcagtttcagttacccattgttggggctcagaaaccaataccccgaaatatagtggtgtgacattctgaactgaagaagccttaaggtctctccgaccagactcccacaggccccccaaccctttgtctcttccaaagcatacagtgaagttgttctctgaagttcctcatctgccttaagtctggacccaccaaagaagaaaacaatgaccactggtcccttcccggagttttctctgactgaactgctgtcacaggaagaaagactgaagcctgctcacatacctggacagattttgcaaaccgttgtctgctctgtgagcccaacagactttgtcccaggccactgtatgttcttcaagcccactgaattcccctgaaaatcatttactagccccctgaaattacccacacttccccattgctcatctgtaccccatttcgtggtggggcagtcactctgatttccccttgcatgctaatgaatgtgtattccatttctattctgctttcatgagctgacttttcagtgaaccttcagagggtaaaggggaagttttcccttggcccctgcaccgcaattggtaaggtccaaaatgttaaatggaaaattccagaaatagctggtcgtgatggctcctgcctgtaatcccagcactttgggaggccgaggtaggtggatagcttgaggtcaggagttcgagaccagcctggccaacatggtgaaaccctgtctgtactaaaagtaccaaaattagctgggcgtggtggcgcacgcctgtagtccctgctacttgggaggctgaggcaggagaatcacttgaacctgggaggcagaggttgcagtgagcagagatcgcaccaccactccagcctggatgacagagtaagactccgtctcaaaaaaaaaaaaaaaa

SEQ ID NO: 206453 - DNA, 1000 bp, Homo Sapiens
atgattagctgctctgtgccagacacaggctggaaattggtagatgctctccccaggaagtgggcagcagcccctttgtgcctctgtcacctctgttaggctcctggaagcccccttcattgctgcatgtaatgacatcttcgtcaccacatgtaacagcttctttaccactatgtgtaatgccattctgtgtgcttattgggctaaacaatcacagaggaaaagagtgctggagaaatgccagggagataggtaccgaaacgttccagatggaaagtctcgtcttcaggtggccgtagcagtaaatgtcagggtcaaacagggggtgtattcttgggagagcttcagctcgtctgtgacctagtgtccagccagcttcctgggaaggaggctgcatcctgacattgaagccctgtgtgctaggatgagtgtgttacgcagagccttacaaatgagaaaatcttgcgtcctcaggacagtgttgctgtctggaatacactggctacctccctcctccccccaccacttaaaattccctgaatccgacagtggtggggaaagggctgatcctggagaagattgttccttgataatcctagtatgattcataatggttgcagcagatgagccgcgaggtttgtggctcagtctgcagctaaggaaggctcttccctggggaggtgtgtccagcttcccggaaagacctcagctgtctagctggtctgggctgcccagttcttagcagtgcatcagcaatgagcagccgctgaccatcaggcagcgtttcccgcctgccagagaacgtcagagccactgcgtctggaccagctgaaggcagccacggtgcccaggatgctgctgctgcctccaaggaaaagaactctgaaaatgaggaattacagcctggtggttttgttttatgttaattttttacatctgggagataatggaaaaaattaaaaattgctataattgcaccaatcttaaaaaaaaaaaaaaa

SEQ ID NO: 206454 - DNA, 1000 bp, Homo Sapiens
tcgatgtcagtgacacttgaacaatgctcaatcttgagagatgagcaccagttacacaaggacttctttatccgagcgctggattgcatgagaagagaaggatgccgcatagagaatgtactgaagaatatcaaatgcagaaagtatgctttcaacatgctacagctgatggctttccccaagtactacagacctccagaggggacttatggaaaagctgacacctaagtttaccaacatgttaataaacaggaacacaaatacatttcagttggataatcttcaccttggtcttttttgtttgtttttattgtcatgaatttgtggtgggggagatgatcacagatgtttcccaaaatctaggaactacttcaattcatcatcagcatattgctctgaaagaaatccattttaaaaaatcttacatgattcagtactgtcattcctagttctaagcttctatgtgttgagcctagctgattgagattggttcacaaagtgtaaatttcattcatgagtatttaaatgtttctgaggaaacatggatcatttcaataggactaggggtgattcacagagcaccactctccaaccaaatggaagagaggagagggggaaaaggaacatattttttttgtgatacaacttaatagcctatgagaacacagtcaacctgagaatcaatgtaagggatttaaaaaaaatgtgtagccactcaattaggtagagttaactcatgatctggaatactgaggcagtttgcaggtatgttccacaatgatctctatcatccagtcaaggtgtgactcctcccttgcaacaggcatatgcatggagtgagtaaagtggtcaacagacctttcaaaaccatggcatcttttcagaactctgacttgggttgtgtgatctagctgtgaatgtagcaatatagaacgtttaatagaatgataagcaaaacactgcaatgatccaaaaaaaaaaaaaaaaaaaaaaaaaaaaa

SEQ ID NO: 206455 - DNA, 1000 bp, Homo Sapiens
gtagacatttatatgaaaacaggaaatgggagtaggaattaaggatgaaagaaaaaaaataagagggtaagaagaactttgaagagattaaaaattatactgtattaggacctgagttgtattgtaaacagaagtctctgctcctaagttatacatatgtacacatgataaagaacctaagaatgaggttcaatctttcagtctaaagaatcattggtatataattttaaaaattaaaaccaatctaaattattgttagagtttattacattatgggaagtgatgggagtagggtggcatagatagatgcatattaaaattttcttattaaaaaagaagacatgtatttggttgattctaggtgttgatagacaaaagtgagttttaaaatgtgaattaaaagttttagggtaatagccaggtgcagtggtcccagctacttgggaggctgaggcaggaggatcacttgagccccagagttcaacaatacagtttgagcacgatcgtgtaaccgcacttcagcctggggtgatagggtgagactctgtctctaaaaagaaaaaaaaaaaagttttagggtaaccattagagatacagacatgagatttcttgctttaaacaattagtgaaaagattggaattgaaagaaaacttagtgctcacaagaagaaaaaaaagaaaaagcataggtaaatagaaaacacactaatggtagaaataaggtgaaatgtatcaataatcaccatgtgagttaaattcttctatgaaaaaagactcattaagaatcatataagcaaaaatatgcagtactatattgtttttaagatatcctaaaataaatattcatatcaaacaaaatagaggcccaagtcaaaaccaaaattatttatctacctgggatattttacaacgattaaaatacacaacctaccaagataaaagtcacaaacctaataacagagaaccaaaccaacttcacagtaaaaaaaaaaaaaaaaaa

SEQ ID NO: 206456 - DNA, 756 bp, Homo Sapiens
ataacagccaatgcagccgccatccacgcacaagcaaagaagcatgtcccatttaaatacacccacgcagccccagcgcccttagccgatcggggcgctcagcccacacgcaccgctgctcggggcttggagatccgcgcaggctgggctcccggacccggcggaccgacgcgcggcggatcgggatccggcgctgtggggctggggtgggcgggggaggctgggcccggggcctctggcgcgacacccgcatgaggacgcgagtgaaatagaccaaggtggaatttccaagggaaaagcttcggggtggttttggtccatttctccagcgaagaagtagacatggcgagcgactccccggctcgaagcctggatgaaatagatctctcggctctgagggaccccgcagggatctttgaattggtggaacttgttggaaatggaacatacgggcaagtttataagcaaatgaaccagtgagtgaagggcattatcacaactcaaagaaccaactaggagtcacccatgacatcatctcctgaatttcatcaccaagcccagctgatcctatttcctaaatggttcctgatttctctcttctgttttctgtctctgccaccactgtcctagcacaggcattgcacatctctcatatgaacgcctgcaggactgtcccttgatgttatccttgcagcccctacattcctactgtgcagccagtaaagtcatattaaaatgcgaaaaaaaaaaaaaaaa

SEQ ID NO: 206457 - DNA, 1000 bp, Homo Sapiens
gaagttaactaaactcctaacgtgccagagtgctttctttagaacaaatatacctgtttacaagagagtagtgatctcgtcaagtgaacattgttgttatattttaaatctttagtatctgctggacaaaaagaggtatcagctgatgtggtttacacctcattgcttcctagtgaacgttacctggcagagacttttgtttctgagataggaaggaagaagctagagatcaccagtccctgaggcactgttttcaaatatgctgttaaccactggtcaggagtctgcagtgcagccacgctattggctgcttcttgacaatgtcatgtaaattatcagtgagcgcttctcagagtcaagccgtccaagagctttgcttcgtccccggtgcctaatagcagactataaagaagtcttatccctgagagagatttaccagcatggggaagaaagcttgcatttagatgccatgttccagttggaaaagtcctttcagatgcatcagtgcctggctgtaacttcacagtgactctgggcagagcccagggttcctatctctgttgtccaaatgggcagactgaggctggcccaaggtcatccacagctgctgatgagacccgaggcccttgatgtggacctgctggcccacagggcagtgtgcttgtcacgtggtggaatttcagattgcgttgcatggaacagagctcccacaagctggccgagggatgctggggagaacgcactcagggcaccagggctcctacgccactcagccagagctgctcttctcttacctgttttataggttaaaagcttttgacagaaactatcataaaggtttaaaaactgctgaccctggccaggcgtggtggctagtgcatgtaaccccagcactttgagaggccgaggcaggtggatcacctgaggtcaggagtttgagagcagcttggccaacatggtgaaaccccatctgtactaaaaatacaaaaaaaaaaaaaaa

SEQ ID NO: 206458 - DNA, 1000 bp, Homo Sapiens
gtattattttgaaaagtccttacgtaacctgcttaatttaatagataaaaattagcatattaattatctgaatgtaaacagatgtttctgtggtgcttcaaatcatcaatcctaagttaatattcttaggaaactactttcgtctggagagtaaaaagacaatcttgaaaccaaaccataaacaatcacaaattctgaaatattgaggactgtattaattgggaatttcctattaatataaacatatttcaaaatattttttcttttttgagatcatctcactctgtcccccacgctggagtgcagtgagccgagatcgcgtcattgcattccaacctgggcgacagagtgagactgtctcaaaaaaaaaaaaaaaaatctgtacccaaatttttttgtctttttgagatggattctagttctgttctggagtacagtggcgcaatctcggctcactgcaatctccacctcctgggttcaagcgattcttgtgcctcagcctcccgagtagctgggactataggcacacaccactgtacccggctaatttttgtatttttggtagagacggggtttcgccatgttggccaggctggtctcgaactcctcacctcagatgatccacccgccttggactcccaaagtgctgggattacaagcgtgagccaccgcacctggcctcccatctcaatttctaattcctacccttaaagactccttacaaatgccatctctttcatgaatccttccctgatcaccacatcatgtatcgtgaatgttacctattatcgtagctatctccatccctatctagagccatctttttaaaatggtgtgccttccttcagaccatgtttgagtacctgccgtggtcaaggcacagtactggttactgtgaaccagaacgtactgtgagttgatataaaatcttgtgtccaaaagttaattaaatggtaatgagggaatagccaaaaaaaaaaaaaaaaaaaaaaaaaaaaaa

SEQ ID NO: 206459 - DNA, 1000 bp, Homo Sapiens
tctcatggcgtcctgtgctgtgctgaactgagggcaggaatcctaggggctgttttccttttctccttctcccagatcagagcatcagatactgccctaattataggtcctttctattaaaaacttaagtgcattccaaggactgcgagcacagtcagcactttggcagagacaggtcacctgggtgtcacacggcaaggctacagggctgtaagagtcgcttgaccttcagttgtgcactgaggccggctggtccttgagaaactaagtgacctgcttctcagctgtacaagtaaaaaatctttgcaacacatcatccaaaccgaggctcagatgctgcagatggaatagggccctgccttgccttgccttcccggcagcatcccatctgaccctgtctgggtcccgtgatggctggctgggtgtgggccccgagtacacgggagatcgtgtgtacttggaaggagtcgaggctgtacctctctttgcaagaacctgttctctttcccttcttgtctttaaaaatattgaatacagtatttttttaatggtaacagaacctggtccagcttctgtggaaaagaaggattgcccagcaaacctgagttgggggtttttctgttcggttctcattacggaccctctaggggggtttctgtgttgttcaggaagggcttctttgataaagaagtaggcccagtgtggtggcttgtacccgtaatcccagcactttgggaggccgaggcaggagcatcgcttgagcccaggagttcaactggccaacacagtgaggctttgtctctactaaaaatttaaaaattagctgggcatggtggcgcatgcctgtagttccagctacttgtgaggctgaggtgggaggatcgcttgagcctgggaggtcgaggctgtagtgagctatgattgcagacagagcaacaccctctctcaaaaaaaaaagaaaaaaatttttaaaaaaaaaaaaaaaaaaaaaaaaaaaaaa

SEQ ID NO: 206460 - DNA, 1000 bp, Homo Sapiens
ggtgtgagtgtaggttcttcagtggcacctctacatcctgtgtgcattgggagcccaggttctagtacttagggtatgaagacatggggtcctctcctgacttccctcaaatatatggtaaacgtaagaccaacacagacgttggccagttaaacatttctgtttataaagtcagaataatacctgttgatcactgaaaggcctgcatgtattgtactctgaattttacagtgaatgagagaatgtaccctaattgttcaacagggctcaaaaggaaagattccattttgatgggtcacattctaaagaggggcagtgtgataggaatgagatggtcctttaggacttaagttctcagcccaaggtttttccacgtggccccctcatcttttttttttttttaaacggagtctctcttgccaggctggagtgcagtggcacgatctcggctcactgcagcctccgcctcccaggttaagcgattctcctgcctcagcttcctgactaactgggattacaggcgcccaccaccatgcccagctaatttttgtattttcagtagagatggggtttcaccatgttggccatgctggtctctaactcctaacctcaagtgatctgcccacatcggcctccaaaagttctgggattatagtgtgagccactgcgcccggccatggctccttaatcttgatccaaattattgttacatccagaatgtgatgaatcaaaatctcgagatgggggtccagcaatctgaaatttcagtatgccagggcttttctgtatgtcaaagtgggtttgaaatagttaatttttcttctagtctgaaatgtatcgggaaaatttggaaatcctgaaggctggaaattgaaataagtttttctaggatttgtgtctcttgctattggaaaactgatggtgaccaattcatgtttacaaataagatcctcatagatctcggtaaattataatttgctacaaaaaaaaaaaaaaaaaa

SEQ ID NO: 206461 - DNA, 1000 bp, Homo Sapiens
cgagccccgaggggctctcgcttctggcgccaagcgtccgtcccgcgcgtgcgggcgggcgcgacccgctccggggacagtgccaggtggggagtttgactggggcggtacacctgtcaaacggtaacgcaggtgtcctaaggcgagctcagggaggacagaaacctcccgtggagcagaagggcaaaagctcgcttgatcttgattttcagtacgaatacagaccgtgaaagcggggcctcacgatccttctgaccttttgggttttaagcaggaggtgtcagaaaagttaccacagggataactggcttgtggcggccaagcgttcatagcgacgtcgctttttgatccttcgatgtcggctcttcctatcattgtgaagcagaattcaccaagcgttggattgttcacccactaatagggaacgtgagctggggttagaccgtcgtgagacaggttagttttaccctactgatgatgtgttgttgccatggtaatcctgctcagtacgagaggaaccgcaggttcagacatttggtgtatgtgcttggctgaggagccaatggggcgaagctaccatctgtgggattatgactgaacgcctctaagtcagaatcccgcccaggcggaacgatacggcagcgccgaaggagcctcggttggccccggatagccgggtccccgtccgtccccgctcggcggggtccccgcgtcgtccccgcggcggcgcggggtctccccccgccgggcgtcgggaccggggtccggtgcggagagccgttcgtcttgggaaacggggtgcggccggaaagggggccgccctctcgcccgtcacgttgaacgcacgttcgtgtggaacctggcgctaaaccattcgtagacgacctgcttctgggtcggggtttcgtacgtagcagagcagctccctcgctgcgatctattgaaagtcagccctcgacacaagggtttgaaaaaaaaaaaaaacaaaaaaaaaaaaaaa

SEQ ID NO: 206462 - DNA, 1000 bp, Homo Sapiens
tgttacataattctacccctcctacaaatttaatttttttatgaaatttttaggtgacttgtaaattcttcatgtatgaggagttgtgtttattaatgctactttttaaattttcctgtgccatgtggcagatgtttattctcttaatgcacttcaggtttgctatctgtaaagcctttgacccaggcctactgagtcaaatctacattcagtgtaacattaaaggtggaaaccaaagggtttgagaaagacgaataaggcctattctccttctgctgcagactttatctttcaaaatcataaaaatgagcaatggagatccaggctgggtatagacaagaataattattttgcaaacacattttcctgacagatttttggaagtaggaaaaaagtatggcaacagtgtcatgaagattgaaactgtaggtgctttgtgtatgtatgcatgagtgcagatgagtttgagagagaaaaagtgtaattgagccctttgcttttgtcagcctgggaaacagatgcgttcttattttttgaagttgtgtgaccctggactgtcccacagcagaaggcagaacaaacacttatgttatgctttaatcataagtggaatggtcacaattaataagatattttatatatggcaaagttttatgaaatgcttttttactattagagacctgtttcttctgttattacagaacacagtgtttatcaactgcggacataattcttttattatacagttgcatgtaaagggagcttctcatttaattcagcggatgtgggtatttttagggcattgtaattgatggttttaataattgctgaataatttttgattaagagaaaaatgtaatacaattactggtctgagttacagaacagaagttaatgaaaaaggctatttgagcatgtgtacttatagattcatttgggtggctgagaaaagatgctgcttttgaaataaaattggtgctgtgtaaaaaaaaaaaaaaaa

SEQ ID NO: 206463 - DNA, 1000 bp, Homo Sapiens
aaaggggactgctcacagtggcctcagcttggtggttttgaggggccgccccccggccctccataagggtatcctgggcctgagaattctgcatctgccattggaggatggacagcctcaaatggaaggagtcccacgggagatgggtccgaggtccggctgtggccatccagccccctgtggcttgtccagcctctgtgcacccctggtgtcttcactccaggggcagacagcagccactgcagttcctttcttcgtgagtaacagtagtgatagcagctggggctaacaggctaggctttgtgttctgcgcatttggtcagcttctcactcgatcctccctaaagcaatggggaggcccccactagcccagttttcaggaagtcaactgggaggttagatgggggccagggtcccacagctactgatggcccgagccaggttgagcttcctggtgtccagtccggatcccacttgcagatctcatgctctcagataggtgggacaagttcttttgtcacagtgctggctctgtcctgaggcctcattgctggctgggtgtgctctgctgggaaaagctttgcggggcttgcttggttaaccacagaagagaaggggactgtttggggtgcctctctgcagcctccccgtgctgggtggaagcacggttactgtgttctctaatgttcatgtatttaaaatgatttctttctaaagatgtaacctccacacctttctccagattgggtgactcttttctaaaggtggtgggagtatctgtcggggtggtgtggcccttggatgggtcaggtgggtgtgagaggtcctggggaggtgggcgttgagctcaaagttgtcctactgccatgtttttgtacctgaaataaagcatattttgcacttgttactgtaccatagtgcggacgagaagtctgtatgtgggatctgtgcttgggttagaatgcaaataaaactcacatttgtaaaaaaaaaaaaaaaa

SEQ ID NO: 206464 - DNA, 1000 bp, Homo Sapiens
gaggctgaagcaggaggactgcttgaggccaggaattcgagaccagcctgggcagcatagcaagaccccatctcagcaaaacaataaaaattaactgagtgtggtggcatgcctgtgttcccagctactcaggaggctatggtgggaggatcgcttgagcccagaagtccaaggcctcagtgagctattatcacgccgctgcactccagcttgaatgacagagggagactctgtctcaaaaaaaaaaaaaattgattccatatgtatgaggatattggactatagttttcttttctcataatgtctttatttggttttggtgtcagagtaatgcttgctgaccttagagaatgagttgagaagtactgccacctctttaaattagtggaaaagtatgtgtggagatgttgttatttctcccctaaatgtgttgtagagtttatcaataaagccatctgggcctggagttttctttgcaggaagatttttttaaactaccaattcatttttttaaagatacagggtttatgcaggttatctatttcttcttgagtgagctcttgcaatttgggtctcaaggaatttgtctatttttattgaagttgtcaaatttattggcatgatattgctcataatattcttactatccttttaatatctatagaacctgtagagactgttatttttttcatgtaacaggtttattgagatataattcacatacaatacaatatactcatttagtgtatgatgcagtagttcttaatatattcatagttttataaccattaccacaatcaatttttgaacatttttatcaagccaaaaagaaattccatactcgcctgtagtcccagctacttgggaggctgaggcaggagaatggcgtgaacccgggaggcggagcttgcagtgagccgagatcccgccactgcactccagcctgggcgacagagcgagactccgtctcaaaaaaaaaaaaaaaaaaaaaaaaaaaaaa

SEQ ID NO: 206465 - DNA, 1000 bp, Homo Sapiens
ctggaaccaaaaggagtaagatgtccaaagagcagactcggccttcctgctctgcaggagccagcacgtccacagccatgggccgttccccacctccccagacctcatcatcagctccacccaacacttcctcaactgaggcatatttgatgaacttgacattatctctgactgcaggaagttttctgtcctgtgctgtttggggaagagacagagaactgcggaatctggaactttcagcaacagactcactgtctactgcccccatctattatacacccattccctttgctcactaatttgttcaagtttctctgacatacaccatgctcctttttcctttaggattttcacacaccatatttctttcacctttaaactcttacctggccaaccctatccaccctctggatcccaatattgagatcttatcctcagggaatcctcacttagacccctgtaacaggttaaatcttcatggtgttctgtttcctaggaacttctttcttttctactgtttatgacaactgaagttaataagtgtttatctttcccacctactcaaagtagttccaagattagggctagtttgtaattctgtggaccactgtaaacgagggcctagttcagtgtctgcctcatgggaagcttccaataaatacctttgctcaacgaaaaaatgaaaacccagtggctcacgcctgtaatcccagcactttgggaggccgaggcaggtggattgcctgaggtcaggagtttgagactagtctggccaacatggtgaaacactatctctactaaaaatacaaaaaaattagctgggtatggtggcttacgcctataatcccagctactcaggaggctgaggcaggggaattgcttgaaccagggaggtggaggttgcagtgagctgagatcgcaccactgcactccagcctgggtgacagagcgagactccatctcaaaacaaaaaaaaaaaaaaaaaaaaaaaaaaaaaaaa

SEQ ID NO: 206466 - DNA, 1000 bp, Homo Sapiens
agctgttggctggctggtgatgaagaaataagtgtgggtgatggacttcttatgatgtagaatgcatgggacttaggggctttaccttaggcaaatgtctcctggagaaaagccactcaccttttatttggagcccctacggcttttgtgcttatcagtgcagaaacccttttctttgaaggctttctgagttactgggccttttttattttttatttttttgtagtagagcacagttcagagttcctcactctgaatttattgccctcagcacaggatcagaattctgcattttacgtgaagaacctctcaaaaacatgtcaagcgacacttataggaccagaatccttgttaagctgtcctaccttacacaaactctttaaagggttacagctcttgttgcttttatattatacctgtaccaagggattgtattttgagtttaaggccactctagaattacaaggctgattttaggacttcctggggaggaggcactggggttttaggggcggtaatgactgtcttttcattggtttggggggctggactttataagattttggtgaatagagcacttagatttgtgttatcttggagtcttaaccaaatgaatcttttgtgcctggagggcagcatgggtgatatgtggattgtcacttcatttggaagcatctcaaatccccagcattttgaatgcctacatgttgctcaaaggaaatgcttgttagagcattttggattttgaattttcagatttgggatgctaaaatggtacgtagaacgcaaatattccaaaatctgaggtctgaagcaacagtggcagttcaggggtggtgatcatggtgagttgctatctgaactcttctttcacctcctttgggttcccagtgtcaaaaagagtggtgtccttttttagcttaattaagcaggactgaacaaaaataataaaaaataaaaaaagccttattcaaattaaaaaaaaaaaaaaaaaaaaaaa

SEQ ID NO: 206467 - DNA, 1000 bp, Homo Sapiens
ccagagcagagaaccctctctgtgtctggaccggggaggagcagacgctggacaggtttttggcagaatgctggcaattcccaggaagatatgtggagaacggaaaggttgctacacccaaatagtggcgcaaaggctatgattatggaggattggacctgcaaactccagaacagagcaaccttgtaaaatgtgtgtgggcagcacagagaccttgggcaagttaacagtttcctcatctgtaaatactgatttatggaaagcacctggtgtatgttctgccctctgaggaccctgccctttcccaaaaggggtatcttaagaaggaaaatatggttgctctttgccggacagcagagtcccagaaccccatgcaggtgtttcagggctttacgtcattcaaggatgtggctgtgaacttcactaggaagaatggagagtactggaccttgctcagagagtcttgtacagggatgtaatgctggagaactataggaacctggtctccttgggatttccattttccaaacctggtatcatctcctagttggaagaagtggtaggcccacgaacgcaaatgcaggagggagaggtgccaagaagcagctgtacactctgcaaatagcagagagaagcccctcactctcgatgctccctgggtacctccctatggccctgctgctgccgactgcttcaacacattcttctgtccctgctgtttagatgtcgtgttgtaggagcctgttgctcagcctcccgagtagctgggattacaggtgcctgccaccacacccagctaacgtctctactaaaaatacaaaaaattagccgggcgtggtggcgggcacctgtagtcccagctactcgggaggccgaggcaggagaatggtgtgaacccgggaggcggagcttgccgtcagccaagatagcgccactgcattcccgcagcgaaagagcgagactctgtctcaaaaaaaaaaaaaaaaaaaaaaaaaaaaaa

SEQ ID NO: 206468 - DNA, 1000 bp, Homo Sapiens
cacgggtctgctgtgtatgtctctccaggcagatggcctgtctctgcctggcaaggacgatctggggtggaaaaactctgatctgaaagtgaaatcattgactccgttaccatgttctgaattcccagatctccctgatatggaaagtgaaaattggcttctattacacaatgcatcaaaattcttttgtataggaccagaccactgatatcaagggcagtgcactgactttcagttcctctgcatcccttggtcatgttcccacctttcaatgggaacagagaataaaaattccagctctagggcccagcctagtggccacctctcacggacaggcacccggctgctcagtgttatccaattactagaggccattcctagcatttcaacttggggaattaatttactattactttatttttatctttagagacagagtcttgctctgtcacccagactagagtgtagtggcatgatcatagctcactgcagccttgaactcctgagctcaggcaatcctcctgccacagccacctgagtagctggaactataggcatgtgccatcatgcccaactaattttatttttatttcagttgtagagatggagccttaccctgttgcccaggctggtctctgactcctggtctctagtgatcctcctgccttggcctcccaaagtgctaggattataggtgtgagccaacatgctgtccccattattgactgttaccctaaagtgtgtgttgcctttctagtttgagtagaaagtccagcattatctttttggataatatccaggttttgctgtttctttctttatttttcataatgagaacatttgctctcttgctgacattggagggcgtctgtttacctctcctgtaggcacacaaaattcccaacgtttatttgaagaaaaagacaattatttgagtaatttgaataaataaacattttaagtgattctcaaaaaaaaaaaaaaaaaaaaaaaaaaaaaa

SEQ ID NO: 206469 - DNA, 1000 bp, Homo Sapiens
ctggttcccgccgtggaccagttcccgctgtatactggttctgccctggactggttcccgctgtggactggttccttggggctctaagtgcggaagggcccagagctggtccctgcccagcgccctgctagggctgtgtccttggctccaggggccttgggactggcttcccagcattccctcggtgtgtcacaggctgcatgacccctggaatgcgggcagggccacagccacagtctgtctgatccctgagcccaggacaggctcacgtcctcagcgacccactggtgactgacttcccagactctcctctgtccctcaggagcagccgtgtcctctcccaggccctaggacactgccagagactgtgggacatacaggcataagtgatgtgtgtgtttctgcttctgttttaaaaatccagggtcattacacacagcatggaaattagcacaaaatgctgtgcaaacgtcagatgctcccaaaccagcaaagggatgggcttgcttcacatcagatgcgggcacgccttacccctgccttccgtgtccccaccccagggtcaagggttcctcagaccagccatgcctcctcctcctgccgcctccttttctagatggggaggggattccgtcacaagaagagccgcccctcggccgtgtgcaggaagccccatgtcgctttgccgagatcagccctgggaggatccccttctctagctcagatcatgccgtgtggccagaaggctgcggacacaactgacctgcttctcgaggtggttgatgttttaaacaggaagctccacggagttcagccctgtgtgcatttcctcatgtatgtaaacgccaagactgaatgtgagaggtgttggccgcgggccttaagtctgagcagatccatctggaatgttcggggtgtgctgtctggatgtggtgcgctaaaaacacggaataaagatcagtgacaaagtaaaaaaaaaaaaaaaaaaaaaaaaaaaaaa

SEQ ID NO: 206470 - DNA, 1000 bp, Homo Sapiens
atctcaattccaacttctctgcagagtctgtacagtgattaagccatgccagatggtctttggtgcacacagttatttaagaatccacttccacaggtggctgcccttgtaaggaagaatgcatccctaaatgtggccaccagagagttccagtgggcagatgtctgtggctgcccttctcatttaaggacatgagttcactggagtattactcaaaaagtctgtggttcatttccagtattgtgaatatttagtttatgtggccgtttctttgtttctttgaacagtgggattttcagtgaaaaagtaccctctttttcatttcctattgcagtggtcacagctaatagtgtctgaacatggttcaagaataagagattccatgtagcattttctttattattttcatttcccttatattatccatcattccttaaggacaattattcttaataatgcttatagaaaatgttctctaattaaacatgccaaaaggaaaaagtaagggaaagagggagcaagaagaaaatggaagaaaaagggaaaaaagctaaccggataaccaatttgttataagttggttttcaacaaagaaatttagcagccaagtaaggtttcaagggaatattaacttggtatcagggctacttttttttttttttttttttacttgcatgtcatccttaatgtctaacatgaaaaatcagcaaagagtatggtttttatcaagaatttgtgttgggagtaaaaactgctttatagctcccaaattaggaagagaagagcagaaatcctctggggcatttaaccatctggcagaattgttgctgcaccattatcccagttataagacagtcaaaatgactatttcctaaatattgtgagtgtatgaaatgtgaaattaaagcaaaaactggagacttttaatgtatttctttaatttgaaatgttttgtggattgtgaaataaaaataaatttatgtcaaaaaaaaaaaaaaaa

SEQ ID NO: 206471 - DNA, 1000 bp, Homo Sapiens
ttatcaccaagcggaacctgaccttccctggagatgaagacctgtcagaaaagatgtttcacactctcggtgaactggagactgtccgcctggacggggaagggattacttgtatcgggaatttagagaaactccggaatattcacagcctctacctgcaatcgaataagatccagcgcattgagaacttggcatgcatcacctccctgcgcttcctgtctttggcaagaaaccaaatcaggcatgtggaaaacctccttgacctccagtacctccagtttctggacctgtctgagaacctgatagaaacgctgaagctagatgagctccctgagagccttctcatcctcaacctgtgtggaaatccctgcaccaaccaggaaggctacaggaagatggtgataggagccctgccactgctcttggacctggacaagcagcctatcctggagcggtggacctcagatgaggaggataaatcctcagatgatgatgatgagtttccagagctcaatggccccttctgcgcagagcgaggattcttcaaggacttggagcaggaactgcatcagcatcaggaacgcaggcagcaggcagcactgacagagcacttgtcaaggatggagacacagcctgtcctcacagacctgcccctgctgcctgctgtgcccatggctggggactgcagctctactgccactgaccagcctgggaaggagtcagcccctaaagctacctcctcaactcagactgcctctactaccaagaaacaggtttccaagaaccagaaaagttctgtccaggcaaggaagggggctctagcagccacaacctccaagacctctcaggctgcaacccccagcatgacaaaaatgacaaacaagaaaagcacaaagtagcgcacagcctctatgcacgcgccacctcctcaggctttgccccaataaagtgtctctgggcaaaaaaaaaaaaaaaaaaaaaaaaaaaaaaaaaaaaaaaa

SEQ ID NO: 206472 - DNA, 630 bp, Homo Sapiens; identical to SEQ ID NO: 26433

SEQ ID NO: 206473 - DNA, 1000 bp, Homo Sapiens
ctggggtgtccctgctgttcaccctccctgggctcctggaccacagcggggcagagtggaggaggaggtgtgcacagaggcaccattgttgtgggaagcagtttgttggtgaggagggagctgcggtcctgcatgacatccacacgtgtgacatccacacgcgtgacatcagcacacacgcgtgacatccacacgcgtgacacccacatgcgtgacaccagcacacacgtgacatccacgcacaaagtcaaaacttcacagctcatgataagcaacgttcagacaggactagcacaagaaccgcacggaatgaccacagagggtcttggcgggaacggaaaacaagctgcctccaacctcgtgcagcctctttttcctccagatcatcgctaagtcctcccagggctggtgtgcccgagaagcaggagggttcccgagagcagctttttgctcccaggagtggcaggttcctgccgcctgacaggctgctcgcggaggaggctggagccagcacaaacgccatgtcttgtcgagaccttcactagagtctctccagttgttttttttctcgagaaaaatattggaaaattggtgaaaatatttacatcgattttatctctttatcttggtttgacttttttattctcctttaagttgattcatttttagtgaagtgcaaaataaattctcatgtttgaagttttggaaaagtctgcagtcccagggaggtgatgggttaaatgctgtttgttgactgtggactgcagatggctcagctcttaccttgacaaggacggtgaggacggcagacatgggcgcccggctgctgtgcctccctccctgcctggcttctgcctgatgctgctgctgagcccccgaattgcctcaccagaccccgtccacccagacactgggagcccatggccaaactggtgtgtcttgcattaaaaataaaacccatttatgacatctgaaaaaaaaaaaaaaaaaaaaaaaaaaa

SEQ ID NO: 206474 - DNA, 1000 bp, Homo Sapiens
atgggctgctgtactggcctcaccctgcattagtcaggatgctcttaacaaatgaccatgttcctgctcagaaaccgcccaaggctgcaaagagcaggaggaccaagccaggagaagccctgggccctcctgactcccactttgggctctccctgccctggtgaaatgacagaacggccaacttgacacgctgaagctgctctgtctcatgcgtcctcctcatttctggatccagagccagggctgccaggagtagccagagagctctgtgtggtgatgttcatattagtgaggtttaccttgaccacgagcagtgggaaactcaaaataatggtggcttatttctcatctaaaaacatcccggggtgggtggtctgggactgatctggtggacccaggctccgccttgttgcttgactgttggcagcacctgcttacttaccactcatggtgcaagatgacacttcagcctccgccaaaatgctcaccttccagccagcaggaagtcggaaggagaagaaaggggacagagccccatggcgtccatccttagaggatgctgccacctgaacctctgctttcatcctgttggtcagaacccagtcacatgaccacacccagtggcaacggaggctgggaaatatagtctttattttgggcacccatgtgtccagcaaaactgggggttccatcagtcggcaagaacgggagagtggccgatgcagtggctgatgcttgtatcccagcactttgggaggtcgaggtgggcagatcacctgaggtcaggagttcaagaccagcctggccaatatggtgaaaccctgtctctactaaaaataaaaaattagctgggtgtgctggcgcacctgtagtcccagctacttgggaggctgaggcaggagaatcgcttgatcttgagaggtggaggttgcagtgagccaagattgtgccactgccttccagcctgggagacagcaaaaaaaaaaaaaaaaaaaaaaaa

SEQ ID NO: 206475 - DNA, 882 bp, Homo Sapiens
cgccaggtcgcgcacagcgccccgagcccaggcgcctccccgcccccctcccgcgctccgcggcggcggcggcggcggcagcagtagcagcaatatggctgttgatgggtgtttggggtggcgctggcggcgggaggagctcccccgagcccctgcgccggctgcccgttgctagctatggcaaatggtggcggcggcggcggcggcagcagcggcggcggcggcggcggcggaggcagcagtcttagaatgagtagcaatatccacgcgaaccatctcagcctagacgcgtcctcctcctcctcctcctcctcttcctcttcttcttcttcctcctcctcttcctcctcgtcctcggtccacgagcccaagatggatgcgctcatcatcccggtgaccatggaggtgccgtgcgacagccggggccaacgcatgtggtgggctttcctggcctcctccatggtgactttcttcgggggcctcttcatcatcttgctctggcggacgctcaagtacctgtggaccgtgtgctgccactgcgggggcaagacgaaggccacccactttgggtccccggaaatgccaccagcagcgcggagctggagcgggagtccgcctgaggccgcggttttacgcggagcgtcttccctggcgctcgaggtggctagatgtcgtcggctttagctattcctggtgcagacgcccaccggcactgaggctggcgacaccttcgatgtatggttgctaggctcactgcctggtctgtagtcgtgtccctagagatgtcttcccttccccacagccactggctggagtgggggacccgacactgatagaaaactgcagaataaaaaagaaagaactggaaaaaaaaaaaaaaaa

SEQ ID NO: 206476 - DNA, 1000 bp, Homo Sapiens
agctgggtctgagcctcccaggcttgagctcctgggagttcttgtgcggtgagctgggcagctcctgggtaggtccgggcaccaagcaggccctgatgtggacagagtcccatcagagggagctgatgaagaatggtccctgtaagtaagtcactaggttcaacaactgcctggccgagcactcagcccgtggagctcaggccaacaccagagccccggttttaggggccaggagagcaggtgaccaattatttggggagtcttgggtagaatttccgccacacattctccccagggctgcaggggtcttccgaggcagggcggtggagcaggattcaggatgtggtgggaatagagtgaggggcagtgggtgggcagacctgggcgtcagaggtcctgatgggaaaggaggcaggggctacccagagaggggggctcgtgtggcacagcccccaccgactccgccgtccccctcccctgtgagccccgggggctgtacatactctactccatccccttgtccatccctgagaccacccccgccgcccttgcgtcgacttagcaaccacctcataggcccacccacctcgggatccgagccaaccatcccacatcacaaactttggtttgggggactttacgttcgtttaatttctcattttgtacggagaaatattcttttcaaaagcgtcttttgactgaagtaactttcctggtgctgttgttaactcgttcctttttttaatttattcccccaccccaggcagccctcctggttcctactcaccctccccccctcccccaccctccgtcccatctgaaccatttgtttcttttctttccgtcagattttggaaaaattctcctctcctccccgccccctccacaccatcctccccgatttaaatatagtcactgctacaagtaacagatgcactgtgaagattccagtattaataaaggtgtactgtaattaaaaaaaaaaaaaaaaaaaaaaaaa

SEQ ID NO: 206477 - DNA, 1000 bp, Homo Sapiens
tctccatgttggtcaggctggtctcgaactcccgacatcaagtgatccgcccgcctcagcctcccaaagtgctgggattacaggtgtgagctaccgcgccctgcctgttttgcttttttatcaaaacattttattgtggtaaaatataacaccaaatgtgtcattttaactgtctatatagttcagtggtattaagtgccttcataatgttgtgctaccaacaccatcatccagctccagaactttttcatcttctcaaactaaaaatctgtacttattttgttttgtttttgagatggagtctcgctctgttgcccaggctggagcgcagtggcgccatctcggctcactgcaccctccgcctcccaggttcaagcgattctcctgcctcagcctcccaagtagctgggattacaggcaagtgccaccatgcgtggctcatttttgtgtttttagtagagactgggtttcaccatgttggccaggctggtcttgaactcctggcctcaggcaatccactgccgcagcctcccaaagtgttgggattacaggcgtgagccactgcacccagcaaatctgtacttattataaacaataacttcccgtttccttttgtcctgacacccaccattctactttctgtctctatgatcctgactaccctatctcatataagtggaatcattcagtatttgtccttttgtgactggcttatttcactgagtataatgttctcacagttcatccatgttatagcatgtgtcagaatttcttaaggctaatattccattgtatgcatgtgccacatttcgctttcagtagtcatttttaagctctataaaataaaatgaagaaaggacagttcaaaaaaaaaaaaaaaaaaaaaaaaaaaaaaaaaaaaaaaaaaaaaaaaaaaaaaaaaaaaaaaaaaaaaaaaaaaaaaaaaaaaaaaaaaaaaaaaaaaaaaaaaaaaaaaaaaaaaaaaaaaaaaaaaaaaaaa

SEQ ID NO: 206478 - DNA, 1000 bp, Homo Sapiens
atatgctcatgaacttctaagtgccacaccagacatatagactctttactttaaaagagcatatatttaaggcattgaaatggatacagctatattcattctcaattgtcttaggctattatatggaaagatatgtgtcaattataggtaggtaggtaggtaggtagattttctggaaacacagaagtacttgacggagagttaggcctgtattctataaatctattaatggtagcaaagtgcataagacagggatttctttgagatgaaaggagtgctgaagaagagcattggaattaatatttggatgtggtattgtgaaattcaatgggtaaagtaaccctaatgtgggaataaaagtcaagggaaaggtcttgaataagtacacagaaaaataggctaaaaatattaaggggagggaaattggaatacagggagacagtgtgcaagaaagcaagccaggaatctgcctatgtggtagacccaaccattactacttgaacccccttagaaaagcttttccagcattccataactcaggttcctcatttataaagtgggaaactcataattgtcctacctacctcacaggggtgttgtgaggatcaaaggaacagatgaatgtatgagcactttcagacatgtaaggcactgtcatgtaacaagtaggggaaagactctggagcacattagtgctggtgtgtgccaagcccgtgggctgttgaccgtaagggatattcaagtaggaggaggaagagaagatggcattgctaataaaggttgtgatacacaaccataggattaactgcctcctcaagtccatcatgtaaataaggtgctatgtataccaacttctcaccacctttgtttttctgttcggtaatcctggtgtggacaaataaagttttcacttgtatgtaaaaaaaaaaaaaaaaaaaaaaaaaaaaaaaaaaaaaaaaaaaaaaaaaaaaaaaaaaaaaaaaaaaaaaaaaaaaaaaaa

SEQ ID NO: 206479 - DNA, 1000 bp, Homo Sapiens
cactactcgtgtgcgtgagctgaagagagtcctccaggagctgggggtggtgcccctgaggcttacctggcaggggccacagcacagggcagttctacactatacagactcagctgctgcccagcaggccgcctctctcctacagggcctacgtctgggtgccaacgccttgagggtgtcactggggcagcagagggatatgtgacctggtgagtaacccccagcagaggagtagcgccctttctgctgctgggatgtgtctgccgtgtgacagtttgccgtgtgacagtttgccattggtgatgaccggctgccgtgtgaggcacctgctctgttcttcctgggaaggggccatgcttccctaatgggcagggatgacggcgagcagcccatctcgacacccaggatgctgtgagctctggcccattcctggtctggttcttgtgaaatccacgtgaggttctctgggtgcagaaggttcagggacagagcagtccagacaagaggtagacaatggagacctgtttcagggtgttcaaggagagcggaggcctgcagagaagaggccgtctcggggatcaagggcatgtggccgagcagggtgtccttacgaccactgggaacccacttagcagaacaggagcggggagggcgggcttctgcatccagagaacacaaacttggagctctgttcctggagacgctgcattgtgagcatgcgtgatggctgctacccaggcagcttagtcatgccatctctcaggtgaacatggcggctgcctgtgtgctttcagaagcacttgtgccgttgagcctaaggaaaaacaagcattaggtggagggtttgtcctgttcaaactgcacacctgggcagtttcttgtttttaccaatgggtcttccacagcgtctattagcattgtcctttgtcccaaaagggcaggcctcgctcatattaaaggaaaagagcttgtgacacaaaaaaaaaaaaaaaaaaaaaaa

SEQ ID NO: 206480 - DNA, 1000 bp, Homo Sapiens
aaagggggatggccttgtgggttagaaccttaacttcaacctccctggttctaatgccgaaccgtacccaaccttccaggagcttggccccacctctgtgacagaacctgcccactttctgcgggcacactcccgctgtggccctgggctcccaccatcccgtgcctccagtcctcagctcgcccttccaggtccccaagctaagggacccggcctaggcgtggatttcattagtcgcaacgccctagctgccaagagagccccccggcgccactcccgctccctgcaggtccttgcacaggttcaggaacagcagcgccaagcccaggagcgctacaacgccacgcagaaaggccatgtgccccattagtgagtaggtcccgtgcgctgtcaagtgcggtgagagacccctgtggaggctgagaaccagtgtgtcttagtgtcttcagccccgggccttgccttcacagcttgttggaacgcagggacctgtggcggaaggaagcggaagctcgccagcgtagccagccagacccgtccatgcccccgggccacacactcatgcctgagaatcagcggctggagaccctgaacaatctgctacaaagccagagccagctgctacgtgagctagtactattacctgctggggcagactcgctgagagcccagggtcatcgtgctgaactggaccggaagttggtgcaaatagaagaggctatcaagatcttttcccgacccaaagtctttgtgaagatggatacctagtccttccccgcttggtacccaccaagagtaacagggagatatgtgtgcggatcaccacgtggctgccaagggcagactcaagccctgtcatagctcaaagacaggagcgttggggtgggcagaatcgaaagcacttcttagtcaccaggggctgcagaagggccaccagcctcccaacttctctgtcaaaattaaaccttttgtacacagaaaaaaaaaaaaaaaaaaaaaa

SEQ ID NO: 206481 - DNA, 1000 bp, Homo Sapiens
catcatagcttagcttagcctaccttaagcaagctcagaacccttacattagtgtacagttgggcaaaatcatctaatataatgcctattttgtaataaggtattgaatattttgtgtaatttagtgaatactgtgctgcaagcgaaaaacagaatggttgtagtctactaaatgtatattgctttcacaccattgtaaagtaaaaaaatcataagttgaacaattgttaagttggggttctcctgtattaccattatcatccctcttttgaacaaggaaattaaggtgcgaagagattaatttgctcaggggaagaacagaccagtaagtggtgaaattgtgacttacagccttctccttcatccaactccaattctccatcaggaagcaccaagtgaagagcttgaaaaaacaggtagaagccatgaggtttacttattgtatctaaagtaagctgtaggccatccagtaacactttttgtattgatgatggaaatgttctacagctgtgttcaatatggtagccactagctacagatggctctcaagcacttgaaatgtggtgaatgggaccgaagaactgaatttttattttagctattttttattcatttctatgtaaatagtcacatgtggccagggctgccattttattggacagtgcagctctaaagcagtggctataaatgtgagacctcccaacaatagattagcatcatctgaaatctggtcagaaattcaaattcttgggtgcaaatcaaaaacccttactgaatcaaacaccctgggggtgggagtccagcaatcagcattagagaagccctccagatgattctgatgctaaagtttgagagccactgtttgcaggaaagagtagagtggcaagcaagggggaagggcagagagactgaatggggatatagtggagagggtcaaggtaaggagtaaggagaatccagtgagaaggctgtaggagaccaatccaaaaaaaaaaaaaaa

SEQ ID NO: 206482 - DNA, 1000 bp, Homo Sapiens
agcggggcggggcgcacaagctcggccccgccccggcttttagtcccgaactccggaccccgccttcttgggctgggcccgggggcgggactggggagggaactccgcccctcgcgggagaccagaactcttggagcttaggggagacccacgtcgctccagcggaggctggactgcgagcctcgtctgggactcggctggagctggcctagggaggcctggggtaacctggggggctcagcaatggtgctgcacggcgaggtggtgtccccctttgtcctccgcccagggcagggaaagtgcttagtattagcgtgatgcttggggttattggagcctgagcttgacctcaaacgggtggcgatttgatgggtacccccaggctggggaaaatgacagcgcttctcctaatcagctcactggattccatcaccctgagcggtaaaccagatgggcgtcaccccagttctgcagacacatacacaacccgtttgctgcagagccggacccagtggctacacccacagcggtctgtggtagagaactctcttccttctttccaccgacaggggcgagggctgcttcctcgcggcagcccccgcgaagaaatctcgagagaactggcatgaggagttaggttcatcacaaatacacacacactgcccccaaccctctgccgttgcctctctcagaaaaacaagacgtactgaatgaaatattttactaagcgttcagtctgtgcctcctgcatgggtgggagtgaggggaacgagacccccagcctctgcaaatgctacccccaggctcctgggagacctggcgatgcactcctgggctcagggtccatcaggcagcctcttaccctagagctctctccactctgaggttcagaaggaccccaacccacaccgtaggcgttccccccaagtaaagttaggtagcaaaagcaaaaaaaaaaaaaaaaaaaaaaaaaaaaaaaaaaaaaaaaaaaaaaaaaaaa

SEQ ID NO: 206483 - DNA, 1000 bp, Homo Sapiens
tggttggggaaggaaggagagacacaaccgcttcagatgggcagtgaaaaagacgatggaaaggccaggacaccacggaagttctgaaggggtagtgggaaccgggtgaatggaaagcagccctttgacagaagaaagacagagaccagtttccagtgagctcctgaggatattcaagtctgtgcttctgcttgactgaggatcatctaggaaatgaaactaaacttggcttcgacctagaccttgtgtgaccttgaggtcatcaccctctcacagtcaccctagagaatcctttacttacctgtgctgaaaaaaatgctcccatcagttaccctatgatgaggtctccagccctttcatcagaagacagagctttaaaatgcaggggctggtgagggtcagcactagtggtgagaattctggagaacattttctttacccagaaacttaaaatcatggactcttggggagaaaggaatgagaaaaggcagcatgcggaattaccagtttgttatttggttcccatctggatttaaaaccgaagatcccaaactcagattgatctggagccagaaggaagagtgtatgtgatcatcgatctctcagggtcgtcgggtgaagtgaaaatacctaactctgcattctgtgaaagggagagagttgaaatgaggcacagctgaagttccaccactccattattctgccatcaagcatcccttcagctcccatctctcaaatgctgcagccccatcaatggaaaaaaatacattcatgggaattgcacaaagtttacaacacatgcaaattccaaggagctcagagagaggtgtgggggtgagatggtgtgactacacccccttcttctaggatgcgccgaaggattctttttcttgctcatatgctgttagaaagcctgggcgtttacgtctgctggagctggagctaatgtgatttctaactgtctaataaaattccactgcttgcaaaaaaaaaaaaaaaa

SEQ ID NO: 206484 - DNA, 1000 bp, Homo Sapiens
gacttaagccgtgagaaaaaaacttcatcagtaagaaacaagtcaatagacaagtaaaagactaggagaaaatatgcataaaacataaaaaagtgacttgattcctgattctggagtatttaagaattcctataactcaacaaaaagttcagttttttaaaatgagcaaaaggcttgggtaaactattcacaaaggaacgtagacaaatgccagtacacacatgagaagcgcatacacatccacaaacttcaaacaagcccacctcatgtatttctagtgagtaaggaaaagaacgcaaacacttttgaaaattgtttggttgtttcttgtaaatttaaacaaataccctattatattatccagcgagtccatccttaggtttttatccaaggataaagaggtgaaaactcatatctaacaaatagacttctgaaaagatgaaaatagaagctttattcataaaagacaaaaactggaaataacccaaatattcattcacaggagaatgaataaacagactaggttgaatccatacaatggaatggtagcagacaataaaaagaaaatgaactattgatgccccctactgcacagcagaagctctgaatcgtgttcctgaatgaaagaagtcaggtatgaaagaataaacattgtatgattccatttatatgaaaatgaatctgtgatttaaaaatcagactagtattaggttggtgcgacagtaattgcgttttttgccttttttttttttaatagttgctttggggtttatggatggagtggcatggtagaggttagctgaagggggcatgaaataactttttgggggtgctagagtgttgtaaatcttacagtgggggagggacaggagtgcaggcatttgacaaaacacattgaattgtgaaatttaagatttttgaatttctttgtatgtaaattacctgccaataaaaacatgacgaatagagcaaaaaaaaaaaaaaaaaaaaaaaaaaaaaa

SEQ ID NO: 206485 - DNA, 1000 bp, Homo Sapiens
aaagctggtgacccctgagccaacacggcactgggatggctttctaggacagaaccctgtcggcgactgtcacatctcaaactaatagctgattttaaaagccagcagcagcgacgccatgtacctgagtacaggtggcagttgcagagccgtgggctgtagaaggtcagatggggcttcccacaggggaaatctgggcgtgctgtagctcagggtgactcccagctccgtcactagcagggcgacccccttccttctggagccttagctctgaaagcccccagtgggggtgccctttcagatgccccctttccatttcaaaggctctgactcttgatcttgaagccggacgcggcactggcactcggcttcagtttccactgtgacagatggaggtctcctttcgccccagcccaggtggccaagcccatcctggcctcagaacatgctgagcacattttgtagggtggcacctttttatccaagttactagctacacatcagtgtttaaagagaaaaaagtgacctttcattttttttttcttgaaacttgaggaaacaagatacatactactgattttttttttttttcttaaaactaaatgcatgactgcagagcggtagaggtgtatatttttcatactgtggggcaaagtatttgtgctgctttttggagatggactggaacgtctggtttctgtccccgggcccggcagctacgtctattttctgtagaaggtgccacagtgagacctggagccaccccttcctgccctggcgccgtttagagctgggagcccgtggactcccggcctgtttctaccttctattcaaccactctgacgtggggagacaagaagaaatagaactttttgatagtgtggtaaaaacattgatttgaactattttagtaaaaggagtaacaaacaagattgtgatagtgtctactttgagctagataaataaaggcctctttgtgagcctcaaaaaaaaaaaaaaa

SEQ ID NO: 206486 - DNA, 786 bp, Homo Sapiens
ccacgcgtccgaattcatagagtgttgtgtttatccccaaagggtcttgtagtcttcactgcaaacatttgattctgatctactcacatacaaggaaatgtagattgccaagaccaaaactagaggggtgggcttcccatcagggttttcctgtgtggagatgacaggggaaacagggaggaaatcctaattatggcttgtcctcttccctgaattgctgtctacgacagtgtagttccaatgtaaacaaggtgggttggggatggtttgtatagggcaggaggcccacccagaagtcctacccagggaagagagggcccagaatctagttgcagcatttgcccagtaaccctaccccggcctttctttgtgtgttaggaagctggaaatgcaggctggtctccctttcttgcctttgtcactaaccccgagctgtcagccatttggaatcagaactgctttccagtgttctaagtccttatttgattacaaatatttggtgaatcaaagtaaggcactttggtcctaatttttgacctttggtcctaatttttgtttgtaagatgtggagaataaccctgaccttaccaggggtcctgggaatgtgaatccattcgtcaagtggttccacatctagaagaattttgcctatgccgtgtcaggcatcattcaacacaaggccaactatctgctgccagtctggcataagatcagattgaaactgctaagtaatggtacatccaaataaacaaagttcttccaagagagtaaaaaaaaaaaaaaaaa

SEQ ID NO: 206487 - DNA, 1000 bp, Homo Sapiens
aagtactcaatgggaatgaacatttggggtatggatttaataggccttatgctgctggtggaaagaagttggctttaccaaatggcccaggtgtaacttctactttaggttatagaatggttcatccctctctactgaaatctagccgatctccattttctgggactatgacagttgatggaaataaaaattcacctgctgacacatgtgtagaggaagatgctacagttttggctaaggacagagctgctaataaggaccaagaactgattgaaaatgaaagttatagaacaaaaaacaaccagaccatgaaacatgatgctaaaatgagatacctgagtgatgatgtggatgacatttccttgtcgtctttgtcatcttctgataagaatgatttaagtgaagactttagtgatgattttatagatatagaagactccaacagaactagaataactccagaggaaatgtctctcaaagaagagaaacatgaaaatgggccaccacaggatatgtttgattcccccaaggaaaatgaaaaagccttcagtaaaactgatgaatggatagatataagtgtctctgacaggagtgaatgtacaaaacatacttctgggaataatttggtttcaccagatacagactacagagctggttcttcgtttgaactctctccatctgatagctctgatggaacatacatgtgggatgaagaaggcttggaacccattggaaatgtccatccagttgggagctatgagtcctctgaaatgaacagcatagtatgtatggatttatatactcttggaatattttgtttaccctactatagagagacttgtgatatgattgattttgtaaaaaatttatgaattaactttactactttgagaaatggaaattcatatttgttaagagcctataaaatatctgactctaatatgaaataaagcatggagaatatatgacattaaaaaaaaaaaaaaaaaaaaaaaaaaaa

SEQ ID NO: 206488 - DNA, 1000 bp, Homo Sapiens
ggtttggggtggagtcggaacacttttgtaccagttaggcatcctgaaagactattatacagcagcactttcaggtggattaatgctttttactgcatttgtcatccagttcacaagtttatacgccaaaaacaaatcaacaacagtagaaagaatactaaccacggatatcttagcagaggaggatgagcatgaatttaccagttgtactggtgctgagactgtcaaatttctcattcctggcaagaaatatgtagccaatacagtttttcattctattcttgctggattagcgtgtggtcttggaacatggtatctgctcccaaatagaataaccttgctgtatggcagtacaggaggcactgctctactattcttctttggatggatgacactatgtatagcagaatattctttaattgtaaacacagctacagagactgcgactttccaaacacaggatacttatgaaattattcctcttatgagacctctttatatttttttctttgtttctgtggatctggcacacaggtaaaaacctaccaaatactttgtaactaactttgtttttaagtatacagagtaagagagctttccttttagtgttacaaaaaaatgaatccatggattaaaaatcatcaaaccattgggtgacaggttattttgataattattcttttaggattaatctctgtaaaacatactaaagcaatagttaaaacttactaaagagtttttttaaaaaaccctttttgagataaggaacttttcaattttgtgtttcactttaaataaggagctttgagtttttaagatagcctggctaaaacctgtgtaaggagatggaactttcctgtggggggaaagaagaaattaaaatttatacatataaatattatatacagattgaatgaatttaagacaaatacaaaatttatttctaattttatgatagcaacaatagtagaagtaatattgatttttttttttttttttt

SEQ ID NO: 206489 - DNA, 1000 bp, Homo Sapiens
ggttctccctgataattttctagaccaccaatggtttagcttgttgctgtcatggagctaaatacctcatcttacctgtttatcaccaaaagcatcatttttgacagcacctttgaacttccccaccctgtgttccaaaagctttcacttcccttggggagagctttggagctctctgctcttgcagcctgtctctctgtctgcccaagatctctgtgccgttgctccagagctggaggctggggcagtggctcccttctcttggagtgacatccgtgcagccttgggtggggtagtagcttggcttgcctctgtcagggtggagcttttgccccacaggtgaactggggcaagagtgagtggggtcctggtgctcctggactgttgtgctaggctggagccttcacttacacatgggttctgggtggaggaaggaagctccagacctctcagctgctcttgcctggaatggagcttctgtacaaggagctgcgggaagagaaatgctggcagaagcctctcctgtggatatactgcagccctgaccaggggctgggggaaggaagtctgtgttcttgcaaacccccttccccaagaggagcttccatcaggctgacctgcagcggggcacaggttatagctcaaatgtcaccaactctctcttccttaccaatatttaatagtgttcattgaatcaatgtgtcttcattttcttcacttgccatatgccgttaggacaatttccagaagtgttaatttttaaaataatttttaccagttacggttattttgctgtggagagggtctgtgtcctctttatgccaccactgcagtgtcattctgatttgtagatacattctacagtgggatggagattcaactgtaattgttaagttttagctcttcttttgttagttatagaacagtgaacaaagtacttaatcttcctgaatcaaatctgtaaaataaaaaatttttaagttgaaaaaaaaaaaaaaaa

SEQ ID NO: 206490 - DNA, 1000 bp, Homo Sapiens
atgcgaagaaacggaagcatgaacgcattatagataaatatgaaaaaataccaagaactctgcaaactgcaccagagaaggaactgattcatttacttcctatcaaagataaaagtggtataatcccacagactagggagaagccagttactgatagtaacaaagatgaagaggatcaagaagaagagagggaacttgaggaagagatcattgaagatcctattcaagagctgaccatagaagaacatttgattgagagaaagaagaaattacaggagaagaagatgcatattgcagccttggcatctgccatattatcagatccagaaaataatattaaaaaattgaaagaattacgttctatgttgatggaacaagatcctgatgtggctgttactgttcgaaagctggtaattgtttctctgatggagttatttaaagatattactccttcatataaaatccggcccctcacagaagcagaaaaatctactaagacccgaaaagaaacccagaagttaagagaatttgaagaaggcctggttagccaatacaagttttatttggaaaatctggaacaaatggttaaagattggaagcagaggaagctgaagaaaagtaatgtagtttccttaaaggcatacaaaggactggcagaagtcgctgtgaagagcttgtgtgagctgttggtggcactacctcattttaactttcacaacaacatcatcgtattgattgtccctctcatgaatgacatgtcaaaattgatatctgaaatgtgttgtgaagctgtgaagaaactctttaagcaagataaattaggccaagcttctcttggtgtaattaaagtgatttctggttttgtgaagggcagaaattacgaagttaggccagagatgttaaaaacatttttatgcctaagaatcaaggaagtagaagtgaaaaaagatacagaagacattaataaaccaaaaaaaaaaaaaaaaaaaaaaaaaaaaaa

SEQ ID NO: 206491 - DNA, 1000 bp, Homo Sapiens
gaaaggtgttacagaagatggctggaactgcatttcttgccctagtgacttaactgccgaaggaaaatgtcactgtcccattggccatattttaggtaagaattagattccttataaagaagtagtgataaatcttcattcttgtttttgtttttatttgaaaagggcactaatttaaatagttaagtgattacttaatatttttgcagtggctcaagcaattctcctgcctcagcttcctgagtagctgggactgcacacataacaccactgcagctggctaatttttaaattttttgtagagactgggtctcgttatgttgctcagcctggtcttgaactcctggcctcgagagatcttcctgcctcagcctcctaaagtgctgggattataggcatcagtcactgtgtccagcccttaatagtgtttataaaaattatttttgtacaaattaatgatacttaaaacatcagcaggcattgagaagaaaatacaaagttttgtctgagttttttaaaactcttaatattgtaggattagatggttatttccttaacataacatgacaaaatatgtctcaactcaaaagccaacttgatacttaatagggaaaaagcgtaagcattcctgttaatgtcaggacctggaaaaggatgcaaactatgcacttaagtaagagaaaaaaaatatttatcattggaaaagaaaaggtaggccgttgttaatcctagcactttggaaggctaaggcaggtgtattgcttgagctcaagagtttgagaccagtctgggcaacatggtgaaaccgcatctctacaaataaaaaaaaaaaattatttggttacggtggcatgcacctgtagtcccagctactcgagaggcaaaggtgggaagatcgcttgagcctggaaggtcaaggctacagtgagctgagatggcgccactgcactccagcctgagcgacagggtaagaccctgtctcacgaaaaaaaaaaaaaaa

SEQ ID NO: 206492 - DNA, 1000 bp, Homo Sapiens
actagataactatatgtagaagaatgaaacagatcactatcttttgccatattaaaaaaatcaaaacaaaatggcttgaagactggaatctaagatttgaaactattgaaactactagaagaaaacgttagggaaatgctccagaaccaaatatttcttagtaagaccttaaaagcataggcaagcaaagcaaaaatggacaaatgggatcatgccaagctaagaaccttctgcaaagcaaacaacaaagtgaagagacaacccatcaagtgggggaaaatacttgcaaactactcatctatcacagaattaatagccataatatataaggagctcaaacaatataataggaaaataatccaattaaaattgagcaaaagacctgaatggttatttctcaaaaaagacatacaaatggccaacagggatatgaaaaaatgcttaacatcactaatcatcagagaaatgcatatcaaaactaggatgaggtataatctcatcccagttgaaatggcttttatccaaaatacaggcaataatgaatgctgataaagatgtggagaaagagaaacactcgtacactgttggtaggaatgtatgttagtacagcactgtgaagaacagtatagagattccttaaaaacctaaatatagagccaccatatgagccagcaatcccactcctgagtaaataccccccccccaaaaaaaaggaaatcagtacatcagagtggtatctgccctctcacatttattgcagcaagattcacaattgtcaagatatggtatcaacgtaagtgtccatcagtggatagatgggtaaagaaaatgtggtacacatacacaagataatatttttcagccataaaaaagaaaaaaagtcctttcatttgctgcaacatggatagaactggaagacattaagtgaaataaaccaggcacagaaagacattagtgtgaatgttcacactaatatgtgggagcaaaaaaaaaaaaaaaa

SEQ ID NO: 206493 - DNA, 1000 bp, Homo Sapiens
agcggttgtcatagaaactatatagcattgatttttagctatgattttgattcagtttttaaagtatttaatttttattatatcagcccacactgaacattggtttttcagcagataatgcatcttccaagtgctccaaggcgaagagccacagagaagaatactgcatcttgagtcataccctgaaattactgaatgaattacctgtggccatgtaaacactctgcttcagtaggtagagtgcaacagacaatccaatcattcagaactaagtttttagttagcttctgttattcactgaagtagtttgcaattacagttgtctctaggtatccatgggggattggttccagaactccctgctgataacaaaattcatggatgctcaagcgccttacataacttggtgtagtatttgcgaataacctatgcacatcctcaagtatactttatatcatctctaaacatataatacttaatatgtaaatgctatgtaattagttgttattactgtatttagtgaataatgacaagaaaaaaaagtgtgtacctgtttagtacagacactactctgtactgatttttttttctgagtattttccatccagggttggttgaatccacagatgtgtaactcacaaatatgaagggctgacggtacctagtagttaattcagatttatcgcagtgatctaaagtaattttgcagtttacaagcatttttttttggttctaaaagaaaaaaacaaaacgaatattggtgatgtgatatttatgtaatgtgatgatattataatggccacgttttaaaacttgagaatgtcctaagttcacacactgttggtttctagatccacaaggcttctgtatacagttcacggtcctcggcattgcttcttgtaatttttccatcccaaaggagagctactgtactgactgtacttgtggaatgcagcgcttcattaaattaagtttattaaaatgcaaaaaaaaaaaaaaa

SEQ ID NO: 206494 - DNA, 740 bp, Homo Sapiens
caccgttttagtggcatttaaatccccggcgctccgccgtctaggtgacgcgcagtcgcccccccaggcagcctaggcggcggcagctgctgcggcgactgcaaaggccgatttggagtgctggagcgaagaagagcaaaagctgcgttctgcgcgcgcccgactccgctgcccgccccgccaggcctccgggaggtgggggctgggaggcgtcccccgctcccgccccctccccaccgttcaatgaaagatgaactggcgagaggacgaatcgcatccaggagctgcgcagccctggccgctgccgggacgccctgctccgcgctgagcttggggccagaaaccagccatagtccccacactccgccgccgcagctgagatttagcggaggaaggggcgagggaaggtagggagcaaacctatgaagaaacatcgcgttgtcattggaacttccaagcctttgctgttaagagccaggttcttaaatcaacccgccccacacacatgttgcttacatgctgcgttttctcacggtctgttttgcctgaacccatcaacagctgggagattaatcaaccacactgaaaatgtggagggatttatgggggagggggttgaaatgtgggtgtttgaaacaaaagtgtataaacaaatgaattgttgataacttagttattgacctggagactggtagcttattaaagaaactccgtgttactcaaaaaaaaaaaaaaaaaaa

SEQ ID NO: 206495 - DNA, 840 bp, Homo Sapiens
agcggggcggcccgagggcggcgcaaggcctgaggcccagcacagtgatgtccgagctcagcgatgaagccagcgagccggaactcctgaaccgcagcttgtccatgtggcacgggctcgggacacaggtcagcggggaggagctggatgtccccctggatcttcacacagctgcttccattggccagtatgaagtggtgaaggagtgtgtgcagcggtaagagatctcggggaacttcctctcacattttgagcagcgcagtgatggcttcgatcccacgtgatggggctttgcacacagttgtggatgtttaatgcgtgtagaataggttaacctgcttatctcaggcagctgtcagtaagtattgatgctgagccctgacaaagaggccgtttttattcctaggaagaaaaagagggagtaaactttgatcagaagcttataaacagtcattctttaaccagactaattttattcactaattgcagaaatgcccaaacaaacaagcaaaataaaaataaagacagaaagtgatggcctggtgcggtggctcacacttgtaattccagcactttgggaggctgagatgggcgggtcacttgaggtcaggagtttgagaccattctggataacatgatgaaaccccatctctactaaaaatataaaagttagctgggtgtggtggcatgtacctgtaatcccagctactcaggaggctgaggcaggagaatcgcttgaacccgggaggtggaggttacagtgagctgagattgcgccactgcactctagcctgggcaacagagtgagactctgtctcaaaaacaaaaaaaaaaaaaaaa

SEQ ID NO: 206496 - DNA, 1000 bp, Homo Sapiens
tgtttagttctgtgtataaatggaatgttgtgaagatggccccttcccatgccagctggttcctctcccttggttatggccgctaatggaaaccggactagtgagcgacctttaatttttaaaaaaagaaaatacaataaaataatactcaaatgtttaagcagatttcccaaaacagagtagaatagaattcatatgaataagcaaacaatttaattgttactactggcattatgttatggattttgctttcctacagaaaataactccacaactgattttattagtatagaattaatttcttgctaagagtcatttttgcttatctcaccattggatatttgcaaagtcactaatatttcttttatccatcattcatatgtaagtaaatatgtaccttacttcctctttccaggcaagtagaggttccaaatatagccatgtgtcacataacagggatttgttctgataaacgaatccatagacaattttgtctttgtgcaaacatgataaagtgtacttgcacaaacctagatggtgtagcccactacacacctaagctatgtggtatagcctgttgcttctaggctacaaacatgtacagcatgttactatactgagtactgtaggcaagtgtaacataatggtcagtatttgtgtatctaaacatacctaaatatagaaaaggtacagtaaaaatatggtataaaagataaatggtatacctgtataaggcatttaccatgaatggagcttgcaggactggaagttgctctgggtgagtcaatgagtgagtggtgagtcactgtgaaagcctaggacattattgtacactactgtaaactgcataaacactgcacactaggctacaatttatgaaaaaatttcttcaataataagctattaaataacataaagttgtaaataataataaattatgattacatatcaacaataaaaaaaaaaaaaaaaaaaaaaaaaaaaaaaaaaaaaaaaaaaa

SEQ ID NO: 206497 - DNA, 1000 bp, Homo Sapiens
ggttcctggatgttcctggatgcctgacatcacattgatacatgctggaggtctggctcaggctcagttttctcacattggtgcatctcttcatgctagaactgcttatgtctacagagtccctgaagaagcaaaaatcctttttttagcattaaacatagcatatggagttcttcctcagctcttggcctatcgttgtatctacaaaccagagttcttcataaaaacaaaggcagaagaaaaagtggaataaaaatattacttcatgttcctcctttctaaattactaacttttgttatactggtactgatattttgtcccatttcactctcttctcatacgtgagtacttaagaatatgtacattcttgctctgcactgtatgtgtgagctatatggtattgtgtaaattttttttgaaggaaaatggaaattcttgagaaacagtttgtttaaagaaatatattcaaaatcatttgtgaataaacttgatcatccatctcaatattgtttgacatataaaataattataagtgtaaaaaattacaatttagtgccaacagtagtgagcatgaaatgaaactattcaaaagagaatatggcctgtgcatattaaaaaattcaaaacagtgaatgcagactggaggagtaacttttgcaaataagatgaatatgcttcattattaaactcaatataaaaggcaaatcatcagaatatttttaaatgttgtttgaaaaatgttttcccaaggaaagtttattatttgctgctgtttcaagaaaattacttttactaaatttttttgtgtgaatttaaacagctaaatagggatcagtaactttatctctatccttaatgaacatttgttttattggtggctggaaatatttctattgtatttctgtgtatatttttaataaaattatttttggcctcttaaaaaaaaaaaaaaaaaaaaaaaaaaaaaaaaaaaaaaaaaaaaaaaaaaaaaaaaaaaaa

SEQ ID NO: 206498 - DNA, 1000 bp, Homo Sapiens
gtaaacattaaaggcttgaaaaaccatattttgttagccctaaaatgtacatttttcttcccattttaacttatctgaaattgggatgcatctcattactgtcaaccaggtgatagtcatgtaacgctcctaccgtgtgcatgtgtgaatttacagcttgtcatcgtgtcatccctttaaccaacatgtgttttgttggtatcaaatgtgtcaggtttaattgacattttaaaatgtcttcaaaaagatcacactatgattcagcattgaaacgaaaagttattgtgtatgcagaaaagcatggaaacagagcagcagggcgtacatttgatattagtgaagcaaatattcgtcgctggagaaatgatcgcaattccatattttcctgcaaagcaacaacaaaatgttttacgggacctaagaaaggtaggtacccacaagtagatgaagctgtactacgtttcgtcagtgagacacgtgcaaaaggattgcctatcacacgccaagcaatgcaattgaaggcaggagaagttgccaaaaccctaggaattgatgaaacaaaattcaaagccacaagaggctggtgtgaccgattcatgcgtcgagcaggactatcattaaggcatcaaacatcgttttgtcccaagctccccactgccattaaacagaagacagtgttggagcactctttcaagaagtgctgcataaccagtactcttgacaacaccgggagagacgttctgtggaaaaatgcagacatcaatgactgtggtttgaaaagtgattcagaagagttggattcagaatatgaagttataattataacttaaccaatttatttcacacattttctttacatatgcacaagattgatgtgataaaaatctgtttaactcaaagcgctgtttcaataaatataaacattttctgtgaaaaaaaaaaaaaaaaaaaaaaaaaaaaaaaaaaaaaaaaaaaaaaaaaaaaaaaaaaaaaaaaaaaa

SEQ ID NO: 206499 - DNA, 1000 bp, Homo Sapiens
aggacactgaaattcagagaggggaagtgatttgcctcagcttgtactaaagaaacatttcaacagagaacccagtggaaattatgacatgttatcttctcagagtcctgaactcccatccctacctcagaagagactcctctgttcacagaagctaaaggcagttccttcccaatggcaactatgtttggatgttggatctacactttctcaagcactgtgatcttcaaatcaaaggagatttctcccattatatacttcttatgatcaacaaattccatcatctccccactaagagaaagtactccaagatgatagaatgattttaaagttatgggactacaacagcagccacaggaaccttgaactgccatccagggccatgcagcaaacaagcaacagggaaatatcccactatgcaatcctattttgagatgatatttaggatgagagaacatgcattagttacctaccagcttgacaggaatggatttccaaatctgacacaccatagcctgaattctcaccagtttgctcctggaaaggcccgctcatgcatgagcccctgccactcttctaaataagcttccaggcattacctgcatgctgtgttcctgtggtgggatggcagtaatctctgctaagataaacgggagcttctgtggataaagcataaacgcagtgaagtgtgtgtggctggaagatttaatgcctctacagtgcttagatacaagttgagcttggaattccagaggtagagcactgctgattggagacatattaagtaaaatgtactgtggaaatgagataaaacctttattcttgctaatgattgtcattgtatgtattcaggtgtccaacaaaggattttagaataaagtgtgcctttaaagtttcaaaaaaaaaaaaaaaaaaaaaaaaaaaaaaaaaaaaaaaaaaaaaaaaaaaaaaaaaaaaaaaaaaaaaaaaaaaaaaaaaaaaaaaaaaaaaaaaaaaaaaa

SEQ ID NO: 206500 - DNA, 1000 bp, Homo Sapiens
ggtggctgcacatgctcccggatacccctccagcactcccttttgtcatcttgagtttcagtccgtgacttgggtggcaccctatcttctccatcagggatggtagctatttttctgccatgagactagaggttgcttgagaacaggaaattggatctctcccttcaggctgggatttcactaagggctggagaaggggggaatatgggaggattatctcctatcacagggagcgctctgagggcaaggctgtgtctccgattcagactgacggttccctgaggatggggctgtttctcccctccgactggggctccctgaggatggggctgtttctcccctccgactggggctccctgaggacagggctgtgtctcccctcagcctggggctccctgagtcagggctgtgtctcccctcagactggggctccctgaggacggggctgtgtctgcctcagactgggaatccctgaagatggggccgtgtctccctcaaagtggggctccctcaggacagcgttgtgtctcccctcagactgcggctccctgaggacggggctgtgtctccctcagactggggctccctgaagaaagggctgcttctccctcagactggagctccctgaagatggggctgtgtccccctcagactggggctgcctgaggatgaggctgcatctcccctcagactggagctccctgagggcagggctgtctccccccttcagactggggcctcccccaaaggacagggactgtgtctcccctgggactaggttctttgtgtcttctgcatcagacagattcccatgaggacagggctgtctccccctccatctggagctccctgaaggcaatggcctctcccctcaaatgggacatttgcaccccaccccaccctctggctccccatggcgcccaggcattcctcccaggacaccatttgtcacgctttgatgaatgaaacttactaagaataactcaaaaaaaaaaaaaaa

SEQ ID NO: 206501 - DNA, 1000 bp, Homo Sapiens
gagtgcatcctgtcagtttcgaaaggaaaaatgcctttattgcaaaaaggatgtggtagtcatcaatctacaggtgaaaaacaacacatacaacagtcatctttatggagctaaattatgcctgagtggtcacagtgaatcaggtggaatgccagaagaacattcctgcatttatttttgtacagaattaggtctaaagaatttgctttttggagagaagttctgtgaaaagcttaaaaccttcttgttggtagcactccatttattattggcaaaaatattatttgaacacatgctgtgtatgtgtaatgaatgctgggtgctgagtcacaaggaggtgacaataatgtctactctctgaattctgcagtgtagctggggaggcaggatgcaggcataaaaagaaagcatgggtaccttttacatgtcccgaaggagctatgctggcagttccccaatctaccttctttgaatcctgtgttctatgactttcttttggaataattggaaaatttaatattttaattaagttcatttacacctagaaagtggacatctttaatccttttttggaattaggcaataacttcctgtagagagtaagccacgtgacatataatccccaaagagacacaggtgtaatcactgtgaggccatgaaagacaaccctttgttttattgcactttctctatttcagaatcatgaggaaaacttgtgtcctgaatacccagtattttgtcccaacaattgtgcgaagattattctaaaaactgaggtagatgaacacctggctgtatgtcctgaagctgagcaagactgtccttttaagcactatggctgtgctgtaacggataaacggaggaacctgcagcaacatgagcattcagccttacgggagcacatgcgtttggttttagaaaagaatgtccaattagaagaacaggtaaatcttcaaaggttcaaataaaaagtgaggcaacagcaaaaaaaaaaaaaaaa

SEQ ID NO: 206502 - DNA, 978 bp, Homo Sapiens
gcccgccctcccctgggtgcggagccggacggcgggcactggcaacccccgggcccctggagagccccgcggcggcccaagacccgctcccgagacacgtgggcccctccggacttggttggtccctggagccagctgcgcgcgtcctctccggcctccttgtcggcgctggagtgggtccacgtctgccttgcggagcgcggtggttccacgctcctgagcgcccacgctgcgcagacctggccgctctgcgaggcgacggcagcgcactgaagaccgtggtgtttcccaagccctccctgctctcgggcctccagggcgcagcaggggagggttttgtccccgtggccaaagctctgcaggtcgaaccttatctgctatgggaaggccccgcattttcagattcacgcagggccctctgcagactgttggcagaaaaaaggtagccaccaaacacatgcataagctggacttttcccagaatgctgcagcagaactaccctccagatagacactagcctgcgtgccacagtgctacgtgagtcttgcaaagaggagatctttatggcgaggctgagagcactgcctgcatgctttaccagagcccagcctccagcctccacggaaaatgtgttttggaatcaacactctttgcaaaggctccacactgctttctggtagcattggcctgggcgcccaggcactcctttagaacccacctgttccccccacccaccctagtgggaggaggagagggttacactgacagataccggcagctctgcaacccgggaacaacgcagacaacatacaactcgacagagtcacagaaggtggcgtccatcgcgcctggatggtgactactgccctgcgggctgctgggtgggtgaaacacacagggaagaagcacaaatacacacacagatgtggctcagggccaaaaaaaaaaaaaaaaaaaaaaaaaaaaaaaaaaaaaaa

SEQ ID NO: 206503 - DNA, 1000 bp, Homo Sapiens
gtaagaaaagggatatttaaatctcttttaatttgaaactatattagtaaacaaactaaagaaatacaaatctggtttattttatagtgataaagatttgataatgcaatgaaactttcatatacaaaaattaagcatttttctgttaagtttaatttttcgtagcataaaagtactatatagacatagaaacctcaggaagagcaaaaaaaaattatttaaaaatcatttttatcatccaaaagcagttgttattagccttatatatacacccttctagttgcatatttggattagtgaatttatttctcaatccaattcgttactgtgccagggactagaaagattatatttcctctagagaagaggtttagtgctatgcttctggctcagaaatattttctttagatttgagttttatctaaaaattaccactaactttatatctattccatagtattgtaatgtaaaaatgcctaggattagaatttttcctcaagattgaggatacaggaagatgcatcttgtttactctggattcctcctctaccatatccgcatgtcatccccaaggataccttttcatagtgaaaacaatttgaggcaagggaggtcatgaagtattctgagcaggagagtaagaaaaataacttctgaaatacgtgtactggtcagaatttgcttaaagagagaaatctggccatggtggctcacacctgtgatcccagcactttgggaggctgaggctggcgaatcaccagagttcaagagttcaagaccagcctgggcaacatggcgagaccccatctctactaaaaatacaaaaattagccgtgcatggtggtgcacgcctgtagtccctgctacgtggtggggggctgaggcaggagaattgcttgaacctgggaggtggaggttgcagtgggctaagatggcaccactgcactccagcctgggtgagagagcaagaccctgcctcagaaaaaaaaaaaaaaaaaaa

SEQ ID NO: 206504 - DNA, 1000 bp, Homo Sapiens
gaagataccaggaaggaggccagagcttcaggaaaccgctgcaaagatgatctcacaaagaaaccattgtggcagggctcctggagcactcaagttgatgtgacgtgtcctactcctgagagcacgcaaccctgctggctccttgggcttgcatggctcagggaaaggaaaatagcccgggtgtttggaagagaagtatgtgtggatggaattattcaaatgctgatggatggattgggtctcctctcctgctggcccggcagcctctccgtggaaggctttgcccaggagatgggtcacaacagctctggtgagatgctggaaacataagcccaggcagatagaatggcagtgagtcacagtaaaccgacaaccgtcaggtgctcaggagggaagctgaagccaggggactcgctgtgctgagctaagcgaggagcaggactctcctgttgtgcaaaacacaaagagcagagtgttcaagtccaaggatcaggttcctccaaatggaagcccaagctgtgcacgctgagctccagggctggcgatacaatcacctgcctctgcccatgcaggaaggtaccacccaaacatacccatttctcccggggcatgggcaggggccaggggagacagggccctaccacttcccatgtaaaactgggtgagcagcccagcgcccgtcagagccgaagcacctcacctgcacccccgcccccgcccccgcccccgccccgccccgcccagccttgtaatctgggctctgctcgccatgtgctctgtgctagtgaaactgccctcagagcagaaataaactgttggctctcaagtttttccagactaaccggactggccaatgcctgaggctctgtgttcaagataaaagtgcctaagaaagaaaagtgcaggtaggcagtccccacttctgcagggctggtgggctctggggatcctgtctcagcctgctgaacagcccagagtggctttaaaaaaaaaaaaaaaa

SEQ ID NO: 206505 - DNA, 725 bp, Homo Sapiens
gggcctattctgagaatcacatattgttacaggccttgcaccccctttgctgcttccctcctgctcatttggggctgccaccagctctccaccctcctggttccgctggccgggccaagagaggatggagggatgggagtcccaggagatccttgtaaatagtggggtgggactgttctgagtgatcacccgagcacttaaagctccagagtcccattcttcctggatggagcaggtggaggtgcagaggggatttcctcctctccttcctcctgtcgagaattaacacctctccacagccttcccctccagaacaccagccagggaggggtggggaaggaggtcacagccaagaaaactgccctgtgacgacttccctccttcccgcctatgtgagccatcctgagatgtctgtacaatagaaaccaaaccaaatgggcaccctcggttgccggggggcaggtggggaggggggtgggaagaagggatgtctgtctgtcgtccccctccccctctccactctttacccacaaaggcagaagactgttacactagggggctcagcaaattcaatcccacccttaccaattgagccaaacctagaaacaaacacaaaacacgaatagtgagagacaaaatagaggagagaaagagagcatgagagggagcgagacaggcgaccaacacagaggagagaaaacaaaaatagcaaaaaaaaaaaaaaa

SEQ ID NO: 206506 - DNA, 1000 bp, Homo Sapiens
tcttggagaagcaggattgaaaataagagctatctttgaggctctagcacctacaagagacaccctccctctccaccatggatcacctgtctcacccgtgtgagtctccacacagaaaccagtcatggccctgcctttgccccccttgaaatcacccaagaggatgcttcaaactcaggcaagcacaactgatactcactctgcatgcaacagcaggggagtgaccttacaagaaactaatgggcctcacttcctgagaatcactgtcagagcccataacataagataaatcacagccaaggatttttgaaaagtttcctgatgagagaaccatgaccttttcaagggtagtgatggattgatcagggcaagcaataggtagattttttaaaacaagcctggcacaaaaacaatgatatatatctaccaaagttggctagaatacctggctgatgtcccagtcaggaaacacaggaaaaggttacatctgtagaaaaaaaacagcttgttaagcaaaacaatgcagtcaaaaaccaagctcactgtaagaaatgccatgtgggccagtggggacggccatgccgaaagcgctcagtgctcctgaagctgggtggcaggtgttttcacacacaaaggccttccttgctcgggccatgggataagcctttgagtggagacctagcaaggagctttgaagtctgcgttgggggtggaaggtggcaatcccattagacagctctccctggcgtgaatttatgaagccccatgcagactgtgacttttaaaataatcatttagttggttctagcacatatcgcaggtttcattacaggctgccccttaacgagcattgtaacctggaggaaagaatccaaattctttagtcaccacctaactccacattcattaccttgttgcccagggtggagtccaaaagcagcaactatgtttatttctccatagaaaataaatgttcaccaaggcaaaaaaaaaaaaaaaa

SEQ ID NO: 206507 - DNA, 1000 bp, Homo Sapiens
agttctgggtctggccccactccccaaaactgaccccaatctctgtgtctgctgccctaaaaagagaccctggggctgggtgtggtggctcacgcctgtaatcctagcactttgggaggccaaggtgggcggatcacttgagatcaggagttcaagaccagcctggccaacatggtgaaaccccgtctctactaaaatacaaaaattagctgggcatgatgacgggtgcctgtaatcccagctactcaggaggctgaaacaggagaatcacttgaacccaggagacggtggttgcagtgagccaagattgtgccactgcactctagcctaggtggctgagcgagactccatctcaaaaaaataaataaaaggagaccctgactggatgtagtggctcatgccttaatcccagcacttttggaggccaaggcaggaggatcacttgaggccaaaagtttgagaccagcctgggcaacatagcaagaccccgtctcttaaaaacaaaagatcctagcggtcctcatctctaccatggactaaccagagggaaggcagcacctctcatcacccagggggatggcctccagtcagctgggtggggaacacagagccctgcccagaggcttgaacctggcaccacaggggtctggaattacacagaagacgggtgacagccaaggtggatcatgaacggtgagaagtccagcaggtgacaaggggaagggtctaaagggtggagggcacagcgcaagcaaagtcttggcaacaaaagagctaatgcatcccagaaatggggcaggtggagtactggaagctacaccaagcttcagagtggtcctgtggcctcggtgtggtagctcaggcctataattccaacactttgggaggctgaggcaggaggataacttgaacccaggagttcaagatcagcctgggcaacatagtgagacctccatttttacaaaaaatacaaaaattaactgtaaaaaaaaaaaaaaaa

SEQ ID NO: 206508 - DNA, 1000 bp, Homo Sapiens
ctcatccttaggattctatttccaatgtatgaaaagcagatttctgattaatgtgtagtaataggaagcgctggaaatatccaggcttatctctccttgccagtgacttttaaaacggttgcttctatccaattctgtcggagagaggcagaggccccatgggacatgaagatggagacccagctcctgctggcccatagtataggattccttgtctgggactgtgtgtttgaaacatcctttatatacaaactccagcctccttcagcccgtgcattgcaagccaggggtcacagctggaagcattttcatgggaaattcagagttgtcaaaggcatttatctggtattttattgtaattggttaatttatgctttatttaccttgcggataggatctgagagctaaggctgggtactgctgcctttttctgttccacactgtcagggaaatgtatgtctccttaggcttaaaagcattttttttttttaaatgagaaatggagctttggaataaatatttttcattgctcacgacacggagcccctgggtcaccatggcctgtgttcttttaagtcatgtaaaactagtttctgctgagaacattcaaatgtttcaccttgtgctgaggaatttggaactaatcttctcagatcggtgttgctggaagtcggtccaggagctttttggataatccacctcatgactggaaaacaacgaagaaacccagtagcttcttcgccgtgtggattcagaccccgggagcccaggcctgcacctgggcagctgctccctgcacgtggccggacatatggaatatggagcgccgctgccttggagtcagagagctgccaagtagaatttgcatgtaatgctgctatcattttcaattgctctcccaataaaacaggccctggagccgaggtgaatgccgtagaaggcattttttccactgggtgtgggtccagaataaataatcaaaagaaaaaaaaaaaaaaaa

SEQ ID NO: 206509 - DNA, 1000 bp, Homo Sapiens
ggacattcttcagaggcatctacacgaagtagaaatgtcaccgctccctaatttactctacgtcttctagaatccctcaatattatccttggcttccaggaaatccaagaagaccctggaagtagagtccaccttctaagagaggaatgtaagaggtgacccccacccacctgatcttcctcgctttgtccactccacgcactgagacttgacacacctagtggccacctagaacgtaggtccttaaaatctagccccccagcccccaacccatctctagcctgtccactcacctggtgaggaacctctcctgtgtccacagccttctgcaggagttggcaacatggctcatagagctcccagcgagtcaggtcatgagtgctttgggggagaaaggggaatgttatactggaaaagaacagagggaaccaactccacagacaccagtaaaaacgggatggggaagaggaggaaagccactcacttgtagaaggcagagaggcgtttcagagtggctgccagattatatacctcatcctcatctaggaaggacgactgagaaggaaagaagatccacaatagcatttcccccagaactcatcagtccacatcccccgtcttgcagcccctcccacccttgtttggggtgtcccattgtccagccccagctcctacctgtaacagctcttcaagctcctgctggaagcggtcagtcagcaaatctactagctggctgcgggcaaagtccgcccggctgaagaaagtgaattcgggattacagagcaggtagagggcatgcgccccagcctcaagcaccgctggctctgcatgcttcaccaccacctcctggagttgctgcaggaacagctccaggtgctgagaagaaaaggcagaagatggtgtgctgtggggatgggaggaggacactcttctggcgggaagtggaacggggttaaaagcattaaacttcaaggataagatgcctaaaaaaaaaaaaaaa

SEQ ID NO: 206510 - DNA, 1000 bp, Homo Sapiens
tgtggaggttttctttgttccataatacagagacaagttcataatttttagtataacagctaagttgacaaattctaagtttcctcaggtaaatagtcgtaactgtccttttccctagagaagtgcttgctgggatagtaaaaacatacaccatttcatgacttctgcaaatactttccagcggaagtcagtgtaggtttgtttttggctaacatggtcttgctgcgcaggaatgtaaacactgtgtttgaaactctggaaatcacgtgtgtggggagatggggacgcttcccatgttgtggggagctctgtggctgtgatggctgcagttgccgtgcctctgttggaacgccaagtgcctgcaactcacgtcaatcatagaattgtgacgcacagttggcaaaatagttctttatgctatttctcaaaatttgaggacaaacccagattgggattggaatatgcactgtaaatcaaatttttcttatctacaaagactaatgtaaaaatgattttttcttctgtgcctgattaaattaactgtggtttttaatataaatatttattggtgtgctttgggagaaaaattatcttttcttgaaagaagttatcaaagcaaatttattatcttcacaagttaatgggagaatgtggttttgattctgggtgtttgaattgtgtaaacacacagcttccttgtgtgaagagagttgtcctgtgctccttctactgtactttttttattttttaataggaaagtgatgtgcttcagagaagggttcctccttaatgttgaggttttttaaaaataaaaatactgtttttaagctctttccttattggtttgcatgattattggcatctgcttacgatggctttaatcactcagagctaatggcacctttcctatttagcctcattttagaatgcagtcaacacatgtagacttttcacaaataaatgaacaacttcaaccttggttttcaaaaaaaaaaaaaaa

SEQ ID NO: 206511 - DNA, 1000 bp, Homo Sapiens
tgggccctgctgcttgtccgcgtcctggtgagcgactccctgttcgtcatctgcgcgctgtctcttgctgcctgcctctgcctcgtcgccaggcgggcgccctccactagcatctacctggaggccaaggggaccagtgtgtgccaggcggccgcgatgggtggcgccatggtcctgctctatgccagccgggcctgctacaacctgacagcactggccttggccccccagagccggctggacaccttcgattacgactggtacaatgtgtctgaccaggcggacctggtgaatgacctggggaacaaaggctacctggtatttggcctcatcctcttcgtgtgggagctactgcccaccaccctgctggtgggcttcttccgggtgcaccggcccccacaggacctgagcaccagccacatcctcaatgggcaggtctttgcctctcggtcctacttctttgaccgggctgggcactgtgaagatgagggctgctcctgggagcacagccggggtgagagcaccagtatgtcgggcagtctaggctctgggagctggtatggtgccatcgggcgtgagccgggctggtatgggggcagccagacgaagaccactcctctgctcttctcccaggtgccaggaccaggcggccaccaccacagtctctactccaccccacagacgtgatccccctccctcccccacagaatacccaggccccagtccccctcaccctaggcccctgtgccaagtttgtctgccgcttcttgcccaggatcctgggggtcgtggctaccccctcctctggccggctccttgctgctcctgtcatagtgagcttgtgccgtccccctaggatggggggcatggccctggctgccagatgcccacagcaccctggcatgacctgccacctctgcttccacaccggagccagctacctctcctgtgcctgccactcaataaacagtgtctgcgccccaaaaaaaaaaaaaaaaaa

SEQ ID NO: 206512 - DNA, 1000 bp, Homo Sapiens
tttttttttttaaatctgagaagaaatatgggactgccactgctcagtaggaaaatgtcctttcccacaagcatttatattttaataaaaatctgcactttgtgagttgagccccctcaaagagacctacaaaccctgccacaaatatctccaaccacactcatcatttccgattttcatcactgctgctcctgtgcaaaccaaactatcctttccctggggcatcctaggtagaggccatgccaggacaaaggcagagatatgcctgcctggtaaggaaatccattttggccttgtaattctcaccctctcccaagatgtttgcctcaatatctccttcccaccttaccccgtcttcagctagccaaaacattccctggtatttgaggcccttccaatttcctcctggttttgtgggtgggagaataaagaaaaaactgcactgttcccacccacatagttacagccactttatcaaacggaagagcagtctggagccattgcaaaacaaaatacctgccacaactcctctcttctcatttcgactccagcttttcatcttagcaaaaaagttgcaatcagcaccccctagacggaaggaatatcctgtcttaatgggagtccataggaggctgcaggctgctcccctacagagactaacatcaaggtagttgcagaattcagattctaattacagtgtggttggaggcggggtggattccagggaggtcaggaagaggtaaagtacagaattgagctccttgggaggaggtcataggaactttgcagtatgaaaatggctagagattgggtagaattgagcaggctggcaatggcagttttgtgtgggtggtaggacctaggattcaaacttgagggcaaattgtggagcacatacgacaaatgatgtagagcctttcctatttcccttcctgctgtgtcatccgaaacaataaataataaagaattaacaaagactgaaaaaaaaaaaaaaaaaaaa

SEQ ID NO: 206513 - DNA, 1000 bp, Homo Sapiens
tccagtgtgtgtagactggcagagcatgtgagggagagggctgggaagagacggccctgggcccgtgaggtgcagaactctccctgcaggtagtctgtctgctctgtgatgtgctgataggaaagagcccccactggccctctggttcacttctattatgaataaatttgcaccaatagccccattagtttttaaagaaatgagctgggtgggaaaagtggaaatgtaatttctggtaagcttgagctactttaatttttattctatgaaactgatatcccttgatgtgggaaacaggcaggaaaggctgtggggtgggggtgggggactggtgtggcaccgtgcaaacaaaatgacaaatttcaactcacaatctttgtaagaaaattgttccagtttgaatcttgatattaaagtttatgtttacaaaactgccagttagatgaactaagtgtgtaaaacaaatagaaaagacattcgcagacatttcttctatgttattgaatgtgttgtttctggtgtacgtgtcaaaagtttcagttttttagatcagaaataaacgacaaatagtgtgagatgtgttgtgaacaggcatggtgaccgtggtcagcgccactcttgtttcctgaaatgtgcttctaagacagaaaatgtattttctcatcaagggtgtctggagacacagaccgtgaccttggcgcagcggcgtgcatcagaggcgtgtgctgagaagggtggtgttaagctgtggaaaatgactcaagagcaataaatcagtgccaaagcttccctgcgcatctgaatagacacaagtgaagcccgtgtgcgcacagtgcagaggccgagcctgtatttccaggtagacgtggactttattgactgtgaattcatttacatgtaacttctgacatttcactctgtgcaaataaagaacatgaggataaaaaaaaaaaaaaaaaaaaaaaaaaaaaaaaaaaaaaaaagaaaaaaaaaaaaaaaa

SEQ ID NO: 206514 - DNA, 1000 bp, Homo Sapiens
aattgagatgcacacagtttaacatctggtgtcaaacctggcttccttctttgtgaccaccctatagatgtttgcttttgggaccactgagtaaaccaggccctgagaatccaagcatgaatccacttctgccctacttttaaggatttacgttccatgcaggaaagcagataaccataatttctgaataaataagacaacaaaatgaaatggatgctggtcaactctgatgcaaattttaagaaggagactatgcctctgtgtctcccagcttcacagaaaaaaaaaaaagaaaaaagaaagatgctcagagtggggtacctacacttggaaaaaacgcaagtataagtctgccattcccatgaatccaagatgaatcctggcacagagtaggtcctcaaattttgcaaaattaattttgaatctttatcaccctggccaatgcactgccataatgcaaatcttactatctacctttctatgtcagtcacatttttaaaactgtgtaacctatgaaaaaaaaaaaaaagctcaccaaatcaaaagagaggaagtgctaagcaaatacaggaaccaaaaaggtttatagaggctgccttatgctgtctcatccagttcctttgcggtcctcttcttcagcacatgccaaagctgttcctcacggcctgtgagacaagagcatctcggatgtaggacaatggaagagttaggtgagtgaggagcctgaggagaaactctgagggagtgaagacttggctgccatctccttgtgtggtggggtatacttctggctagactgagggtagtaatggaagattttattttcacttctttcctgtcctcagccctgccaagagtgaagcatgaggaactatgattgttttggggaactatgggttcactgtttgcagtggcaaaatagatggagagtttggtgctaaccgcggaataaactcttggcaaataaaaaaaaaaaaaaaaaaagaaaaaaaaaaaaaaa

SEQ ID NO: 206515 - DNA, 853 bp, Homo Sapiens; identical to SEQ ID NO: 26943

SEQ ID NO: 206516 - DNA, 1000 bp, Homo Sapiens
ggtaacttttctgacacctcctgcttaaaacccaaaaggtcagaaggatcgtgaggccccgctttcacggtctgtattcgtactgaaaatcaagatcaagcgagcttttgcccttctgctccacgggaggtttctgtcctccctgagctcgccttaggacacctgcgttaccgtttgacaggtgtaccgccccagtcaaactccccacctggcactgtccccggagcgggtcgcgcccgcccgcacgcgcgggacggacgcttggcgccagaagcgagagcccctcggggctcgccccccccgcctcaccgggtcagtgaaaaaacgatgagagtagtggtatttcaccggcggcccgcgaggccggcgtgccccgaccccgacgcgaggacggggccgggcgccgggggcctcccacttattctacacctctcatgtctcttcaccgtgccagactagagtcaagctcaacagggtcttctttccccgctgattccgccaagcccgttcccttggctgtggtttcgctggatagtaggtagggacagtgggaatctcgttcatccattcatgcgcgtcactaattagatgacgaggcatttggctaccttaagagagtcatagttactcccgccgtttacccgcgcttcattgaatttcttcactttgacattcagagcactgggcagaaatcacatcgcgtcaacacccgccgcgggccttcgcgatgctttgttttaattaaacagtcggattcccctggtccgcaccagttctaagtcggctgctgggcgccggccgaggcgaggcgccgcgcggaaaaccgcggcccggggggcggacccggcgggggaacaccgacgcggaggttccccccacacgcgcgggacgcccgcccgcccccgccacgcacctcgggagaggcgatgggggggtggagcgaggccccgcggggaggggacccgcgccggcacccgccgggctccccgggagcggccgc

SEQ ID NO: 206517 - DNA, 1000 bp, Homo Sapiens
tgttttaatatgattttgtgttgctttgttaaatcatcttattttcattggaagcaactgttttcagcaccttttatatgtaaggaagtaccaatatactttttaaaatttggttatttttgaagtttgttttctttttatttagcaggacagatttggtgatggtattatactcacttgataactattttcttcagatttcactatatcacacagttttcttctgtcctgaaaaatttttgttgagaatccactggctatctcataagagtattcttgcaaataatatcactttttttttttttttttttgagatggagtttcactgttgttccccaggccggagtgaaatggcgcgatttcacctcgctgtgtcccaggttcaagcagttctcctacctcagcctcccgagtagctgggattacgggcatatgccaccacacccagctaagtttgtatttttagtagagacagggtttctccatgttggtcaggctagtctcgatctcctgacctcaggtgattcacccacctcagcttcccaaagtgccgggattacaagcttgagctaccgcgcccagccaacacatcacttttatcttgcagctcccgagattctcttttctgtgacttttaaaattgtgcttacatatgtgtttgatataaatatctttgtattctagtttgtttgttcagcttcttcatttttacatcactttttaaaagatttctgttattttttatattttttacctccataatttctgtttttccaatattttaaatatttctgttcttatttccagttttctgattttctgtagttctctgtgttcatattttactcattgagtattcaatttattttgtttttaaaattaatgtatacattttttatttctttctgaaaaatttataataattttgttggtactacattgccctgttttgtatatattctaatcttttattaaaatttgcacaaaaaaaaaaaaaaaa

SEQ ID NO: 206518 - DNA, 1000 bp, Homo Sapiens
ttctgctaagtgcatccattcataaacagtacgtgcctggcgctctttacgtgtattaactggtttaattcccacaaccttaagtaggggctgttaatctcacaattgtagagccaccattcaaagccaggcagtctggccccagcctctgtgggcttaaccactacccgccgccaagcagctcctaggagcctggcagggaaaggcatggtgacgacagcagacgaggtccctcaagtagcttgcattctggaagcgaagaaagatcatgaacaagtttcaaattggtaaaataattgtcagtggagattcatcccataaaggaattgagtaaaaggaagaactactttcagtaagatggtttgggttggagtttctgttcataagggcagaaatggactctctctgacttaaagagaaaaaactttgttaagagtttggggtaacccacagaattatcaggatgtctcagaatacagacaagaacaaagggaggctccgcagccaaaagtccctcctctaaaccactttgatgaggaccaaacaggtgctactgctgaaagctagacaccacatcctactccacaaccaacgctggaactccccagacaccccgctggctctgccgcccctaaaccggatgcggcagccaccgcggaccccacagcggattctccaccaccccatttctttgcattgcatcaccacctccagagtgtgcctaattggcaccccgctgcttctgatgcaaaactccaagctgtactgggcaaacgcgcagcctctggcaccattcccagtgctgctgagcatacagacctgagcacagcggagggggagggcttggtggggagggggacttacaattcatccacgctgttgaaatcccatcaaacacacacgacccagtttggctggtgcagccttttctctcccctcctgatagcatttcagcctctcttccaataaaaaatagtagctactaaaaaaaaaaaaaaaa

SEQ ID NO: 206519 - DNA, 1000 bp, Homo Sapiens
gtggcagggcctgtgagccacaaaggagactgaaaaccagaaagagcttctctctggtctgttattttaagaaaaacatgcccagaggggccacctggaagcaaggctgtgtggcaccctcaccttcctaattaaacaacaacttcccaggagcaacgacagcaacaacagcctggcccagcagatgaactcgaatcaatccaagcccttcccctatacgggtcagtttgggcactactttacctgctgtgaagtctactgggatcttccaggaaagtcccacctcattagtaaaaagaaaaacaaagactcgggaagaaagttcctgccctccctgttgaatgctgtgtgaggataagatgtctggagcatggcagtcaccctgtgactatcagaaggccaggcgtaccacaaggtggtcattccagtgctctgaatcagccccaaaccacttccctcaagactcatgttctgaggtgattaaaagtgtgctttgaaggtaaatctaggatgacagtcaacagatcagtgattgccaggagtcaggggtagagggagggaagaacagatggagcacagagaatttttagggcagtgaaaatgttctgtatgatactatatataatggatacatgccattatacacttgtccaaatgcacagaatgtacaccaccaagagtgaaccctaatgtaaactatggactttgggtgatcatgatgtgtcaatgcaggttcgtcaattgcaacacacgtaccattctagtggagggtgttgataacaggaggctatgcatgtgtgggaccaggggatatatgggaaatctctgtacatgcctctcaattttgctgagaatctgaaactgctcttaatgaagtcttacaaaaataaagaagtctgctttgccttaaaaaaaaaaaaaaaaaaaaaaaaaaaaaaaaaaaaaaaaaaaaaaaaaaaaaaaaaaaaaaaaaaaaaaaaaaaaaaaaaaaaaaaaaaaa

SEQ ID NO: 206520 - DNA, 1000 bp, Homo Sapiens
ataaattagttacaccctttgtaagctttaaaaacatgaaatttaaggcttactcatgttgcttgtattgatactcatatagttcaatttagtaggttaatttttgtgttaggtatatctcttctggaactgataatttgtaatcttagactattttttttttaagataagtaacttagagtaagaaatccagctgggaacagtggctcatgcctgtaatcccagcattttgggaggccgaggcggctggatcacttgaggtcaggagtttgagaccagcctggctaacatggagaaaccctgtctctactaaaaatacaaaaaattagccaggcatggtggcaggtgccacacccagctacttgggaggctgaggcagtagaatcgcttgaacccgggaggcggaggttgcagtgagccaagatcgcatgactgcacactagcccgggcaacagagtgagactgtctcaaaagaaaaaaaaaaaaaaaatccattcacagaactgctaaagaaaaactagaggaatattttgctcatttagctttaaaactcattattagaggtgtgtattttacagttttgtaaatatagattatgctttataatacacataaagcaagtatatataacatgcatatagtaaataaattttaaaatattgactattccccagttaagcctatacttcttaaggaagactactgatgtcattttaagcatgtttcaaaattcaagttttatttttgatcaataaggttttttttttttttttaacatgctcagcactataggaataagaggacagtggagatttgtaggctaataagatcgcttttaaactttgtggtccatgttaaaattattagttggagaatgtgtaattagagaactataagataaagagataatctttagaatttgaatgtactaaaattgtacacagcttggaatattaaaatcttaaggatatgcaatgttaaaactgaaaaaaaaaaaaaa

SEQ ID NO: 206521 - DNA, 1000 bp, Homo Sapiens
tctcctaaaccatcagcactccctccctttacttgcttcagctcattaaaattctactactgcattgaggttgatttcagcctaagtgcttggaggaaggcagtctaaatacagattttactaaattgtgaatgactgacagctctcccaagagtatttacaatttaaacagagtttattaacacaagtaagcctaaatggatggaggtttggataatatgacaaagtaaaattggggagcagtcgtggggagaaatacagtgaatttgagtagagaaaccgctccagagtctcttaaatcttctataacaaatgacaaatgccactatccactcttctgcaagagattggcccttgggccaattgaatctgcgttaatgcaggaaaatttttaagtttatttttggtagacctccctgctccctgtcagagtcctgcataattctgacaactcctccctctcccccaagcacctcttctgtgttatgcccctcattcttgcagggttctcaacccactctcttactccttcaaggacgtttctgtttgtttttccactttcgtgatttttgcacatttgtgtgctgccagtgctatgaactacctattattgttccatttttctaagcaatggtttcacaaaattgtgggtttggtgtgataattattatgttcctaaaatacattaaaataggtattgaactgttaaaattttagacaaactaaaagcttgatgtgtgtagtagtccccccttatctcagggggatatgttccaagatgaccagtggatgcctgaaattgcagataatacgaaaccctatatatactatgttttttcctgtacatgcatacctatggtaaagtttaatttataaattaggcatagtaagagataaacagtaactaataataaaatagaacaattataacaatatactgcaataaaagttatataactatgaaaaaaaaaaaaaaaaaaaaagaaaaaaaaaaaaaaaa

SEQ ID NO: 206522 - DNA, 1000 bp, Homo Sapiens
ctagctttttactaacccatggccagcctttttttcaagtaccccaacgttttcgccacatgcctaacgataccgttttccaaaggctcaaacacatccgttgtgtctaactgattctcctgttccgacctagaccgatcacttcctgacccggctgcacagctcttatctcgagcttttctctgctctcatccttgagactcactttgtctgtctcctttcttggattccctgtgtaaacgaaaaataaaatcctaagctctctaccaactgttttttgttttgttttgtatttgagacggggtcttgcgctccagcctggggaacggacaagaatccgtctcaaaaaaaaaaaaaaaaaaaaaaagccagacgcggtggctcatgcctgcgatcccagcactttgggaggccaaggcaggcagatcatgaggtcataagatcgagaccggcctggccaacatggtgaaaccccgtctctgctgagaatgcaaaaattagctgggtgtggtggtgggcacctgtgatcccagctgcttgggaggctgagccaggaggatggcttgaacccgggagtcggaggttgcagtgagccgggatcgtgccaccgtacgccagcctggtgacagaggaagactctgtctcaaaaaaaaaaaaaaagaaaaaaaaccagccaggcacagtggctcacgcctgtaatcccaacactttgtgaggccaaggtgggaggatcacctgtggccaggagttggagaccagccttgccaacatggcaaaaccccatctctactaaaaatacaaaaattagccgggcttggtggtgctcgcctgtagtcccagctacttgggaggctgaggtgggagaattgcttgaacccaggaggcagaggttgcagtgagccaagatctggccactgcactccagcctgggtgacagagtgagactccgtctcaaaagcaaaaaaaacaaaaaaaaaaagaaaagaaaaaaaaaaaaaaa

SEQ ID NO: 206523 - DNA, 1000 bp, Homo Sapiens
agaacccaagtcggcctgactccatgagtttctgcctcacaggagatccactggcttagagtttctctctcgtcgcccaggctggcgtgcaatggcacaatcttggctcactgcaatctccgcctcccgagttcaagcagtcctgcctcagcctcctgagtctcttttgatttggtgctgtcacaggttgggttctttggatgtggactctgtgacaggaaaccagccaagtaaccttgttatcatgccggacttctttccacttatgtcctggaggaggagaaggaaccttggcatctctggaaataacagagcacgaggatagtgaaataagatgccccaaagtgtgaaagtggtgatgttggcaatttggatatgccatacagaagctgcacagagtgctttaaatgaaaaggtggaaattatcgacttaataaaaaaaactgtatggtgaagttgctaagatctaaggcagcctgtagaagaaaaatgacatcccagctggataccagaaagatccttcagtaatgaggatggccaaggctggaagatggagatggatgagcatcacaagattccagagtaaaatagatcaaagagcagggaggtacatggccaatatgatttcatctgtcttaaatccttaatatccagtagccactgtgggacaggtctgcccatccttaattactatattattggctggagttactgactggtttttaggtcactgaagcaccaagattcctgtacagagctactgagcaaagtacttgttcacaattttcagtctaactaaaacctttaagaaaatttagactttgagaactctaagtctttagcatagaatgatgtgaaattactgatgttaatgttgtgtcataagaaccaagaagaaagttaaatgaaccaatcacaattccagaattctccagaggtttaataaattctgtagtaccagtttctcaaaaaaaaaaaaaaaaagaaaaaaaaaaaaaaa

SEQ ID NO: 206524 - DNA, 1000 bp, Homo Sapiens
ggagtacagtggtgcgatctctgctcagtgcagcctcggcctcctgggttcaagagattctccagctactcgggaggctgaggcaggagaattgcttgaacccgggaggcggagtttgcagtgagccaggatagtgccatcgcactccagcctggacaacagagcgagactccatctaaaaaaaaaaaaaaaaaaaaaaaactcagtttttggttttgaaaatgtcatgatacctgttgagataactgctgaatagatgggtaatacacagtctagggcatggtatcaaaagaacttgtcactgtacatatcggaaatggtaaaaatatgttttgccgttttcacgaattcattcatttttcatgtttcatgaattcattctttttaaaaaaaaaaaaatcctgctaattctctgtttctcttgcttttctcctttatgactaagttttcctcattatgggttaccccacattactgcttacgaagacatctctttagtcagaaaacagtagcttggttcagttctagcttcattgttaagctcataggtaaatctggcaaatggctagaaacagtcacatgtttgcttgtccttaatgctctcaccttttcccagctatttggatgtatatacttttgcttactttgtagtgtaccaacttaatacatgttatagactaaatgtttatgtcctcccaaacttcatattttggaagccagacatggtgactcacacctgtagacctaacactttgggaggcctaggtgggaggattgcttgagtccgggagttcagaaccagcctggacaacatagtgagaccccgtctctacaaaaaaaaaaaaaaatttttaattagccaggtgtggtggcatacacctctagtcccggctactcaggaggcttgcctgggcccagaagtttgagactgcagtgagccatgatattgccagcctgggtgacagagcaagaccttgtctcaagaaaaaaaaaaaaaaaa

SEQ ID NO: 206525 - DNA, 1000 bp, Homo Sapiens
tttgggggaccgttattcagcttaacacaatacgtcccccttcatcaggtggagcttattttccctccttccttgagtgtgggctggacttagtgactaacttccaaagaacagagtatggaaagggaggaggagagtaacttcatagtacagaaacctggaaacactgtcttggccaggtggtcaaagttaatatcatcaagacatgttgatagcatatactcccaatatactgtgatgagaagggcaattcacctctgtggtattctcaaaacctataacccaatctagtctaaacatgaaaaaaaaaaaatcaaactaaaattgaaggacattctataaaacacctgatcagtattcctcaaaactatcaacgtcgtggggaacaaggaaagattgaaatactgtaacagaccagaggaaactaaggaaacttaattgatgactgaatgcagtgtgctgtgttgaactggatcctagagaaaatagacattagtggaaaaactactgaaatatgaatagtctcaagtttaatagtagtgtaccattattactttcttagttttgataaatgtaccatggttatgcaagatgctaacaatacagaaaaataaggggtatttgggacctccctgtattatccttatgcccttacttgaaagttgtttcagcaatagaagtttatttaaaatattgtgaagggcctgagtatttttaaatcaactgcagtgactctcttttgtgtatttgtgtacagatgagtttttctgcatcgaattttatctcctttccttgcagaagaaagagaattagccctttacagagataacagttgcctaagccagctcttttctcctctttttgatgttcttctttttctctcagtttgaaaattgtaggttatttgagtttttaaaatgtctattgctacatacacattctagttatattctagtccaaacaatctagtaaaatatctaaaagaaaaaaaaaaaaaaaa

SEQ ID NO: 206526 - DNA, 1000 bp, Homo Sapiens
acatctctgtttatgccaatggctttttaaatccaaataatactagttattgccaaattgcattagaatcctattgaattagaataattcatatacttcatatactaggcagtaaatggttagagacggtaaagatctgattgtgatcaaaagtagggtttttgttttgtttttaatcatgagcacatataaaaggaaattcaaatgaaaccaagccaatttctgatttagtaagattaaaaccatagatggagctcagttattaaggatggaaaggaggaaagcacagagtgaggagagaaaaaggggaaggaaaaaaagtagtgtttttttggggaacagtataatgtctcagaagttcttctctcttatcctgctgatgttgagacagtggctttgtataagcttttatttatacctatttcaacatcatgaaaatttttccatcagcattttcttgcaactttaaaaatcacaagggattatttgtttataaagagatacaggatctataatttattggcaatactttattttaggaatcttcaaattgtacttaataaataaatcacaggtcaaaatgactgtaaaatcaatcaggctttctcgtaagttatttcctgaaaaccatccatgataaatacaacaaggcttggcgaaacctcattactcttggaagtcttcagaggttattatacctactgatctgtatttgtctctaagagacatttgaaacacagttacaatgtcaatttggtgtaacattacctgtagtagagctcagagtatatggcagtgcacggtcactcaagatgcatggcgtgtcatttgggtcgctttgatgggtgctcgggtagaactagccttgtagagactaatgtgttcatgctatctctgatcctgtggtgttgtataaaaatgaacagctaaaaatttacccatgacaagattaaagcaaaaataaacacaaagttgttagactttaaaaaaaaaaaaaaaa

SEQ ID NO: 206527 - DNA, 1000 bp, Homo Sapiens
aataagctccaacagcactgaaagacgtttggattattttcagtttgggataatactactatgaacattcctgtacatgtcttttgagaacacgcatgtgtacatttgtgatgggtatgtaatggggtggaattactggttcatagaatatgtgcatattcacctttagatatagaggctgccaaccatttttctgaagtgattatactaatttatattctcactatctgtaaatgaacattgctgttgctccacatccttgctggcacttggtattgattgatttctcttttaattttaggctttttaatacgtgtgtagtgatatctcacttgctgtttgtttgctttttggtaaattttttattgaagtataatttacatacagaaaatcacacaaattgtgtacaggtgtgatatttcacaccgtgaatacatgcaaaaactagtatgaaattaagagttggaacatcaccagtactccagaagccccatgcatgttctcttccagttactataccactatcccaaggatggtctattaattcaacagaatagatttattttgcctgtttttcaacttcaaataaatgaaataatatgcactcttgtgtctggcttctttgactcaacagtatgtctatacaactcatctgtattgttgcatgttgtagttcgttcattcatactgttgtatacagtattgaattgtataaattactcattctgttactatgcatttgggctgtttccagttttggctattatgaataaagctgctatgaacattctagaattgtcttgttgaacatatgtatttctgctgggtataaagcttaaaaaggaaattactggataataagagtattgcctcatgttacctacctgctattttcactgtaatttcatctattctggttgatgtgtaatagtgtcatattagcattttttctttgcttttataaaataaatgtttttatgttggaaaaaaaaaaaaaaaa

SEQ ID NO: 206528 - DNA, 1000 bp, Homo Sapiens
gattctaccctccaagggatgccaggcagtgtcagagcttttctgtcatggggcatgcacgtgggtgggtgcagcggtgctgctcaacactgtggtgtcaggacggccccacccagaggacgatctgggccccagggggaccctggagtagagcgggcctcagggtagctgctaaggcccaggaggtaggcaggtgggtcgggccagccgagacgctgacactcgctgcagctttgcagttctcctggagttcgctgaggagcagctgcgagccgaccatgtcttcatttgcttccacaagaaccgcgaggacagaggtaggtgacccgtatcgcctgcagtagggtgcgtgggggtgcctgcgccgccccttcattctcagcccgcaggcacggtctccctgcgggggtggggggtgcgggcggggggttctggtcggcaggggttctgacggcttctcccccgcagccgccttgctccgaaccttcagctttttgggctttgagattgtgagaccggggcatccccttgtccccaagagacccgacgcttgcttcatggcctacacgttcgagagagagtcttcgggagaggaggaggagtagggccgcctcggggctgggcatccggcccctggggccaccccttgtcagccgggtgggtaggaaccgtagactcgctcatctcgcctgggtttgtccgcatgttgtaatcgtgcaaataaacgctcactccgaattagcggtgtatttcttgaagtttaatattgtgtttgtgatactgaagtatttgctttaattctaaataaaaatttatattttacttttttattgctggtttaagatgattcagattatccttgtactttgaggagaagtttcttatttggagtcttttggaaacagtcttagtcttttaacttggaaagatgaggtattaatcccctccattgctctccaaaagccaataaagtgattacacccgaaaaaaaaaaaaaaaa

SEQ ID NO: 206529 - DNA, 1000 bp, Homo Sapiens
tattgatagtgtttgacgtggaatttgggctaggaaaaataattaccaatgaggagatacaagatagcagcagttagggagaggccgtccatgcagctgcctatttaaatcactgtctatgttaacagataagaactggaaatgtcaaagaacaattgcccagctcagttaccatctgctactaaagatagccccagctgggtgcgatggctcacacctgtaatcccaacactttgggaggctgaggcaggtggatcacctgaggtcaggaattcaagaccagcctggccaacatggtgaaaccccatctctactaaatacaaaaaattagctaggtgtggtggtgcatgcctgtaatcccagccactagggaggctaaggcaggagaattgcttgaactctggcagcagaggttgcagtgagctgagattgtgccactgcactccagcctggtcgacagagtgagactcagtctcaaaaaaaaaaaaaaaaaaaaaaagcccgtaatgagaactctcaagagtactatggtaatataatatggtaatagataataaaagagtcatgatcattaataataaatataatacttctacttcaactgaggaatggaaaactaaacatcatatgttctcatatgtccctaagctatgaggatgcaaaggcataagaatgatacaatggactttggggactttcagggaaagggtgagaagggcgtaagggataaaagactacaaattgggttcagtatatactgctcgggtgatgggtgcaccaaaatcttaaaaatcgccaaagaacttatgtaactaaataccacctgttccccaaaaaactatggaaattaaaaattaaaaaataagtataatttctgctttagcgatattaactattcagtacacaataagtgagtttagcaattcagtgatttctgactgttgggtagctctctttgttaacaaataaaatataaatttgaagaaaaaaaaaaaaaaaa

SEQ ID NO: 206530 - DNA, 1000 bp, Homo Sapiens
taatatcaacctggaagaagctgtacattggaatgcgtttacagtcattgtaatggaagcaaaatacatgaaggaaaaactgttatttgtatccctgcttattgcacctgacgactagttgcagatggttttgtttacctaagaaaacttgtgatataaatgaaaaaaacacctgttttcctagagtcattggttacaaatatgcttcgtctaagagctatttgtccattctcctggagagtgtttcaatttcgacccatcagttgtgaaccactaattattcagatgaataagtgtacagatgaggagcaaatgtttggttttattgaaagaaacaaagccatactttcagaaaagcaagtgggatgtgcatttgatatgctttggaagcttcaaaagcagaagaccagcctgttaaaaaatgctgagtatgtcagagaccatcctcaatttcttactcttcataatttagctacaaataaattcaaattaatgaatgacgataccctggtgaatgtgttatacgtcacacaacagtttgctggtgaggcccatgacccgctagttgaagcactagttacagaagcatggagaaggctagaaaggtttgatattaaactgctctcagaattttcctcttgcctagcagatcagcatttgtattttagtccattaatgggaaaaatagctgatattgttcataggaacttggaaaccacacaggacttaagttccttgtctgtcttgatggtcaacatatcttctttaatatcacgacattttcaacaacaactggtgaacaaaacagaacttctttttgacaccatagattcttctgaggtcaacgttgcaaaaagcatagcaaagtttcttcgaaatgttagatatcgttatcaaccactattagaaagatgtaataacgtatttttaagtaatgtggaccaccttgatttggattccatcagtaaaatacttagtgtatacaaaaaaaaaaaaaaaa

SEQ ID NO: 206531 - DNA, 1000 bp, Homo Sapiens
atttgaaggtttttcagccttttgacagctacatatggagtcactgtaatttccttttttttctctcttctgaaaagtaggtttcggaggagggcactgccctcctggaagagatgcattagatcggtaggcacagaatacctttacatgagaccatttagagaatgattaggggccaaaggtagggggtggactgttaagccaacagggactcagagaaagcaagggtcagggtgaccagaaatagagaaaaaaaagcctcacagaggaagaggacctggacctgagccacagaggatgggtagaacttagaaggagggaatgagcccagtctgaatgatatgtctacaaagtatacaatatgcaatgatgattaactgaaaaattgggctggccatttgtgagatccatgaataaaagtagatcagaaagtcagtgtgagttttaaatatatatattttattataaaacgttaatcacataatatgtgaaatcactattgataaccttttctattggtcctagtgttttgctatttaagataatactgcatcaaatattcttagtgtagccatccatttacaagtgttattttcaagagcaaaatttatgcctttaaactgtgataattaaattaatactggtgagaactatcagatataccactgtgacagaacagatggcctagagacagtgatacctttaaaagttaaataattgctgagcgcggtggcttacgcctgtaatcccagcactttgggaggccgaggtgtgtggatcacgaggtcaggagttcaagaccagcctggccaagatggtgaaaccccgtctctactaaaaatacaggtgggcgcctataatcccagctactcaggaggctgaggcagagaattgcttgaacccaggaggcggaggttgcagtgagccaagatcgtgccactgcactccagcctaggtgacagcgagactccgtctcaaaaaaagaaaaaaaaaaaaaaaa

SEQ ID NO: 206532 - DNA, 1000 bp, Homo Sapiens
gttggtggctgttcttactgtccaaatgaagctaaaaagaaaggcatctttcttcccttttaaaattgtgtaaactgcaaattataatataatttgaatttatgattattttccagaagaaatcttgtaaacctgtggatactcattaattcttttgttaatatttatttccatgatagcatcattccagccagacttgctgaaaatctactggtgaggcaaatataatatatataaatatgctacatatatatttataaaatttctagtgggagttctatataaatgtttctttggtattcttcagcctgtgatttaaagttttacaaaaagcagagctttttcctaagttacttttcagttaggtaactgtgtgatccagttcttccagctgcttctataatgaggcacatattaatacagtttttatatggtatctatgaaagagttcacttcatagagaataatacttgagcaaatgtatccaagaaagcaagcaaatgaaaagaaacctatttatggaataaactccagatctgaaattcagtattttagaaaaatgccagctcttcttactgtatttattaaaacttgtaataatgtgatttttttcaaggatattagttcaaattgaaatggtttcacgccacacggaaatctttaagttatttgttgaggtaccatatatttagggtgctaggggcaagtaatgttaatatgtgcaataggaactactggtttgaatgtgtaaatgggtgatctctctgagtcctggcaacatccagcaaaactactgcttattctccaaagaatattgggagctctcaatcctcggtgatatgggaaagagaactgagtatttgccctatgactgagctttctataggaattttattaaagaatgtttaattttgttgtccttcttaatgttctcagtcaaataaatgagtgagctggtttcggctgctcttggaatgaaaaaaaaaaaaaaaaaaaaaaa

SEQ ID NO: 206533 - DNA, 1000 bp, Homo Sapiens
agctggagatgcctgtggaacattccagccaggctgcatcacgtcacactgaccttcagcattgcccacagtccatcttcccccaggacctgaggattttgcgtccggctccctcctcgcccaggacccccaagctcccagcacgcttctgatttttttttgtaggttttttttttttgttttttgttttgttttgttttgtttttgagagggagtctcactttgtgccctagactggagtgcaatggcgccatctcggcttactgcaacctccacctcccaggtgcaagcgattcccctgcctcagcttcccgagtagctgggattacagatgtgagccaccgtacccagctaatttttgtatttttagtagagacggggtttcaccatattggccaagctggtctcgaactcctgacctcaggcgatccatctgtctcagcctcccaaagtgctgggattacaggtgtgagccaccgcgccaggcctcagcccacttcttttgggtggcaatggtttggatatcgtttgtcctcactaaaattcatgttgagattcgagccccagtgtggcaggtgttgggatgtggggcctcataggagctgtgtggtcttggaggtggagtcctcatggatagattaatgcctgccttaaggggtgagtgagtgctcacccttgggaatttgggaatttggttttctctcccttgcttccttcagcaccatgtgatctctgtgcacacagctgcatccttctgccctcccccagaagcagcagcagcctcagggatgagggaggtcctcagtgagtgcacctgcccagtcttgaaccttccagccatcagaatctgagccaaatcaacctcttcctttataaagacccagcctcaggtcttctgtcagagcaacacaaaatggactcagcacggatcaaattgtgtctcccccacccccacaaaaaactttatattaaaatcctaacccccaaaaaaaaaaaaaaa

SEQ ID NO: 206534 - DNA, 1000 bp, Homo Sapiens
tgggtaaatgcagacattttaggaggaggtaactgaatgaacaaaagcatgggagaaagaagaatgtggagcatgtcagtagtttcattcaactggcatgaaggatgtagaaaactaggctgctaaggctaaccagggccccaaagtaaagaagcctcaggatacggtagaaagtgcaccggttttgaggttttattggactgggttcaaattccagccctgctactttctagctgtgggactttgggcatatttatttaaccaccgattaccaatttgtttcttctctagaatggaaataatgaaacatacctcacattatttgtattagaattaaattagacagtgcttgtaaagctcctagtgtagtgcttgctttattataggcactgaacatacggtaactggtgtcattattattcattctgccaggtgaaagagcttatgctgtaggcaacagaagccctcaagacttttgaggaggcctagaagagtcccataattcaatgcagttcctctcgctcatctttgcctcctgctcctcaaccacccccttacctctgactcagtgctgtacccttccctatacacctccctcttcctctcctcccaccacaggcccagaaggatgtggatgctgtggacaaggtgatgaaggagctagacgagaatggagacggggaggtggacttccaggagtatgtggtgcttgtggctgctctcacagtggcctgtaacaatttcttctgggagaacagttgagcagacagccacattgggcagcgcccttcctctccaccctcccagacctgcctcttccccctgcttccacctcaccccacttatccctctccataaccccacccctgcccaccccacccccacccccaccaagggcgcaagagtagcggtccaagcctgcaactcatctttcattaaaggcttctctctcaccagccaaaaaaaaaaaaaaaaaaaaaaaaaaaaaaaaaaaaaaaaa

SEQ ID NO: 206535 - DNA, 1000 bp, Homo Sapiens
gactgtggaacaagtccatccagatctgctccaggacagccaggtgcacgattcacacatgagtgagcttccagagcaggtccaagtgagttatctagaagtgggccgaattcagactgaagaaggtactgaagtacatgtagaggagctgcatgttgaacgggtcaatcaaatgccagtggaagtacaaactgaacttctagaagcagatttggaccacgtgaccccagaaatcatgaaccaagaggagagagagtctagccaagcagatgctgctgaggctgccagggaagatcacgaagatgctgaggatttagagaccaagccaacagtggattctgaagcagaaaaggcagagaatgaggacagaacagctctgccagttttagaatgaaattacacatgaatatatttttaaatttacttgttgggtttttgaactgattatgggcagtttgactgtccttaattaagcctaacagacaagtggaccaaagttaagctgtttcctgttgtgctgaactgttgtccgttgaaacacattgattcccctccccctacttattgccacagaggagggatcttttccataactgaaggggagttttgagaagtatatttctggaaacttaaatggattatattcttattatatagttgggtacgaatgtatctattttcattgtggtaaaagttcttccttttctctttcccaggtcatgttcttcctcaaattttttccatattgtaaaatcaaacttaaatcattagaatacaagtttatgtattctaatgcatgttagaaaattgaataatataggaaacacaaggctgcatgatgaaaagtgcattgttactgtgcagttaaattttggcttctggctttctttagtttgaacaaacgttcttgtctaccccagtagtcacagatgccatctttgcaacagaaagagtggtggtggcaaaatttctagaatgttaaaaaaaaaaaaaaaaaaaa

SEQ ID NO: 206536 - DNA, 1000 bp, Homo Sapiens
aatacatttgtggagttttgatccaacttatggtggaagagccccataggaagactgttttgagtggccaaccattcccacccactgcataattcagcagaaactagaggagcagggcgtgtactgattggaattgacacgcttattctgtctacctatcagctaactcattagcagccaagcccttaggcagcttagtgtgaaaatacaatgttaactgtttgtttctctgtgaggttagtgggaacctcttggataagcctattgggattaatctaaatgatgtgatgatttgattcaggtatagcccaaattagtaaggggctttagctgtaaactgaaaacaatattcacaccctctcctgggcctgtaaggtctaaggtgagaatttcaggatggaaaatgcaatgtaaagcttccacaggaaagtattcgggtatgtaaggtgttatttctgaccagagccctagttctgcaataaccaaaaccaaggagtataaataacaatcaggctctgggggaatagaaagcaggctttagacaatctgtccatttctacagtaaaattggagtgagtgtgtatatctacttaaaacttaatagaagtgacttctactttttgggctattccagaagtattttaaaattattatttaaaattttgaagccccatttcaaatcttgccgaccttagttcaaagccccctgagagatcacttttagaattgaggatttgttaaaatggcaagtcatttcatttgtgttaaaaagaaaatacccaaaaggaaggagggagccctgttcgccttgagataaacggccttggcattttctggcattaatgtagaaataatgttcctatgatgacatattttcaaagaaacactttcttatttactgtgtggtgtaaaatgttgctaaatgtgttgttacattatgtcactgctgaaagtaatttgcactataataaaggaattttctacaaaaaaaaaaaaaaaa

SEQ ID NO: 206537 - DNA, 1000 bp, Homo Sapiens
gaaccagctaatagaccagccgagggaaggttgaattggctgtctttacttttcccgataagccctacttaaatgcagcctgtaattgtataaaggagatgagaaacatcaagagaaatgacatacatgtagctctggggtagcaagaactagacttcctcaatttggattccatttccttctgccatttgcttttaggcaattgagtgtgggtagtgatagatatcaaatcccttagtgtttccattttgggaaatgaggcactattttttttttaaaagacaacttacccacctgagtcctgaaacagtttgtctctccagttttctggcctatactctagttagctctgatccaagtttacaggacaacagccttgctttaagccatgtcctgttgtgggcacgataatagcaactgagctgtcacagcctaccagcaggctggtaacacctccagggtctcttggctagagcagatttcttagcagctgactaggacttcagtcattgggaagcctatgaggcctttacatttttggtgtgagatggggaagaaacataaaatgccactttacaacttcaataatagcctgtaatttatatttactgtgtgaatttttagtcctatattttaataatttgtaaattgatctcttattccaagaatcctttgaacttgtagaacatctgggagtccacttccctgtcctcttcctgatccctgctttctggactgtttaaatcctctttgggatggatcagagagtctagagaggccactcataggtccagctgctggcctcctgactctccaaagccttcactggaattgggacatttgctccagccctagctgtgaacatgaccagagacattatttataattcagccatttaagatatacctgtactcaaaaagtcctgtatatttttaaaaagttttatttttcaggtgaacaaaaatacatcctaagaactctgccaaaaaaaaaaaaaaaa

SEQ ID NO: 206538 - DNA, 1000 bp, Homo Sapiens
catatggagtgtctgaatctgttgctgggacataccaatccatgtattcattagagccatagaagttattattcattagttcatagtgtttgagttctttatgtcactctgttagaaacaaggactgagtcgtgaagaaataagaattggatttttataaaaacctctgaaggatatttacctatgaaaaagttgttaagaataaaaattagaagtccatggttaacttttccttcaatttatattattcctgaatcatagggaatctttctagaatgtgtttataatttccttgtacagtttctttggaaatacgttaaagatagtggcaatttcatatatttcatggatacttgagtttgtgcttttaaggtgtttgtttagggatacaatgaccactagatgtcgctgtttatccagtagactaagattgagtgttctttttgttcagcaactcttctaaaatgtttcaagcaaagatagtaatgacctcagtttctgaaataagggcatcttcatcagattattcttctgttttaaaaaaaagcttgaggcaaatgtgagtgatttccagtgctttgaaagggattacagtatcacacaatgtcaagctagagttaaacacagtattagctaaataggcacttatgtgtattttctttttcatgattatcggtgactggtcagtgtactcatcaatttccaaaatttgtataaatatcacaattagaaaaatgcctgaggtactaaagttatgttggctttttgtgtcttaacacacataaatactattgttattgcagcagatgccttttgaatccattttccataattgcggatagtcataaattgcttgctcaatttttagtaattattgctgttgacaccagcgttgtagatttttggtgttgttgaatgcagtagagagaccaagacactattctgtaagatcaataaaagtaattggaaaataaatatgaacccaaaaaaaaaaaaaaaa

SEQ ID NO: 206539 - DNA, 1000 bp, Homo Sapiens
tcttatgggtgagggtgaagtttgttgttgttgttgttgttgtttttaaaaatatattttttaaattataaaagcacatcgttatttatttatgagcggagttttactctcgtcactcaggctgggtgactatatatgtatatatatttcttttttttttttactcttcaaagttccttgagctttttattttgaaatttggtggttgggctttttacccttttttatagacttaagaaatttagcactttgtgatataagttgtgactactttttccattgtgattgtcttttgagtttttttatgattggtgttgcacattagccatcagttcttttttattgctaagtaatgattcatggtatggatatatcacaatttctctaactattcgaattatttaagagcattttggttgtttacagtttctggctatcataaataatgttatcctgagtattcatgtacaggtgcttgtatggacataagttttcttttctccaaatacatgcccaggaatggaattgctgggtcatatgtgtaagtatatgggtttttgggggtttttttttgggagaaaataccaagttgtcttcctgagtggctgtaccactttctgtttcttctggtattgtatgagaggtccagtttttctctgtctttgccagcatatttgttattgtcactttttttatttttagatgtttaagtatgtatgtagcgataactcattttggttttaatttacattttcctaatgactaatgatgttgaacatctttccacatacttatttgccatctgtcgacatacttatactctttggtgaaatgtctgtgcatatttttctcattctttaattgaattacttgtttttatattattgacttttgagagttcctttgcatattgtagatactagttttagtcagagatgtagtttgcaaatgttttcttccagtctgtagcttgtatttcttcggaaaaaaaaaaaaaaaa

SEQ ID NO: 206540 - DNA, 1000 bp, Homo Sapiens
tcagaaattctgttgagaacccagctatttgtgtgagtatattttagctatcccaaaaactttttctgaccttcctctttctgggataggatatgtgtgcttagagtatcattcagaagggtacctaatagttaatctgttaattagttacatcaggtttcaaatactaggtcagtgatatgagagcgagagagagagatttgaattgtcaaatgtattgtcagatgcattcacaagagcaggactgctttatctgttttgttcactactgtacccctagcatctaaatgaatacctagcccatagaataaacccactggttatttgttgtaagaataaattaatagaatcttaaagttgaaacagagtgattcctaatatattgtaaccacatggttggattcagtagttccattttaggatgtcccttttctcaggagtcatagggcaaattcttattgcccactgtgtctttttaaagtttaaatgttttttaaaattaaacatgtttcttagtaaatattgaaggggtataaaagaacatttatagcagatatgtaaggagtaaataaaatacagcaaatatccatgtacctaccattcactttaagaaaaagttaaaattttcttttataaaaggtttaaaagttttaaaaagttaaaatctttaaaaatcttctccctgctctcctcagaggtaaaagttattctgattgttttttatcgtttgtcattcttttgtttttttcaagtagttttagcagacatatgtatcttcaagcaatacattgtccagttttgtgtttttgaaccttgtgtatatgaaatcaaagtatgtcatattttatgttgcagctttcaccgggttctgtttttgagattcaattatgctttgtcctgccaaaatctatgtttcaactgccatgtatgtggtattctattgtatgaatatgattaatatgttataattaaatgttcttgatgaaaaaaaaaaaaaaaa

SEQ ID NO: 206541 - DNA, 1000 bp, Homo Sapiens
ttgttctggttagacatcattacattgggaaacacactttactaaacagaagccatgagtaccatacttacttgtttctctgggcaaatgaagaaaatcttactatttcctagaatctttatatatgcttaaccttttaaccttattgttcagcatgagtacaaattccctccaggtttataaaaatctactaatgagtgtggataggtagaagacaaaaacagagccatctgaaaccaaatttactttttaaatggcaaattcttaacttagtgcccctaagacgtgggtcacaagcctaacttagaaagggaatcatgtctttgcctctggggccattctgtccccaacccctcaagtgaaatcctagagtagaaattcagtgaataattggaaaagttgaggttttgtgtaactggggctcttggtggtgacagtctcatcagagtaaacacgaagaaatactgtgaaaacaatacactagtgatacagattttcactgctggtgtgtggaagggacactctagaatatgtcatttatcaggaagacttgcccagttaaaaaaaatatatgcacatatgtatatatacacacatatactttttattttttgccaaatacacaaacttcaaggagactaaatatgttttgaaaatatagtttgtctccttatctattggtatgtatatgtatgtttgtatgtgtttaatgtcttaataaattagttcttgctatagtcgatatgggtaatatattttgtttatgactgtgaaaatagtgaaaactggtttttataaatttttttttaccttttaaatatataacaatataatgttaagatcttaattttaaatgagaatacgggctggaagcctggaatcccagcactttgggaggctgagtttggagaatcgcagaggtcaggagtttgagaccagcctgggcaacataggaagactgtgagaacagattgtgagaataggaaaaaaaaaaaaaaaa

SEQ ID NO: 206542 - DNA, 1000 bp, Homo Sapiens
atttatttttttagatggagttttgcccttgttgcccaggctggagtgcaatggcatgatctcagctcactgcaacctctgcctcccgggttcaagcgattctcctgcctcagcctgctgggtagctgggattacaggcatctgccaccacgcccggctaattttgtgtgtgtgtatatgtctatgtgtgtgtgtgtatgtatatatcttttttttttttttagtagagatggtgtttcaccatattggccaggctggtctcaaactcctgaactcatgtgattcgcctgccttggcccctcaaagtgctgggattacaggcatgagccaccacacccggcctattcttggtattctttattcttggttttctagcctttagaaaaaaaaaatctagtcttggtaaagaaaatgttcattttaatcaagctccagtacagcttgtgtcaagacctagtaagaccacctttaatgtgttcctggatatgacattaaaaactaacttgaaaattgttaggatatttccttgttccctacttttattgtaaaatctactacattcttaagaattaaaaaatgccatttcagaagagatgatagttttatcttgccaaggaattatcttcttagtagcctatattggcttattccaaaaaaggcgttaacctccatcaaaacatcttctgcgcctctctctcagcatatgctttgatatttgaagtgtgtaatagattggagctatcagtcacttatttctaaaaaatgtattcttttttcttcatagctgtgaagagggataccaaggaaagttctttctgctgtctttctcttcggtaatgcttatcttatgaacactcaactgaaaaaacactccacctaaaagcaggaaagatggcaattctaaatagcagctattatccccgggtataaactatttttgttgttggcttggggctttgctgcaggtattaatagtttaaaaagaaaaaaaaaaaaaaaa

SEQ ID NO: 206543 - DNA, 1000 bp, Homo Sapiens
gttttaaaactctgtattttcatttataataataaaatatttgccaaaatacagctgttttgtaaaattgtctgcaccctcatccaagctttatatttaatagccttaatcacattttatgaagaatgttaaagaaaattttttttttactacatcgaaatgagataattaatttcttttttttttttggaaatggagtctccctctgtcacccaggctggagtgcagtagcaagatcttggctcactacaacctctgcctcctggttcaagcaattttcctgcctcagcctcccaagtagacgggattacaggtgcgtgccaccacacctggctaatttttgtatttttagtagcgacggggtttcaccttgttgttcaggctggtcttgagctcctgacctcatgatctgcccgcctcatactccccaagtgctgggattgcaggcatgagccaccgtgcctggcaaaataagataatttctcaaaataatttggtttcatataactggagtagtaattaatattttaacttcatcaactagatgtatctcctcagtagcatagtaactggtacatccagaaatctgaaatccgagttacttgatacaaattctactttatctaaccattagttattaaggaggtaaaatcttgttctaatttgctattaaaatcttattggttaaatagaaataagaaaaagtataattaagtttcttcatcctcaatgtcaactttatattgtaattaaatgtgtagcaaccaagctgacaatagtgattaagaaattaaagtacagaaatattttatttggggactcaaaatgaacaaaagatagataagattaaaatttcacttaaaaagctgccatctcttcctctcttgccctcccaccaccaataactttaaggggaagagaagctggttttttccctaaacatgtctttaaaataatgatacactgtatttattaattcttgatgcaaaaaaaaaaaaaa

SEQ ID NO: 206544 - DNA, 1000 bp, Homo Sapiens
tgaacctttgttttcctaggagttgagggagaactgtaggaacaccttgggaagcctttactggttgtcctcttaagaagagctggataatgtactgagaatacctgtcctttcttggtcctggagggcagacagcagctacagcaggactggtggaaccagcttcctggcaggaattaccctcccccaaagctagggacccaggaagatgccctgtccagcatagactttaaagagagtcaaactctacggaagaggattgtaacggaccatttctgaataaagtgatgatcagccacaatgacattagtaaaatttgaagtgccgcttatctttgtgcgtgctgttataatttgatgtggttggtatatgaactctaggactaaagtacgttgtgtgcgtatgcactaacttcataaaacaactctattataaagtgttttgtcataaggtatcgtgaaaattgcaaagtgctatccaagtgtaaaggattattattattgcagaattttttttttcttttgtaactgaacaggccttaaggtactcagttgtttctcataattcctttaattaccaggtgtccttgaatgcttatcatggaatgtgagatactataattaacatattttggttttggaatatccactccacctgttatactagtgttcttgtgggaattttatcagttatatttggggaaagcacatccagttttccgtttggacattgttaataaatctgaggtgggtttttcccatactcctcatgctaactttgtggtatacttttggttttaaaaaatgtatcttagtgttttttttgttaaaatagctttcttttattagggaacttttgagaagttaaaaattctgcttctgaattgtatttgaatagtatgggcttacaacaaaaaccagataattcttgcttctattctttttgaatatttttcccctctaataaagtacttgattcgaatacaaaaaaaaaaaaaaaa

SEQ ID NO: 206545 - DNA, 1000 bp, Homo Sapiens
taatttttctatttttagtagacatggggtttcgccacccccggcagcatgggtagacatggccctcccgcctgatctcttaaaaaaactttaaataattcgtggggggggttaccgcccacctgttttcccagctactccggaggctgcggtggaaggatcacctgagcccaggaggtcaagactgcagtgagctatgatcctgccactgcactccagcctgggcgacagcgtgagatcctgtctccaaaataaataaaattatgtacatatgtatgtatatttaattacatatattttgtataatttgtatatagtttataatatatacatgtatgtgtacacatacataaatatatgcgtaaatatatatatgcatatatatatgtaataaaatattaagaacccgcccagccgaagccacgggcgctttgggccctcggttggcctcagccacttcagtcgcggccccggggatgttgggggaaccctgtcaggcagcaagcgcgtcctccagccccgggcggccggcggctgtgcacccgccctccctccctcccacggcgctcgcctgcatgcgttttggcaaatatctaaacccgcaaaaccatcactagctctggtttcccaagatccttgaagcccctccgttcagcattccacgcccctctctgccctgctttcaaaccaccgccaatctgctttctgttatatatacagattagtttggattttctaacagttgtatataaatgcagtgacacatttgagtgtactcttttgtgatctggtttattttactcagcataattattttgagattatccattttgttgcatatgtaagtagctcattccttctattgctgagtggtgttccatctcatggatgcaccaccattgtttatcacgcatctgtccatggacatgtaaactgttttctatttggggctgttaaaaataaacttctgtgaacattcgtgtacaaaaaaaaaaaaaaa

SEQ ID NO: 206546 - DNA, 1000 bp, Homo Sapiens
gtcggtgtgatgagagactgagatgtgaattgctcagtagagagttggcggtggcgtatcccagagtgtacttagaaacatgaaaacttctttgaaagggagctgatcacttttggaaaagatttacagttcttaggaatgcaaatatttgtttcttttccttttcatctaaaacatttaccagataaagttgagtccagagacaactaactaataagagaataattttaatatgtttttccattttggtgtcaacattgcatggattttttttcttgttccaagactggctttttccagtggaaacttagcagttaaaattaatttgttccaaatgaaatattgcatctgaaattaggctggaattgcagtagacgttcctggttcttgcaaaccagaggacattcttgaagctgtgtggtcccaggctctcccctctctggtttcctgtgttccctccctgcagcctcagactcgccctccagggctccactgtgcttttccaaactctcatcctttcctcccaggcgtcctgtgcagcacgccactgcctctcacttctcacatccacagctcctgcttggtcagtgttcctagttgagtgtcagaaattgaacaacccaattagctggtatttcatttgtaccaacctatgaatggaggagtagccttaattcccttgggggcttccacttctaagagaactgttttccgtccaggtaggcagacctgtcatggctgaagcttcatcacctggcctggtcatagcccccaggccctgtaggcaggacaggggcttggcagattggcatccttcccacaaaagcatgaaagtaggatgtctgtatgtagcgacaacaaatacaagaataaggagagtttaacaacattctcaaagttggtggaaaagaaaaagaatcaatgaaaacatcaccctaaaccagctagtgctttctgtttacagggatcagaccccttcccacttaaaaaaaaaaaaaaa

SEQ ID NO: 206547 - DNA, 1000 bp, Homo Sapiens
gccttaatttgggttcctgcagcctcagggcattctagggctctcttagatcctgctggactgagtcccctctagaaaagaagcaggaacaggctaaccaacagcagactgttagaagttggtggagggcactgacaggagtaccagccagctgttcagctaggatcctgggtccccagagctgacagcctcataggaacagacttacagtaactcagtgtgagctggatgcatactaggtgccagtgcattcctttagtgggtgctgccctcccttcctgagttgggggcctgagtgagcacctctgtacagggcacccctctacagagggaggtagctggtatgtttgtcagtggagacttgcttctccacctgccacgaggcgggcatccatccggcagtagactcctagctcagggtgctcctgtgatggctgccttgcaacagagagaggatagcccaggaatggcagctccctcctttctcaccagtttccttcttccgtcctccctaccccaggtgctcagcagggagaccccctttcccgctatatcttcaggaaggctggggagatgctgggcagacacatcgtagcagtgttgcccgagattgacccggtcttgttccagggcaagattggactccccatcctgtgcgtgggctctgtgtggaagagctgggagctgctgaaggaaggttttcttttggcgctgacccagggcagagagatccaggctcagaacttcttctccagcttcaccctgatgaagctgaggcactcctccgctctgggtggggccagcctaggggccaggcacatcgggcacctcctccccatggactatagcgccaatgccattgccttctattcctacaccttttcctagggggctggtcccggctccaccccctccaagctcagtggacactgggtctgaaaggaaggagtcttttgcttcctttctcctttttacaaaaacaaacatagaagaaaataaa

SEQ ID NO: 206548 - DNA, 1000 bp, Homo Sapiens
gaatctttcatctggtgccgaaacccgggaggggctccggtcttcgtcccccgtggacctacccctccgccccagaaagcaggccacagcagccggacaaaggaagctcctcagcctccagttgcttctctgtgcatgcacatcagtcactgatctcacctactggcccagtcccaaggcgcaaggccacttgtgccagcagtgtgagtcagcaagatagcagaagcaggaagagagccggccagaagacacctactctgactgggagacacgtacccctgaagattgagaaagaggccatccagggagtgaagatggaatgagaagaacagagaaacaatgacagagtccttacaaacaccatgatacaagaaggcaatggggatatgttatcctaaaggaatcctaaaagaagtgatcaaaaaggtgaacagaaaaccaagtgggagtactgtcactgaggatgagtttccagagagaattaatgctgaagaagctattgcagacactgctgagtatgaagaactaattggagaaggaagccgttgtatagcagatgcagagcagcagcaaaaatggtaatgaaaatagaagataaattagaaaatttggaaaaacccaaacagatcagccatattgaagggaaaaagaaaaacaaaacaaagtgggagggcagaaatgtagaacggtatacactcttttaaccccaaggatgaatgtagccaagaacacagtggggacttaggagtctcagcacagagcattctctactccctactgctcaggcaaagaactccttcatcatgcagaaccaaaactggtgtagagtcttaaatgacctgggtatctctacgcagaagaaagcgctttccatgtaaaaggattaacttgaacctgggtgctcaagggacaccctaggctgcttatcccactgattctgatctgactgtgttaagtaataaatcatgtggttacatattcacattaaaaaaaaaaaaaa

SEQ ID NO: 206549 - DNA, 1000 bp, Homo Sapiens
caagaatacatccctgttcacgtggataccgtctctgtgattgccactctgaactcagacctttgtatctctggaggaaaagacaagaccgccgtggcctacaattggaaaactgggcgtatggtgaaaaggttcacagggcacgagcgggaaatcacgaagatagcctgtattcccaaagcaaaccagttcttcagcgcctctcgagacaagacagtcctgatgtgggatctgcagggctcctcgcaccctaggcagcagctgtctggccatgccatggtggtcactggcttggctgtgagcccagactcgtcccagctgtgcactggctctcgggacaatagcctgcttctgtgggatgtggggaccggacagtgtgtggagagagcgtctgtctccaggaacctggtcacacacctgtgctgggtcccgagtgagccatacatagtccagacctctgaggataagaccatcagattatgggacagtcgggggcttcagatggctcacatgtttcccacaaaacagcatatccagacccattgtgaagtcagcgtggatggacacacgtgtatttcctgcagcagtggctttgggggtgaaggctgtgaagccacgttgtgggacctaagacagactagagacagaatgtgtgagtataaggggcatttccagacagttgcatcctgtgtctttctaccgaagtccacggccttgatgcctatgattgctacctctgcacatgactccaaggtgaagatttggaaccaggatactggagcttgcctctccaccttgtctctggatggatcaggacccctgacctcactggctgttggtgacatctcctccttgttatgcgcaagtttctacagaggagttcacttactcagagtggaccacagccaaggactggaactgcaggaagtggcagccttctaaaatcaagagatattgattggataatatcaaaccatggtccctcaaaaaaaaaaaaaaa

SEQ ID NO: 206550 - DNA, 1000 bp, Homo Sapiens
cctgtgtacatttctccagataccctatggctaattttgttataactgcacagtggctgctgccattttgtattaaatatattgtgaaacaaacctatctggggagaagcaatctacttgccgctgcttcctgtctggatccagcttgtgtccttggagagtggctggcccaggtcctattcctgtcctccagcccgttctttcatgagggacaggaaggtaaaatcagcccttaggagagaggtctcagcctccctttcccagatctcccagtgagttttaaaggaagcagggagcccagagtgctaagttcttacagccagaaggaagcttatagatttctgaaaaccgcccctttgtttttaaaaagatcaacacaatttgactttctcaaggtcaaaacgaactagaatccagatctgctcatggcaaaaatgggggtgttctgagaattccagctttgggccgcactgtacagcagtctggatagagtgtgatctgagaagggaatgggtctgggttgttccaccccttccgagttccaaaaagagggaactggttttcttggttctcagcccagcagcacctatcctggctcttggtcctggcctgcagccaagtgctgttcctagcctgaggcttgagacaggtggggttggctcctcaccaaccccagttccgtcccatcctgagggcaagatcctgggctcataggcagtccctttcacttccttgtcttgctccctgctatgttggagatgaatgtgactaaaagggccatcttgctggcttaatgtgtggctggagagaccagcctggagacaatgtggcaaaatggggcgcttcatccagtctgtctaagccctgtcgacttggggaggtgatttctttcctggttctatatgtgaagcaaaataaatgttttaaaattaaaagcaaaaaaaacaaaatgaaaaaaaaaaaaaaaaaaaaaaaaaaaaaaataaaaaaaaaaaaaaaa

SEQ ID NO: 206551 - DNA, 1000 bp, Homo Sapiens
ttaggattctgccatagtattgattctgccatggcatttattatgcccagtgaccaaggcattagaatatttgtggtacctttacctttttaggccaataaatatcattcatttgctaaagaacatttcattaaacgaggtacagttggctctccatatccatgggtttggcatctggattcaaccaaccgtgaattgaaaatattcaggaagaaatttcacagagttccaaaaaaacctggaatttgtggcatgctgagtactacattgaatatacacagatgaagtgatgtgtaggcattctgttaggtattataagtaatctagggatgatttaaagtatacaggacaatgcgagtgggttatatgcaaatactacattattttatataagagacttgagcatgttgggttttgttatcttttgggggatcctagaactaatcccccatggatactgtgggatgactgtacttattttttagaaataatttctacactatagccccttttttactcccagtttctttcatttttttttttttttaggcttcctaaaatattggcagaagctccatcctttctctgtgctttgttccaatgtttttagcatgtttcagcttgttctacatccctgggatatataataagacctagcctaaatgtaagcttgatagttcagggactatcttaagtgttatgttaactttttttcttttaagggagggagaacaaattctaatactagttaatagtgtcttacccacagtgtgttatctaatgcctttcaaactaggggaaaaaaatcagtgaacattatggtagatgctaaaatctgccattttcttgtatatttctgacagtttcagttactttgcatttgtattatacaatgactaacatcagccttttaccattctttcctctggtatttttcagtaacaaatagtgaatgtatttagagataaaaataattttgtgaccaaaaaaaaaaaaaaaa

SEQ ID NO: 206552 - DNA, 1000 bp, Homo Sapiens
ccagcctgaccaacatggagaaaccccatctctactaaaaatagaaaattagccaggtgtggtggtagatacgtgtaatcccagctactcgtgaggctgaggcaggagaattgcttgaatccgggaggcggaggttgcagtgaactgagattgcaccactgcactccagcctgggcgacagagtgagactccgtctcagaaaaataaaaaacaactttggacatagaggagttgggggcagaggggggaggatgagagaattttccatgtaactccttttccttaagaaaaagaagcaaaaatccctcatgcagtgccatctgactttatggtgtttcacattatatagttactttttttaataaacgcataagattaactcttcctgcaacccaaggtggatacttggatgtttgatttttatttatttatttattttttgaggcagtctctctctgttgcccaggctggagtgatgcgtgatttctgctcactgcagtctctcccacccgggttcaagcgattctcctgcctcagcctcccaagtagctaggattacaggcgcgcaccaccacgctcagcctgatttctaggctgaaaaggctgggactcaggtactttccccagttgggactgaactttctcatcagagaatgggcctcagaagcaatgttcccaaacttgtggttgggtcatcgtggaaaagaaacctcaaataagaaaaataattacaataagaaatggattttcttttttcccacaacagttatacattataaagaacagactgtcgtagaaaactgtctttgcttccaaatcagcagaggaccattgtatgtattgtcaggtctttatataagagtgaaacctttatttatgcttcttgtgagtagagaataaattttaaaactaattagatgaaattaaaaaaaaaaaaaaaaaaaaaaaaaaaaaaaaaaaaaaaaaaaaaaaaaaacaaaaaagaaaaaaaaaaaaaaaa

SEQ ID NO: 206553 - DNA, 1000 bp, Homo Sapiens
agaagaaatgtatgcagctaaaaattgcactgtgtgttcttgtgaatttgctcacaattctaaaatgacataattggtggctgtgatgcttacagtcactgcctactggctctcttatgatgaatgttgccatcatatgatcatttatttactttttgtgcaagcaatggcattttggttgttgccaaaaacaacacaagtggttgggagtgtatgttgttggaaggtgtacacttctgtttctttcagctgtattatttatacacccaggttttctgttaaggatgtaatcattcattcaagaaagaacaattggcaagaaataattaaattaccttaaaaagaattaagaggcactccagccagataacacctcccaacaacatgaaatttagttagtgcttagtgaaattccttaaatatatatgtatatgttttcttcaacattatttaatataactactgcttttatattttttaatggtgttgcaaccacttgtacacctgctacgccttactgacaaaactgggcagctgaaaataaaagagaataaattctattccactgtaagaagttgatttcttttcagctttctttgtatatcagtaaagaacacgaattgtttgaaaataattttaagtctgataagtatggatagcatgttacctaagcttttaatttgtacattttgatgtctgatcatttgcatggaagagacaatagtgccacgtctgaattgttctcttgtgcttggttaatatgtacttctctagattgttcaaaaagtttcaaatgacattccttactctttggttttcagaggcattcaagcaaaatatcacagtggtcttttgttttctgaccaatctaaaaatacctgtgattaaatttaatttgttagtgtaaataaatttcttgccaatgagtattattgttgttagacaacgaatgcaataaaaagaaatactgaggtctgttgaagcaaaaaaaaaaaaaaaa

SEQ ID NO: 206554 - DNA, 1000 bp, Homo Sapiens
gctacttatttaggactcgattaacttggcaacttttacaaaaaacattcacatcacaacatgcaacttaaaaaacagttaatgtaactatgccactgtcagcaaggccagcttgcataccagagttaagaatgagagtgtctgtctgcctagggcttaacattcaaagatatttataatctgtgttttaaggttaaattttatatgacccagttttccttctttgttcactatacactaaaattaaacgcctctacgctgtgcaagaaatcactatgtgtgattttactatttcaaccaatccatagaccctgaggatttggcagcagaattcaggagaaatgctacctaaagtgattgagctgttgctaattctaccttctgttccactcaagtacctccagggactaacaagggaaggcaagggcaactgtgactgactaggtaaccagctattctgttgtgacagaagaaaccaggtaatacttgattttcaaaagataattttaactgctgccctatactacttttagtatagtttggcttgaccttaatagccatgtccctcatcttagatagaataaccaaattggtttaaaattacttgatctatgtcactgaaacctgaaatatgccatcactaagagaacccccaaataaaaaataaagaactaaaaaacacaaccaaaccaaatcaaaccaaaaacctcattctctgtatcatactttaaaactaaaataaaaatccctgtgtcacaggtgcttgctcagggctgccaacttctatttttcacctgagagacatctaaaagcgcaaactatgcttgtaaaaaccaaaaagtaaatctctacataggacaatacttataagcagacctattgataccacttatatataattagtctgttttctttagaaagtatcagagcagaaacgtctttggttaattctttcctctacatgcaaaataaaatattcttaaacgaaaaaaaaaaaaaa

SEQ ID NO: 206555 - DNA, 1000 bp, Homo Sapiens
tgcaagtattttctctcagtcagtggcctgtcttctcattttgttttaagctattcttttttaacaccccaagattttcatcgttacttttaaggccactgtgcacacataaaatactaagaagctaaacttaatatctgcaggtagaagttttaaattcaagattttaaccaaataacagagttaatgctaaaatctcacttttgaagtttatgttgaatattagcattctaatatttaatatttttctatttttgaaataggaaatggaaaagatgcagtaggtttttcaaaagggtatcataggtgagcacttcttatagaagaagaaaactaagaggtagtgctatttacctcttcagcactaagtttatctttatttttatttatttctataaagagatgggagtctcactgtgttgcttaggctggtcttgaactcctggcctccagtgatgctcctgccttggcctccgagagtgctgggattataggcatgaggcaccacacccagccagtaatctttagcttctagaaacaatcagatttccttaagattttgcaattaggtttagaggagctcacttgctttttcaaatatgggttggatatgtccaaaaaaaagagttttgcctctacaatgaaaaatgatttttaccagattatggaaaggaagattcataaaaatgtgcctttaaaaagcttttttaaagtgcaagttcaccaatttgacttttgaaaatacgttcattttaggaattgattttttaaggaaagttgtaaacacagcaaagcacagaattacactggttcagacttgcatcttagcaccaaaatccactatacaaatgcagacagcataaagtaacctagtttcgctttaaatttgttgcttattttattctcccttataaatgtcattggtcttttgttagaacataatttactactttattttgaaataaagtctaagatttagcatgcaaaaaaaaaaaaaaaa

SEQ ID NO: 206556 - DNA, 1000 bp, Homo Sapiens
tggggagctaacacatatgggcagctgggaactggcaataaaaataacctgctaagcccagcacacatcatggtggagaaagaaagggtggtagagattgcagcctgtcactctgcccacacgtctgcagccaagacgcagggtgggcacgtgtacatgtggggccagtgccggggtcagtccgtgatcctcccgcacctcacccacttctcctgcaccgacgacgtgtttgcctgctttgccactccggccgtctcgtggcgcctcctgtctgtggtgagtattgtgattggaaaataattggttcactgaatgggactatttggccagaattgcacatgtatggcatacccagctgaagcacttctgtacatatcttcagatttgtatatactacttaacctggacttgttataaaaggcttcccccagttcttatatcttaaaatggcacaggcattcttttcagaacaaatgtcctaacaatttaaatgttaagtttggaaaaaatatggtcattgactatatcctcctagatcaggggtccccacaccccaggccatatgcctgtactggtccgtggcctgttattaactgggtcgcacggcaggaggtgagtggcagtgagcgaagcttcatctgtatttacagctgctccccatcactcacattaccgcctgagctccacctcccatcagatcagcagcggtattagattctcaaagaagcgtaagccctattgtgaactgcacatgcgagggatacaggttgcgagctccttatgagaatctaatgcctagatgatctgtcactgtctcccatcacccccagatggggccgtccagttgtaggaaaacaagctcaggactcccactgattctacattatggtgagttgtgtaattatttcattacatattacagtgtaacaataataaaaattaagtgcacaataaaaaaaaaaaaaaaaaaaaaaaaaaaaaaagaaaaaaaaaaaaaaaa

SEQ ID NO: 206557 - DNA, 1000 bp, Homo Sapiens
agtatcttaaatagtgattttttttttttaatttacaaaagaggtttattggacttacagttctacgtggctgggaaggcctcacaatcatggcggaaggtgaaagccacatctcacatggcagcagataagagaaaaaaaggtagtgatcttttagtaaagaaacctgagactggtagtgggcttggagccagaggatcgcttaagtccgggagttcgagaccagccagggtaacaaattgagacccgccccaactttaaaattaaaaaacgaaagaaaaaatagctgggtgtggtggctcacacctgtaatcctagcactttgggaggccaaggcgggtggattgcctgagctaaggagtttgagaccaacctgggcaacatggttgaaaccctgtctctactaaaacaaaaaaaatcagccaggtgtggtagcgtgcacctgtagtcccagttacttgggaggctgaggcacaagaattgcttgaacctgggaggtagaggttgcagagatcatgccactgcactcccagcctgggtgacagagcaagactgtctcaaaaacaacaacaacaacaacaacaaaacaaaacaaaaaaaacctctcaaaaaaatgaaaaaaaatttaaatttaaattaaaaaaaaaaatgctgggtctgatggctcacacctgtcatctcagcactttgggaagctgaggcaggcagatcacaaggtcaggagatagagaccatcctggccaacatggtgaaacccagtctctactaaagaaggtacgcgcctgtagtcccagcactcaggaggctgagccaggagaattgcttgaacccgggaggtggaggttgcagtgagccaagattgtaccacttcactccagcctggcgacagagtggaactccgtctcaaaaaataaaataaaataaaataaaataaaataaaataaaataaaataaagcaaaaatataaaatgttaaaaaaaaaaacaaaaaaaaaaaaaaa

SEQ ID NO: 206558 - DNA, 606 bp, Homo Sapiens; identical to SEQ ID NO: 27167

SEQ ID NO: 206559 - DNA, 1000 bp, Homo Sapiens
ctttctgagtattgaagacaaaaagagaaaagtgagaaaattgaaattactgctaatagtggagtaaaaaaagtaccaaagatttttaaaaaattagtaaatgtaaagatactatttctttaataatttgcagtcaggcattggagtgtttccactaatggttgcgagccaactatttataggacaatggctatagaatattatgtagtcttataaattgggtttcctaggaagatagctggcagagcttttgaaactaataaagggaatatgatactgtgcattataaattatgtcagcccgtcatcttaggggcagttacagtggagctttcccagtgatataacagcatgctagtttatcttttagttacctaccttaagcgactttctttcttttccaaaggccatgagaatggccgaaacgaaaagattaattaccacaagtaccatcaagatgacactggtgaggatcagaaaggtgcccaggactgggtctaaagcgaaaacctgggaaaacaataagaacacttgcagtgactgacaatttagtttatactttacaaacataagctatatgctagtgtttgggatcttatcagaagaaaagcttatccgaaggaaacttagggagagagtcaaaagataataagaaggaaaatacttttaaatggacagaagagcaggaatgactcattttaaggaggttaagataattgtgactgcagggctttcacaagaaaacaggtgagttgcagtggaattggaaatgattcaaatgtcacatgagttttggcaaaaaatacatctaatcatggaagctaaaagtgggaggggggtaagcaaacactgaaagattaaatgcataccagaaatgagaatgcacactgtctctgccatatcaagaaactacaaccctaaacacaggagcattccaataaaagttaacaggttggccacaaaaaaaaaaaaaaaaaaaaaaaaaaaaaaaaaaaaaaaaa

SEQ ID NO: 206560 - DNA, 1000 bp, Homo Sapiens
tgggttggaagaaagtgtcagtaagatcatttctcctatttgaaaatcatacaaagcttgtcagagtgactcaggccaggagtgtagctgggcgtgtagctaaatgatatctccccacatctatataataagctgttacctgctttaaaaggaaaagctctcagcatgactctaatgttgcatttctggaatacagcttgaaaagctcttctcagggttgaacagagcatgaaggtaatggttattatctactcacattaaaaaaaaaaaaagaaagaaaccaccacagaaaactacttactgtctttaggctctactttcaaaagagccctttatgaacgcttttacactgttgatgggagtgtaaattagttcaaccattgtggaagacagtgtggtgattcctcaaggatctagaatcagaaataccatttgacccagcaatcccattactgggtatatacccaaaggattataaatcattctattataaagacacatgcacacgtatgtttattgcagcactgttcacaatagcaaagacttggaaccaacccaaatgcccatcaatgatagactggataaagaaattgtggcacatacacaccatggaatactatgcagccataataaaagatgagttcatgtcctttgcaaggacatggacaaagctggaaaccatcattctcagcaaacaagaacagaaaatcaaacactgcatgttctcagcctaagtgggagctgaacaatgagaaaacatagacacagagaggggaacatcacacactgggcctgttggggggtagggggctaggggagggatagcattaggagaaatacctaatgtaaatgacaggttaatgggtgcagcaaaccaccatggcatgtgtatacctatgtaacaaacctgcatgttctgcacatgtatcccagaacttaaagtataaataaataaatgaataaataaataaattttaaaaagtgaaaaaaaaaaaaaaaa

SEQ ID NO: 206561 - DNA, 1000 bp, Homo Sapiens
tgcacatacatgtttgttttctaacagttattttttaagcttttgagataattttagacttacagaagagttgtaaaagtagtagagttcttgtatactctgcacccaccttgcccttatgttaacatcttacgtaacaatagaacatttgtcaaaattaagaaattaaccttgatataatactaactaaagtagaaagtttaaaaagtagagattttagtcttttcactaatgtccttttactgttccaagacccagccttgcatttagctatcatgcctacgtcctgtcttccagtctgtgacagtgtatcataacaggggatacctgatgttgtaatgtatttctggtgttgttaaccttgatcactatgctaaggtggtgtctgctaggattcgctactgtaaacttactgtgttttccttgtaattattgaatatttgctggagatacccggagactatgcaaatgtcccgtttctgcttaaacttttgctcattttactatccattggcagatcttgcttgtggcagttactactgtggtgttctaatggtgattttctatttctctcaatccttctacatttattattggaattcttctgtaaggaagagttgtcagttctggatttatatttttaactataataagatattcaggataagtatagatttagaacttaaagatgttaaatcatgttaaaattattccaaataccaatatcaaagaaaactaagttggtaatctatctcagaaaatatatgaacttaagaaggaaaatagtatttatgatttgtagaattggttcaacttttgacttaatactgactttggactgaattcaaagttttcttgaaatttcacatctggactttttaaagtgtctacatttatattactttggggatcattttgtcaaagtcttgaataaagttacccagtcctggcatgataaaaaaaaaaaaaaaaaaaaaaaaaaacaaaaaaaaaaaaaaaa

SEQ ID NO: 206562 - DNA, 1000 bp, Homo Sapiens
cactgttggaggaattgaattctattgcctccctcatttcaattatgttcattgttacaattgtgctgctctgttctcattgtgatgcttagttctcgtgtagaactgagtgctacattgtgattagaaactggagttgtgcttgagtcagtcctggaaaacaggacccatttttaagaagaacggaacataccactttggcattctggctgaccctaatttctgcagagttccttggtgttaaaatcatttgaggtcatagttgctgcttatggtttatatacacaccatctgctgctctaagttcacatcctctcaaaagcatgcaagtgcttgaaatttaaatatttcccagatctaaaacaacttgtgactacctaagaaatgcttgaaccaaataagaaacagcactgtggaataaaatataccattgtgaacatatctgatgctgcaatgaaatgtaaagttccttactttgctgatttttcatcataactccttgactcataaaagcggtgtctaaactgggaacagctgctaatagggtaaaagtattatacatcaaataaaagttcattacaatatttgtactcataagtcaaaatctgacctggttcgctttgtgcctctgtcagcctacttacagtgataaatgtacacacaagtccagtgttgccaaggagctttgtttatagaaagaagcttggtcccctcagttctatgctgttgtgtggcctggttggtacatgccgtcatgatgaaggatgactttggtttgagataatttgtcactccacattccatggagaaaagtgtttcattttgatgttggaaaaacatgaccagagaagcatgtgactcagataatgttccccggaagttgcagagcaatctgtggtgtctgtcatagcccaactagtcctggagcacatggacaattctgtaccccaataatcagaacaataaaatggtagttgtgattcaaaaaaaaaaaaaaaaa

SEQ ID NO: 206563 - DNA, 1000 bp, Homo Sapiens
tgagtagttgggagtagagatgcctcccacatcgcctggctaatttttgtatttttgtggagaggggatatctcgccacgttgccgaggcttgaagccagatcaagcaattgggttccttggatttccgaaatagaccccaatattctgcctttaccccggaggatgcagatgtaccttctctcaggccgatgacctcaggcctccacggtccctggagctctaggaaaggtgggcgcgatctcgcgcccacacccagtgctctgggtcataagcctggatctggaaaaacaaatgcgctttgagaagacggggactccccaggatacccctctctcccctcgtccagcctccagcccacccgattcctccccacatcctccacctccccaggccccacccacctcctccaactcctccggggaaacccaagccctgcagcgcatggaacagaagaactggaaccgacgcttctggaacaaggctatctgagagcagttcttcctggccctcgggttcatgggacggcataactggaaccaatgcttagggcgcaagggtatgtgagagtgggtcttcccgtacaggaagtagaagatcttttgtttgggggcctcgtcgtcctcctccatgtcattggccagatagctgaggacagaaatcaggttgctgctcaggggcaccaccaggagagacctccggctgaggtcagcttcccagagaggaaggtaagggaccgtccctagctcaggactggcacccaccctgcagagagccacgccttcctcaggagggctctgctggacagagacctgatcaagggcatctcccactccttcaggatggagacaaaaacccaactggtgaccaagagtggtggcttaggcctggaatcccagcacactgggaggccgaagcaggaggatcacttgaggccaggagtttgagacaggcctgggcaacatagcaagacccttgtctctattaaaaaaaaaaaaaaa

SEQ ID NO: 206564 - DNA, 910 bp, Homo Sapiens; identical to SEQ ID NO: 27229

SEQ ID NO: 206565 - DNA, 1000 bp, Homo Sapiens
ttgttctctctttgaaagaaaccctccaccgaaacaatggtccccatctccccagaagcctttttttttttcatttttctctaattagtctatgcatttctctctctcaaaccatcttctgcctcttcccttgagaaaacgggcatctcacgtacccccatctgagacctcttggaaaaaaaaaatcccgtgtattctggagatgtgagaattcacccaaaattcttaaaacattggagaatagcttgttataaaataaaagtgggggtaaaaagaaggtggttttccccacatccctttgcattgaataagagacctagttctttgcgtttgtgcaataactctttgctgcttgccttgagagcgggtagcaccacgctcctgtccagactactaacagcacaagacgcactcacagggtggcggaatcttccggaaaactctctataagctcagctccccccaccccacccccactctagcgttttgtcacgtcttacattttagcagtattttatattttctgtaacgcaccaagtcttagatctttctagagcttgtttgttcatcctcacaatcacagatttttttctccaatcctcacagagacccaattgaccaaaaaagaaaaaaggaaaaaaaaaaagtcgtcttttttttttttttttgtacaaatcgctttgagatgcctctggtgtgttgctgtgtgacatctctctggtaacattttatttcttgctatttgtttttctacattaagagtcaaagttgacctggctggcgtgggggtgggggaggcacccgtcggccccttggtgttgtccctctgtctttggttagccatacgatgtttgttctcagcactgtacaacggtccctatataatacggagaagcaatatcactgtatgagactcacaccatgtattattattcactagcaccctaggtgtgataattgaagtaaatatcttttatacaaacacaaaaaaaaaaaaaaa

SEQ ID NO: 206566 - DNA, 1000 bp, Homo Sapiens
agatctcctgactccattcatatgaccctataaactgtctcaaaacaaaaagataaattaatataaatatttattgaatatgtctttgtagagaaagcataataagcataaagggcaatgcgttaacctttatcacaagcaaccctattggaatgtgtcaacttatcagaatgaatcaggccagaatatcaagtataaatgaagcctgtagttaactgaaagttgcatatcaatcaggcactccagtttctctcctcaaactctgaatattcaatgaataagataaagaaatggctaatttgattttacctttcatttttttgacctaattctaaggtgactactcactcctcaagatttaactaatgttgctttatttttatccctctggggagacagaagagatgattgggaaacacatgtttgaagtttgtaagttctgctgctttcaaccccacagatgtctcttactgcccacttgggccctggtgattaagcaactagatttggagccagtcaggcttttgtttagacattttaactttttcttgctttccttgcaaactcctcagccttcagactggttggaaagtaaatgtacaatcttacataaattttcaggtaatagcatttcagctttttccccaagattttttgcttgggaggagacagattagactggattcggagtcttgattttgcaaaggtaacaaaagacatgtttttttataagacttttcatcataagtttattttattcaacagaagcaaaatctaatataatggaaaaaataaagatctgtgataaatctgatctgtgtggataaacacaattagaaagatttaaagattaagtattgaaacaaactaccaaaatattttaatactgatttgtaaaaatttcagtacatttttcttctttgcttaattctactgggtcctgtttttcatcaaaacattctatcatgttagtatacaatagccaaaaaaaaaaaaaaaa

SEQ ID NO: 206567 - DNA, 1000 bp, Homo Sapiens
gtattcttctgtgaccacctgtattattcctgtcacagaatcgtgacacagcagcagccctttcccagtgtgtggggcacagttacattcctaggtgtggaaggaagacctttgctgcattaaattatccccagcatctgtttgctgcttttaacacgagtgacttaaagggacatgggttagaagaaggagggaggagatttgtgccagggatgaaagaaaatggctaaaagatgaatgaaagttgcatatatctctttttcttctgtaaataactcatgataaaagggaataaaatttaggttttccccacttggaagagacatggccaaacggagtgtgtgcttttcctaaaccaccgtgaaggtagcatgaaaaccaggcttgctcttcagagactaggaggctcctgttttgggcactccatctgccctgctgccgtgaaagctctcggacccaaatggcttcctgtgatccactgtggtctgcttattatattcccttcagctatgtttataactctgtcaacagccacagcgtgagtaccccaatcggataacaataacctaaaattttaaatgctcaaaagtcagaaagattttaagtgacaatatgatgctcaaaggaaatgtccattggagcattttagattcagatttttggattaggaaggtggatgtataatagaataactggtaagtataatgcaagttttcaagatccaaaaaagttcaaaattcgaaacacttctgactccaggcattttggataagggatacccaacctatattatgaagtggtagcaagaaaattacattgaaatggaacattttttcagtttatgtatccttttgcgaggtttttatttcaaaatatcacagtccaagccaaaaaatatacgtgggtgtttcagtttatgaaaactaagttatgtttacttttctatatgtatatatttttttacctcaataaaatgatagccccaaaaaaaaaaaaaaaa

SEQ ID NO: 206568 - DNA, 1000 bp, Homo Sapiens
agtcttgatataaagccatgtaagtcccttgaattagtctcccacttttccttcttaaaaacattctgggatcttcttggcctttaactcctctgacttaattttaggatcaatttctcagattacattaacaacctgttcaaattgcatagattttataggtaaatctgtataaaatttacatgttataatattggggctttttattcataaacattttcaccaacgttttagtttcatatcttccaataagattttataatttttcatacctatcttagatgattttggttgcatttattttttatagttttagttttattgtcaatgcagctttttccaattcaattttataacagttttgctggttaaaaaaaaaaaaaaagactatttattttgtgtattggtttttaaattgtacaatgtttctgaattttcttacttccaaacagtcgtctataaattatcttgattgtctaaaatgtgaaattcatatactatgagaatgataattttattttttcattttcaattcttaaacttctgatgacacttggctggaacctccttcactaggttgaaaataagtggcaacagtggtatccttgttctgttattgattccaagagcctgcctctaatgtttccccatgtattatgatgtttgtgtaaattttgatagaccttatttattaagtaaaaagattctcttctagttcaagtttggtctacaagtttttattgtgaaagtgaactgaattttagaaataccttttaatgtgtataaaaaattatatctttatttctgttaatgtgataaattacattaagagattttattaatatttggttatctttgtatttcaacaattatttggttatctttgtatttcaacaattatagtcatattattaaatattaatttggttagctaaaaaaaaaaaaaaaaaaaaaaaaaaaaaaaaaaaaaaaaaaaaaaaaaaagaaaaaaaaaaaaaaa

SEQ ID NO: 206569 - DNA, 1000 bp, Homo Sapiens
aaaaaaaaaaaagaacatattactttctactagtatcaatatagattagtaaagctatactgaaatgcagatcttcaaagatcagtaggctcacttggaaaataaatgacttgttccatacaaagaattaaaaatttgtttttcagtataattataaattaagtatcatggaactttagagactctcttgaatagtcagacacctcaaatattaagtccttaaatttcagttgttgggttttttgcttttatattttcttttctccacaggtataaatggtttaaagaattgtgggatgtattattgttaccagaattagatgccgtcattttaacttgtcagagtatgtgtttccccctgatatccttgattctctttctgtttggaacgtgtactgcctactggagtggcctactgtcttctgcatctgtgagacttctttcttcattgtggctagctttgaaaagaccctctgaacttcctaaagatatcaagatgatatcaccagacttgccctttttgacaattgtcttgatcatagttagttggacaacttgtggagcactagccatacttctttcttatctttactatgtgtttaaggttgttcatctgcaagccagcttaacaacttttaagaatagccagcctgtgaatcccaaacactctagaagaagtgaaaagaaatccaatcatcataaagactcctcaatacaccatcttcgtttatctgccaacgatgctgaagatagccttcgcatgcacagtactgtgattaacttactaacatggattgtattactcagcatgccttctctaatttattggctaaagaatcttaggtattattttaaacttaatcctgatccatgtaaacctttggcatttatccttattccgactatggcaattcttggaaatacttacactgtttcaataaaatcaagtaaattgttgaagactacttcacaatttccacttaaaaaaaaaaaaaaaaaa

SEQ ID NO: 206570 - DNA, 1000 bp, Homo Sapiens
agtatggcattttcatattcactctatgtaaagattgaagcccaaagatgagttaaattcagtgctgtattgaaaccagtcagtgcaaaaaaaaaaaaaaagttttacctttgtaaatttttcattgttaacatcagttggtagttgttaaaacatgcaccaaattctttataatgttctgtgtggttctcaatgtgatattcttgacattgctgtccttactgcttggttcttggttttaaattaaaaagtagatgtagctcatcatttttacttccaaaacggtggagctaaaaacggctaattgatcttgagataagaataccctttactaaggcaaagatttaattgaaatccaaaatgatttatagaaacgaaaggcattttccatttgttgtcttctgccgaaattctgaattgcatacacgcatgaaggataatgaatggtttcaacggtgctatattaggttctctgattttcatgacctatgtatgtttggaaatacaatattgtataaaatgtggatcgttttgttaccgatttaatattgccattttaatttggtgtaacaattggttacacttgtttttcaaagctatcctttgaggagaaagtcaaaatgtgttgttagcctacctccactcaggcctcttgctgtgtaatcattattccaggttatgatgtgcatagcttttaaaactgcgtgtactattattctgctctttcccatactcttgtcatgtattcagaacctaaacttatagcaaaagagccaagcagtagcagtttttgtaaatgtaaaaataattagatccagactttgtttccttcaattttaaaaataaaaaatacctcagtgctatgtttttcagttatcacctgcatttctcaaaaaataacacctgcttcatgtggcacataacttgtaagaatcacattttggattttaaagaaagactattaaatattttaagatcactaccaaaaaaaaaaaaaaaa

SEQ ID NO: 206571 - DNA, 1000 bp, Homo Sapiens
gagttggttattcattccaaggattaagtcccaatctacctctcagcacaatgcagaagctcaccactgtattgctgccattaactcatgccagaaccctttgccaataactggaattacaaatttttgttaaagaaaatttatcaagatctttctttactgccttctctatatgtacatctcaaaaacatgtacatctcaaaaactggagtagaaagttagattgctcaactacaactcctctagaactctatagctctgacatacagattcacactctcctctatttgctaagtatgtaaagaatgttttcttttaaaatgttctcttttgagaacaactgcttatttgttataaaagcatttggttaaaatgatgtcatcataaagaacagtggctttgtttcaatacatatttttgagatgattatctagaagccagattaataaaatcagcttgtgaccttgctaagcatataaactggaaattcagatacattcaaaattatgggttcatttaaaagtgttctaccttttgggtatgagactaatatcactaattcctcaatagttatcatggctctatcttaattaattagaaaatatgtgtgtttaattctttgagaattaaaatagagaatattaacagagggttaaaaactgcttcaactccaataagataaaggaagctcaaaatctatgagctgagtgttcaattagctttgcctactgagttcaattttatgtcaatacaacagtggatcagacagtacgactttgaactggtgaatgtaaacaattgtttttcacctaagctgctttggaagaactgatgcttgctgctaactaaagttttggatgtatcgatttagagaaccaattaatacctgcaaaataaagcatactgtggtacttctgtttgatctagtatgtgtgattttagattgatggattaaaaattaataaagatcatacattccataccaaaaaaaaaaaaaaaa

SEQ ID NO: 206572 - DNA, 1000 bp, Homo Sapiens
cacacacgcatgtgcgcgcacacaccacacatgcacacacgtacacaatgcacacatgcacacacgcacacacatgcacacacgcacacgcatgcacacacacgtgcgcgcgcacacacacacactgagcaccgttgagctttggtagaaaatggcaaaattacgatgtttttctcatttctggtgattggcttccgagtgttatttagagagcggagtggagagggctctttgcagccctgcggtagtgtcttgtgctcaccaagaggctcacgggaaacatgtcctccaacatgaaggtgtttgctaagattccaaccaggacccagtcttgggccacagaacactgactgctcccgcaagcccctcgcagaccgcagggatattttcccttcagaacctgttgcatcagaatggggaaagcgagggctgagaatcccagaggaggccgtgaactgttctggaaaagcgagggctttgcagtcagaccttcatatgcactttgttctatctgttgcgctctgcctaaatgaccacgggccagtgactttacctctctgatccctgctccttgcctagatagtggggatcacgtcgtaatgtatgtaaagaaccgggtgcgggacttggcacctgggaagtgtcttaatacatgtctgtcgagaaaaggaagggtctcgacgtgcggaaacaagacggatgccaggaaatacgtctgcccacctccacgcccctaacagcggaggctcctggaggtctggtgagaggccccacgtgctccagccccctccgctctgtgctgagctctgcctttaagagactgcagctcctgcctctaaaaagcctttcaaaattctttattaaattttcatggcgcataaagtcaaggttctgttacttggcctcagttgtcttggcaacttcataaaacgcaataataaaacgaagctgagtgttgctaaacacaggctcattgtataaacgaaaaaaaaaaaaaaaa

SEQ ID NO: 206573 - DNA, 1000 bp, Homo Sapiens
gccccagtgccaggctcactgcttgccataggcagccctgccctctggatctcatatctgcagttctgaccttgcctgtggagggaaagtgtaggggaaagaaagagatcagactgctactgtgtctatgtagaaagaagtggacataagaaactccattttgttctgtactaagaaaaattcttctgccttgagatgctgttaatctgtaaccctagccccaaccctgtgctcgcagaaacatgtgctgtgttgactcaaggtttaatgggtttagggctgtgcaggacgtgctgtgttaaaatgtgtttgcaggcagtgtgcttggtgaaagccatcgccattctccagtcttgagtacccagggacacgatgcactgcggaaggccgcagggacctctgcccaagaaagcctgggtgttgtccaaggtttccccagactgagacagcctgagatatggcctcgtgacaagggaaaaacctgaccatcccccagcccaacacccgtaaagggtctgtgctgaggaggattagtgaaagaggaaggcctctttgcagttgagataggaggaaagcatctacctcctgctcctccctgggaatggaatgtctcggtgtaaaacccgattgtacattctatttactgagatacgagaaaactgccttatggctggaggtgagacatgctggcggcaataccgctctttactgcactgagatgtttgtgtaaagtcagacataaatctggcctacgtgcacatccaggcacagcacctttccttaaacttatttatgacacagagacctttgctcacatgttttcctgctgaccctctccccaccattaccctatagtcctgccacatccccctcactgaaatagtagaaatagtgatcaataaatactgaaggaactcagagaccagtgctggcgcgggtcctccatatgctggcaccagttccctgggcccactgttctttcgcaaaaaaaaaaaaaaaa

SEQ ID NO: 206574 - DNA, 1000 bp, Homo Sapiens
ctccagcccagttcgaggaagagtaagctttctagagattctaatgaaagctgccaaaagtttatctgcccccagcattccggggcagaaactgcaggacttcagtgccacaaggaatcaagcacgtctaaccactcctcccgcctgatggccaagagagggcagtagaggttgccttcacaggcctctccgcagcagccatcttagacttgagggctctgtcctgatgccttacaaacgcagggtccaagaaataggattccaaaaaaaacagtggtctccagcctgggactatgaagatacgaaacaacttactttaagggacagggtctcgctgtgttgcatgcgctggagtgtagtggttattctcacagatgtggtcacagcatgctacagccttggactcctgggctcaagccatcctcctgcctcagcctccccatgtggtggcctacaggcactacctcatgcctggctatgaagtaaatcttaaaagtgcctatgagacttttaggcaagaagatccgtatctcttattctcaacggagttcctaatgaggaaattaggaactgttgttttagaggcttaggcatatctgctcacatgtggtgtcagagatcaatttattagtaaaaggttctggcagaagctaatgactaaacaaatggccccttctggaacagtccaggttcaaggaggctgcttttattattattttattattatttatttttttggagacggagtctcactctgtcgcccaggctggaggttgcagtgagccgagattgcaccattgcactccagcttgggcaacaagagcaaaactctgtctccaaaaaataaataaataaataaattaattaattaattaaaaaaaaaaaaaaaaaaaaaaaaaaaaaaaaaaaaaaaaaaaaaaaaaaaaaaaaaaaaaaaaaaaaaaaaaaaaaaaaaaaaaaaaaaaaaaaaaaaaaaaaaaaaaaaaaaaaaaaaaaaaaa

SEQ ID NO: 206575 - DNA, 1000 bp, Homo Sapiens
ccttgtcatcttagtgcataagtacatcaaagtatgactttagctaccttaaaagcatgtattgttatgtgatattgggacatctggacattctgctgtcgtaggagtttgtccttgcagcattactaaatcgcttccttagctgtaaacatcttataatcgtaggtcataactgtcaaggaagtgccttgctagtttttagatggagttgattttaaaatagtgtcactctggctttcctatgctcctgctttcctaacaaatctggttcaacttttttttttttattcaacataatcttttttttccatactacctcatttacagagtgcttcctatagatatggttggtctgtatgtttcctttttcagctttgattcttatttttttgaatcacacatgctttatgggggcttccactaccatgagccatattttctgtattaccagcaagatgtttgggtttgttttttgttttctttatatttcaaattttattttagatttaggaagtacgtgtgcaggtttgttaacatgggtgtattgcatgacgctgatcttacaataccaatgatcccatcactcaggtagtgagcataatatccaataggtagtttttcagaacttgccttatcttccctctctccctgctctcttaattcgaagcctatttttcctatctttatgtccacatgtttccagcatttagctcccacttatacgtgagagtatgtggtatttgtttttctgtgtctgcattaatttacttaggatgatggcttccagctgcatcttttgttgcaaaggacatgactttgttcttttttatgactgtgtagtattccatggtgtatatgtaccacattttctttatccagaacactgttgataggcatctacattgattccatgtcttggctattgtgaatagtgcagcaataaacatgcatggttcaacttttatggtaaaaaaaaaaaaaaaaaaaaaaaaaaaaaaaa

SEQ ID NO: 206576 - DNA, 1000 bp, Homo Sapiens
ctcctgtgaggttcacaacatagtccggaagatgagaaactactttttttagtaacctggattcccatctaagagatgccttactttatcgtaaagcaatgagttgttcacttgaggagggaacttcatgtttaacatgtatttgcaacaaatttacatacattttctgcctgtatgaatagttgtcagtgatgcccatgaatttctcagatggatgttgaagtatacagttagaaggttagaagatcttcctagcaatctgtgattacggtatgcattcttccatggtttctacgtttttgtctattctataatgaaattttctaagaagccagaaattaattaagtgctacctaaaaatatcaaaatgtcaggtacaagaatttggcattttcaaaattagtaattacaatgtaagtttgccctattataatgatacccagctatgtccagtaacataactagattgttctgaataccgttattatttcccaataatacaaacatcacaatttcagttctgtagtacctggcctacctacccttcccactgccttgccccaggtaaacacagcatgcctgtcactatacattattttacatgcctggaaatatatttaaatggaatcatagaggtggtttctttttttttttttatcaacacctggcttttttcattcactccacttatttttatatttatccattttattgcatttatctattgatatacttcattctttttgattgctaaatactattgcggtatacaaccacactaaacattttattatccatccatttgtcgatggacattttggttgtttctcatttggggctcttgtaaataaagctgctatgaacattaaaaaaaaaaaaaaaaaaaaaaaaaaaaaaaaaaaaaaaaaaaaaaaaaaaaaaaaaaaaaaaaaaaaaaaaaaaaaaaaaaaaaaaaaaaaaaaaaaaaaaaaaaaaaaaaaaaaaaaaaaaaaaaaaaaaa

SEQ ID NO: 206577 - DNA, 1000 bp, Homo Sapiens
ccatcgagctctcactctggatttatcgtgggtcaaaccgcaactcccaaaacagctttggacagcaagcgcctccgaagtgtgcatgaccccagtttccacggggagtacgtgtaaaaagctttcatggggcttgaggatttccatctggcttggtccctggagctggttcagttaaggcttcaagaagcagaagagtgggttacctgtggtgcccccttcgagtcccgtgccataggcggacaccagggcagggttccccgcttgtccaggctccccaacgcgcactttgaaggggcttccaaccacgtggctcccattgaacttgacatcgatggtgtggacaccattctcatgagggatgaagcgaacagcatacttatctaggagaatgagcaaaggcacagggtgaaatcaagcaaatggacacccctgagttcagtgaggataaaggatggaggccaagctgagatggcccatttaaaatcaacagttctacagggagcctggcactcagcatcctggatttcagaaccagacagaccccctgggtatccctcatcagccccaagggaaacgcatccacattgcaaatcctataaacacaggacaagactctgacccctgcctcagaagaacacttcctttctttagaaaacctcacttcttcagtgtgaaattctgtgaatgctgttactaatcctgtcacgagatgaatctcatttcaccaaaattaaattatgtttttccactaaaatgatgatacaagttgaagacacagcactctgaaattggaagacctcaccacttaaggctccgcagcggcttactcagctgaactccaggttactactctttactttgttcacccattggggagttcagtttgtttttaaacattgggagatggccattctaactactgttcaatgtctctgttttgggaaggcataacaagaaataaaaaggaatatatatgaagggaaaaaaaaaaaaaaaa

SEQ ID NO: 206578 - DNA, 1000 bp, Homo Sapiens
gccaagagggacctggccttagtaaatgatcagctgcttggctttgtaagggaaagaacactggataaacggtggcgagtaagaaaagaagctatgatgggtctggctcagctttataagaaatactgtcttcatggtgaagcaggaaaggaagctgcagagaaagtcagctggataaaggacaaacttctgcatatttattatcagaacagcattgacgacaaactgttggtagagaaaatctttgctcagtatcttgtcccccacaacctggaaacagaagagagaatgaaatgcttatattacttatatgctagtttggatccaaatgctgtaaaagctctcaacgaaatgtggaagtgtcagaacatgcttcggagccatgtacgcgaactattggatttgcacaagcagcctacatcagaggctaactgttctgccatgtttggaaaactgatgaccatagcaaagaatttgcctgaccccgggaaagcacaagattttgtgaagaaatttaaccaggttctcggcgatgatgagaaacttcggtctcagttggagttattaattagcccaacctgttcttgcaaacaagcagatatttgtgtggttagtaaatcatacttcacactttttctctagctttacttacagaaatatgtattttattaaagcctgttttacatacagtgatttgtgtaaatgtaacaatattgtgagctctgaattactttggagtatatctattgtcaagttaattctctatttaccattcactctcagccacattccaggaaaataactaaagaactaagccagggagattggtcttaggaattttacaagataaagtactttgaacttagtagacattcattgagtaatgataagtattttctgaatgcttgtgtacatgtgcattttcttctttcatgtattagaatggaaataatcgtcaataaattagtagtagtaacattgccaaaaaaaaaaaaaaaaa

SEQ ID NO: 206579 - DNA, 1000 bp, Homo Sapiens
tttactgtgagggatttggagccacatttagtcctacatcacagatacaggactcaagagtcaaagtgcacagaaatttgaattccgataagaatactctgagccagtttattctggggtacatacttcattttatgctagaactctgcaatcctgatgaaagagggcttgcattgctcaactaactaactcacccgtctctcctgcagtattagaaactacttctgtatgtacacgttacagtttctaggaactccatttttgcaagacagataggagccagaaaatttgttccttcaactgtatatcgctaattaaacataaaatcaaatcagcattttaggtacttgaataactagtctgtgcttacttttattcatatggaagcagtgtttaaattattctctgattgtaaactcacttatgtaaaccattatacaggaaaaaaatgagtaatgaagcaaagttctgaagcagatctatgtaagcaaatttcaataaccttcttaagagaatatgacacttagtagtggtgagggacattttaagctttttctatttacaagttttttttaaacgagggtgtttcaaagtaaatatttgctgttacgttatgccacatgatatactaataaatgaattaatgaaattaacctaaatatccagtattattattgaatatatagctactaaaattttatattcaaatatatccaaggacatgaggaaataaggatttaattctaaacaaaaaaagaagctatgaaatatatataatttaagactataattttgttaaaaatatgtttatgtaaatgcgctaaaaaaagttctttaagaatatatgccaaaatattgacaatggttatcccctgagtgatttttattttcatccttaggattttctgtattttctgtttcacattttgaacatgtatacttttacaagaaaatatgaactaaaattaaaaatttttaaactccaaaaaaaaaaaaaaaa

SEQ ID NO: 206580 - DNA, 1000 bp, Homo Sapiens
atatacgtatctatatacacattgtctaatgctataattaaaaaaaagttgtagacacaaatatacccatttaaaaaaaaaattttttttgctattttacttcatactgccaactcctttttcctgaaactgcttcaactctggaattcttttttgctattagttttattttattgaaatattcatgaatgagcatacacttgtatatggatttaaaattcacagtaatgttctcatgagttcatctgtgaataacattttatagacaaaatgtctgcactaagacaagagaaagatctataattcctttgttctaaggtaccgccattcattgttattattttaaaataggagtgttgactgatgttaaaacacaaaatgggttcgggagtggtggctcccgcctgtaatcccaacactttgggagaccgaggtgggcggatcacctgaggtcaggagtttgagaacagcctggccaacatggtgaaaccctgtctctactaaaaatacaaaagttagctgggcatgtgttgcgcgccaatgatcttagctacccgggagactgagtccggagaatcgctggaacctgggaggcggaggctgcagtgagccgagatcataccagtgcactccagcctagatgacagagtgagactctgttcttcccccaaccccccaaaaaaacacaaaaagggataattggccgggcacagtgactcacgcctgtaatcccagcactttgggaggccgaggtggatggatcacctgagaccgggagtttgagaccagcctgaccaacatggaaaaaacccatctctactaaaaatacaaaaattagctgggcgtggtggcacatgcctgtagtcccagctgctcaggaggctgaggcaggagaattgcttgactctgggaggtggaggttgctgtgagccaagatcgcaccattgcactctagcctgggcaataacagcaaaactccgtctcaaaaaaaaaaaaaaaa

SEQ ID NO: 206581 - DNA, 1000 bp, Homo Sapiens
actcttggtggggaggtcccatatcccataaccaggagcatactgggcctcctgtccacagcaaagagccaattactgcatcttgcatctcccatgaccaagagagacagacaatgccagtacgccttctggaggcagcacgttccacacacatgaagactactccagcctatgtaccattgataggagaagctgtcggccttccctgagcctgcagcaggtcgaggctgcagtgctggcagccctgtgactcaggccctgcagctggtcggaccctgtgttatgagaggtatcagacgtgggaaagcaatgctgtgtgtttatggcaaaccactatgccagaatcacagtgcaggcccctgggattcagaaacaaagccgtgccatctgcggcagaggattctgcgaaaaattctgaaaagtccctgttgatgtgctcctggggcctggggtgatggaatacctgattgtgcatgtggaactgctcagatgagctggattctgtctcacccctgggtcatgaggttggggactcagaaataacccatcacaggtgggagtgtgcgtgtggcagcagcagaagcaggagcaggaggccaagcagcggcagctgcccagtacccccccccaccctccacagcagtccccacagccccagtggaggaaccttctggtgaactgaggagggagggacaagcccggcctcagttcatggaggtgtctgctctgcctgtggggccagcccaaatcgcctggctgccatactccagtctcagcaagctgccctttaaagagggtgatatggtttggctctgtgtccccacccaaatctcatcttgaactgtaatccccaggtgatgagggtgagacctgatgggaagtgattggatcatgggggctgttttccccatgctgttctcgtgatagtgaaggagttctcatgagatctgatggttttataaaaaaaaaaaaaaaaaaaaaaaaaaaaaaaaaaaaaaaa

SEQ ID NO: 206582 - DNA, 1000 bp, Homo Sapiens
ttcccccaacaccatggaagaaggggtccaggaagaaaatgtcacacttgcctgtgacccccacctggtctgcagaaaggcagagaagacctgcttatggaggaaaaagacggcctctgtctggagcttctatgaattacataacgaataagtgatttcactacaaagcagtgaaatttttaaaagttaaccagtggcagaagtgtcaggacagtctgcacgggcaagaatgatacctaaatcactactcaggcacaggagagagcaggactggcatggctggcagttctctatgtagcaggcgctgtactttggccaagccaatctccatttgcaacatgtttctcccttacttgactccactatagagagagtaaaagctaaattttgatgttccacccccacccccttattgatatgagaaataagtcttctggtgcattcctctccaatttctgtcttctttccacttgagctgccaggagatgcaacagtcgttttgaaaccaaaaagataaaaactgcatactaagaatgcatgaacctaaagatttacagagcctgggacactggggatacttggagtcaatgtatcagccttggactgattcccatgggacttcttattacccaagtgaaacagtccttcctttcatctgttaagccactatggtatgttttgctggttctcgtagccaaatacagttttgactgctatacccatttttttcttatggatgttcatgacttcttttatattgtggattgtattgtgaatatgtatcttatttgttgcaaatattttctcagtctttttgtcctttaatttaagatattattcaatgcttgtaaggtttttatgtttatgctgttatatatatccattttttctgatttattcaattgaaaaattgagaaacgtaattgataattttgaacattatcgaagaagacatcaataaaacaaaacatagtctagcaattacaaaaaaaaaaaaaaa

SEQ ID NO: 206583 - DNA, 1000 bp, Homo Sapiens
tcacctgcgccttcagggagtcttagtctttttgctggtgaagggtcttgccttgatgttgttggctgctgcctgataagggcgatggttgctgaatattgaagtggttgtcacaatttcttaaaagaaaacaatgaaatttgccacattaactgactcttccttccacgaaagatttcagtgtaccatgcgatactgtttgataagcattttacccatagtagaacttctttcaaaattggagtcagtcctctcacaccctgccactgttgtactatgtttatcaatattctaaatcctttgttgtaggctaaacaatattcacagcattttcaccaggagtaaatttcatctcacaaaaccactttccaggctctttctggactgtagagttctttccaggctaccttgtggcagtttaagagtctggcatcattttccgctgggacctaaggatcgaggaggtgcttgtgactagactgccaatggacccatcacaaagtttaacccaaccttgatccccgagtcttcacaaatgctcactgaagaaaattcctagaacaattcagggtcctttcataacctctactctgaggtgttaataaaaaaccttagtaacttaaaaaaaatgagctgtacacaaatactgaacaataatgctacatatgttaagtatgtaagaaaaatatatactttgacataaataagaaacggtgagttgataattggatagaatggtggatagagtgagagatatgtagtaaagcaaatataacaaaatgatgtacaatctaagtggttggactataaatatgcacttcccacaacatttttatatgtttaaacagttttataataccatattagggaaactgtttgtctcaaggaaatagagattgtgatatattctagtacaatgaagtgtaatcatgtaaaataaaagcttttacttctggcaattaaagttagtcatgttagaacaccaaaaaaaaaaaaaaaa

SEQ ID NO: 206584 - DNA, 1000 bp, Homo Sapiens
cgctggacttcctagtgaagaaaacagcaagattatagacacagtttagaaacaaaggaacaccatatacatttaaaggcataaagtatttactcactccctggccacagccaccgttaccttctcaatcccaacttcggatataattattgatatatttataacgagtttatgaagaatgtgaaaaaggtataaagatttcattatttactatttcatcaatcatctacttttttctagtttttgacctagtccctgagatgtaaaacaatatctctttttgaatacatcatagtctatgggtgagaaaaatattcaaaaagatagtcaaacatgatgaatacaaaagaggcctgagaaagctctgatgggagcacagaacagaggaaggctttagacaggtgaaaaaatttacctaagtcttaaaggaagaaagggaatttctaagaagtataatctctaccatgatttgcaatatgcttacaggccttatagcctcattttataattgtgagggtgcattgactctaaagactcagtgctgaaataaccctaataacagcccaactaatggtcatatctcatatatacagtcttgacaaattatttgtgaactctagtattttaaaagttatccttctttggaaaaatagcagtagcagaaataacactcttatcctaccttggccgtggatttaaacgtcatccattagcctaatacaacgttgctgaaaagccaaatttttctacactatatgcttcaaacccaagaaagtactggagctgactaataagggaagtcattagcagtacacagctgctacaaagagcctgaacaaagtaacacaaaattatcaggagaaatgttttacacagaacagatgtagcagagtttagaagcatgcagactttttttttccacaaaggagttgcctagtaattatgcatgttttccatagtatttacattaaacataatgaaaacaaaaaaaaaaaaaaaa

SEQ ID NO: 206585 - DNA, 1000 bp, Homo Sapiens
atgctagaacaaccttttatatttgtttagatttgatttcctgaagtggtgttaaaaggttttcatatctatgtctgtgagggatattaatctgtacatttttttattactattttctggtgttatggtaatgctagtctcatagaatgaattaggaaaagttgcctccttctgtattttctgagagtttgtgtggcactggtaaaatattttctgtatatgtttgacataattcaccaggaaaattatttgtacctacaagttccctcctggaaagatgttgataatcacttattatcctttcattgtctgccagatctgtggcattgcttttttctctggtattagtaatttaaattttcccttatttcttgatcaattttggcagagatttatcaattttattaatctcttttaaaaatctgtattgagctttgttaattttctctattacatactttttatttctactcttacgattgctatttctttatttctccttcggatttagcccatttttctatttgtctaattttaggatttaaaattcaatcattatttttagatatttttatttttaaatataaacatgaaagttgcaatattaccttgggcactgttttgactgcattccacaagtttttatttgtcatgttttaatcaccattcagttcaaaatactttctaatgctccttgttatttcttctttgacccattggttatataaaagtacgttttgctttatttctaaatatgtgaagactttctagatatctcagttatttattactaatttaattttattgtagccagagaaaatacactgtatgtgttcaatctttggaaatttcttgagacttattttttgacccagtatgtttgccctcatggacattccatattcactagaaaaagaatgtgtgttcaaataatgttggatatagtgttatgcaaatgccactaaatcaagataaatcttttgcaaaaaaaaaaaaaaaa

SEQ ID NO: 206586 - DNA, 1000 bp, Homo Sapiens
ctatttaggctgggcccagtggctcatgcctgtaatcccagcactttgggaggtgaaggtgggtggatcacctgaggtcaggagttcaagaccagcctggccaacatggtgaaaccccgtctctactaaaaatacagaaattagctgggccctgtggcaagagcctgttatcccagctactggggaggctgaggcaggaaaatcgcttgaacccaggaggtggaggttgtagtgagccgagatcacaccactgcactccagcctgggtgacaagaacgaaactccatctcaaaaaataaaataaaatatatactatcttgctcctcagaaccagtggggaagaagagggaaggcaaagaaagaaactgagcatagtaaacacagcatttttttgtaggctcttatttaaaatgtgtgtgtgtgtgtgtatgtgtgtgtttctgagtaagtattgactgggaaaaagagagaagtcaatcaaaagtatactgtgcaattgagagaggctggcccaagatttaaaacttcctgtgggtaatctaactgtgagtagataggaatcggccatatgacgaaatgagatcaataggaaatgtgctttttgaggaaattttattttagtaccaaatgttgccagtgacaatcttcagttaagaagtaagttattctgacctaaaattcttatctctgccactttggtttaaaaacaaaaacccttatatacatggaatagttatattttaattaagcatttattttagttgttttcatccattcaagcaaaatgaataagcagcatttttcattgcacttaaaaatgtaaaatacctgcatgccactaatctgtaacattttaccagttcagatgcctgtaatgtgtgactttatgtgtgtctgtgttgttttgaagagaataaaggaaataatactttgcaaactgaaaaaaaaaaaaaaaaaaaaaaaaaaaaaaaaaaaaaaaaaaggaaaaaaaaaaaaaaaa

SEQ ID NO: 206587 - DNA, 1000 bp, Homo Sapiens
aagacacattttatcagtaacaatgttcattttatttttcagactcttccctctactacttactctgtatttctgtctcttctaatgactaggaaaggcagtttctcaaaatcatcttctatttagttggcaaatgtgataatgtgggtagtgttcctaccttcctgctgtatgtgttctactgaaatgagatataatagccatctggctacaattttgatttctaagaagttcttatgtcattttaaattcaaaaactaagtatttcaacatttggtctctcatatcttaagttttattttctttgttccagctgttcagagatagtgtgttctaatatctccacaatcaagatttttgactaaaatggatcagtacatgaaaaagagggactagtattaattttagatcttgttagttaatcatggtcttactaataatttggcaagttctttaatgagccaaatctttgtatttcaaatgccttgaagttgttattctttcctattagtaccctgatgggaggatgaaaacagcagaaaggagcagcaccagatgatcttttcatgggcacgtactctttcaaggaatcccatggagctcagtgaaattacactttggcttagagataattaagttgtggaaggaggtttaagagaggagcttaggtgaaatttgagctgtaaatgagtatgctaaattaaagaaatgattagtaataaatgagatttgctattaagaaattcactttggatctgagacaacattttacatacaatgtagaaaactttatggtcagaacagaacacagtctgaacctaaattaacagtagtgttaaagaattcagggcgggatattatccaagaaggcctagccagctgctccacttaatgttacatcacaagtggtttctgtgttgctattgtttttattagcatttcaatgactgtgtcatattacattaaatcaattggctctaacttaaaaaaaaaaaaaaaa

SEQ ID NO: 206588 - DNA, 1000 bp, Homo Sapiens
cataatgtcctccaaggattagttagtattaagatataaaactatattattaagatataaaattttattaaactaaacataaatggagaaatgaaagtactactactattgagaaaagatttagtaggttggccaaaaccgactataatcaggtgtctattagactaaacttcttaattgaatgatcagttgtgaagaaaaaaaattttatatatatataatgcttgggaaagttgtgtctaaattatgttataacactgttctaggagacagaatcaaacaccacttaggtcatataaatcttttaatggtattcaatttttacaaattgtaagatcctttcttaattcagttttcttatgcttattccttcaatgtagtttgtaaaatgagtatttttttgcatgtttaaatcaaaatgtataagattttcatgtaattcactatttttaggccatttagagctttttccttcccagacatttccaaatgttggcattatctttttcttgcaggaataaatttcattatctttacttacaagtggctttgtctttcaaaagttattacttataatatgagcattttaaaggtatgctaaaatttttgaaatattgatggctgatttaagacatgttttagttgtagtttctcatattgtccatgattatcagtgaagatgtgtagagatcaaaatgttaaaacaattaaaaccatgacaagataaagagctgtataacaagagctacaaggataagagtaacagcgacttgtgccaatcatatgttctcctcccttctgcccactccatgacaaagcatgacacaggaatgaaaatcctggaatgttcaaaaagggagaggactcagactacctccactacatttttgtataggtgagggtcccccactccaaaagaaaggtgaatagttcgagtatgtataagtgaatctcagactttttacatctagagatcacttgaccaaaaaaaaaaaaaaaa

SEQ ID NO: 206589 - DNA, 1000 bp, Homo Sapiens
gaactagatcagctgaccccctgaaagtctaactcttagtgaatgaaacagtatccaggaaatagcatctttagaaaaactgaaggacatgtctacttcttgtgctctaagccttctgttctataacaaattcatctccatatttctcctgccttcattgctttaagctgtgacatttattccatatctatgtttcttcatactctctttgaaaaggggagaaaaccctcagatgaaaagagttaagttaaaccatatgcatagtgagtgggcagtgtggccaagagcaacgtttgtgaggcacagcagacctcagtttctacactggctttgcctctcaccaattgtgtgactgtgttgtacacagtcctttaaaaaaaggataaatcctttaaaatcctttaaaaaaaggatttactttctactttttcaccatagccccctcttttgaataatttgttcctattttggtacaatgtatccttaaggagtttcaatgagttgtgaaataattgttactcacaagcaaaaagaaaggaaaaaagaaagaaagaagaaaagaaaaagcaggattaactgcaattgcccttacaactgagaaacttgcatcttgcactttcaccatgtaaataatgcacagatcctgcgggaacatgccaaacaccaagattcttaattaatggagctccttaatgtgcaaatcaggaacaaattgcaagttctgacttgcattgattatgaaaacattaattgaatgagcaagaccctaaaaaagacagaatcccgagtcttccaagagacagaaagaatacaaagctctggaaaccagacaagtctgaccaatgtctaaaatgtaaacctaaaactgagtgttctcactagtaaacaatgaattaaaaaacaagaaacaaacaaaaaaccccaacagtttcatcagacagcaatcatgataaatgcatctattacactatcatcttgcattagaaaaaaaaaaaaaaaa

SEQ ID NO: 206590 - DNA, 1000 bp, Homo Sapiens
agcaagacaggtgtggaggatgagaagcgggccacaggatgggaagggaatctgtgtggaggcggtgccctaaacatgctgccttgaggagggacctctacatggggtggccgggcacagccagttgcacagggtacctcagacccacatcccagatgacattcctcagaagctcgcagctggagatgacatcaccttagacaacatcaccctagcccaagacatcgctattagagatacatcacctggacactaaagcctccaccccagtgacactctcaaggtgctgacaaaatggacatggacatttgttgcttttcttcttttgaattaggaactctattgtgtttcctgaatttactgtctgcttggcccatgatcctggtatgttccttgctctctgccaaaacatgcaccgtcccctccacacctaaaggaaaacctggtagaagctactactctcaatgccattctaaaattgacgaagagtattattttccccaagaggcagctgctgcaggccagtgaatcctctggaccctggggagagggtcatacactccctagtgacttctactctatgctccagctttccaccaggacctcctgccctgtccccaactgtaacgaccacaaccaccccatccccttggttacacacaaatatcaccagtctttacatgtactttactgacttctcagataataccctccaacaagataactgcaggacttgccaccatgacctgagaaatacaccaagatattattgtccaatttttttgagatatatatatatttctcatacttttaacatactctgcaatccaccaagatattggtagaaaccctggaaatttcaaatctatttcgtctgctaatgccatgtgaatgggaaacttagatacaggctggcctacaaggactccttatacttcaatttttgttcctcctttcaactctcataaaaaatattttctatactaaaaaaaaaaaaaaa

SEQ ID NO: 206591 - DNA, 1000 bp, Homo Sapiens
gctgtacctgagtgatggtggtttttggggggctgcacctgagcgatagtgatttttttttggaggctgcacagctggtcagaccatctctagatgttctttccacagtggttcatagggcgtcattcccccttcctggattattttgactatgggtagcttattttcaagagctctttgcctttttaatcctgttccagatcacttatccaaaatctttccaaatcaattatattttgctgcttttctttaattccctaaaagccatagcttctagattttctatcagcacacattctcaccagaagttgaaccaatacaggtagaaaaagaaagcccccttaatgtttttaactgatgatatttttttaagcttaccaatataagtatttttaaaggttctatttttcaaagtcataacaatgattgttcttgttttctctcatagaatagactgccatcggataaagagtggtccctagcttctatttttccaagtaaataagtagaacatgttcttgggattataccattaaatgttaattttcttgaagaagaaagattgttgtctgccaagattttatgttagcgctcggattgaggcagaaaacggaagcaccaggtttaacactgggatgacttgggttgtgttcctggaggtttgaagtgggccttcccgccttttgagggggaaaactgactgttttgaacacatatcctggattagttgggttgttttgtattgaggatccctaaaagacaaaagagtcttggaaaggactgctggcttcgtcttgaacgttcgccccatcaccagtgtgagtccgtggggaagtcttcctcaagtggggttcagtctgtaattttcctgtctgttcttagtttgttctgagttattttggattttgttctttagccaaataaaggcagtgtggttttacctgaaaaaaaaaaaaaaaaaaaaaaaaaaaaaaaaaaaaaaaaaaaaaaaaaaaaaaaa

SEQ ID NO: 206592 - DNA, 1000 bp, Homo Sapiens
gggctccggctaccagtgcttccccttctgtgctttgacaactctgcagtctgcttctaatgggaaagggcaccactctcctcagccacattattggggccccacagcaagactgcttgggtctcaaggaaatcgagcttaatgaatgagagcaaaccctcttcatttggccatgtcagcttgtcaggaagggtccatcaatcagccaccatgtcttacctgcctttaggtcctattgctgagtttgacttctaaggatacatttggtaaattcctttttttcttgatgaattacctcttattggtccctaattccttctttaacttttttcttttccattttaaaagcaatataggttcataaaagtaaattcaaagcagtagagaaaaatgtaagataggaagtactagcctgggcaacgtggcgaaaccctgtctctacaaaaaatacaaaaattagccgggcgtggtcctagctactcgggagactgaagtggaaggcttgcttgagcccaggaggtcaaggctgcagtgagccgtgatggcgccactgcacttcagccttggagacaggggagaccctatgtcaaaaaagaaataaaaagaaagtaaaagtcccctagtgatagccactattcacagcttctcatttgtgtagctttccagatattttcgattccactgtaagtccacatgtcatcagttttctttaaaaacctacaaatgggatagtattgcaaggttcttctgcaatttacttttctcattgtttcttatatattgttctatattagcacatatagatagattcatctcgttttttcaatagaagcagagtattcgttttactcaattggtcccctactgatgggcatttgttgccattattttactgttataaacaatgcttcagtgaatgctcttgttaacaaatgtttgcatacttgtaaatctgtagaataaattcctggcaacgaaaaaaaaaaaaaaaaaaaaaaaa

SEQ ID NO: 206593 - DNA, 1000 bp, Homo Sapiens
gaatcctcccaccaccccctatttcctttaatttctcaggtctgctccctcctcccccaaccccacagctgggcaagaagtctgcaaaagctgcatctgcagctgtctctaactcttcccagccatctcccgtattttttggtaccttgattccttgactcttaataagccaagccaccttatctctgtagttcttatttttttgttgactaaatttggggggttcttttttatggtcatgtcactgacctattaaattggggcttggtgcttttccaccttccccctctgaatgaaagccaaggaatgggggaagagcgggaactctgccgcggaggtggagcaagaacggtgaagggccctggtcccagagaggctggtgggtccctctcccaaaggaaggcagacagtctctgctttgccttggaccttggtgctgggggtggggaggcctgggggggacactccccactcccattccccttcctttgtcctaatcctggaattaagtacaggggtttataggttctatttcttcccaagagccctgcaaagaaccccagtttcctatttggatgcccctacactgttgtgtttcagtggaatgtattttcatttaaaaacaactttgaatggggcactttttctttcctgttttaaaaattgaaaaattcttacagtacaaacaggactgtcagggtgggggtgttggtgctgtaagaggtcactcttgagtgcattttggcactgggatgggatggctggggtgggaagacccccatccccacccccaacttcttttctaatatttaaggagtgttttgtaggattcaacaaccaccacaacttgaatttgtatcatgggaggtgggagggagtggcttagaggtgtctgcctatgcttaaagccaactgtggaagttttgttttcccttttttgtataataaagtgaaaaacaaaggtttgaaaaaaaaaaaaaaaaaaaaaaaaaaaaaaaaa

SEQ ID NO: 206594 - DNA, 787 bp, Homo Sapiens
ggggaaggcggggccagaggcttgaagtgtggggagaacttggtctcctctctgctatatgaaatatgggagacgacagaccgtttgtgtgcaatgccacgggctgtggacagagatttacaaacgaggaccacctggcagttcataaacacaagcatgagatgacattgaaatttggcccagcccgaactgattcagtcatcattgcagatcaaacgcctactccaactagattcctgaagaactgtgaggaggtgggactcttcaatgaactagctagctcctttgaacatgaattcaagaaagctgcagatgaggatgagaaaaaggcaagaagcaggactgttgccaaaaaactggtggtattcagacctaggctatttttattgtgctttgggataattttcttaattggttaaaacacaaaatcatgggcttagtagagtaaaaccagtaaaaccagatagtagtcactaatcccagtcagccattcaggtctttaggagttccagatgatggatcagcacaagtctgtcgtcaccgaaaattagtcctcttgttcttccaggggagtattagtttaataatcggttttttaaaaaatatttatattataaatatgttgaagatgttaaaaggtgataaattactcagattttgttggataacatatttgttgccaaattccactcttttctgagctgatcagacttctcagctacactgtttttttgaatcagcaagtcaataaacatttatcaaatttccactcaaaaaaaaaaaaaaa

SEQ ID NO: 206595 - DNA, 1000 bp, Homo Sapiens
cccggccccagtctgaaacatgggattatttcagaattggaggtggcagcttcagaaaaaaatccttctcgtgtgttgactgctgagatccaggaactgggaaatcaacccccagtttgtagattgctctctttggaaattctgtggcccaacctcgtggctgttttctggaattccttctatcggggcagacagtgctgtgcctttcttgacttcaggatgttccaaggatgctgctggatctgtgtgtgtgtgtgtgtgtgtgtgtgtgtgtgtgtgtgtgtgtgtgtgtgtgcgtgcgtgtatgtgcgcctgaccctgatttctgcaacctccagatttctttcttgacccttcaaagtggaacagtccagtgccaaaaattttagagtttgagaaggtcacagaaatcctctagttggtgcctccacagtcttcattttacagaggaactcagggctaatggagttaatgcaactagatcagggttttgggtctgtgttctttctaccgtcagcacctgtgtggtcaattctggacacttcccagagaagtctttgagtagagaatcctactcaaatttcactgtatattttaagcattcctctcctttccctttgcctcccctgttgccttttcttcccctgatttctcctctggtcatctcctctcccttctgcgtgtaagccatgggaaagggatgagggaggacagcttctggttaaacacaggtccctcttccacatcaaatgaacattggcttcctgggacagaaggccttcaaaggagggattgcaaagcaaggcaaagcgttctgtcttcattttccccatccccatgagacaagactgatggaaagggtggtggggcaacactgcttaatggatgccttttcacatcatttcagtttttagccctcatgactgtattttctaatcagagacaataacattttaaataaaacaacgacaaagaagtctgaaaaaaaaaaaaaaaaaaa

SEQ ID NO: 206596 - DNA, 1000 bp, Homo Sapiens
cttggctcactgcaacctctgcctccttggttcaagcaattctcctgcctcagcctctcgagtagctgggattataggcgtccgccaccatgcctggctaatttttttgtgtgtttttagtatagacacggtttcaccatgttggccaggctggtctcgaatgcctggcctcaggtgatccacctgccttggcctcccaaagtgctgggattacaggcatgaaccaccacgcctggcctaaaatgtttttaaataactgtacttgtactcactcaccctacctccagggcatagtcagtctgggctgagatccccatgatcagatatttgatggaaagtcctgaaaggccaatgagttggatggcaagaatgcaggcagaagctgctggataaaataggctacagccacctcagatgctttcagtgctctgtctgaggatgtgtatatgcatatgcaaactcgacccccgttcctgcccagataatggctcaataactctgaggctggttgctcagcctctgagggcaatacaggcatttaaaaaattaaaatgaccgggcacagtggctcacgcctgtaatctcggcactttgggagactgaggtgggagcatcacttgagaccaggagtttgggaccaggctgggcgacacggggagaccccctctctacaaaaacatttttaaaaaattagctgggcgtggtgatgcgtgcctgtggtcccagttacttgggaggctgacgtgggtggctcacttgagcacaggagtttgaggctgcagtgacctatgaccacatcactgtacgccagcccgggtgagagagggagaccccgtctctaaaaataaaatgtaaaatcactgaaaaaatgagtgttcggtgaaacaagtgggattttctgggccagcaagtcttccaaactgtatatgatgcatcctgtctccatgtgtaatatattttaatgataaatgtatttttaacagtgaaaaaaaaaaaaaaa

SEQ ID NO: 206597 - DNA, 1000 bp, Homo Sapiens
ttttttgttttcaaatactaaattttaatctttaactctgagtaccaaataaacaacttttttgttttatttcagataaacatagattttcaaaccaaaactctgattgcccagaatatacaagaagctacaagtggctgctttacaactgcccagaaaagggtatacagcttgatggagaacaactcttatcctcgtttcttggagtcagaattctaccaggacttgtgtaaaaagccacaaatcaccacagagcctcatgctacatgaaatgtaaaagggagcccagaaatggaggacatttcattctttttcctgaggggaaggactgtgacctgccataaagactgaccttgaattcagcctgggtgttcaggaaacatcactcagaactattgattcaaagttgggtagtgaatcaggaagccagtaactgactaggagaagctggtatcagaacagcttccctcactgtgtacagaacgcaagaagggaataggtggtctgaacgtggtgtctcactctgaaaagcaggaatgtaagatgatgaaagagacaatgtaatactgttggtccaaaagcatttaaaatcaatagatctgggattatgtggccttaggtagctggttgtacatctttccctaaatcgatccatgttaccacatagtagttttagtttaggattcagtaacagtgaagtgtttactatgtgcaacggtattgaagttcttatgaccacagatcatcagtactgttgtctcatgtaatgctaaaactgaaatggtccgtgtttgcattgttaaaaatgatgtgtgaaatagaatgagtgctatggtgttgaaaactgcagtgtccgttatgagtgccaaaaatctgtcttgaaggcagctacactttgaagtggtctttgaatacttttaataaatttattttgataaataataaaaaaaaaaaaaaaaaaaaaaaaaaaaaaaaaaaaaaaaataaaaaaaaaaaaaaa

SEQ ID NO: 206598 - DNA, 864 bp, Homo Sapiens
gaggtggaggatttgctcgacttggacgaggagcttcgctacagcttggctacctccagggccaagatgggtcaccgagctcaacaggagtcagcgcaggccgagaatcacctcaatggcaagaattcctctttgactctgactggagagacttcctctgctaaattacctcgctgccgacagggaggctgggcaggtgattccgtgaaggcttcgaagtttaggaggaaggcttctgaagaaatagaagagtacgtttccagtattcttattcttatggtatcctatgttgatcttggtcaacagtgcagtcttggtggtcatgatctgttccacctatgttgaacactgtgttagaagtctggggctagaattattgatgcctgctgaatccaaggtttggttaatcccgcttcctcaactgaaggtctggaccatggcattgatgcccatgtcctatctcccactgtgtggttttagaattatatgtccaggtatcagggtactggcccatgccttctgcattattgatatagatgggcagaagcaataccagcttctaagccttgccttctcataagacttatatcagaaaagaaagaagttttctagataaaggtgctgtgaaggtagggccacccagtttcctactcccaggggcggaagctgcattcatgtcatagcctctgtgatgctgtcctctggaatagtgcatcgcacagcctgtgcaaccacacacggcacacccagtggcctaattaggtttgactaagttgacagagaaaaacaggttcagggacattttcatctaggagaaagaatggatacaataaacatttgggatgtccaaaaaaaaaaaaaaaa

SEQ ID NO: 206599 - DNA, 1000 bp, Homo Sapiens
ttaaaatgttgtattttttccctgaaataaacttttatgatttaatgtcttggaaaaagactcacatgaaaagtggcttttatatttggtaggataaagccattgtcctttaataccatagcaaatagaagcaatttttaatgaggttactgaattgtttagtattcctaatatggcatccaggtcatcttttcttttctccaaccattattaaaataacttgacactttgggaggccaagctgggcagatcacctgaggtcaggagtttgagaccagcctggccaacatggtgaaaccccatctctactaaaaaaatacaaaaattagcggggccatggtgacgtgcacctgtgatcccagctactcgggaggctgaggtgggagaatagcttgaacctgggaggcagaggttgtggtgagccaagatcacgccactgcactccagcctgggtgacagagcaagactccatctcaagaaaaaaataaataaataataatttgtgtatgtgatgactgactctagtcattatggaaaataacttttggcagtttagttcctacttgttaacaattcctctttttaagagaggtactacatttgatttctcaatttctcagtttgttttcaatacaaacagcaaccactgaaatgcagaaaatggtaatcaagtgtgatgtttctataaaaataattgagattcacatgtaatagaccctttagctttaatgagcagacatgagaatggtttatgatcttaagttggtaacataggaatatgtatttgtcaattttagttcacaaacatatccataagaatgtttacacatggcagtatcaaagcatataaaatattttctatgtaagtaaattgcatctttatgctagtgaacaaagtagcaataaatgttcatttttggatggcagtacacattgttaacaatcgtgtaattataataaatatgtctacctactccttgaaccaaaaaaaaaaaaaaaa

SEQ ID NO: 206600 - DNA, 1000 bp, Homo Sapiens
atgacatctaacagtaggttaagttatataggaaaaaatgtgcttttctgtaattaatttattaggcattttcactaatttgtgcattttatatctctgaagagcacactgctagcaacctgattgtaaatgaccagaaggacttatatccaacctatgtgacttaaacatacacttaagtactctaaaccactatttaaaaaatacttctagagagattctgaaatcttaatttggttgcactttctggtaatatattttttgaaaactattttgatatttctttcatataacattattggatctgtatcactaagttaattgtctaaaaggtaactgatttcatcaaaccttccagtattaataatttttaagccattttgaaactgaggcctaaaatactgaaatgcttatgtcgttgtacttactcctttctgaaatgatcagatttttaaaaaatggatttctcatataaataatattatcaaaaaaggatttctcatataaataatattatcaaaaaagctgattttaaaagtttctcccaaagtcttattctagtaattatagagacctaggtaatgagtggcagatatatctgcctttcagatatgccgtaatgtgaaaaataacacagtcatgtggtattctttattaactaaaactgtgttgtttttattttggagtagttctcataattcattggtagggaactatccagtatttatattcctatgtatgtatatcagattaattttgaggcttggtattcctaaaagatttggatgtgtgtatttctttaacttgacgtaaacatgtatcacaaacatatcttttaattccaattaaaggggtgctttggcacatgctgaaatctgggatttttttttttgactttgataaatttatcaaaaagattggaaccaaatgttaattagggtaagttgtctttgaaagtaaagtgaactgttttatttaaaaaagaaaaaaaaaaaaaaaa

SEQ ID NO: 206601 - DNA, 1000 bp, Homo Sapiens
atccgagctatttgggaggctgaggcaggagaatcgcttgaatccaggaggcagaggttgagatgagccgagatcacgctattgcactccagcctgggcaacagagggatactccatctcaaaaaaaattttttgctttagggccaatcgtggtgacacacgcttgtaattccggcactttgagaggccgaggcaggtggataatttgaggtcaggggttcgagagcagactggccatgatggtgaaatcccatctctactaaaaatacaaaaaaagccaggtatggtggcatacgcctgtaatcccagctactcgggaggctgaagcaggagaatcacttgaacccgggaggtttaggtggcattgagccgagattgcaccactgcactccagcctgggtgacagagcgagactccatctcaaaaaaaaaaaaagggccggacgcggtggctcacgcctttaatcccagcactttggaaggccgaggcgggtggatcacctgaggtcaggagttcaagaccagcctggtcaacatggtgaaaccccgtctctactaaaaacattaaaaaattagccgggcatggtagtgggcgcctgtaataccagctactgagggggctgaggcaggagaattgcttgaacccaggagacagaggttgcagtgacctgagattgtgccactacactccagcctgggcaacaaagcaagactctgtcttaaacaaacaaaaagcccagtgtggtggtgtatatttgtggtcctagctactttgaaggctgaggtgggaggattgcttgagtacaacatgtagaggctgcagtgagctgtgattgtgccactgcaccccagtgtgggtgacagagcaagaccctgtctcaaaataataaaattaacattcattaacaataatgttaatatatatgttaatgtatatgttaatcgtaatgtttatattttaccatgataaaaacattttaaaaccaaaaaaaaaaaaaaaa

SEQ ID NO: 206602 - DNA, 1000 bp, Homo Sapiens
ttcagagtcatggccactagccacaaaattgtgacttacagttcacaaaattgggacatatttacatgttgactaagttgggaaataatttggattttctttaaaagtagtaaaagtaaagaagaaaaagtcaaaaaggtctgacatctaagagggtgaaatttccttactttagatcacaagcaatcaggctgatcccgcctgagccctgagctccctgggacccagcagcagctgtgcattggcacgtggtgccctgtgtctgatcagctgactcctcaggcaaaacctgcaccattttcaccagaattgcagatgtcctcagtgtcattacaaagttcctaagtcatgaccattctgtcctgtggaaccaggctggactaagctcccatttctttaagccatcctgtcccctgcagggacttccaaggtggagctgatgagcaatagttatgagtcattggaggagacatcccagaggcgccagctcccctctgccctaaactgaaattaagacctggtgctctgggtggggcccctggaaggggatgtgcaactcagaggggaccttctccacctccacccaggagaccccagagggaccatggcagagccggagccctcttttttttttgttcgttttttattttattattattatactttaagttttagccctcttttaaaaaccaaatgaaaataagcaaaagaagccaatcgtctctgtgaaatgtccagaagagggaactctgtagagacagagaggatattattggctgccggaggctgggaatgggaaggtgaggggcctggggaggtgatggttaaaagattcttctttgtggtgatgaaattgtcttaaaatggactgtggtggtagttgtgcaacttggtgaatatataagttattgaattgtacactttaaatgggtgaattgtatggtgtgtgaaacatatctcaataaagctgttatttgaaaaataaaaaaaaaaaaaaaaa

SEQ ID NO: 206603 - DNA, 1000 bp, Homo Sapiens
aaaatacagatcaactgaatatttttggtcttgtttacaagataaatcatactttaaaatgatacaggcccctcaagtgtcttaggaaaaagtcattggtgctataaaacctttcagtatcatttttgaacccattgttcagactttgctaggttttaatctgattccttgtgatttattataatgtagcagcatacttataaaagtggtctgtgctgagtcagagagcccagcccattagaaacacatcataatttaagaatatgatgcagaatgcccttacacttatttgtgcccagcttcccaaaaagaaaattgttttgttaagaggaaggcagttaatttggctagaatccaaaaactcattcagcatggctgttttcccttatttcaaatgaaaacttttctaatactaaaatatgtaatcctgctttgctttaaatttccatgtctgtcactcaacaggaggcatagtgattcttaaatatttacggaacatttggtgagttgtaaagagaagtattattgcattgtaggtttttgcattgatgtgtcaatttttttgttttgtcccaagatttccttccagcaccttaatgaatgttcatatgatagaatgttttaagtatcagcaaagcattcatggatgcctgcttttcattctcagaaggctaaacctgttttgggtatgatgctacttcagaacatattgtctggcacaagatttcttctaataagtggtttatttaaactcaatttcggtggactgttgaattgaaaaacaccaaaggagtcttcttgtctggagactggattgttccagctttaaatacctgtgcccataagtatcccatttcatgaatgtgtgttggcatggggaaaaaatttccctgctctttgagtggagcgaaagcaattggttaagctgtagcagcttttttgtttatttttttaaagtaataataaaacttgaactgaaaaaagaaaaaaaaaaaaaaaa

SEQ ID NO: 206604 - DNA, 1000 bp, Homo Sapiens
tattgaaacaaaccaaaaacttccagtccaaaccatatttactcctgaagtcctattatgcctaactggcacatctctgctggatgctaggtagcaacttggaagactgtctatatataattcataatagtaattggtttcccccaatgaaaagtaagctcctaatgtttttaagtgcaatgaacataaaaaaatttcagaatttaattaaagacagtccagtagagctcagtctttggcaaatacatacactaacctagaatcagtctactatacaggatttttatttaatttttttctcttttgctatagtacttcattatagtctattctgcctcattttctgacataactctagcaaacttaaaggagtctagtaaatgagtacattttgtactcatttaaacatgtatagctttgtcctttttatgtcaaagtaattgtgcttatatgaacacctactcattaagaagtttcaaattcaataatcgaatgagtggtcaggtagtcttaaagagcctcatgttaaatagacacaaatttgcatagttgaattctttaatagacttaatttaagattttgtggggtttttttgagaaattaatggcttaataaaatggataattacaacatgggcttaaaacatagaactatttacaaatcttattttccttagctaaaaacctttaggtatcttcttattttcttgaaatttgtacaagctgtcattccaacaatagaatatgactacacaagacacttcacaatgtaatgaagagagcataaaatctatcctaattattggttctgatttttaaagaattaacccatagatgtgaccattgaccatattcatcaatatatacagtttctctaataagggacttatatgtttatgcattaaataaaaatatgttccactaccagccttacttgtttaataaaaatcagtgcaaagagaaaaaaaaaaaaaaaaaaaaaaaagaaaaaaaaaaaaaa

SEQ ID NO: 206605 - DNA, 1000 bp, Homo Sapiens
aagtagattccagcttagtggaagtgagattatatgtcagatgattgatgtggtgtggcagttggggatttccatttagaaacaagctgaccactttcgttgctgtggggcttcattgtggagtctcattcctaaatttgaattgttttttaagcagaataatggaaagattaagtcatttcatgcaattcaaaactggagtcagacaaacatacaaagtttgggcctgatataacttcacctgatcacaacaagcctgctataataagtttcaaagttagtttacgaggatcacttgaggccaggagttcaaaaccagcatggtcaacataacaagacctcatctctttaaaaaaaaaaaaaaaaaaaattaaaaattagccaggtatggtggtggtgcacctgtaatcccagctactcaggaggctgaggcaggaggatcgcttgaaccaaggagttcaaggctgcagtgcgctatgatggcactggtgcactccaggctgggtgtctcttaaaaacaaacaaaagtttgaccagtcaaagtggcttgcacctataatcccagcactttgggaagccgaggtgggtggattgcttgaactcaggagttcaagaccaacctgggcaatatggtgagaccttccatctctatcaaaaatacaaaaattagctgggcttggtggggtggcgcaggcctgtggtccctgctacttgggaagctgaggtgcgtggatcactggagccaaggaagtcgaggctgcagtgagccatgatagcatcagctgcactccagcctggacaacagaggaagacactgtctctaagtaaataaataagtcaatttacaattaatgtggtaaagattacttgtatgtaccaatgtaacttgacttttgatattgaaatgtataattataataaatgtataattaaatgtgtaataatgtatagaccccctctgaaagacgagggtaacaccaaaagaaaaaaaaaaaaaaaa

SEQ ID NO: 206606 - DNA, 1000 bp, Homo Sapiens
accaggccggggtctcacagtgaggccgttcatggtctggtccagctgtccccaggatgggctcctctccatcatccaaccagagacccagggccccagcaccaaggccctgacctgcccctgccttctccccatgtcttcccagctataactcctgatcctgccaggcctctccagccttccatcccctgctcatacatgctgtctcctgacactcttggaactgaccctgctcttgggactgaccctgcttgagcttctctcatcttcccagcatggggtctccttccatctcctgcacagtgctcctgctccagggagggctgtgttgagagggtagagacacaagattgaccagaactaaaaaggagtcccaaggccaccccagtctccacacccactcttgccttccccaggagaggctcctctcctggcctggcctcagtgtcacttactgctaatcatcgatgtgtagagacctttctcccatctccccaccaccaagcccttgttgagcacactgcacactggctttttatttttattttctgggtgacagagtgagattccatctcaaaaaaaagaagtatttttctttacgcttgacaatttttcttttcagaccaaaaagaagaatgtacttcatctggttgggctggattccctctgataagccttcccagttgactgaaagatgaggctaggctctagcaagttgaagtcaaaccagctccttcaagaagctttgagcagaatgaagtggggaggacccagcttccagcccaggaagcccactgtacctggagccatctgggataagactttgacccatgactcccatatccacagcctgtccatcctagcccatcccagtttatcctgtatcatttgagctgggattcccacatcctctgagttggaagtcccatctcaagtcttcaataaagactcttgaatattgaatcaaaaaaaaaaaaaaaaaaagaaaaaaaaaaaaaaa

SEQ ID NO: 206607 - DNA, 1000 bp, Homo Sapiens
agcgctttgaatgcctggcacaaaaatatttaggggtttggcgccatctggtggccaaatatcaacttttcagcttctcttttatgactaagaagtgaattactctgcactttccaataaacactattaataaataaaattatttaaaatgttgatttccaggacttgagaagacaaatcaaagacagatttctgttatgttacctattgttatatgacagaatttcagtcttgagtaggttcttttatacttgcatttgatttatttatgaaagcattatagacataaatctgctatctttttcttaatacaagagaagactctttccccaaaagaaattagacgtgctcaataaaatctaaatttattttttcacaattctgtaaaagattgagctaggggtgcgtgtgtgtgtgtgaatatcagaatttattttaaaaatgcaagagggagaggggaaggagctggtagtgacattgttaattgtctgctttgcaatagcaaagacttggaaccaacccaaatgtccatcaatgatagactggattaagaaaatatggcacatatacaccatggaatactatacagccataaaaaaggatgagttcatgtcttttgtagggacatggatgaagccggagaccatcattctgagagaactatcgcaaggacagaaaaccaaacactacatgctctcactcatgggtgggaattgaacaatgagaacacttggacacagggttgggaacatcacacaccggggcctgtcgtggggtgggggaaggtgggagggatagcattaggagatacacctaatgtaaatgatgagttaatgggtgcagcacaccaacatgtgctgttgtacacgtgtacacatgtatacatatgtaacaaacctgcacgttgtacacatgtaccctagaacttaaagtataataataataaaaaaaaattgtctgctttgtaaaaaaaaaaaaaaaaagaaaaaaaaaaaaaaaa

SEQ ID NO: 206608 - DNA, 1000 bp, Homo Sapiens
atttaagccaatgccttgtcttatagcggagaaaactgataaacagagcacctaggcaatttgcctactcactctcttcccttagttaaaaaggcaaatcaagcatggcacagtgtacacttgtagttccagctacaagggaggctgagtgggagcatcccttgagcccaggagagcagcctgggcaacatagcaagatccccatctctaaagaaaaaagacaaactgcttccttcaagcttcctgaaaatgtttgaatttattgtcaatgtcaaatgaaagaacacacctgtattttttgtattgcactatatgtccttcggtatccctaaaaagggaactgtttagtacttttactttctagaaaaaaatttttcagccattgtcctcagaaaagtgctttttagtacttttaaatcagttgattctttcaggatttaaaagcagtacaccaggccaggtgcggtggctcatgcctgtaatcccagcactttgggaggccagggcggatggatcacctgaggtcaggagtcgagaccagcctgccaacatggcgaaaccctgtctctactaaaaatatagaaattagttgggcatactggcacatgcctgtgatcccagctactggggaggctgaggcgggagactcgcttgggcctgggaggcggaggttgcagtgagccaagatcataccactgcactctagcctgagcgacagagtgagactcagtctcaaaaaaaatcaatacaccaaatagtggagtttccctattttttcaaatagaaatatttccatcaaaaccttttgctctcgaatacaaactaatactgagataaggaataattctggcgtgggggtggaggagtctgtttctggcctgttgtgctacctgggtcacatatgatggagaataaaacattaattttgtaactgtgaaaaaaaaaaaaaaaaaaaaaaaaaaaaaaaaaaaaaaaaaaaaaaataaaaaaaaaaaaaaaa

SEQ ID NO: 206609 - DNA, 1000 bp, Homo Sapiens
ccatcgctgcctcctccacccccacacccatccgaaagcagtccaagcggcgctccaacatcttcacgatatgtgccactgtttccaacttttcatcaacaaaaaggcctttccaactccttccaaattagaagaccagttggtgacacacagcacctctggacatgccccctgtgcggggccggaggcgggccgggccctgggactgctctcagatgagaagcggccgccgagctccccactccagagacccacgggaacctttgtaactaaccccacccccagggaaggctaggagcgccggagcccgcgctgggggctgccggggaccaggcccggccggacgctgcaggctcgctgcatggagaagaaggcagctcggccccacgcccggcgctggccagcgcgacgaggcccagaggggcgggggagtccaagcccgcccggcccggctgctcctggggggcgctttcctgcccctcccctcctctgctccttcctgcatggacctctgccgttcctgctcctgctccggaagccgccgccgccgccgcgcttgccttgccccctctttttggcctccccctatttcctaggatccgcattcgggtggactctgccccaggagcttgacagggtgcagggcctcttctggcctctctcctctctctgtccatccactgtgccccttgggccacgccgacgcgctcggtgccacgtgccgtgtggtgtctgtgccgcagacgggccatctgcccgctcacttgtggactttgcgctcccggttgtcgcgccctgtgctcccgaccagcagccccaccgtccacctcctcgcccccgcttctcttacgcccccgccccgggcgtgctcctcgcgccctcggcctctctgtccttgctcttttgtaaggggcgggcccggctcagtgacctgtgctgctctgtatggtgccgtgtgtaagaataaacccgttggaatactaaaaaaaaaaaaaaaaaa

SEQ ID NO: 206610 - DNA, 1000 bp, Homo Sapiens
taaattttaaaaaaaggtggaaaagttacggcaaacctgagatttcagcataaaatctttagtatgaagtgagagaaagaagagggaggctggttctgttgctcgtatcaataggttatctgtgtccctcatcttggtgttacagtgttatttctgtcagtattatgaatatgtggttgacccatcctgtcaaatgtaccaacattttcgaaagaattcattcaaatctcttatgccaacagaaaagttccttcttgtttaatatctctttacctcagtcctacattttgattctctggaggagattttagcttgtcttaaaaagccaaatttggagtcatcaagcctgctgaacctgatggggcagctttttgaacagctttctggaagtaagaacttcagttgaaaagccctttgatcgcttcagcccgggacatgcccttcagatggcttattctcagtaaagctttatgtagactgtgacactgtatatgtgtgactcgtacaactttgacgtgtttctgaagtggtttaatcgtatttgttattagcttctttgtggaaatgcaatttttatactaaaaacattgcttatttgcaatgcaatatgttataaatttgttgtttatattactggtattagtcttagcctaatgaacctaattatttttctttctgtattctttgcttcctcaaatagcatctgcagcaattggaatgagaaatccagatatgtgtttcaagtagtacattgcctgaatcacaaatcacttgatcacagtattgtatataatccctgatcctatttgtttcattttattgtaaattcccatttgcatcaaaacctaatgatagtgattggtaagtaaaaacaaatggtgtattgcttttcatacaagtgttttcacaaaagccatttgcctaggcagcaaaaaatattaatttgttaaaaaaaaaaaaaaaaaaaaaaaaaaaaaaaaaaaagaaaaaaaaaaaaaaa

SEQ ID NO: 206611 - DNA, 1000 bp, Homo Sapiens
tggacgagaccttccggcagctgtcagaagtgtatgggaagctctctgaaggggagttccagctgatccggcagacactgctcaacttcttccaagacctgcatatccgagtgtccacatttctaaaggacaaagttcagaactctaatggtcgctttgtgttgccagtgtcggggcctgttccctggggaactgaagttcctggagtcattagagtgttcagtgtcaaaggcaaagaggtgaagaagatgaaattccggcatggcggagactatgttgctgcccagaaggaaggttcttttgagctttatggagaccgagtcttgaaactgggaactaacatgtacagtgcgagtcgtcctgtggaaacccacatgtctgcaacatccaagaacgcagcctccagggcacaggaaaacattgttccaaaccctcttgccaaagaagagctgaatttcttggccaggctaatgggagggatggagatcaagaagccgagtggccctgaaccaggattccgactgaatctgtttacgaccgatgaggaagaggaacacgcagcactgtccaggccggaggagttgtcctatgaagtcatcagcatacaggctacacaggaccagcaacggaatgaggagttggcccggatcatgggtgagtttgagatcacagagcagctggagcagaacaccagtaagggagacgacttgctggccatgatggacaggttatagatgcagatgggcacgccctagccctccctcaagagactgccttagaccaccctggacacggatggctggggatctcatgtgcccctgctggattccaaccaaggcctgcaccttctagtccatttttaagtcagaaaaaaactgtgacgacctctcggagagcatccatttctgaagccacacacatttctgtattttcagcaaaatatattcttgctcttaaaaaaaaaaaaaaaaaaaaaaaaaaaaaaaaaaaaaaaaaaaaa

SEQ ID NO: 206612 - DNA, 1000 bp, Homo Sapiens
tgttagggtcggggatgtcacagaaattaacagggcagccaattcccatccagaggggcccaggatgaccccgaaccctctagctcagccccaagctcgggccagggagtgaagcctttgtccccaagcaacagagtgagggtctgtctctaacccggtgggctccagtgaaaggaaaatggcctggaggtgcccacaggagggcgccctagttctgagacaggtctacggctcccagactgtgtccccatgagtaacagagggacacgcagaggggcatactgagtgcctataggggactcacagactgcagatgcacgctgcggatccagaagccggtcaggtaatgaggtgcagaggtgtggggaagacctgggtgcctccctgggtgccaaccagcctaaccagccggggccaccaaacagaagtgcttctgacattaacgcgacacacagaaggtgtgtagggtgggtagtggaagtgaccgcagaggcctctggggattgtagttttggagctagagaggcaggcaagcagttgggttcgcccacacggtgtgcctctcacatctgcacagcgcacacaaccaagcttaggagccgactgttaagatgccccagtgacacggacaagtttctcctccgcaacccaatgagagctgctgaccacgagagcatcgcgggaccgccaaaggattctggaaaatgtggtcccgggtggccagtgtgcgctgaccttcacctgaaggtacggcttgaaggaaacttctggagggtggggtggtgttgaagagaaggcacaattgtcaccattttgttcaacatgggcgttttctttgtgcattgatttgcatttttaaaggtattccattaaaaatatgtttatctattttaaaaaaaaaaaaaaaaaaaaaaaaaaaaaaaaaaagaaaaaaaaaaaaaaaaaaaaaaaaaaaaaaaaaaaaaaaaaaaaaaaaaaaaaaagaaaaaaaaaaaaaaaa

SEQ ID NO: 206613 - DNA, 1000 bp, Homo Sapiens
atatttccagttagagggctatgggttggttatctagcgtggtattaatgaatttaaagttatagatactatgttagtgttgaacaagaaaaaattttctagcttttaacctgagccaatcacgtcaaaaatgatttgttagataccaaagtacttgttcctactattatttttgtatatgaagaactggctttggatttaactgaaaacttaggaaaacaatctaatcgctgttgtctatatcattgatttaattcatcaaagttactcaaatgattgatatttttacttgctaattattttaggagtgattttgtgaaatttatttttaatacagtcctagaattgaattgaaatatggtttggaagtttgagggttttttactgtgtctatccttgtgtgtctgtttcctttaaagattcatgatacaatcactgtgtacaatgtgtcctttaatattggttcctgtaataatgtgccttcaaattatttcttgagttttgtgacttaaatatgcagttcactgactcacgccaatgttgtttgctttttaccttaattctttttactgtgctctctcagttttattttttggaagaatggtactcagtgctttgatttgattagtaagatttttgaaacacatgtaatttatttcagaaatgtgattgttttaactctgacttttttagtgcagtcattggagaaatcgatgaagaaacagattctgcgcttgatttggggaatattcgagcagaacctttaaattctgtagcacactgaggaaaaactacatacttggacatctgtaaatctttgtacagaaactgattattctgaggatgatatatggagtttttatgaatgtgtcactggattttgactccttattgattcattgtaatatgtaaattaaaatatttctacattttattgaaaaaaaaacctttttttttgcctaaatataagtttggtagcttggaaaaaaaaaaaaaaaaa

SEQ ID NO: 206614 - DNA, 1000 bp, Homo Sapiens
attttgttctctctttgaaagaaaccctccaccgaaacaatggtccccatctccccagaagccttttttttttttcatttttctctaattagtctatgcatttctctctctcaaaccatcttctgcctcttcccttgagaaaacgggcatctcacgtacccccatctgagacctcttggaaaaaaaaatcccgtgtattctggagatgtgagaattcacccaaaattcttaaaacgttggagaatagcttgttataaaataaaagtgggggtaaaaagaaggtggttttccccacatccctttgcattgaataagagacctagttctttgcgtttgtgcaataactctttgctgcttgccttgagagcgggtagcaccacgctcctgtccagactactaacagcacaagacgcactcacagggtggcggaatcttccggaaaactctctataagctcagctccccccaccccacccccactctagcgttttgtcacgtcttacattttagcagtattttatattttctgtaacgcaccaagtcttagatctttctagagcttgtttgttcatcctcacaatcacagatttttttctccaatcctcacagagacccaattgaccaaaaaagaaaaaaggaaaaaaaaaaagtcgtcttttttttttttttttgtacaaatcgctttgagatgcctctggtgtgttgctgtgtgacgtctctctggtaacattttatttcttgctatttgtttttctacattaagagtcaaagttgacctggctggcgtgggggtgggggaggcacccgtcggccccttggtgttgtccctctgtctttggttagccatacgatgtttgttctcagcactgtacaacggtccctatataatacggagaagcaatatcactgtatgagactcacaccatgtattattattcactagcaccctaggtgtgataattgaagtaaatatcttttatacaaacaaaaaaaaaaaaaa

SEQ ID NO: 206615 - DNA, 1000 bp, Homo Sapiens
gagacagagtctcgctctgtcgcccagtgtggagtgcagtggtgtgatcttggctcactgcaaactccgcctcccaggttcaagcgattctcccacctcagcctcctgagttgggtcctacaggcgcacacgacctcgcccagctaattttttgtatttttagtagagttggggtttcaccatgttagccaggatggtctcgatctcctgacctcgtgatccactcacctcagcctcccaaaatcctggggttacagatgtgagctaccactcacggcccaaatcttcttgatcatatgtttaaatatattttttaatatttggagcatgagttgtcacttcttgtttgccttttttataaggaaatgttggagagttacatcattgctaatgtagaaatgttaagtggaaaaatatacagtttggtaaaataaactagattctacatttatttgtgggtttttttcccctcctttctttccacagcacttttgatatcaagcaagtggcttcctttttgagatattaaaaaaaaaaagaaaaggaaaaaagtaaatgaagcccaactacctaaccctttcttatttgtatttgttttagtattgtgaagttgtgttaaatagtactagctagaaatacaaatttctggttatcatttctcttccctgtggcacttgacattttaattgtcttaaagtttttgaagtacatcttctggccccttgagtactgccagaggcaaaagatgtttgtttcttattcattccacttttgtctcctgggatcccttctgtagcctaaagtatggctgggaaatggacttgagaagattggcttgaattagatcataatcatgtgtgatcccatcatgaattcattggaatttgtgttgcatgtaaggcaatctttcctgttgtaaatcttccttttttaatgtacatatattttgaaaaatatgaataaacatgaaattttaaaagctgcaaaaaaaaaaaaaaaa

SEQ ID NO: 206616 - DNA, 1000 bp, Homo Sapiens
caacataatgtatgtgaaattaatatttattgtggtctatattgtagattgcttattctcattggtgtaaagtattatattatttggatatttcacactatatttatctgtgatggagatttgtgtattttccagtttttgacatctcatgaataatggtgttatgaatgttcatgttcattcttttggatgaacatatattttcttttttaaaaaaatcttattatcaataatatttgaactatttaatatctgtcatcttaaaattattattcataacactttttaccttgtagctatagacaaatacattcccattttagcaggttaatgaaattatctttataatactatagaagcatttatttgaagaataccagaaggaacatcctgaaaaccaagaactcaaaatgcctttttatcccaaagacatgttttacaaatatatacccattcatccatttgttttcacaaatgaagctacagagaactttgaatataatgatgtgcagcaggggcttattcctaacatatttaaaatttaggtcaaccaaacttctctgtggaaactgagttgaaatccgaaatcttacaatcctaatttcgagccacattcattttaacttaattttaacatgttttgcaaaatgttccaatataaacttaatagttcctataccaccaaacatggatcctcatgattttattttctagattggctgataggctgaataatctcctgtagggtaagaagtgtcaactgtatcaagcacatggaggtggactggctacaggagaaaggttttccaaatcaaattccaagtatttctttctctttttatattaccattaggagaaataactaatgtagatgacgggttgatgggtgcagcaaaccaccatggcacgtgtatacctatgtaacaaacctgtacattctccacatgtatcccagaacttaaaagtataataaaaaaatttaacaaaaaaaaaaaaaaaa

SEQ ID NO: 206617 - DNA, 1000 bp, Homo Sapiens
tctgttcaggctctgcttgtttttcagaatatgatttttacctccagacagtaagaattgaacaagaactgatcaaacacaccttcctattttgttttcttcactatgtaaatattatttgggcaaacattacaaaaagggatccaaacaatttgagtttcagtatttttttctccctaggcatgtgcttcaatttcaaatatttttttctgtgtggaaaatgccatgtaactattgcactaccttctgtgtggactgtgttggtattggttctttctgtatatcaaaagtcagggtgtttataactgcaaagtttgtataagtggctttattcctcttctagaagatttatgaggagcctaggaagcactattggtacaggaggaaaaaagaatggaaaacatgtttacagactctagctttccttattagcttaaactggggccctcaaagagcagcctgttgatcttttggccaaatgacttgagcataagtcttttatttctttttaaggttaaatcgtaaactgtatacctttactactgaaaacaaaactatagggcatcatactaattgaaaatcaatagtaatgggttccatccattggctttttaaatgaatagatctggtattgatttccttcctgtttttttgaggcacattcctttacaaccagtgtttaaaccaccacgtaatcatcttctgcaaacaaggggtgccagtgttgcctaacagaagataatctttaataaagcaaatcctctgcttcaaaggtttttgaaataattggatccctttttgaaaaggaagatgagtttaactgtgtccaggtggagtaatagtactgctgttgcatgaatagatgatacaaagcaagtgatgaggttggtatgacttctttagtgaccttttagggtttgcttttattttcctctcttttttgtattatttctttcaaacatagtaaatatatgattttacagccaaaaaaaaaaaaaaa

SEQ ID NO: 206618 - DNA, 1000 bp, Homo Sapiens
ctgctgctgtaatgggctggcttaattatcggcagagtgcttgaaaaggctttgcagacctcccctgcccccaagactgggtgactttatatgtacttcattcaagggtaaatcaggagacgttctccatttatctcttcgtccttcctgcctggaaagtgatagcactaaatattcccagcagatgggtagtgttctcaaaggaatcaccctttccctaccttcagactctattctttacccttccattgctccagtgctgatggaggccaaagacaaccccagggttttcataggaaattcactggaattgtgcgcaattgtctttgtagtccttttgccttttttttttttaaatattatgttgtcaatagcatttgtttgggtatttgttttagaggcctcactctaagttattaccgtccccttcattgttttcaaagacatgtggtgatatagtttttaaaaataactattttgttatagatcataatatgcataaaactgtacagaaatattttgtaatgtgttgattttaaaaaaaatctgtaaataaagttttaaaaaaagaattcaaatggcacacgctgaaatatgtagatattttgctatttatttaaaggagtattttaagagatattgaactatctgaaattgaccagtaatcaaagttccaatcatctgaatgcttttccttgaggtagaatgtgagtctcagaaatgactgcattacctgcccttttttgcaccttttctgtctttttattttgcagaacaacaacaacaacaaaattgtgccttagctgtatttttttgtctaggggagtttgtttctgtctgacaaagcaacattttttgcagaaaacagtggatgtattaaatactgtatcataccaaaaacactgcaggtgtatatagatgctttctgtcatactgtgttttcagatgcagaattttaaaattaaaaaaacactgcctttatggaaaaaaaaaaaaaaaa

SEQ ID NO: 206619 - DNA, 1000 bp, Homo Sapiens
gaacggtgcctaacgtcagacgtctcgaggctcgcgttccatggaggaagccctcgcaatccgaaagcgcccgggcgccaagccctgcagccagaagctcggcgtcccatgggagcgacctccgcatggctggaccaatggaaacggaggaaaggcgggacgtcactgctgactggctggttgggcactcccccccctcccccccccgagttccgccgctgggactacagcgtttggctgcacggggagttctcgtatgtctagaacgatggcctttctgcggtgtctgcgaccgggaccaaggcggagcaaagtcgccgggggtgtggggtgttccacgctatgttgggagtgttcgctttcgaggtacatgactacgttctaaatttttttttttgagacagtttcattcttgttgcccaggcttgagtgcaatggtgcagtctccactcacagcaacctccgccgcccgggttcaggcaattgtcccgtctcagcctcccaagtagctggaattacaggcatgcgccaccacgcccggcttatttcgtatttttagtagagacgggtttccgcatgttggtcaggctggtctggaactcctgacctcaagtgatccacctggctaagcttaccgaagtgctgagattccgggtgtgagccaccgcgcctagccctctaaacttttaaataatcgtgaaatgtatgcgcagctgaagcgaattcagctatttcctctaccttttgtgtggaatttaaaatactgaacttgtgagatgaacctggtgggcaccagttctcaaacttcttggtcacaggacgcttgcactctcttaaaatgtactgaggacacctaaaagcttttgctcactgttgtttactactgctatttactaacatagaaattaaacatattaaaatattcacttaaaaaacacacgacactaacataagttatatttttattaaaaatcttttccagacgaaaaaaaaaaaaaaa

SEQ ID NO: 206620 - DNA, 1000 bp, Homo Sapiens
aatcctgaaattggatctcttgaaacttatggttttctttcagcagcataggagttaagttttcttctaacttgccctaggttctctcaggaactgggaaagcagttctcccaaatcccaagtaaggtattcaagacaacataaggcagagctaaattcttctgttgaagaatttaacatgactcaaaccataaggaaatctaaagaaggctgccaaactatttcgctgctgccctcccccaccaaaaaagagataaaaatgttagatttacaaagcaaactacagtgtatggaatatatatatctatatatagagagatatatatacacacacacaatttttttaacctaccactttgtcttatttgcatgagcacaaatcgctttcaacttaatgccagagaaaaaggcaacattccccgtgatgacttgctgaaaagctcactgtatttgtttgataatggattttagttcattgtcatgtacttcactcttcatcagcaggagcacttcagggtaaagaaacaggcttttaccacactggaacaaaagctatataaggaaaaaaaaatcctgagcagatggaatattatttgcatttgcacaaatagtgctttttagcacaattcatattactccattgtgagctaaagtaagccacatgtgtctacagcatgctgcagacgcagaatcggctttttgtttgtcagactcagaggtcccaaccttatgatatctttgtacttgtatatccattagttttatttcagttacttatcagaagggaaaagaaaaaaatggcactatgcagttaagaggaccattgcatggagggctaaattaactattttttattttcatgaatgaggatcaaataggtttcagatgtctcgacatctatctggagatctagatgatgatataaaattaaaatgcagaatgtaagtgtaataaaatttgtttctccatgattacattaaaaaaagaaaaaaaaaaaaaa

SEQ ID NO: 206621 - DNA, 1000 bp, Homo Sapiens
aggatcctcttccaccacatcatttaatgggttagcggaacagatagggagctatgacactagcaccaaagagagatttttcttctggttgggtggtgctggtgccacgcccctttctgggatttgacaagtctttcccactcacctatacaatatgccaaatcaactggagttgtcattctaatgttttaaagaatgattgggttcccccaaactgtaggaggtcgatggtaacaataaagtgatacaaaatgcttatgtcattataatttatgtaagggagaccattaggctgagaatcaatatgattgaggttatctattctcctgaaaagtgaattggagaataaagaaagaatatttgaaaggatgttgtgtactaggcaatatactagcatgtattagaaaatacggtaaactgtgggttagaagagtgaaagtagctggtatgatagagcactggactgagtaacgaagagattctagtcatggctcttgtggtcatttcatttttgagcctcacattcttccaattaatgagggtaccagattaaataaactctggggattcatcccaattcgaactctgtaattctctgaatgaactctctcttcaattaaagccaaattattaacattttaactcaagtttaaatttaatagagaagtcaaaatgaggtatgcactttgtggaatgtttttggtcttatcacaataacctgattaaaatggtgcctttatttccatgtttactcctttaaataagatgaaagctttcagaacatttatttgcaaaatgactgtcaatatcaacaatatgcatcaaagtaccatatatgctaagggagaggagcacttgatgggctgctatgttaactgtaaattgagaactgcttgttttatggcttttgctgttaaaaaaaaactgctggcttttaatatgtactttaaaatatactcatgtctgggagagaacttttaaaaacaaaaaaaaaaaaaaa

SEQ ID NO: 206622 - DNA, 1000 bp, Homo Sapiens
tttgaggcccagctgcttggaagttgcataatctctatacttcagttcccccctataaaatggggaatatgatagaatctaccttgtatttgagaggactaaataaatataaagtgcttagaaaagtaaggactcaactactagtaataattattttgacatgtttaagtaatcagtactatctggaaaactgtgctaatagtgcctgatctacacaaatttaagtgactataccccttttttgagtcagagtctcgctacgttacccaggctggagtgcagtggtgcgatctctgctcagtgcggcctccgcctcctgggttcaggagattctccagcctcagcctcccaagtagctgggattacgggcgcctaccgccacgcctggctaatttttgtatttttggtggagatggggttttgccatgttggccaggctggcctcaaactctggacttcaagtgatcacctgcctcagccttctaaggtgctgggattataggcttgagccactgcagccaccactctgtatatctcttttgaaagtcataagcaatatctttggaaaaaacacttggggttatttatttagaggtagtgtctctctgtaccccagctggagtacagtggcacagtatcacagcttgctgcagcatcaaattcctaggctcaagccatccttccaccggacatgttggcgtgcacctcctgagtagctgggactgcagttgtgctctaccacaccgggctgatttttgtattttttggtggagacagggttttgccatgttggacaggctggtctggaacgcctgacctccggtgatctgcccacctcagtctcccaaagggctgggattaaaggcatgagccaccgcactcagccacttaaggcttttaaaaaatcaattaatttctaaatggttttggacttttgactccttataagtgttaagatattttggtatcacttttttccttccgaaaaaaaaaaaaaaaa

SEQ ID NO: 206623 - DNA, 1000 bp, Homo Sapiens
atagtaataatcctattaatactcacttcaatgcataaaataaacagccaatgcacttccatcaagtctgcaggcactatataataataaataggtttccaaaatcacttaataaaaacacacagttataatgtgctcggccttcattagcatcctctgcatggggtggttttcatttaacctgaattattttaacattttggctaatttgtttgctgcaatttcatgggtctaaatttttggtttggtttgcaatgtaaatcatattgtatatctgctcctttgttattagatttactttgtgaataatatcttttaaaaattgagttatcaaaaacttaaattataatgtcatcaactaataccaggtaaatatactaatatatatgtagggcatgattaaattgcatatattttgaaatgtcaaactattttttgtttttttaaaaaaatgaatgcatctcttaaacctgtaccattaattttaaaaaagtttcatttggtatttcatattatattttaaaatatttttctttatctagtagtacaggtttaaagaaactttttctgattgaaatgataaaatatgcctcatttcactagaattttaagaataatacatgtaaaagtataactcatataagattataaatatccacaatatcttctttgattttcatgtaacaccactttttactcattcttttatttgttattattcgaaatcattcacaatgtaaatagcatgtttcatgatgtaaaatgtctttgcatttacagactgcagaacaaggtgaatttgtatatgaaaaataagtgatggaaacgtgggattcttataaaacaaagtggaaatgatagttctgtgttatatttacataattcattacaaaattgtctagttaagtcatgcatttatttaccttaaaagtgtccaaactgtcacttataaaatatttaaatcaataaataataccaaaaaagaaaaaaaaaaaaaaaa

SEQ ID NO: 206624 - DNA, 1000 bp, Homo Sapiens
actagctaaccatctgcctttcctccaatccacggacgtggtcctcaaaataacattttatcttgtgagaaaccttcattaattacacctaacaacaccatgacgcaggttcatgaggatactactgaaggcaaaaggaaatccctatttctctgaccctttccctaatttccacttagcacaaataagactactggacagtctgattttaaaaaatcactgtatgggccgggcttggtggctcccgcctgtaatcccagcactttgggaggccgaggcgggcagatcacttgaggtcaggagttcaagaccagcctggccaacatggtgaaaccccgtctctactaaaaatacaaaaattacctgggcgtggtggcaggcgcctgtaatcctagctactaggggggctgaggcaggagaattgcttgaactcagggtcagaggtcgcagtgagccgagatccctccactgcactccagcctgggcaacagagtgagtctctgtctcaaaagaataaaataaataaaaaccactgtatggagcaaaaactagaaggacatataccacatgttatcagtaatctctaattttgctctgtgattttgtgcattttccaagttttttgcatcaggtctgattttcaagtttaattctctgagaaacattctcatcagaggaatgttctatcttcttagagaaacctgattggcctagtgaaactgtcatgttcctactctctataatcatattgtaattctttgcttgtttccctagtaaaggtgaggcaattttcgggtaagggatttccccctcacctctgccctccaagtggccagcatctgctttgcacacagaaatttttacatctgctatatgtttgcattaatatgttcaacaatgatcctaatgtaggccagtcattttggaaatgcattgtgaagtggagaggattattaaatacctcacattttaaaaaaaaaaaacaaaaaaaaaaaaaaaa

SEQ ID NO: 206625 - DNA, 1000 bp, Homo Sapiens
actgcatatttagaaattaatatacaaaaatgaaaacaactatgtttggggacagtgattatgtacttttaaattttttttaatcttgttatctttaaacttttctaaaaatgatgtgattacaagcaatggctctttgggatcacctaataaatacctactaaattctagacgggacaacgagctctgccatcctgcaatggctcctgtgacctagttccagggccattctgaatggacagaggtcttcacaatggaggtggagatgcagggagctctatggcatgaaatggttaatgattctcttttgtaattgtgttttctgtttgctgccttagttctaaaaggaggcaaaacaactgtggtttattctaccttttccaggcatagttcttctcctacctttgtgatccccaaattaatatcaaatgtctaattagtttttttctccattggtgatccccaaattaatatcaaatgtcagacaaagtaaatcaaagtacaaataaaggtaaaactgctcttgcaaagggctaaaatagcaatgtttactagaagcattcaagagccagttcaatttcctatttctcattaagtggtaaaatagtaatgccaagaccacatcccagaatctccagggtaacagaggcccaacgaagggctgcagagaaacttgaaagtaaactggcttagttctttacacacagaaattgttctacaaagatctcttgcaaagcagtgtcaccagtagcatcactgccactaagccaatgtcccaggaattgaggaaaggaagacacccttaaagaaaaaaatggaaaaaagccacaaggactggtaccacagtaaatgtctgcctgggtctccctaaactgtcttaggtgagcttacccaggaatgtttctcccctacatgtttgccttcctttgtttaagcctttattcctcctaaatgaaaataaatacccccgactggggaacgtggaaaaaaaaaaaaaaaa

SEQ ID NO: 206626 - DNA, 1000 bp, Homo Sapiens
tgcaatgattaatataaaaacctaattttaattcctctttcactttagtgcaataagaaaaaaaaattatatatatagtttccatagtaatacttgtaaatttgtgattccataatgatgttataaatttgcttgtgatattttggggagctgtaagttccatgctctcactggaagagttcaagtggattggcagcaaatctgagatctatttggtgtgacctggtgagatctaaatatggagtcagcacatgatttttttaagagtaatattgctaagtaatattgctaagtatacttgggagatttttgaaacaaagtatgtcatgtcatgattttggaatttagtgcccatatgctgacagatggtttaatgggtctatctgttctagagttttcctaataggtctgaaaatacctctaatcaaaattatttacttgagaaaagtattcagaatagttcctaaaaattaagagtatatcttctgacagcttgcttgaaacagtcttcactgttgaattcaggctcatggtcttaagtagacttcattatagcatttgagaaacaggagtgacacttatagtcataccagagtaaactcagatatgatagatgtattatagcaaatttctggtataaaaggataaataatctgtatatgagtattaatccaatattcttaaaacttcagtattttacttaaaagtactttttgtcattaaaattatagcaaaggtagaatgcacttgtttaatatactctcatgattcttttgcagggtgttcatttagaagaaagcaacactaatgattcaaacagcttcctgaattttaattttgtgttgtctcacagaaagccttatcataaattccataattctaattaatttaccaagataatgtaattacatttggttttgtaaggtatacagcagtaatctcctattttggtgtcagtttttcaataaagttttgattatgggcaaaaaaaaaaaaaaaa

SEQ ID NO: 206627 - DNA, 973 bp, Homo Sapiens
tacaggcgtgagcaaccatgcctgaccagtgtagctactttcattaattttgttggctagatttttaggatgacttgctgtagcttctgcatcagcacttactggttcaccttatacttttatgttacggagacagtttctttcattaaacctcaacaaccaaccccatctagtttcaaacttttcttctacagcttccttctctctctcaatcttaatagacttgaagtgagagagagggccttgctctggattaggctttggcttaagggaatgctctgctggtttgatcttctatccaggtcactaaaactttctcctccatatcagcaataagactgctttgctttcttatctatcatttgtgtgtttgtgttcactggagtggcacttttaatatccttcaagaactttttcttttctttgcattcgcaactcagctaactggaacagaaggcctagcttttgacctgtctcagcttttggcatgctttcttaactaagcttaatcatttctagcttttgatttaagtgagaaaggggactcttttacttgaacagttagaggccattgcagggttattaactggcctaatttccatatggttgtgtcttgaaataggcccaaggagagggatagagacaaggaaatggctggttggtggagcagtcagaacacacacaatgtttgtcgattatttcaccatcttatatgggtgtgatttgtggtgcccgaaagaaattacaatagtaacataataggtcactgatgagagatcaccataacagatgtaattaataataatgacaaattgtgaaatattacaagaattaccaaaatgtgaaacaaagtgagtacatactgttagaaaaaatggaaccaatagacttgtttaatgcagggttgccacaaaccttcaatttgtaaaaagaacagtatctgtaaaatgctaaaaaaaaaaaaaaaaaaaaa

SEQ ID NO: 206628 - DNA, 1000 bp, Homo Sapiens
aagagagccctcaccaggaactgaataagtcagtcagtctgggacttccagcctctagaactgtgaaacaatagatttctgtggtgtaagcaactcaatctatagtagtttgttactattttgttatagcaaccaaagatgactaagccagacaggttatgtcactcgccaagtgtcttggtctgtttgtgctgctataacaaaataccttagactgggtaatttacaaacaacagagatgtatccagagatccacagttctggaggctgagaagtctaaaatcaaggcaccagcagattccacatctcgtgaaggctcactctctgcttcacagatggcactgtcttgctgtgttctcacatggcagaaggggcaaacaagcccccctgggcctcttttataaaggcactaactctatgcctaaaggcagggccctcatgactctatcacctaccaaaaggctccacttctttatactattggaggggtagaaggaacttcctttctagaccttgaaggtttaagaatttgaatctataaaacaagctgacaatagacagattaacaggagaaaaagcatatacattttttaatgtgggccagatggcagaagcttaaataacaccccaagctacaggaagtgaggcctctgatggggaggtagtgacacaggctgtgggagggggtaggggaggaagtctgtggtgagcaaagtttgccttattacactgataaagtgtaattacactaataaagctggatcacctgaggttaggagtttgagaacagcctggccaacatggcaaaaccctgtctctactataaatacaaaaattagccaggtgtagtggcagggcacttgtaatcctatctactcgggaggctgaggcaggagaatcgcttgaacccaggctgtaaaggttgcagtgagccaagatcatgccactgcactccagtctgggtgtcagaatgagaccccatctcaaaaaaaaaaaaaaa

SEQ ID NO: 206629 - DNA, 516 bp, Homo Sapiens
gggctcatagtccgactgccgcgacagaaaggctgggagtggatctgagactacagttccaacactacggggaaaatttcatcttctctgagactacagttccaacactgaggggataatttcatcttctcctccgcccctccatgtttccagtgcaattccgccctgctgaggggagcctatctgttcccaaacttctgcgtgcgaggagacagcgtggccagggcaggtggtctcacttgtaattgtgacacagtctccccacgtgccacttgtacgactatttgtccctgaagtttgatttctctctgacaagacagagcccgggagcctccaacagcctgcccagcgttgccgtaaagcttgctctcggggacctgggcgcgcccagacctttgcagggcccctccctcagccccgacccttctcctcgcccctcccctgccacgccactttcgacatgctggaaagtcatctacctttaataacagtcatctttgcaaaaaaaaaaaaaaa

SEQ ID NO: 206630 - DNA, 1000 bp, Homo Sapiens
aattctcctgcctcagctttccaagtagctgggattacaggcacccatcaccacacccagctaattttcgtctttttaatagagagggggtttttccatgttggccaggctggtcttgaactcctgacctcaggtgatccgcctgcctcagcttcccaaagtgctgagattacaggcatgagctaccacgcctggcccgtgttgctgttttaaaggtgctgccatgttcccccatcttttttttttttgagatggagtctcgctctgtcgcccaggctggagtgcagtggtggcgatcttggctcactgcaagctccgcctcccaggttcacaccattctcctgcctcagcctcccaagtagctgggactacaggcgcccaccaccacgcccggctaattttttgtatttttagtagagatggggtttcaccgtgttagccaggctggtctcgatctgacctcatgatccacccgcctcggcctcccaaagtgctgggattacaggcgtgagccactgcgcccggcctcccctctcatttatgatgccctctgtgcaggcagacggctcttgggctcttttccccacctgtctctaacacaggccccacggtgatggccacaggcagtagaggaggaatgaggatgggttggggagcggggagtcgcggcttggctcttcctggtttctgagagggacatcttcatccctactccccttggtccccaaccacagtcctggtgaagatgtggatgataatggtgccttgatttccaaatgaagacagctttattgcttaactctattgtacataggatacacgttcagtgtaaaataaagtgtaaaggggaattcaggcttaatgctgcacctagatataaatgctaatgatacttgggtttatagccttctgatcctttatttctgcatatatatatagatatatacatatatttttggtataacaataaaccgtctccatccttaaaaaaaaaaaaaaa

SEQ ID NO: 206631 - DNA, 1000 bp, Homo Sapiens
agaggaaggcctggaaggagggtagggggaccaaggagaaacttttacccaaagccctattacctccccattcccagtgctgcttatttgtacctcttctgcccactcatttctgttccacctgcccctttacttcttaagcagcatcctcatccttcttcctcttcagctcttatgttgaaactcctgttatctcataatcacgttgaatgtgctcattggttggttgattttttaaagtctagtttaaatccatttaatttcagccctgcaaagactctatccgtgtggttatttggaaatacgataaattagtagttagtatagagggttctcccacttacaaatggagaagagcctgtacatttcatattcacagaaagttttcctgcattcaaagacttgtcactggacccaagccacatgtgtagttggggtcaacatgattatcactggactctgctcgtaaatcctcctctactcttgtctaaaggaattcaagcccacatttaaatcttgtcagcttcatagttgttggctttgctgtggcctacgctccctattttcattcagattctgagccctggataaaatgcagagagtctaaccctctccacccctctgcctctccagcggatgcagtggtgcagtatgacgtggagctgattgcactaatccgagccaactactggctaaagctggtgaagggcattttgcctctggtagggatggccatggtgccagccctcctgggcctcattgggtatcacctatacagaaaggccaatagacccaaagtctccaaaaagaagctcaaggaagagaaacgaaacaagagcaaaaagaaataataaataataaattttaaaaaactaaaaaaaaaaaaaaaaaaaaaaaaaaaaaaaaaaaaaaaaaaaaaaaaaaaaaaaaaaaaaaaaaaaaaaaaaaaaaaaaaaaaaaaaaaaaaaaaaaaaaaaaaaaaaaaaaaaaaaaaaaaaaa

SEQ ID NO: 206632 - DNA, 1000 bp, Homo Sapiens
gaacacagttctaaagatgaccggaagatcaatataagatgtggtgagaatctctatatgtcaactgatcctaccctctggtcaactgtaattcaaagctggtacaatgaaaatgaagattttgtttatggtgtaggagctaaacccaattcagctgtcggacattacactcagcttgtttggtattcatctttcaaaattggatgtggaattgcttactgtcccaatcaagacaacctgaaatatttctatgtttgccattactgtcctatgggtaacaatgtgatgaaaaagagcaccccatatcaacaaggaacaccttgtgctagttgtcccaataactgtgaaaatgggctgtgcaccaatagctgtgattttgaagatttacttagtaactgtgaatccttgaagacttcagcaggctgtaaacatgagttgctcaagacaaagtgccaggctacttgtttgtgtgaagacaaaattcattaacatgcccagtgtgcagcaggacagactatatgaggaaggggtacagacttagttgagactgatggggaaaatctataggagattagtgacatgtcacatcccaaatgacaaggcttctttccttcctagattcatacattaatatctttcagaacagccatttaaaaaggttgtcatttagtataacaactttggaattggaccaactttgctgctttaaatatagtgaactgaatcaagtggagaattttgaaagttgcaccatatcaggtcattcacctctggaactttgaaaaaaagagaaaactatttgtgtcctaaattaacctgcaatggaagaatgggctgtagttacatcaacatcaaccgactttatagcgcctgccaggatgaagcttgacatctacatgtgtcttctgtcttcttacttaaacacagataatcacttctttcaataaagaactcaagctaccacaaaataaaaaaaaaaaaaaaaaaaaaaaaaaaaaaa

SEQ ID NO: 206633 - DNA, 672 bp, Homo Sapiens
atataagggccgctcgcttctgggcgttaacatctcctggccgcagccgccctagatttggaattctacactaaagtcatcatgggcgttttccagatattgatgaagaataaggaactcattcctttggcgttttttataagcgtggccgccaccggggccacatctttcgctttgtatgcgttgaaaaaaaccgacgtggttattgatcggaaaagaaacccagagccttgggaaatggtggatcctactcaaccccaaaagcttataaccatcaaccagcaatggaagcccgttgaggagctgcaaaaagtccggagggcaaccagatgattgctcaccactcctctcttccaaagaacactctatgaatctagtggaaacatttctgcacaaactagatgttgatgccagtgtgcggaaatgcttctgctacatttgtagggtttgcctgcattctttggatcctgcattagcaagtgaaggtagcacatagtctaaaatagttttctgtgtttattggtgtaaatttcaattttacagttgaaattttatgtttgtgatgcttggatattttccttgaaatgtataaacatgtaaaaattagattactgcctgtaataaaataattcgatgactagcaaaaaaaaaaaaaaaaaaaaaaaaaaaaaa

SEQ ID NO: 206634 - DNA, 684 bp, Homo Sapiens
cctctgcgaaccaggtcgtgctgaggctgcactagtctccagggagtaagcgtgcgtctctgggcctttaaacatgcttcagcctcaggaaactttctcgaaccctgccttacgcgacgaagacaaacatttgggaaatctgtgggcttctaagaaatcgctgtataagaacccagctcaccttgcgcaacagcaggatccctggagtcggctcagctcaacccccacagccacgtccagaagtcgagacaccttttttgattctaagataccaaaggatgacctggacttccgcttagcaaccttgtataaccaccacactggggcattcaagaacaaaactgagatattgttacaccaggagaccattgaggatatccagggaaccaagatccagtttcctggagaatgtttccacgctccttcagcccccattacttcccggaccaccatcaggcactggatcaaccctaagaaagagtccatccatagcattcagggatccatagtgtctcctcacactgcggccaccaatggaggttactcccggaaaaatgatggtggcttcttctccacctagtggtgacaaccaggctaatttcaacatggtggaacatccagccacccatcttcattaaataggtttgttcaaacaaaaaaaaaaaaaaaaaaaaaaaaaaaaaa

SEQ ID NO: 206635 - DNA, 1000 bp, Homo Sapiens
tgcggctgcaccctgaggtcaagttctccgccatcaaggagccacactggtggacccggaagcgctttggaatcgtccgcctaagagatgggctgcgagaccgctatcccgtggaagattatctggacctctttgacctggccgcacaccagatccatcaaggactgcaggccagctctgcaaaggagcagagcaagatgaatacaatcattatcggggaggccagtgcctccacgatgtgggataataatgcctggacgttcttctacgacaacagcacggatggcgagccaccgtttctgacgcaggacttcatccacgcctttcagccaaatgccagactgattgtcatgctcagggaccctgtggagaggttgtactcagactatctctactttgcaagttcgaataaatccgcggacgacttccatgagaaagtgacagaagcactgcagctgtttgaaaattgcatgcttgattattcactgcgcgcctgcgtctacaacaacaccctcaacaacgccatgcctgtgtgtacccccccccccccgtaccccccgagctggcccctggcagaaggagctggtttgttgttattatgcaagcggcattgtgggtttgcgtttcagcataggaacagagagaagcgttttaatgtgcaaatgctgttccccattattcatggatgtaaaagctgaaaactgatgggctcttggtctggctcctgccttcctccctgctggtcacctgccacctccccctcctccctcagcaggaggatgagggtgcctttaggaagattaccatttagcaagacacccggcaattagaatcggcagacacgaggacacccaactctcaaattgtcttaagagcattctcttgagcggtggattgttttgttggtttaaaaaactacccatcaatgattttcaatgcttcgttgacagagtctcaattgaaaaacattttctgttgattcctcaaaaaaaaaaaaaaa

SEQ ID NO: 206636 - DNA, 1000 bp, Homo Sapiens
tagattttctagctgtaaatcaacaggcaggaccttatgtaatgatgattggaaaaatggtaagttgacagatgtttgataatactcgtgggtttattgattttttaaaaaatcacaaaaatgttattaacatagttttatttgagccagtgaatgtcttttattttgtgtttgtttgcctcatacttcacatctgccattccttaagagtttctcatgctcaatcccaatcccctatacccatttagtgctttgcaagataatgttagctataccatctatggtttatgtctgtaggtaactcctttttcctgtcttcactgatccaggctttttttttttttttttctttttgagacagagtttcgctctgtcacccaggctggagtgcaatggcactatcttggctcactgcaacctctgcctctcaggttcagcgattctcctgcctcagccacccgaggagctgggattacaggcatgtgccaccatgcccagctaattttgtatttttagtagagacagggtttcaccatgttggtcaggctggtcccaaactcctgacctcagatgatctgcccaccttggcctcccaaagtgctgggattacaggcgtgagccaccacaccctgcttgatccaggctattttttaaaagttaaacccaaaatacctaatcttttcctaatacagtatgcccagtattttgctcttttccttagtcttatctgagtggcaggttttattttttaaaatctagatgtcaagttgaatgtgtaatttttttatacactgaatctgaaatatattgggtctactccttgccgtaattccttttagttttcagtggtgaaaaaggcaaaatttgtaatatagctattgctattccttattctgaaattcctgttcatcctaggaaatttcagcaaatgcagacaaatcactattcagagacattcactattaacagtttaacgtaaaaaaaaaaaaaaaaaaaaaaa

SEQ ID NO: 206637 - DNA, 818 bp, Homo Sapiens
ggcggcggcggcggcggcggcccgctccagccatgccgaataaaaacaagaaggagaaagaatcaccaaaagcagggaagagtggaaaaagttcaaaagaaggacaagacacagtagaatcagagcaaatttccgtcaggaaaaacagccttgttgctgtcccgtctacagtatctgctaaaataaaagtaccagtctctcagcccatagtgaagaaagacaaacggcaaaattcttcaaggtttagcgcaagcaataatagagaacttcaaaaactaccatccttaaaagattgcaaatgcacaagattcgagacctatgtatacagagggccaacttttcatacgcacgggttctgcgggccgactgtgggacttgaatatgcgtggatttggttgaggctgtgaagctgggcagggtttcagctgagctgaggttggaagtccctgaccttcagctgtggccgcctacggagcagcagggagagcaaacccatggagaaccccgcggcccccaaagcatggacggagctgccagccttctcccctgcccttcttcctctactcccgacctgccagccttctcccctgcccttctgcctctactcccgacctgccaaccttagcctaaaatcagagctgctagaatcacacacactgtcgtagctggttttgtattgtaaatgagtcattctgttattttggaaacttatgtctcatgccaggatctgcagatagttctttttcaaaatattgtttagacaaaataaatttctttaaatataatatctctactttaaaaaaaaaaaaaaaaaaaaa

SEQ ID NO: 206638 - DNA, 1000 bp, Homo Sapiens
tttccttacttgtttacattccgtggtacctacttacatgcttaggagtcaaatggattatgacattaggaaaaaagcagaataaaagagattgaagtcttctgatgattgagtgttttggataggcctgatcttataatgataaatcagagaatgaaatgctctccaggaagcattctgctccactcatccgtgggaaacaaattacatttattgagtaccaggcactgggcaatgtctttacataggctatttcattaacacacacgcaccagaattcgacctcattatcctcgttttatagtgactttgagaaggtctcacaaccagacaaagccaggatgctaacctaggtctgcctgactccaaagcccatgtttttgttccttctcaacactgtagagaaaaatcatttatagaaactgaacagagtatgaggaaaggagatatgataaagtaatgcagctttaggatggcagttagtgactgccctggaacaggattaaaggaggctgtgtcaggttcagcttcccctgaattgggcttcccttatatctcaggagattgccctataaaatcagtaaaatttgtgcacttttttaaggatatggagtaaaattgtaatagcattataagctggtaattttcacacaaagaaaaaaatacgttccgtcgtcacagactctactcctaaacttagctaactaactatcttgcaaatgcctgcagtttgtcccagtgggcaatgtgagaggggatgtcggtggctcaggcagcacagtccatcaccaacacagagaaaattactgccaggcctaccggtggctggccagtagcatcaattttgtattggaagggcaatccaaaccagattcaccaaaaatttgataactgttatctgctaaaactaacttcattatgtacaagaacaacagatttaatattgaaagcatatgtaacaattgggaaagtaaaagcataaaacaaaaaaaaaaaaaaa

SEQ ID NO: 206639 - DNA, 1000 bp, Homo Sapiens
agcattctggactctctaacactcagaattgtaatgtaatattctgctctaatttaaatttttaaaaatatagtctcctaattcaggataaggagtaagcaaactttctgaaaagggctagataataagtattttaggctttgccagtcatatggtctcttgcagctactcaactctgccactgtagtatgaaagcagccatgagtaatatgttaatgaatgggaatggctgagttccaataaagctttattttttttttatttgagacggggtcttgctctgttgcccaggctggagtgcaatggcgcaatctcagctcactgcaagctctgcctcctgggttcaagccattctcctgcctcagcctcccaagtagctgcgactacaggtgcgcaccacaatgcctggctaatttttttgtatttttagtagagacagagtttcaccatgttggccaggttggtctcaaactcctgacttcgtgatccacccaccttggcctcccaaagcactgggattacaggcatgagccaccattcccagccaataaaactttatttacaagaacagctggtgggccagatttggcccaagggtcatagtttattatcccttgagctaggctgctgcctgaggttgattcaacatcccagctccagtcaacaacaaaaattctaagtctcccgcctaatgctgctgtggtgtgtcatgccaaaaaagtgggctactcaggttagaccaatgacttcagaaccacagggctcagaacaggaaggagcttctttctgcagagctgattcctggaaagccaccagcactccaccttctgcccagaaatgtgattcagtcaatagctgatgaggaaaagcaacctgcaaacattaggaagaaggagaaaaataattcagaggtgatgataccacctccaatgaacagggaagcaagttcatcagtaacaaaagtcagtgaggcaaaaaaaaaaaaaaaaaaaaaaaaaaa

SEQ ID NO: 206640 - DNA, 1000 bp, Homo Sapiens
ccccagaaggcatctggtttccttatgaagaaggaactggattatttttccaaggctttagaaaagccagagaggcccttcctggctatccttggtggagccaaagtgaaagacaagatccaactcattaaaaatatgttagacaaagtcaatttcatgattattggtggtggaatggcttacaccttcctgaaagaactcaagaacatgcagattggtgcttccttgtttgatgaagagggagccacgattgttaaagagatcatggaaaaagcagaaaagaatggtgtaaagatagtttttcctgttgactttgttactggtgacaagtttgatgagaatgctaaagttggacaagccactatagaatctggtataccatctggttggatgggcttggactgtggccctgagagcattaaaatcaatgctcaaattgtggcccaagcaaagctgatagtttggaatggacctattggggtatttgaatgggatgcctttgctaaaggaaccaaagctctcatggatgaagttgtaaaggccacctccaatggctgtgtcaccattataggaggcggagatactgctacttgctgcgccaaatggggcactgaagacaaggtcagccatgtgagcacaggaggtggggcaagtcttgagcttctggaaggtaaaatccttccaggggtagaggccctcagcaacatgtaattgtcataatgtacttgcttcctgtttcctgcgcacaggaccagaaccaactcaacctaacctatatctcaacatttgttaacctctactatgaatcaagacccaggtaatgagctagcagtgagccatcaatatcacatcagcaagtcttaattctgtcacacatttgttagtctcttcaagatctcatcaggatttcccacagtccttcctagggaggaaacattctcatgtcaactattaaagaagtgagctaagtaaaaaaaaaaaaaaaaaaaaaaaaaaaaaa

SEQ ID NO: 206641 - DNA, 1000 bp, Homo Sapiens
gaaatgcagatgtgatgagagcttcttgaccagtaaacaaactagcccaggtctgagagagacgtgctaaaggagagtctacgtctgggaactctatttattttcctgtttctccggtgtgaagaatgtttcatcaaatgtccactttgtcgctcactgccgctgtaagcagccgctgctgacggtgggcctccctccgcgtagttagctgactagatgtttgtgttcaggcatccggatgcactgcggttagcgggcatcctcaccaggtactcacagagcagattccatgcattcttcattcaagggctaaatttctctcctttgggaatcatggcaagcgcacacagaacgttgctggccaggatggctgttacctcagtactgaggtcggctccatgttcccacgcagaagattaagggaaagcccttacggtggacaggcatgcagagttcatttctgtgactctacacagtgacaaaggatttgtaaactttgcctggattttcctcattttataccagttttgttcatcacgatggtttctgttgaccgcttcatgtttttataccttaagcatttgatgaaacactctctagtgctctctaggcgtttcttacttttattacaaatgtgacaattgtcaaaagatgcactaaaatataaatggagattgagcctgttcattttccagcttataggcaactttatacagacttgaaatctttatccagttgtttagtaaagtgagagagaggtttcctgccacaggagaacttttacacaacaccccactgctttagtgggacagttgagagcagtgtgtcccttttatgaagaacccgtcatttacagcgctccgggagagagaatgttactgcagatcccttttccacggtgtagatactctgatttatagaattcattcttgatccagatgatggttctttcacagaccaataaaaaaaaaaaagtataactaaaaaaaaaaaaaaaaaa

SEQ ID NO: 206642 - DNA, 1000 bp, Homo Sapiens
ttttatgtaatcatacaacagatatttgcacctacatgtgcagagcactgtgataggcctcagtgacacagaataatacggcaaagaccccacccgatgagccccctcccaccacccaccagtacagtagggggtggtttaatggagtgttcctggaatatgaagtgggggcaggcattaggggtggcaaagggacaagtgtttatctgatcagttatgtactgtttataataagtaaatcagcagagggggaataatacttagaacctatagagagtaaatctgacaagatgaaatgctgatgaaaatatggaggaaatgaaactctcatgggttttgcagggaatctaagtcagtgctgtgttgtgaatgtaggtgtaccctttgaattcatatgttgaatcctaacccccaaagcaatggcattaagaggtggggcctttggggctgggtatggtggctcatgactgtaatcccagcactttgggatgctggcagggggcagatcacttgaagccaggagtctgagatcagcctggccaacatggtgaaaccccatctgtactaaaaatacaaaaattagccaggtgtgatggcgtacatctgtaatttcagccactcgggaggctgagacaggagaatagcttgaacccagtaggtggagatttcagtgagccgagatcgtgccactgcactccagcctgggtgacagagcgagactccatctcaaaaaaataataaagatgtggggcctgtgggaggtggttaggtcatgagggtggagatcatgaatggggttagcaccttataaaacaggcttgagggagcccttctgtcccttctaccatgtgtggatgcagtgagaaggcaccgtatctctgaagcagagagcccgccctggacactggatctgctggcaccttgatcttggacttcccagcctctagaactgtgagaaataattttttgttgtttacaaattaaaaaaaaaaaaaaaaaa

SEQ ID NO: 206643 - DNA, 1000 bp, Homo Sapiens
atcagaggtcctttcccaccacccaccctcagtatctgggaccccaatgctctgttctgtttccttggtggcggcgcccggctcttctcggagttctgatcccgggaaagggagcgggccccctccggctaacactcacccccagaagcagcaacagcagcaggcgcggcccgtccatggcgcggccggtggcacctgcccccatcgcccgcctcccgcggcagcgctcgacttccagctcggtccgctttgcggactgatggggctgcgctgcgctgcgctccagcgccccccctgcccgccggagctggccgcggctcggctcgctctggctgcgggcgggagaggctgggtgaagccagtgctgcggccccgcctccgccccgcccagcccgcccacccccggaaccgcgcccgcccgccctgccgcctcggggtgggaagcagaggcaaagggagggcgtgcggttccccgcaccccgctgcgcttctccctgccttgtcccttagagcctctcacccatcccgccctggtacccagttcccggcccgcgctactgcgcgtccgtcccggatgctgtgggcccggggaccagggcgtccccactgcggttcctgttcctctccggctgcggcccgccacagggttcactctcttacccatcttcctccgcctctggcttcaccttctccctggagccttgctccctaactgccccctatcagtaagaatgcccgcttgccctccctgcccttcatctcagtccatcaccccacctccaccccatccccacccctccccttcccagtgcaggagatccctgggcagaggcctagggggaggggaggggcgcaggcgcccttacctcggccatcgacattcaaggtggagtccattccgacatcatttgattctcaaatgaggggtttgaaggggtcacaggtgtgcacacagtgcacaggaatacacactctcaagctcaaaaaaaaaaaaaaaaaa

SEQ ID NO: 206644 - DNA, 1000 bp, Homo Sapiens
tgaaccgactctgagaaatttggtaagtatgtcagaggatgggtgtttctcagtaatatcccccgctacttccccggagtctcaagcaataggatcacccccttttacattagtctccatagacccctggacagtggaccaaaagtctccttctagtgccttgaaacaaacgacagaaagaaaatccatattggtcaccacaaatcagtggcattaacagctagatccgctgaatccccttgccccgcatctccattggtcattggagagcttataatacaagctaaactggggttcgttcggccgttgtctggccacctctcccgggttgacagtatcggctttccacaaaaatgcctgtttggaaagaggggaactcaagtgttggcgcgtgcgcacggtcgccgcccgctgcctcgaacgggactgggcacgggaggaagaggctgggtggtaaacaggaagtgggcgctcagagctcgggggcggcgctcaggtaggttcctctggggactcggggcttccggggtgggggtcccttgttaggagcgggagtcctcttgtggaagtgtgttagcttacagcttcgatccgaatgttgtattggtggctctaaaggcacccttgtccctgcgggtgggtgtgtcgttcttctatcccaccctaggaactcccgaaaactgaagaccgccgggtcgcagaaggggagaagatggggcaggggcagaaaccctcttctttcctgaagtaaagattcgcaaaacttcagacattttcatccaggaagtaggaggccgcattaaaagaagtatttgtggaagatttcgcagcctcaagtgctgagtgtgatattatttgtaggcacatagatgctgtattaggctatcggaatttatatggaagatgtgtagaagatgatattttctgaaataactcgttaaatgttttgagtcctaaataaacctgctcagtttttcgttgggtaaaaaaaaaaaaaaaa

SEQ ID NO: 206645 - DNA, 1000 bp, Homo Sapiens
ccctgatgagctgtcctctctgcagactgctccgtaccctgtgctgtcctgcctcagatgcagagagagcacaagcctccctcctcatcctcagtgtgcctgtgttcttactaccatcacagctgaatgcaatgaaaggctatcctctgagaggagcagggtggagatgctaaagtggaggccccctcccattgctgatagatcctcatctggcatgcactccacccacccaccccattctctgctaccacatatcgtagccccattaaagaagaagtgacatggaaaaaacactgtgcccaccctagtccttttcttaaatttgggcagagatccagggtataggttaagagatttttaatttgccagatggtatgcctatgttgttaaatatacaatgaatctatggtatgatagcagtttctggataaacattacttgaggtcctaaaatgcagaagggaaaaagcagcttttgtcagatgcttactttgctttcatttcatctctaatattttggatggggaaccatccaaagcttctggccgcatgaaggtcaagtgtgccagtgtgcagctgggtttcttttccagaattaaaagtattttgggtggtgctgagggtcagaggaagaagtaaaaattgtgagaaaggagaaacatgggcttggggagaacccagaattggggacagaagacctggcactaagctatagcacttagcacctctgatcttgtttttcctcgtccgtaaaaggagattaacaatgcttttctgcccacctcttggggagaagggaataatttagttggtaaaaaaaaaacttttgaataataagcaactctgtctttatataagtagccaagcattattaattatccaccccatatcactggtagatacctgtattcaagctatgtggacataaaagcagtcacattttagaagtcatgaagttggtgctaataaacctaatctacagaaaaaaaaaaaaaaaaaaa

SEQ ID NO: 206646 - DNA, 1000 bp, Homo Sapiens
tactcctccctctaaatgcaattttgggccctcctgccatcttggagctaaaaatatgataaggcaggaagctctgtttcataagaactgccatcacttctccctccttgccccaggtggggttggcatggagtttgggtatccagtagaggcattgctttgcaacagcccactcagctctcctgcagggcctcaggtgagagccaggcttgggcgcccatgctgcccatgctgcacggacggtgtctgcttcaccatgctggtctagggcgaaaattgggtccagaagttcttcctctggaaccccgcagggaactgtttttaccatccagaatgacacttttcctgggctgactcactggtaagtggtgcactgagttggttcctcttgaagacagatgttttggttattcatttagctacatttagcagggaagtggcaggatttcattggggcacagtccctgattctttcgctaaggatctttaggaaggggtagacctcagtgtccaggggtctggtgattgtgactgtgtaagagaagcctgaggcttttggtcaccctagtcctgacaaaaagaaagggaaaatgttaacaaatgaggaaacatggagactttcattggagttttagcctggagcttcagccatccactgcctgacaaaggccagcatgacgtatgttggggttcgtggaagtatttgctgtccacctttcattccttcgggtagaactcaaattcttggagctagaagaactctccagaggatctactggatctgctttgttcagatccaaactttgagagccctcagtgttagagagttattttttaatctctcagacccttttgaaaatctttctcggccaggcacggtggctcacacctgtaatcccagcactttgggaggctaaggtgggcagatcacgaggtcaggagtctgagaccaacttggccaacatggtgaaaccctgtctctactaaaaaaaaaaaaaaa

SEQ ID NO: 206647 - DNA, 1000 bp, Homo Sapiens
tgcctactcagggaaatgacttaggttctcccaggtgctctgttgataaggatggaagcagaactactttgagacacaagcaacaattggaagagtttttttatatgaactgaaatagatctaagagagcctggttaacagtttcctttaataccagttcagattaaatggttactttaggaacctgtgttactgtgtgagcacccacagaaacaagcaaacttatttcctacaaaaaatgaggggataataaccgatcagagtcacagtcgtttcaatataaacccttccgaaagcaaaagcagggaccacatgagcacacaagaagccaaagtttgtcagtgatcttaataaattaagactgagtaacatcctgcctttagaaaaaaataaccccgaggtggagaccagggcaggggaggtggcggagaagcatcgggccagatcaaccgttaataacatgcttctgagctatgtggatgtataaatgaaaacacccccaactaggtattgtagaggctggaaaaagatgtgatgggattatacaggtgatgcatatttttgttttgagactcaacaatgtgctacaaatgtgatacttaaccctgaactgcatgtattggggattgttttttaaaaagaaaaaaaacaactttgaatcaataaattaacagtttttcacttgctggctcttcttgctgtaaatggtgactaagaggttgggacagaaatcttgacaactagtggaaaacttggataatcttcaaggaccatggagccttctgtttccttctgtttgcagaaaagcaacactgcctgggttgtgatcctttacaagtgactacttcagacacaattggccacctctttgtatcactggatgactgatgtatgatttatgtgctgctgcccttagagggaagaaaaatgccatgttaaatcctgttttcttaaataaaaatgttgaccataaaaaaaaaaaaaaaaaaaaaaaaaaaaa

SEQ ID NO: 206648 - DNA, 1000 bp, Homo Sapiens
gacctctgagatttaaggccatgccctggatcatggtgaacttaccaaagcaaacaatgcctgtgagatggtcctgcagcagccaaccagtgaactcttttggtgacatcctgttcttgttgtataactttatattcctataaatccattaaggccccaataaagtttgtctctaagcgctgtgttagatctatatgactacatctagtaaattgtgaattttaagtaaatattttataagaactcctatgtaaagcattactaaaattagtgttgaaatatgaccttcttcctacatttattcatttatttatgtctatttattcatttattttagtgaaaaatataaggaaagtagaggaaggttaaatccaaaaaagaattgtttccagtacactttctttaatttgctgtcagtttttgcatggaatctacatctttttatgctaatcctcatcctagtattttacatcttaactatttttttctgactgaaatggttgatgtgcttgttttttgtaattttctactttccttctaaaatgcttagtattgaacaaatagaatatcctaattaaaaacagtaataaatattatggtgaaaaaatacaagtaaaatgggaaaacattagatagcagctttcaatatttcatatagttcataaatgtttcaggaattacaaggttatagaaaaaaatttatagactataataatttccagggatataaaaaaataaagcttctacctttgaattgtaataataaaagataaaaagacttgaaagcatatattatatctgaaaatgtcaggtaaacttggcttataaattaaaatataaaataataatacaatttgttcaaataagtaattaaagcttacattgtaaaatgaatatttagagagattgtgaaacctgagtattttacccaatcctctgaaattagtccctagcatcagaattaaagaatctgaaaaaccaaaaaaaaaaaaaaaaaaaa

SEQ ID NO: 206649 - DNA, 765 bp, Homo Sapiens
ggggaagctgggggagcgggtgggtgttgggtggcgttgggggagctgcgcctcgcccagagcctcgcccggagcctcgcccggagccttccggggtgggggatagttgaggacctcatcgagggaggggttgggcggcggggaagggagcgagcgtggcgggggacccgaggcacgctctcgagccaacgagcgtgatgcgctcgagtgtgggcggggactgagggaagaagtgaaaatcggactgccaggcgacagttcctccgtttgaaatctcgccggctcctgagcgggccaccgggcccgggctgggggtctggcgggagaaataactttatttggactgagagctggagaatgagaataggacctgagagtatattgggctaaggaggagaggtgtttgagcccagatgagtcatggctggacgacccctccgcataggagatcagctggttctggaagaagattatgatgagacctacattcctagtgagcaagaaattcttgaatttgcccgggagattggtattgatcccatcaaggaaccagaactgatgtggctggcgcgagagggcatcgtggccccactgcctggagagtggaaaccatgccaggacatcacaggtgacatttactatttcaacttcgccaacgggcagtctatgtgggaccatccatgtgacgaacactatcggagcttggtgatccaagagcgggcaaagctgtcaacttctggggccattaataaaaaaaaaaaaaaa

SEQ ID NO: 206650 - DNA, 1000 bp, Homo Sapiens
ctctgtcatcacaaccaccagcatgcacacggtgggacccatccgcaggcggtactcagacaaatacaacgtgcccatttcgtcagcagatattgcgcagaaccaagaattttataagaacgcagaagttagaccaccatttacatatgcatctttaattaggcaggccattctcgaatctccagaaaagcagctaacactaaatgagatctataactggttcacacgaatgtttgcttacttccgacgcaacgcggccacgtggaagaatgcagtgcgtcataatcttagtcttcacaagtgttttgtgcgagtagaaaacgttaaaggggcagtatggacagtggatgaagtagaattccaaaaacgaaggccacaaaagatcagtggggtgccattcgcaccaacctctcactgcataagtgctttatcagagtagaggatgagtttgggtccttttggacagttgatgatgaagagtttaaacgtggccgccatattcaacgaggccgtcctcgcaaatactgccccgatgaaaactttgacgagcttgtcgcacataacccttcccttattaaaaacatgcagagcagccacgcctactgcacacctctcaatgcagctttacaggcttcaatggctgagaatagtatacctctatacactaccgcttccatgggaaatcccactctgggcaacttagccagcgcaatacgggaagagctgaacggggcaatggagcataccaacagcaacgagagtgacagcagtccaggcagatctcctatgcaagccgtgcatcctgtacacgtcaaagaagagcccctcgatccagaggaagctgaagggcccctgtccttagtgacaacagccaaccacagtccagattttgaccatgacagagattacgaagatgaaccagtaaacgaggacatggagtgactatcggggcgggccaaccccgagaatgaagattggaaaaaggaaaaaaaaaaaaaaa

SEQ ID NO: 206651 - DNA, 735 bp, Homo Sapiens
ggggaggtcgggagcgcgcccgtgagcccggagcagcggcagcgtcggtggcgtcgagagcgagcgggcccgggaacggcgcgggtggtagaggaggagccgcgggctcgattctctaaccatggcacaggtagagaaacgtggaggtttgctccggaaatcttcagcctccaaaaaaccactgaaggaaaaagtggtgctgatgtatgatgagatcttcatgacagaggaccccagtaagtgcagtcctcggttttgggaggagctctttctcatgaaggtgaatttagagtacctagaaggcaagctggaatctcttgatggtgaggagttaatgaagatcaaggacaatattaattgcttattccaacactgcatccaggctctgggagaggagcatccaattcgggttgtcaatgcattgcagaccctgtgcgcactcattcgaggagtccatcaaaagaataagtctacctctgggtttgacattatcaacatgctgatgggctttgacaaggcggagctgtgcatgaaggtgaggcataagctgcagatgtgcctgtggatggcagcttctgacagctgttcctggacactatcagcagacaaatgtactcaaagatttggactcagaaagatacagatgattgaatttggccttgcatttagatgtttttatttcacagatttgctttatctgaataaaggaaaaaaaaaaaaaaaaaaaaaaaaaaa

SEQ ID NO: 206652 - DNA, 1000 bp, Homo Sapiens
caacaaccagctcagtggttggaccaagaggcagctccaaagcagttcccaaagccaaacttgcaccaaaaaaaaggtcatggtcactgttcggtggtctgctgcccatctgatccactacagttttctgaatcctggtgaaaccattacatctgagaagtatgctcagcaaattggtaagatgcaccgaaaactgcaatacctgctgcctgcattggtcaacagaaagggcccaattcttctccacgacaacacctgactgcgtgtcgcacaaccagtgcttcaaaagttgaaggaattgggctacgaagttttgcctcatccaccatattcacctgacctttcgccaactgactaccacttctgctagcatcttgacaactttttgcagggaaaacacttcagcatggtgcagaaaatgctttccaagagttcgtcaaatcctgaagcacggatttttatgctacaggaataaacaaacatttctcattggcaaaaatgtgttgattgtaatggttcctgttttgattaatagaatatgttttagcgtagttacaatgatttaaaattcgcagtctggaaatttaatttttgcatcaacctaatatttctatggtaaatccttgcaaacatggaaacaatgcatttggcccagtgctttgtggttgtgtactctttttctttgtttttttaatagatggcattggccgggcatggtggctcatgcctgtaatcccagcattttgggagggtgaggtgggtggatcacctgaggtcaggagttcaagaccagcctgactaacatggtaaaaccccatctctactaaaaatacaaaaaaattagctaggcggggtggcgggcatctaattccagctacttcatgaggctgcgacaggagaatcatttgaactcgggaggcagaggttgcagtgagccgagatcacaccattgcattccagcctgggcgatgagcgaaactgtctcaaaaaaaaaaaaaaa

SEQ ID NO: 206653 - DNA, 1000 bp, Homo Sapiens
tggaacgccgggccttggcagattctggcccttcctggcccttcagtcgctgtcagaaaccccatctcatgctcggatgccccgagtgactgtggctcgcacctctccggaaacattggaaatctctcctctacgcgcggccacctgaaaccacaggagctcgggacacacgtgctttcgggagagaatgctgagagtctcttgccgactctctcttgacttgagttcttcgtgggtgcgtggttaagacgtagtgagaccagatgtattaactcaggccgggtgctggtggctcgcgcctgtaaccccaacactttgggaggccgaggccgtaggatccctcgaggaatcgcctaaccctggggaggttgaggttgcagtgagtgagccatagttgtgtcactgtgctccagtctgggcgaaagacagaatgaggccctgccacaggcaggcaggcaggcaggcaggcagaaagacaacagctgtattatgttcttctcagggtaggaagcaaaaataacagaatacagcacttaattaattttttttttcccttcggacggagtttcactcttggtgcccacgctggagtgcagtggcaccatctcggctcaccgcaacctcctgcctcagcctcctgattagctgggattacaggcatgggccaccgtgcctggctgatgtttgtacttttagtagagacggtgtttttccatgttggtcaggctggtctcccactcccaacctcaggtggtccgcctgccttagcctcccaaagtgctgggatgacaggcgtgagccaccgcgcccagcctctctctctctctctctctctctctctctctctctctctctcgctcgcttgcttgcttgctttcgtgctttcttgctttcccgttttcttgctttctttctttctttcgtttctttcatgcttgctttcttgcttgcttgcttgctttcgtgctaaaaaaaaaaaaaaaaaaaaaaaaaaaaaaaa

SEQ ID NO: 206654 - DNA, 1000 bp, Homo Sapiens
aggggcagagggctcacttcctcccacccagagcttttatgaatgacaatcagctcatgccaggtggggaccagggcatgatcccagcgcccagaccctgggcctgccccttgccaccaacctaactgtgagtgtaggtgcccccctcagtctcccttctgccgtaggaccaacaacacccaggtttggagattgaaagaaggggaggcctaggaaagccccgggctcaccccacccccattacagccaatgcttgagttggtacagatcagatgcgaaggccagtctacccttgggttccaggcctctgagtcagttatgtcactggattgtgaggaaggagggacaggggaccagcagagggggccggtgagggggctaagtggttcctcgccccaggaaggaagcagggcagaggaaaccacagctccctcccgatgccccacgcccgagctgctgccctttccttgaggatcatccgtcccctgtcctaggcccttcaggttccgttccctcctctccgagagcggcacagtaccactggctcttatgacccccatcctgactgcctctgtcactggctcagatgtggggactgctcaccttaatgcgccttcccgccccagccgtactgtgtgcagagggtgcaggagaagggtcctgccccaggcacatggctctttggcgtctcagctcctccccaggggactggctcgctcagtcttctgagccccttgggcaggtgttggggggcagggagttgccctccccctccctgggaagcaaccgaagaatgtttacatgccacacagaatgtaacagcccttgcccaccccttccagtcactgcatggcctctgcccaccctgtgcctgcccactcccctgacaccaacaccttgcaagtcgctgtcacaactagatcgggtctcagaagggaagtagccatcacaccattaaaaagcctgtggacctttcaaaaaaaaaaaaaaaaaaaaaaaa

SEQ ID NO: 206655 - DNA, 1000 bp, Homo Sapiens
gtgtgactcaagataggggtgtaggggtggccattccagaaagaccaattacatggttagagggtgcgggctttgagtgatgtgagaccagcctgacctctggggagggcatggggctggagactgatttcagtctcaaggcgtcctgtcaaggtcgctggaccccaaactcccctcaaaggcaaatttacacccatttactcagcagtgctcctaagcgcctgccaaatgcaacgccctttctgagatggggaaggtctctcctacaccctggaagaccatgaaagatgttgagggctgactgactttggctagtggatgggaagcctgggagagttcagagccaggctgagcctcatggagacaaatttgatcatgcgcatagaggtacctatctggtggagacagaaggaggcactacattcagcagcatcctaccagccggggccagagcaggcaagatggacaatgctccatcacctgaatgcgccaggctgtgtcctagagagaagcttccagaagcctcccaacttcattagcccctgcagagggatgatgactccagcctctgtaggttcctgcttgagaaaactcaatgctgccaggcgaacttactgtttgttccagccaaaacctggtgacagggagataggccctggaacccctctttgagcagcagttcctttagaaagcttgcaattgtgggccgggcatggtggctcacacctgtaatcccagcactttgagaggctgagttgggtggatcacttgtcataggagttcaagaccagcctggccaacatggcaaaaccctgtctctactaaaatacaaaaattagccaagcgtggtggtgcacgcctgtaatcccagctactcaggaggctgaggcaggagaatgacttgaacccaggaggcagaggttgtagtgagccaggatcgtgccattgcactgcagcctaggtgacagaacaagactccatcacaaaaaaaaaaaaaaaa

SEQ ID NO: 206656 - DNA, 1000 bp, Homo Sapiens
ttcaagcaaggtgtgcgctccgttgctggaaaactttccgtcttcgccaatggggtcatgacgtccattcaggatcgctacggttcttaatcctggtgccaggctgtccaacctggtaaaactccacttcagatggacctgagaccacatctggctgcgccaatgccccagctgctttgtgggcaggctctactagttggcgaggcacctgcacatttctgagtgtccatgtttcctttgagacatccccatttctatgtaggtgggattttgctttcatttctgatttaaattagctccttgtgtccttgctttatctttggggcatctttagttccaagaactggaagccagagctgcaggctcctcccacctctctccaggctggtgttgactgggcccggaaatcaatccccagcacttacttctcactgcaaaggagcaaaacaacaaaaacagcaagaccagaagtgcccagccccttgctgacagattgcttcgtgtgtgtccccacacaacacacacttaaagccatctgtcactctgtaagttattttgtacattctctactcttaaaagtgtcccccagtcagttcctttaacagacctgagcttctatgatgccaagggcgttcactgcgacctgggagtaaacagggtgtcgctgccctgtgagaggaagatggggccaccccagggctcccaatgcactcggaagtcagcagtaccaggagctcaggctgagaaggacagcagtgcggcttcaggacgaagctcagccagggagagggcgattataattgggtagttttgttaatatttttttatcttgtccttgatattccaaaagttacaggatagatgtaaatcaataaagtcatttggctgtgttttagacagctccagaatatattgttcagcgcagtaaaatatatttggaatttgatgaaccaaaaaaaaaaaaaaaaaaaaaaaaaaaaaaaaaaaaaaaaaaaaaaaa

SEQ ID NO: 206657 - DNA, 1000 bp, Homo Sapiens
atcctgaagctacctagaggctgccagccatcagtcacctcattagcatacaaaaaggcaacactttgcagattctaaggattttaggaattgtatgtcaggaagtcacaaacacaattcaccaaagaagctatacagatggcaaataagcatatgaaaagatgctcaacagcatttgccaataggcaactgcaagttaaaataatgagataccactacacacctaagagaatggctaaaatccaacacaatgacagtatcaattgctggtaatgctgacaacaggaacttccaaatcattatggtgggcatgcaaataatacagccacttgggaagacagtttctcagttcctcataaatcaaaacataatcttacaacgcaatccagcaatcttgctcccaggtatgtatacaactgatctaaaaaattacgtccacaaaaaaacctgcatgcacattacagaagctttattcataatcatcaaaaactggaagcaaccaagaatgtcttttaataggtgaataattaaactggtacctccataaaaggaacattaagtgataagaaagaaaccagctaacaagccatgaaagaacatggagaaaccttaatgcatactgctaagtgaaaagaagcagtctgtcacattgaccattttaatttcaggggggaaaaaagcaaattggctgcaggtggctcacccctgcaataccagcactttgagaggccaaggcgggaggatcacttgtccccaggaatttgagattggcctgagcaacacagtgagatcctgtctctacaaaataaaaatatttttaaagttagccaggcatggtggtgtgtgcctgtggtcccagctacttgggaggctgaggtgggaggattgcttaaacccaggaggtaaaggctgcagtgatattgtgccactgcactccagcctgggcaacagtgatacactgtctcaaaaaaaaaaaaaaaaaaaaaaaaaaaaaacatgt

SEQ ID NO: 206658 - DNA, 1000 bp, Homo Sapiens
aacacacactcacctgaattgaaggcatggcagaaaaaattgttttctagttccaattcagtttcatgcagctagtaatggtaatttgccacaaggaaggcctatgttagagaagagcaactgctttcttgatctccagggtctgtaacactaaaaaggacagcacatgctcatcacttattagatggagtcatcctgttaggttagaaggtatacttcacaccatcctgggcattatgctaagttgaataccgtacttagtagaaataacagatgtcatgcatgctgtggctgaatgtatcttcttccttgtttatttggccattcagtcctgacattgattcatgtatttattgagcctgcattaaatgccaagtgatatattagttgctggggatacagtgatgaacaagcatgtatggctccccctcatctcttacagtccagtagaaaaaacaaataatgaacaagtaaacaagcaaatgattgtaaattggaataagcactatgaaggaataaacggcatgctgtgtttggagggagagacccatagatgctcaaagatcatatctctgtaagatgacaatttaaattcaaaactgaagtatggccgggcgcaatggctcacacccataatccctgcactttgggaggccaaggtgggaggatcgcttgagctcaggagttggagccccacctgggcaacatagtgagaccatgtttccacgaaaagtaaaaaaaacaaaacaaaacaaaaaatagccagtagtcattctactggggatacagaaaaaaaaaaaaaattagccaggcgtgatgcctcacacctaaggtcccagctactcaggaggctgaggcaggagaatcaattgagcccccaggaggttgaggctgcagtgagctgtgatagcaccactgcactccaccctggtcaagaaagcaagaccctgtctcaaaagaaaagaaaacaaaagaaaagaaaagaaaaaaaaaaaaaaaa

SEQ ID NO: 206659 - DNA, 1000 bp, Homo Sapiens
aatacaattatatatatagctaacatcaggataggctggttgaggatttatatgaatctttgctagttttgcatgtttaaaattatttcaacataaaaaaattatatgggtcatgtagttttttgtgcagtttaattctaggcaccatagtttctgttttaatgggtgtattttcttctttcatggaattgggatagtctgttgtattaaaaacctattcatttttgtacattaagattcttctggccaggtgcaatggctcaagcctataatcccagtacttgggaacctgaggcgggcagatcacctgaggtcaggagttcaagaccagcatgtccaacatggtgaaaccccatctctactaaaaatacaaaaaaaattagccaggcatggtggcgcatgcctgtaatcccagctacttgggaggctgaggaggagactcgctggaactcaggaagcagaggttgcagtgagccaagactgcgccactgcactctggcctgagcaacagagggagactccatctcaaaaaaaaaaaagattatttctctaacttactggtttatcttttgtagcttatttcaggtgatttgttgtgtttgtctatagagtaaaataacatgtctaatgagttataatttaatgtccttccattcaatcactgtatttcaaatttattccaatattttggaataagcttccaatattttaacttaaatagggaaggtcatacttggtattttcctgacctcagctggaatgccttcatagtgttcacatgaacacatttggcctgagagagacttattatgccgagaatgtgtgtaaccctttttacttaggaattgtgggtggagtttttccccccgcccaagaatgattgttaatttccgtccatcattttcctttgattgttcttcatctcgaaaacaaataataaaataataaaataaataaaaaaaaaaaaaaaaaaaaaaaaaaaagaaaaaaaaaaaaaaaa

SEQ ID NO: 206660 - DNA, 1000 bp, Homo Sapiens
atttgttggggttcggaggacaccagggagtctgaggatgggagagccccagtttcggaggggccagggcagtgaacacaaagccccgcatgcccgggcaggttgggagagtccttctgcctgcgcagcctggctgggctggagcagggggatggcccttgctgcctggctcacgaaagccccctgtgggagagccccaggagcgcagggcatgtggggtgcaggaagcgactttccccacgccccggtgtaggtgaactcgatagaggagggaggagggtgacactcaccaggggtgctaattagtaaccacagtggcctcaaagaactcaaatgaaaggaagacttgcaagtctctcactttaagtccagagctagaaatgattaagcttagtgaagatgcagaattttcatagctagagagaagtcaacgcttggcttcaaaacttcaaaggatgggctgactctctttgaggagcactgcagctggtgactttaagttacagccagtgctcattgaccactctgaaaatctcagggcccttaagaattatgcaaaatctattctttctgtgctctagaaatggaacatcactgtctgggtgacagcacatctgttaatagcatggtttactgaatattttaatcccactattgagaactgctcagaaaaaaaaaaaccgattcttttaaaatgattgttggttggccaggcatagtggctcatacttgtaatccctgcactttgggaggccgaggatcacctgaggtcaggagttcaagaccagcctggccaaaatgatgaaaccccatctctaataaaaatacaaaaaaattagccaggcatggtggtagtacctgtaatttcagctactcgggaggctgaggcagaagaatggcttgaaccctggaggcagaggttgcagtgagccgagaccgcaccactgtactccagcctgggcaacaagagcgaaactatgtcaaaaaaaaaaaaaaaaaa

SEQ ID NO: 206661 - DNA, 1000 bp, Homo Sapiens
gagccactgtgcctcgctgagtcaccttttttacataaacaacttctataatacatagtccagagtttccggttttaattccataaagtggatcaagaaactgagtatacaacttaggaatttttcctccccatcttttacctaattctatagctctttttctttctttctttttttttttaagcagctcatctgtttgtttcctaaacattctacttatcagtataaaaataaaacttattatttacataataagtaattagcattactgagttacagtaggaagttcaagtaacccaagcagacccgggagcatatactgctagttgttggtaaggatgcactcagctggtgggggcagaggcagagggaggctggaaagtagcctacaatctctgagcgttcttcctgccatgagtggccatcagtgtgtttgacagcaggagtagagggcgttggttaatctggagaggcagttaaatggagatgggttaagagatcttggtacagtcatgggcccgagtgtctttaaggctccaaggagtcaagccatcacagtgagccacggttatattggttggcatgaggaatgaggattttccatctgttggctatcaagtcactgagaggaggttgaacttttttattttgtagtcttctgagttgacagagcagaagcttcgtgcctgtttagagggtagtataaatgagcacagtgcacattgtccccacacacctgaattttcagtcactggaggaacagaagaaaagtccagtcttctcatgagctgtctggcctgtgatacttgggctgtgatcctctagagccagcttggactcacatcattctatggggttgaagacaactcattccctctgaggagccttgtacatacaagccttttatttataacttattttgtattgaaacttttaaacaatactgaagaaaaaaaaaaaaaaaaaaaaaaaaaaaaaaaaaaaaaaaaaaaaaaaaaaa

SEQ ID NO: 206662 - DNA, 1000 bp, Homo Sapiens
tttttttttagcaaagattctgcactggaacgtagacagttggaaacagtactacctacctagaggttatgtgttttctctttctccccgctttcacctctttctttcccaattcaaaacagccaagtgagccctgttctggtattttgaatcattagagaaaagaaagggagtggctgttttgagttgtcctttctttgcagaaaggagaaaatgtgattgtgttttttttttaccagcctacttctaagtgtcactgcctggtttttctctttttcaaggattagaactaagaggacacaccagcatcggagtgtattaagcccctgaaacacatggtagctagggactgaacacaggaaccgtatgacagcagcacaaacccccaaaggatgttcctgccttgtgggcccctgagccccttgggagactgagaatcatgaccagattcatccagaactgctgcagtgttaagtgaaaatcctctgtagttgttctgcagaggaaccttccttccattagaaaatttctgctcaatacagaatggtccacatcacccaaagtgcactgttggagatgctgtgaaattaaaacctctttgtacctgagacatctagattcacctcaggaggcctgaaggaaatgtgtaacttgtgggaaagaactagacaaccatttaggaattctctagatatactcagcctaacccagtggcttaacacaaggagattggctttgatctttttttcttgtggcatcttccagcaagttagaagtctcatgggataagactgcagttcccctggttcaatagctggaacagtgattttaaatgtccctttttctggatcccttgtaaacatgaaatcattccatggatggctgccttataattttgtctctttccactttaattgtgaatggttaaaaaaatgctgttttctgatattaaatttttattagtgcataccaaaaaaaaaaaaaaaaaaaaaaaaaaaaa

SEQ ID NO: 206663 - DNA, 1000 bp, Homo Sapiens
gctctgctctgtgcctggagactgagcatttatttaccacagacgccacacgaagcttttcactccagcgtggttggcaatgcagattccttttttaactgttagtttttaacatggggtgggagggaaggaacaccactgtcctagctgtgttctgactctgcagtgaagacactgcatgttgttttcactactgtacacttgacctacacatgcaagcaaaaggtggaatgtttaacataccataatcagctcaggggatttgccaatctgaaataaagtgtgctagggaagtgtgtccttcaaatcaagggtactaaagtccctttcgctgcagtgtgtgagaggtatgttgtgtatggctgtatggatgtgtgtttgcgtgcatgtttgtgcatgtatggctgtgcatgttctgtccatccatgtgggaaaggattagaagtgtaagttcttatttattgttctagaatgtgacatagtgagcagccacacttgggggaggggaaggtaggtgaagctgtaagattgctccagatgccttaaactatgcacaaagctaagtgaccaaacttctcattttgatttgaaaagtgcattgttttcttgtcccccctcccccactttgatgaaacattaccctttggcggaccttttgatgtgagtagatgttttctaggataaaatttaaggactaattttagacttaaaacattccacttttgtaagttgttttcagtggtcttatgtagagcaagcacaactgtaacctagtttaagagaaacggtgctttcttttagttaccttctatttcccttgttactgtttaagactgttcattatgtttacagtttgttgcaacagccatcttgggagagaacttgagtgtaaagccatgtgtgaaggcttgggcacactcgtttaaacacgtgcctgttgcttcaccttctgattgacaaataaaaccggtctttgctcaaaaaaaaaaaaaaaaaaaaa

SEQ ID NO: 206664 - DNA, 1000 bp, Homo Sapiens
aagtttcttaaactgtaaaatagcaattcttgttttaatacaaaaaacattatattcaatactgtgtccttaaatgatatttcttcagaatgaaaggaattcagattatttctaggagtctatgaatgttttctttactgcctgtcatactttgtttactgaagtattttgtatggtcatttaaattaaccctctcagttaattgtcccctgtaaacgatgtgtgcagtgtaaattgtgtaattatgcatatatatatttataccaccatggacttactttcacactggaaatttgtggtgtttttccacagaggaagccttttaacagcagaaaattatccggtagcaaattgtcttagggaaattactacactgttgtaacaaaagggctggcaagtgactaaatgttcattaccttttggttagcgttgctatcactgtagctgtgctgccttaacattgagagttgagttgtggacttagtcattgagtgaatgttgaactttcttccttgaatcagcgttagagtcaaatgtgggtttaatgtgaatgctaaatgaatatgcaacatagtttcaaatggaacatagaaatttcacttttgaaaataataaacccacaacctaattgcatggttttgggctgaccgtcctgtctcattcatgattttactccctgcccagcttgcagatacatgcatttgaattttagtagtctgtcatatttaaaatcccacatatgtgagttaaatatgcaataaagaatacgccttgctgattagccacacccaggcaatttaatatccatggtcttctataatgtttataccacattgtaaatattcagagaacttgttttaaagtttatgctttctgattctgtgattttcaaaagaggaatttttttggaaattaaggactatcgtttgataattatatatgtaattaagatttagccaagcattaaattaatttttaaatataaaaaaaaaaaaaaaaa

SEQ ID NO: 206665 - DNA, 1000 bp, Homo Sapiens
tgataggtattttaggttggttccacatcttggctgttgtgaataatgctgcactaaacagggatgcagttatcttttgggcatgtgattttatttcctttggatatatacccagaagggagattgccagatcatacggtagttctaattttaagtttttgaggaacctccatactattttccataaaggctataactagtttacattcccatcaacagtgtgtaagtgttcccttttctccacatactcaccagcacttactgtcttttgtcttttcgataatagtcactctaacttaagtgagatgacatactactttttgtttgttttcttataatgtatacaaaattgtaggataccgatacatgtatatcacatacatgcacaaacatgcacacctcaagatacatgcttaaaactttttagtgaatgatatgcaaagtatagagacaactcttttaaccaaatacttgttccccaccttatcaccacccccaagtttcttctctatagaaattttgaaggtttcactggatctaggagactgttgaccacctgattgagtttttaggaattagaaacatcaggggttgataataaggaacatttgacagcttctcccaacataggtggaaaggaaggttgtatcaagcacctactaggtggtaggtatacgtttcatctcattgacttatttctgtttaggagcacaaaggccaaggtggatgttctcacatctggactaatcctagaatttgattttaggacagccaggagctattcagtgagttcaattcaacacacacacacacacacacgttgaaactaacttttcagctgaccctgtcctggtagctggagatagaaagatgaatcatacccagaccacatcctagagacactctcatttgataccactcatagtggtatcagaactcttcatactactcttactttaaaggcatttctgttccctgctatgcaaaaaaaaaaaaaaaa

SEQ ID NO: 206666 - DNA, 1000 bp, Homo Sapiens
gtcatttccaaccttagcttcaaggcagaactggaattagtttcaaaataaaccttgatcctaggcatttagttctagaagatcctacaagcacgtctgctgtaactctatgtatgttttctgtaaaatcacatacctataaaataaaaagaaaaaaatcacacatctataatattataagagagcttatgggaaaaatagaattgggccaatgcaactgcaactttttgaccaaaatatgacaaaaaacaattattggtgcttgggaagatgctttggactacctagacaggcagctcagggtgatgtgatgctgcaaatgtacaaagagccgtcttcttttttttttttttttttgagacggagtcttgttctgtggccaggctggagtgcaatggcgcgatctcggctcactgcatcctccgcctcccgggttcaagtcattctcgtgcctcagcctcctgagtagctgggactacaggcacacgccaccatgccctgccaatttttgtatttttagtagagacggggtttcaccatgttggccaggatggtctcgatctcttgaccttgtgatccgctggcctcagcctcccaaagtgctgggattataggcgtgagccaccgcgccgggctacaaagagccttctaatgtgagcagagctggcagttaccgaggaagcccaggtggaggtggagttctgaaacagccactgtggtgaaggagtgtgtgcagctgggactgtgggggaggagggttggagtgcaggacttgcttctcccctaacattttgttgtgaaaaatttcaaaaatactgaaacattgaagaaattgtatagtgaacacctttgtatctaccaccttgattctctataggtataggcactcaattttaataaaaaaaaaaatagctgaaagggctttttctttcctgctgaagattataattctaaaaaataaaaaaaaaaaaaaaaaaaaaaaaaaaaaaaaaaaaaaaaa

SEQ ID NO: 206667 - DNA, 1000 bp, Homo Sapiens
gttacagtaatgttccagcatctcataatctatcctggggaattcagctgcctcccagggtgaatacaggtattcctgatgacagtctgcctctatcttacagagcagcttgttgctatataccattgaaaagccttcagagctgagaggtactactaaccaataacctgcttggctcaaagggccagcaccttctctctaaagcccaagaggagtttgaggaaaactaggtgtctgtgttcactccaggctgaagttacaggtctgagcaaataaggtgtataaaaaatggaatctgtcttggaggacatcagaaggtgaattttccaagttcttggacaacctagctgttgaaaagctttctgggtttggggggtatttcagatgtaccttaaagtgttagcagacacagattaagacactgggagccaatgaaacagcagttgagggtttgctgtgtatcacatttctgtattttatcacccccttcctgcaacattatttatctggaatctacctgcccttttgttttttagatacaagggcttggttttgttacccaggctggtttcaaggccatagctttaagagatcctctcaccacagatttccaaagtgctgggattgcaggtgtgattcatggcacccagactttgctgcctttcttacatgatccaggcccagaacccaaactcaggcactgtatagatgaccactttcgtaaactactgacctagcttgttgccaattgttgattgaacttcccataactccacttcgtgtctgttcctctgtatacagccaccttctgttcccgtcatgagcctttaggtctccatttgcatattgcaaatactatgttccatgtaggtagctcattcagggccttgctcttcacttcaaaaaaggttcccttgaggactggctgtcaatttgtgttgctgtgttggttgttgatgaaaataataaaatgattgattacataaaaaaaaaaaaaaaa

SEQ ID NO: 206668 - DNA, 1000 bp, Homo Sapiens
atgagaagcaggaaagaagtcagtgggtggctgagttgtgtccaggttttgcgtggccatggaaaatcaggtgaaggacattaaatatcttgcagtggcttctccattaggagcatgaaatgaggaaaggggctgtcctcacaggccagccaagagggatgcctatgccaaacagaaagactgacagtaaacagaatccaggatgacatgactgaggtatggtgtgcagggcatggcccagggaggagggtagataagtaagcctgggtgcaccttcagaggaagaaataacagaggctgcaggcgagagagttacaaggaaggaggagcaggaagacacgagaaaaattcagataaactcaacatctccagcctgggggaaacgtgagagggtggtatgaagatacacacgatgcatgttgcttagtgaaagcagccagtcggaaaaggctacgtagtgaatgaccccaactatgacattctgaaaaaggcaaaactatggagacaggataaagatcagtggttgccagtgaggcaggagaatagggtctgggggcagggagcctaaggctgattcatgctgacttcatgaacggaatcaaaaggaaaaccctaaatttccatgcccacgtaacaaaaggatcagaggctactccctttgcaactccccccaactttctgtgttgcagatgaaagatggaaagtgcctcggattggtcccctcctgcaaccagtcagacatctgcatagagcgtaactttgtaacttcacttcagcctctgcttggtcaccttccacaaccaatcagactggtcatgggccactatttcatagggtgtaaaccaagtgaccaatgggaaacatctagagggtatttaaaccccagaaaattctgcgaccagtgcttttgagccttgcttgggcctgctcccactctgtgaagtgcatttttgtttcaatacagctatgcttttgttgcttctttaaaaaaaaaaaaaaa

SEQ ID NO: 206669 - DNA, 915 bp, Homo Sapiens
gttcatttattggagtgagctgcagctctaagaagacctgttcttttgaatggagagtagcatcaggaaccaggatgtgggtgcgaggcgtgctcctggctgttgcagattgctgcacccgggagctcttagtggacagagctagaggatatgtgcacgtacttccatctctctctctgtctccgattttagcccagcaccacagggtacgttccagtttttctctctttccatagctgtaaggccctttctgggaatggttctcattctccttaatctattattgggtcagttttcctgcatgtccccagcctcccatcactgccacccactccccacagagatgccctgctcatccgactggggctttgactcccacactgtgtacccctcttgtgtggacgccctgctgccaaaaccttcagcaaacagctttccaaatggaagttgtcactgtcagggcctttacaatcagcaacagcaaaatctacatgctgctgagggtcctgcctcattaagatgcaataaatatgtaagtacataaaaacagcaatagaagaaacgtaatgctttattctcaaatatgatgtctacatagaaaagccaaaattattaagaatagtaagaattcacccagcactttgggaggccgaggcgggtggatcatgaggtcaggagatcgagaccatcctggctaacaaggtgaaaccccgtctctactaaagatacaaaaaattggccgggcgtggtggcgggcgcctgtggtcccagctactggggaggctgaggcaggagaatggcgtgaacccgggaagcggagcttgcagtgagccgagattgcgccactgcagtccgcagtccagcctgggcgacagagcgagactccgtctcaaaaaaaaaaaaaaaaaaaaaaaa

SEQ ID NO: 206670 - DNA, 1000 bp, Homo Sapiens
tccaggatccactcagcgtcaggcccaatggaaatagtgaagcagtgattttccctcccctgcctctccatagcctggtcttttgccctctcctttgctcttctcttcccccatagccacctcaaatacctgcagcctgatatcttcatcccttcatccagaccttttctctcctagtggtattgcaaactgaaagtggacaaagacttaaggtaaacctgctcctcatggtggaatgcttccaaatgctggaaggaggactttagggcagagttcactaaggaggcttgtgcttatagatcagtgggcctgaaagaagtttctctaggttctggttgtgtgctgtacgaggtgtaggtagtaataatactcttgtcagccacagtgaagccccaagctagccgggataggggactgaccttgtacaggcagcatggagaaactaagacagagtgtcctgcccaagtgatggcactggggagcagtcactcaggtttatttccaccagggcccaagaaaaaaagaaatgaggcaacctaaaattccatcaagatagataccaatatccaaggtgcttggtcttagcggtgtgggacccacgttaaggctcttggtgggaaggtgggaggtgttttcagcatgagatagggttcaggctgtgaatcagagtctagagcctaagataaaagaagataccagggctgggccacggtggctttcgcctgtaatcctagcactttgggaggccaaggcaggcagactgcctgagctcaggagttcgagactagcctgagcaacacggtgaaaccctgtctctactaaaatacaaaaaagtagccaggtgtggcggcatgcacctgtagtcccagctactcgagaggctgaggcaggagaattgcttgaacccgggaggcggaggttgcagtgagtggagatcgcgccactgcactctagcctgggtgacagagcgagactccttctccaaaaaaaaaaaaaaaaa

SEQ ID NO: 206671 - DNA, 1000 bp, Homo Sapiens
ccttccaagtgcctgtctgtgcctgggagaacagagcaggagcgtcgtgcggtccaccgcgcagtgcatggcgattccaggcgctgaacaactcccctggacccttgggcctgcatctgactcccagctgcagagtcagaagctgagtccaggcaactgcttggccactcccgatcgctcctccctggacacccggttaccaaagtcagcaaagaagatgcggtaatcgccgcctgatctccacatggtgaacacaacactcccaccaacacctccttgactggtcggtcttcagcaccgggggtgggcaggcaggtgttctgtgttgacgagaattgcacaggctaaacacaaacacggaaccagagtgagaacacctcactcacggcagcccaggctgctccctaccaggtgacggagcgcgccggggctgtgggtgccaggggctgagtgctagggactcgtcatgagtggggatccccacgttcctgtcactgctgtcaaacagaaggtaaacagtcttatgaatgtatttccttaggaaaacttgtaaaaacttttattaggatatctatttaatactgaactttggcctactttgtgatagactataaacaaattgaggaaatcactatttctcacttctgtattttctcaaaaataattttgttacagagttcaatatactgtgtaccattgatcttctattgtgaaagcaaagaatttcatcaaaatattttaaattatgagtgaaaattgtgtatgttaattttgcagctataatattaatcaaattttgtgtaattctaatcacaaaatgacgtgccttaagtgcccctccagctgtgggttggcagtgtccagacagggagggcccatcaccgaaatcctgaacgattactagaccaattctattaaaaacatttcaaggcattttgggtgcaaactttgtttataaaagagaaatatccacctatgagaatttaaaaaaaaaaaaaaa

SEQ ID NO: 206672 - DNA, 1000 bp, Homo Sapiens
ggcatggtgcagtacctgtgcctaggattggttttaaatttgtaaataattttccatttgggttagtggatgtgaacagggctagggaagtccttcccacagcctgcgcttgcctccctgcctcatctctattctcattccactatgccccaagccctggtggtctggccctttctttttcctcctatcctcagggacctgtgctgctctgccctcatgtcccacttggttgtttagttgaggcactttataatttttctcttgtcttgtgttcctttctgctttatttccctgctgtgtcctgtccttagcagctcaaccccatcctttgccagctcctcctatcccgtgggcactggccaagctttagggaggctcctggtctgggaagtaaagagtaaacctggggcagtgggtcaggccagtagttacactcttaggtcactgtagtctgtgtaaccttcactgcatccttgccccattcagcccggcctttcatgatgcaggagagcagggatcccgcagtacatggcgccagcactggagttggtgagcatgtgctctctcttgagattaggagcttccttactgctcctctgggtgatccaagtgtagtgggaccccctactagggttaggaagtggacactaacatctgtgcaggtgttgacttgaaaaataaagtgttgattggctagaactgctgcctccctgactgtgagctgccttccacaccctgcactgcactgtgttctctcctcacccttaacctgcttcactccagtctgttctggctgtttattaccttgttgcaaaacagggccgaagcaaggattaccttgacaaccctagcttctccttagccatcttccttgacagtgtgatctgtttagtgagatttagcatgtgtgaataaagtatatgcaggagaaaaaaaaaaaaaaaaaaaaaaaaaaaaaaaaaaaaaaaaaaaaaaaaaaaaaaaaaaaaaaaaaaaaaaa

SEQ ID NO: 206673 - DNA, 1000 bp, Homo Sapiens
agatagattctgacattattgttgtgttctgcaccaaacaagtcagagaatagttcagctccttctttctctgatatgagaaaaaaaatcattataagtcaactcaaagactatgatttttcttgtgtcacccaggttgatcacctaatgggcaaaaaatcattttccctcaagcaaatagaactaggaatgtaaaccagcaaccttcattctggtgactgctactcagaatttttaaggtttatgtttggcctcaggaaatataatctaggcttatgtatatttgctgtagacaagaagatgtgattccctgttgcaagcataatgtgtcataaaagtcacattttaacttaatcatcagtaacatacttagtgtttagtaattaaaaaaaacaataattttagaaatctaagctagaaaattctagtcactgatggtgggaaaatgtctataataattacagcaatttctagatgtcagtattataaaggagggattgctgtggcctgtactgctagagaaggcttcagacatgaggttttaggatcccaaaggatgaagagaattatagaagctggaacagaggaggaaaaggcccagcctgattaaaggcagcaactaagaatgtgtttcaattagagcaaagggctcacgtcagggggtgatgggaataaaattggatggtaatgtaggatcctttcacagagtgccaggctaaagagctgaactttgtggtggaagagacagaccccctatgtgctctgtagacacctgtgatgaagtagaactcatgaggatatgaagagaaacatttgtaatttgagtgattaaactaggaacgaaagaggaggggagaaataggaagagagaatcaccggccctgttgactgatttgagctgggaatgaagaagaaaacactgcaggtgtgggcaccaatgtttgaaacccccacagtgtgagtctcaactctgtgtgagagaaaaaaaaaaaaaaaaaaa

SEQ ID NO: 206674 - DNA, 1000 bp, Homo Sapiens
agcaacacctaaacaaagggagttgatgcctccgaacagagtaatgtcgctggagacactaagcatcgtcggcccctggcaggagctccctaaatatgtgttggatggatggaagaaaggatggatagttcagagtacttcagccttgattcctccgcaacagacacctgaaacttgaccctacattggttcttggccatcgtgatcttccttggacagaatcacctttcagctccggtcatcagactttcccagggccctcagaaagcccttcagagttgttactcacaggcaggctgagggattccttacggggtctgcagctctcctcacctcatccacaagtaggaccgtggcctgttcctcactactgccccaggatcactctgttcccagcccagtccagcaatcacttgtctagctttctggaaccttgagtactttcttgaaccatgagtcctgtgaccaccctagcagctctaaccctcccttatctgaaaggaagtgtgaggtgaccttgcaggtcccagagttgattgaagaccccatccagaaagaaggcaccctgtgggagagattgcaaggcctaggtctgaatccggaagcttccaccccatggagaagggctggcaccagcctggggctggcagtggagctgagctttggagccaaggactgtactgcagtgcagggagagtgaggccagaaaggctgagacaactcagggaaagaaaacctcccttctggctaatagtcaagcaccgcctgagtagaccaacactctcctgtccacaggggcagcagatgaagacacaaccagagaggactaacaggccccctcagctctcagtcagagggcagagcaacacagaatagacattaaaggaacagactttgaggccaggcagccttgggtgtgcatctgtccctactaagccatgtgacattaaacaagtgagtccacctctccaaaaaaaaaaaaaaaaaaaaaaaaaaaaaa

SEQ ID NO: 206675 - DNA, 1000 bp, Homo Sapiens
caaaggagggaaagtggttggccgcagcggctcacacctgtaatcccagctctttgggaggctggggtgggaggatcactggagcccaggagttcaagacaagtctgggcaagatagcgagaccctcatctctttgaaaaatatatatatatacttttttttttaaaggagagaaaatgcttaggttgcaaatggagagtattgaacatggtgatgtaaaaaacttctgcaaaacttgttctgtagctcctgggtcaggtctatgccattttttcttatatctgctcacacagtacagaaatgactaaaattttgggtctgggctgttatatcactttgtgttaagttatttgtagtagctaatgtgctaacttatatatgtgttctttctgttttttggattttaccttttgttttggcataacttatctatatttttgtttacattattttaaaaatatcagtaactgtaataatataaaattgaagttgtattgttgacaatacctctagtttttaaggtcatctgtcacataatttaagtgcaccagttcctaatgtataaagttctctctctctctctctcaataaacaatgcagaaaatactttcctttctcataacaacttgattaaaatactgctcttgagggggtggtgaaagcccaaggtgagccctatatattaattcaaagtcaagatttgagctttattgaaaatgagccacagccaggtgcggagcccaaggcaggcagatcacctaaagtcgagagttcgagaccagcctggccaacatggcaaaaccccctctctactaaaaatacacaaattagccaggcatgatggtgggcacctgtaatcccagctactcaggggaggctgaggcagggagaattgcttgaaccttggaggcggaggctgcagtgagctgagatcgtgccactgcactccagcctgggcgacagagcacgactctgtctcaaaaaaaaaaaaaaaaaaaaa

SEQ ID NO: 206676 - DNA, 1000 bp, Homo Sapiens
atttgaatttgttttattgtagatttgttactggagcactagtgaagtcagtaacctaactgcaatttgtttagtaatggtttaagtgatgtgtaagtttaaaattaagaaagccattttgtacattataatggtagtagtaaatgtttatttgttgcacctcagtggttgctagctactgatggtgcatatattagttttaacttccatgaaaggaagatgagatatgggcttgtttgcttcccaagtagaaatctggggtttactcagtctctttgcagagaagcataactgcatggatggtaacccactgaaagataggtgtcattattactgtttatgtcttcattttttaacttaatgtaatattgttgttcagatcattacatgtaatttttgacaatttcaagtctcagaatttcctaaatgaattgtgaaattacattacgcagcagtaaccagtatgaagacaaaaataatgcaagaagcattatgagaagatgaggattctaaataagtatagatacctaattaagataataccttgggccgggcactgtggctcacgcctgtaatcccagcaccttgggaggccaaagtgggcggatcacctgaggtgaaagaccagcccggccaacgtggtgaaaccccatctctactaaaaaaaaaaaaaatacaaaaattagccaggcatggtggcgggcacctgtagtcccagctactcgggaggctgaggcaggagaattgcttgaacccgggagacggaggttgctgtaagccaagatcacaccattgcactccagcctgggcgacaagagcaaaactctgtctcaaaaaaaaaaaaaaaaagataataccttggctgggcatggtgactcttgcctgtactcccagcactttgagattacagaggcagaggtgggagtattgcttcaggccaggagatcaaaaccagcctaagcaacatagtaagactctttctacaaaaaaaaaaaaaaaa

SEQ ID NO: 206677 - DNA, 1000 bp, Homo Sapiens
gagataaatggaacagagtctacaaataaacattttataaagatgatccttcaatacatattctacagcccagttaaaatgtgagaggccatgatctacagacagccatttataaaggtggatcagggccggacacggtggctcaacgtctgtaatcccggcactgtgggaggccaaagcgggaggatcgcttgagcccaggagttcgagaccaacctggccaacatggtgagaccccatctttacaaaaaaatatatatatccaggcatagtggtgtgcacctgtggtcctgtggtcccagctactcaggaagctgaggcagttgaggctgcagtgagccacgttctggccactacactccagcctgggcatcaaagtgacaagaccaaaaaaaaaaaaaaatgtggattggaaggaggcaagaaagaagtcaggaaaagggtggaatgtaagtccctaaggacacaatcttactcacaattgtatctccaacatttggcataatgcctaatacgtaagtattttatgaattaattaaacgagaacacaagcctaaattaaggcaatggcaatggagaagaagaaaccaacttgagaaatatttaaaggtcattgtcaatggaacttagtgactttaatggttaattttatctatcaacttggctaggcgatgctacccatgttactcagtttttggtcaaacactagtctagttgttgctatgaattgtatttgttagatgtgattaacatttaaatcagcagactttgattaaagtacattaccctctataatgagggtgggccgcatccggtcagttcaaattaaaacgagacccttaagaagaagcaattcagcctccagactgcagcgtcaaatctccctgggtctccaggctgtttgtctgccctgcagatttcagacttgccagctcccagaataatgtgagccaattccttaaaataaatctctttctgcatatacaaaaaaaaaaaaaaa

SEQ ID NO: 206678 - DNA, 1000 bp, Homo Sapiens
taatataactcaactcttgaagagcttccgtttcataccagtttcatcaggtttatttgtaaagtactttgaatgtaactcttacatgctttgagaagaaaaaaaaaatcacataacaaaactggggtaatctggtccaaatctggtccacaagtgttgtacagtatgcatgtgttaccgctgggcttcgctgcaggctggactcaggtaacatgtgcccggtgtctgcccgctgagccgactgcagcaggcagctgtctagctgcccgggagactggtgccacagcatacctttgaactagagagccacactctccatccaagtgagcatctctgagcccacctggaacacctgcccggttccttccatcacccacgtctgaccaccttttctctgcaaaaccctttctttctgccctcttaaacttgtctggagaaaacaagagtgtgaaagccgagggcagaaatagagaagcagaggtgtactcctgctgtagaaagctgcggtcgggggcagaaagaaaactgtggggaggggaggcagctttcaaaacccctgagaagactgcagatgcttgcctggccactgcttctatcacagtctgcatctgcagggcaaggtggccccggcctctgatgacgctgcaggcagtgcagagggggcacgcctctatccattagaggagagctgaggtcggggcgcatcataatgagatcaaacttgccaaacagaagagagtttgttaccaggtttctacactcactaggaagtattttgtagctgtcatcttcctagagattctgtccgggagattctgtcagggatgcataaaaggtagttgaatgcagaagcaaagggtgtggactggatcattttatatctatcttctggatgaacaagcaagcttgacctagaaattggtcaaagagccgtgttcttcaagctgggttttaacttaccagaccccgggcacttccttaaaaaaaaaaaaaaaaaaaa

SEQ ID NO: 206679 - DNA, 1000 bp, Homo Sapiens
gtccaaagactacaagggcccactggacccccagagggtcaagatcgaggataaagttaacaagtccaaggtcatcctgaaagaacccggcctcgaggatttgggcacctactcagtcatagtcactgatgccgatgaagacatctccgcaagccacacgctaaccgaggaagagctggagaagctgaagaagctgagtcatgagatcagaaacccagtgatcaaactgatctccggctggaacattgacatcctggagcgaggggaggtgcggctttggctggaagtagaaaagttatctccagccgctgagctacatctaatcttcaacaacaaggagatcttcagctcgccgaaccgcaaaatcaattttgaccgagagaagggcctggtggaagtgatcatccagaacttgtctgaggaggacaaagggtcgtacaccgctcaactccaagatggaaaagccaaaaaccagattaccttgacactggtggatgacgattttgacaagcttctgaggaaggcagatgctaagagaagggactggaagagaaaacagggtccctattttgagcggccgttgcagtggaaggtcacggaggactgccaagtgcagctgacgtgcaaggtgaccaacaccaagaaggagactcgctttcagtggttcttccagagggcagagatgccagatggtcagtatgacccagagacgggaacgggacttctctgcattgaagaggcaagtgtggctccagcttcagggctcactttctcctttggctgcaagccagggagggccaagagctctgggctgggagtcagggcagggccgaggctaggttgatgcaagtgaggccctgagcacaaaatttaagaggcaccaaaaaactcagtaatcaagataaataatattgtatgcaatattctaaaaaatcaaaattaatgcaaaaaaactattaaagcccccaaattttcaatagagaaaaaaaaaaaaaaaaaa

SEQ ID NO: 206680 - DNA, 1000 bp, Homo Sapiens
taaatgcatgtggtattcctatttccattaactctgtgtgtggtgtcgctgtaggagcgtcaggaagcagagaaaatgttcaagggcaaacggggtgcacagcttgcaaaggatattgccaggagaagcaaaacgtaagacacggatatccaacttaactctacttcaccttcagaaacatgatctgatctgtctggcagttcgtctcctacaaaattaaccaaaaactctgacatattaatgtggtattaaatttgagtgcttatagtccatgtacatcaatggtccacacatcacaagaaatttctaccagcttagcagagcaaatatttcagtagtcagtcttcatgtgataccatgtacatcctattttctatataggaagatgaactggatggtgtttctgaaggagagagttcttgtatcagtttgttaacaaagataagatactacactggttgaattactttcaaaagcttttgaaagtaaaagagaagcaacttctgttggtctaggtctaacagttatgttcttccccctcttaagttttaatccaggtgctggtttgccaactgacaaaaagaaaggtgggccatctccaggggatgtagaagcaatcaagaatgccatagcaaatgcttcaactctggctgaagtggagaggctgaaggggttgctgcagtctggtcagatccctggcagagaacgcagatcagggcccactgatgatggtgaagaagagatggaagaagacacagtcacaaacgggtcctgagcagtgaggcagatgtataataataggccctcttggaacaagtcttgcttttcgaacatggtataatagccttgtttgtgttagcaaagtggaatctatcagcattgttgaaatgcttaagactgctgctgataattttgtaatataagttttgaaatctaaatgtcaattttctacaaattataaaaataaactccactcactatgctaaaaaaaaaaaaaaaa

SEQ ID NO: 206681 - DNA, 1000 bp, Homo Sapiens
ggggcagtagaaatatggtcattttgggaagcagccaacagcaaattaaagtacactggacgcaaagagggcaatgtagcattaaaaatgaactccactgccaacagcagatgaacagtgtttgatacaaaaggtctctttttagtactaatcattgatttggggttgcttttgatgatatttacagtacatgaaaagttgccaccaaaatctgaggggaagagttaagataactatgatgtttttgcatctcagaaaaaaataccttcttactaaacaaaatataacatttaaaaattttgttaacatctttgttgaaatataatttacataccataaagttcggccatttaaagtccacaaatcaatggttttactatattcacagggttatgcagtcaccataagctaattttagaacatttggttcaaatatttaaaaagattattttctacatactcaaatctctgttccactcatttttttcagtcccacaactttttctatatccaaaaatccaggcatctttacgggaacattttgtttccattgaagtaaataacaagactgggaaaagagtgaagcaaagtggctctaaattctgtgttaccaacaggcattaaacatgattcatcaactgactgatgaatgtatgaaccactttttgtttgtccattcatcagttcatggacatttgggttgtttctaccttttgtctatttaaataatggtactataaacatttgtgtacaagctttgtgtgaacaggctttcaattagtattttaggagtggagttgtggggtcgtatgttaactctatgtttaacattttcaaaaaccgtcaaactgatttccaaaggaactgtaccgtttttacatatctgccagcaatatgagtttcaatttctctgtgcctttagttacaataacaatataacagcccttgctattgtcttttaaaaaaaatacagccactctaaagaaaaaaaaaaaaaaaa

SEQ ID NO: 206682 - DNA, 1000 bp, Homo Sapiens
gatcgcgccactgcactccagcctgggcaatagagtgagactttgtctcaaataataataataataatcagaccaagtataatgaaattaaaatttattttgcaaataaattggtcctactacaatttatccttcatagaaatgtggaaactgaagataaaaaaaattaggtttcagaagaaaactatactacacctgttattagattctagccctaaacattgtttttgaggtttttattatttacctgcaatttggtctaaattctgaattatttcctgactacaagtatccaaggaataaatgggttttctttttctttatgatagttttagttggcttctaatgcagcaacaatttttattgtaatcctgtgtgcattctattcctactattcaaattattaatgttatagatctttcattgtagtacttctgaattaaccaaaatcacagtattctgaagatgattctacaaagcctgctgtttctacaaaggctgctgatgatttctacaaagcctgctgtagtgttgctgtggcctctgcttaaaaaagtagaaaacacattgatgcagcatgttcaccccaacctccctgcctaaaggctcagggaccatcttggaagaggaaggcgcgtgagattgtaagagccgaattagggggatggagtgtggagaataaggacacttcatcttggatgctcacctgccaaattgacttctgatgaaagccagctccagaaatgtgcctacagttactactttcacctaaaccctgcccttagtcaaatccttctcttcttctaagcaatcaacttcaattccttgtataacccacagtataaaagggcttttataccattctatcctattgcatgtaagccttgggtctgggaggtaacagtgtgggattccaccatctcatctccctgccacccaaacatgcctgctcttctttaagcaatattaaatgtttgtacttcagaaaaaaaaaaaaaaa

SEQ ID NO: 206683 - DNA, 1000 bp, Homo Sapiens
gagcacggagtgggcttcaggaagagggacgtcctgggctacagcaagccaccgggggccctgcagctcatgcagcagctcaaggccctgctggaccccaagggcatcctcaacccctacaagacgctgcccagccaggcctgacggccactcctgctgctgccaaggcccactgggggtcggcgggtggctctcgggcgggggtgttgcggtggctctgagggatgagccggcagcgggcaggggaccaggcacctggttgaagggactgggagcccgcactggggaactgccggacgcaggccctcgggcaggagcatctggcagagtggggggcgtggcaggcaccctcctttgcagggcgaggtggggcctctgcagccatcctggacaggccggggtggcggcagctttgcccacgtggaagcggggtgggtctcacttgcgtggtggcccctggccccatcttgcctgctgcggcctggggagcaggcgctgggtggtggttctgcctgcttgctgctcgttccccgggcatgcgtgggcagcggggggcatgcgtgggcagcagggggcgtgggcagcgggggcacgggcaggaccacgtgggccgtgatcgtgggttgccgagaggacctgagcgctgcggctctgctgaatggagccgggtccctcaggccgtggacgccctcgggaggggggtgactgtggcttgtgtctggacaggaatgtgtcatttcccacatcttctagagggctgccagctgggaagacagttatcagggcaagctgtgctctgagtttcgggttctgctcctacaaagaacgtgcggtgctgcgggcgagggccccggcacggacaagggccactgcagagtgtgtttctgctcgtcagctgccctgggcagcggatgggctgggcgatgcagctggatgcacatctcgttctgtcatgaatgtccagtaaaaatctgaattggttgcaaaaaaaaaaaaaaaa

SEQ ID NO: 206684 - DNA, 1000 bp, Homo Sapiens
gtgaaataactccaaggtcacgtagctgagggtagagctggcatttgaacagcagtctgcttcctactgtgttctgtttccccttactaagctgctagcagatacatttacctgatgtagatttgcttgcctgtgttgtctagtgttgtcctcaaccccagcccacctctaagaatgacatatgtgagctacttggttaaatatgagaggcctaagctttagcaaatctgcgaagctaaatttggccatagcaaagccacagaagagcaatgattttcatgttccagcatgttggattgacatcaggtttttttcttttcatggcagatgatttacccaggaaaaggttacctcagctgtataaaccgcccactcctgagatgttggcatatcttgattttagtgtctccacaactggcatgcttacaggagtgaaggtaaggtgcatgctggaaaaatgccacatctgccaaaaatagagatgaccactgccccagaaactatagatgcagaggccaagtggttgtaccagagaccggtaggcagagtgaagatctaagtcgctgctctatttaaataaaggcattggctcctctggaatgagttatcacaaggaatttgtattattaagcgtctgaacctagcatagaagctgaaagaaaaagagttttagttaaaatatgtatgaaatctgatatttagatatcataaaatgcagtattcgctgggcacggtggctcacgcctgttatcccagctccttgggaggccaaggcgggcagatcacctgaggtcaggagttcgagaccagcctgaacaacatggaaaaccccgtctctactaaaaatagaaaatcagctgggcgtggtggtgcgtgcctgtaatcccagctactcaggaggctgaggttgcggtgagctgagatcgtgccattgcaccgcagcctgggcaacaggagtgaaactccatctaaaaaaaaaaaaaaaaaaaaaaaaaaaaaa

SEQ ID NO: 206685 - DNA, 671 bp, Homo Sapiens
acagccgcgggaagacatgagaggctgctagaaggacttcccgcggccagcgccatcacctgcccacgccgcagggagccctgaccagagctccagacctctgggtccaactgccttatggatccctctccctgaatgtcacataggagaggggacaggggttggccacacacctggaaatggagttctctgatgcaatgtcctttggggtccggactgtggtgaaggttcgtccagctccacgcccacccactggccgctggcaaactccgtggtcccacagaaccgcagtgtgcccgtctggggagagaagggaggcgatggctaaggaaggaatgctgggaggccaacgtggagtgcccacacacgggcagcaagaaaagaagagagggcaatgcaaccatggaggcagagactggagagatgtggccacaagccaagcactgcctgcagccaccaggaaccggaacaggcaaagaagagattctcccccagaacctccagaggagtacagccctgccgacaccttggttttggcccaggaaagccgatttggactcctggcctctagaactgttagaaaataatttgtcttgttttaagccaccaagtttgttagagcagcatgggaaactaatagtgaaaaaaaaaaaaaaaaaaaaaaaaaaaaa

SEQ ID NO: 206686 - DNA, 1000 bp, Homo Sapiens
tctggacgtctatcttattcactggccacagggattcaaggtttgagtgactccctttctcagcctctagtttctgagctgttgcaggaattcagggacccccaacagagagactggctgaagccatggcagaagaacataaattgtgaagatttcatggacatttcttaattccccacattaatgtttttataatttcttacgcctgtctttactgcaatctctgaacataaattgtgaagatttcatgaacatttatcacttccccaatcagtacttttgtgatttcctatgcctgtctttacttaaatctcttaatcccatcatcttcgtaagctgaggatgaatgtcgcctcaggaccctgtgatgattgcattaactgcacaaattgtttgtagagcatgtgtgtttgaacaatatcaaatatgggcaccttaagaacaggataacagcgatgttcagggaacaagggagataaccttaaagtctggctgcctgtgggccgggcagcacagagccatatttctcttctttcaaaagaaaataggagaaatattgctgaattctttttctcagcaaggaacaaccctgagaaagagaatgcgctcctaggggtaggcctctaaaatggctgctctggggacggctgtcttttacagttgtagataagggatgaaataagccccggactcctgttgtgctcccaggcttattaggacgaggaaattcccacctaataaattttggtcagaccgattgtgtgctctcaaaccctgtctcctgataagacgttatcaatgacaatgcatgcccgaaacttcattagcaattttaattttgccccggtcctgtgatcttgccctgcctccatttgccttgtgatattttattaccttgtgaagtaggtcatctctgtgatccacaccctatttgtatactccctccccttttgaaaatcactaataaaaacttgctggttttgtaaaaaaaaaaaaaaaa

SEQ ID NO: 206687 - DNA, 1000 bp, Homo Sapiens
tggccaggttggtctctaactcttgacctcaagtgatccacctgccttggcctctcaaagtgctaggattacagacacgagccacggcctgacctgaactgtggggaaaagaaagagagatcagattgttactgtgtctgtgtaggaagaagtagacataagagactccattttgttctgtactaagaaaaattgttttgccttgagacgctgttaatctgtaaccctacccccaaccctgtgctccctaagacatgggctgtgtcaactcagggttaaatggattaagggctgttcagggtgtgctttgttaaacaaatgcttgaaggcagcatgcttgttaagagtcatcaccactccctaatctcaagtacccagaggcacactacactgcggaagactgcagggtcctctgcctaggaaagccaggtattgtccaaggtttctccccatgtgatagtctgaaatacagcctcgtgggaagggaaagacctgactgtcccccagcccgacacccgtaaagggtctgtgctgaggaggattagtaaaagaggaaggaaggcctctttgcagttgagataagaggaaggcatctgtctccggctcgtccctgggcaatggaatgtctcggtgtaaagcccgattgtatattccatctactgagataggagaaaaccgccttaggactggaggtgggacatgctggcagcaatactgctctttaaggcattgagatgtttctgtatatgcacatcaaaagcacagcacttttttctttaccttgtttatgatgcagagacatttgttcacgtgtttacctgctgatcttctctccactattatcctattgtcctgccacatccccctctccggaaatgcccgataatgatcaataaatactaagggaactcagaggccagtgccggcatgggtcctccgtatgctgaacgccggtcccctgggcccatttttcttcctctgtaaaaaaaaaaaaaaaaaa

SEQ ID NO: 206688 - DNA, 1000 bp, Homo Sapiens
tcacatgtagatttaagtatctttcatcttatgcaaatgttcattaatgcgtttacatttcatttggacatcttcattctggcattttcttactccagtactttctgttttctgcaagttaatctatgtaaattgaagtttacatcagtcttatataggcacataagatatgagatagaaagatttatccccagaaaccactctcccccggaggctggacaagatggtgaccaagaagagcgcggtgaggggcgcgggccgccaggaccccgggaaccccgccccgccgagaccccgtcgagcccgccgacccccgttagggccggaagacgacctgaggggcaggacgagacccctccccggcagagactaaccgggacgcaggggagacccccacccgtggccgagacccctgccccgggccagccctgccgttcactcccgcaaccccggcagaggccgcgatcaggcctggaccttgtcccgggagagccacccgctctggactcagacccctccctcgcccgcagtcacaggctccgcacccttccctgtcccttaactccagacccccagcctggcccgtcgactccttccttggccctgtcccgcctctcggagcccccggggtgttcgggcctcctctgcgggccgcgccagccccttgccttcctccatcccggcctgggcatcctcacaggccgagccccgccccccaactcagccctctcccacgctccgtctcttacagcgtttgtcaccctccgtctcccatagcatttgtcgccggcaacagtttggagtctgaggttggatccccttttcttctggagcttccgtgcctcccctgcctcttcccagcccttgtcatcctccttcacaggccagccagatacctgtcttgcctgtgggcccattttcttccctgtctgtccccaccccacaagaaccaggtttctctaataaattctctcccttctttaaaaaaaaaaaaaaaaaa

SEQ ID NO: 206689 - DNA, 1000 bp, Homo Sapiens
gagcaaagctgccttccaagtgcctgtctgtgcctgggagaacagagcaggagcgtcgtgcggtccaccgcgcaatgcatggcgattccaggcgctgaacaactcccctggacccttgggcctgcatctgactcccagctgcagagtcagaagctgagtccaggcaactgcttggccactcccgatcgctcctccctggacacccggttaccaaagtcagcaaagaagatgcggtaatcgccgcctgatctccacatggtgaacacaacactcccaccaacacctccttgactggtcggtcttcagcaccgggggtgggcaggcaggtgttctgtgttgacgagaattgcacaggctaaacacaaacacggaaccagagtgagaacacctcactcacggcagcccaggctgctccctaccaggtgacggagcgcgccggggctgtgggtgccaggggctgagtgctagggactcgtcatgagtggggatccccacgttcctgtcactgctgtcaaacagaaggtaaacagtcttatgaatgtatttccttaggaaaacttgtaaaaacttttattaggatatctatttaatactgaactttggcctactttgtgatagactataaacaaattgaggaaatcactatttctcacttctgtattttctcaaaaataattttgttacagagttcaatatactgtgtaccattgatcttctattgtgaaagcaaagaatttcatcaaaatattttaaattatgagtgaaaattgtgtatgttaattttgcagctataatattaatcaaatttcgtgtaattctaatcacaaaatgacgtgccttaagtgcccctccagctgtgggttggcagtgtccagacagggagggcccatcaccgaaatcctgaacgattactagaccaattctattaaaaacatttcaaggcaaaaaaaaaaaaaaaaaaaaaaaaaaaaaaaaaaaaaaaaaaaaaaaaaaaaaaaaa

SEQ ID NO: 206690 - DNA, 1000 bp, Homo Sapiens
tagggctgagagccaggcacctaatgttggtgccctgtcccatcccatcgaagacacgcggccttatggagtccccatgggacggggcagccaccttttctcaggatccgggagactgacgcggacacatgcagaaatgagcaaggaggccacagaggctgaaaatgctttcagaaacaatccgaagtttcagcgacttgttaccccatctgcttcctgctttgcaaccacctgtggagtggagagacaaggcagggaagcagcaccttgcccttccagctctcatttcccccccgccaccagaaactgggaaggggtgggcgggggtctgcgatgagtagacttcaccctttcggtcttcagacatggctgtccactccttgcctgtccccacagctcttcctgcagactcttttttcccgaggatcctgttaagattgtccgggcccaagggcagtacatgtacgatgaacagggggcagaatacatcgattgcatcagcaatgtggcgcacggtcagtatcacacctcaggctggcagggcaggagaggaaggcagtgctgtgaacctggtcccaaggtgacctgagattgccgagaggtgtggagaacctgggtggagttgaggcactgtcagtatgcagaggaggctcagccttcgcaatatagctgtggaattctgcaatctggagctgtgctaaaccaggcaggggtcagcaatctaggtctgtgagtctagttccacttgggactgatgatgagctcacaaagtggcagatggcccagctgtgaccagcaacgtagcacagtgctggccaagtgctggggtcatggcagtgcttcagccccattggccatctcaggtgctaggcaagggagctgaagtaggaattcagtcatcttgatgaggctgccagagctgatggaaagaaagggagtctgagactcagcaggcacatggaagatgaataaagttgaggttaaaaaaaaaaaaaaaaaa

SEQ ID NO: 206691 - DNA, 1000 bp, Homo Sapiens
tccgcccctgggttccagcaattctcctgcctcagcttcccgagtagccgggatcacaagtgcgcgccaccaagcccagctaacttttgtgtttttagtagagacagggttcaccatgttggctagactggtctcgaactccagacccaggtgatccgcccgcctcggcctcccaaagggctgggattacaggcgtgaaccacctcgccctgccgcggccacattttttcttttttttgagatggagtcttgctcttgtcacccaggcaggagtgcagtggcgcaatcttggctcactgcaacctctgcctcctgggttcaagctgttctccttactcagcctcccatgtagctgggattacaggcgtccgcaaccacgcccggctgatattagtagttttagtagaggcgggtttcaccatgtggccaggctgatctcgaactcctgacctcaggcagttcacccgtctcagcctcccaaagtgctgggattagaggcgtgagccactgcgcccggccaaccacattttcaaaacaggtcatgtggtgtcaggttggagtgtacttccagggataaccgtgggacattcttgaaatctgaactatcctgggaagtcttgaagtaatggatgcctatagtggacactcaggactcctgtccttggagcgagattggaggggcatctagcacttaacatatgccacaatgctttctgtggccattatttaacctctggttaaacaagcttaggaggctgacttactagtagtaaaaggagtgtgctttgagtcacagatcctggttgaactccagcatgttacaaacctcagccctgttctatgaaaggtcataactacgaggattattgtaaaacattaatttagaaatgtaaagtggtccccaatctctggatctggtcaggatttattggagctgccactgaggggattaaataagtggggtcaaagccccacagcctagtcaaaaaaaaaaaaaaaa

SEQ ID NO: 206692 - DNA, 1000 bp, Homo Sapiens
tttttgaaacagcttccccagttgtcctttttcttaccagctgggtggtctggtgcccctgacagctgagtgcctgctttacggacacgcagtaatgccgaagatttgcgggggaggacatagggctgtccccgggattcacctgctggctgtggtctctgcccactgcttctgtccttggaaagcagggcaggaggcagcatccccaggggcctctatgtgggagggagggacacctggggtcacaacccagggagggagggtcacagcccagggaggctgggagctgctccaaggccctggaactctgcctcagtcgcggcatgctggagaggggtacggacttactttcttggagttgtcccaggttggaatgagactgaactcaagaagagaccctaagggactggggaatggttcggttcctgccttcaggaaagtgaaagacgcttaggctgtcaacacttaaaggaagtccccttgaagcccagagtggacagactagacccattgatggggccactggccatggtccgtggacaagacattcctgtgggccatggcacaccgggggggatcaaaatgtgtacttgtggggtctcgccccttgccaaaagccaaaccagtcccactcctgtcattggacgtttcttcccattccctcctcccaaatgcacttcccctcctccctctgccccctcctgtgttttggatttctgttcactcagaattgtaaatgtttagttgtgaccatgacgtattgtttgggtcaatgtccctttccaatgcatactaatatattatggttattatatatgaatatatttaatgacatggaaaaagttgtggattttctttctttccttttttttgggggggggtggggggttggttagagttgtaatggacccagatggaacttgtaacgtgggccccacatgatagaactaaattcagatatcattaaataaactcttgtacactaaaaaaaaaaaaaaaa

SEQ ID NO: 206693 - DNA, 1000 bp, Homo Sapiens
gggaccaaatgagactgagggaagaaaaaaaatctctttttttctggaggctggcacctgattttgtatccccctgtagcagcattactgaaatacataggcttatatacaatgcttctttcctgtatattctcttgtctggctgcacccctttttcccgcccccagattgataagtaatgaaagtgcactgcagtgagggtcaaaggagagtcaacatatgtgattgttccataataaacttctggtgtgatactttcatcttgtaaatctgctttcttttgggaagatattgagatatttaaatcatggcccaccttacccaaaataggagattctgttcatctcatatctagtattaattagaaaaataactacataaaaagaaggaagctaagaaggcactcactcagccataaattctctaaaccctctctaccttggaatccgtgaatggaatctggtatgttttttgcaggattttcctattgtaaattgtggcaaatacagggctcccttcatttgcttttcatctcttatgcatcaaagtcaaaaacatttctgaatcaagataatctagaagagaaaaaaggaggaaaaggaaaagagaaagcagaagggacaaataaaagcaattggcaaaaactgtcaataatagtttatacacttaactatatcaataatcacattatatgtaaatagtctaaacaatccaattattttttacttctacttatgttatatttttacttctacatttgttaaaggttccacgctacatttttactattcttgctttaaataattttaataatttcttttaaagtttagataataagaaaatatcccgggccaggcacagtggccacacctgtaatctcagtagccatgaccataccaatgcactccagcctgtgaaacagagtgagactctgtctctacagaaaaataaaaaagaaaagaaagaaaaggaaaaaaaaaaaaaaaaaaaaaaaaaaaaa

SEQ ID NO: 206694 - DNA, 1000 bp, Homo Sapiens
atgctgtgggctttccatgaatccgttgtaataaaacataaaccagtccacatcagtccaaagtgatcagacagtaattttactgcccactagaacaaaattaattcacacaatcaatgacacatgttagccaggtcgatatttaggcaaaatacatctaagaacagctaacaaataactcttctcaaactcacatagagcattcagcaagatagaccacatgtgctgagccatcgttagtattttctgtcctttctctttgactcgtgtatagtgtgctcaaactcttaaaattatacactttaatgattatacactttcatgcatctcaattgcatgtaagttatatttcaatatatttgttaaaagtttataattaaaaaaactgtcctagcttgattcaagaaatcttttttatatttaagaaaatgtaatgttatgtattatcagggcaaaagagaaaaaccatatgattaccttgtcatacacagtaaaagcatttggcacaattgaaaacttttttcatgatttataaaaacaaaccccagaaaactctcagcatgataagaagagaaggcaacactttcaaccctattaagggtagatttgaaaaaaactcagaggtaacattatattaaatggcataggattgaatgcttttctattaaatcagagagaaaagtagaatatctgttgttattctttcaattcagcattatactagagatctaaatcaatgcaataaagtaagaaaaataaataaaagtattgaaaagattgaaaagaaagaattgaagctgtctttattcacagataatgactgtgtatgttaataatcctagaaatctataaaaatctgccaaaagtaattagtgagtttggtaatgttgcagaatataagctcaatagaagtagtcttttgtatttctgtgtattagcaatgagcatttggaaaatgaaataaaaatacaatttcatttcaagtaaaaaaaaaaaaaaa

SEQ ID NO: 206695 - DNA, 1000 bp, Homo Sapiens
tataacctagtcataaagaccgggcaacaggttctactgttccttcagcccttccccatccagttccccgtgatagttatgtgcactttcattctcggcatggagaaccaatcattctctagggctgatgaaatctccaagtaatctaaaatagagctgagtgcttacatctctctcttagtagacacaggcctgtgttttaactcttccttgtaatgccactacactacagagcatggcaccagcacgtcgtagtcacctaaccctgtgcattgggaatgagcaaactgtactgcaatggtagttcacaactcctaaatcattaacatgctgtgttttctttcaggagagtatctaaggaaaaagggaaactaagaccgaagataactagtgaagacaacttggttgttttagaagaaaagtatagatccttaagaaaaaatattttgtggttgaaaacactgcatggaagattaaaacaaagactgagctaagggaaaaagttttcttatttcggaagagcatcctctctaactggaaggacctgaccagcttttcccttttctttaagctttggtcacagacatgacacctgagtgcatttatggtttttcccagggcaagtctcctgggagtcttatctccaagtccccacacatcttgccagatatgccaagaatataggccctagccactcatatgtgtgaaccccattcacatcgaagtcagagggcagccataggagtcacctctcctctgggtgatgggagtggaacgcaggccataaggcttggtggcaagtaaacccatgagtcatctcactgcttccgggaaccactctgtagctagggccatgccagtctcatgcctccttaaaggcctaacgtaatacttggagggaaaactcgctaagtgctttctgtcaaagatgtagagttcctgattcagtgcccctttattaaaatatagaccacaaaaaaaaaaaaaaaaaaaaaaaaaa

SEQ ID NO: 206696 - DNA, 1000 bp, Homo Sapiens
aaaacccagcaacagaaaaatggagtttggaaaacaggacttaaaatgacattcagtatataaaatatgtacataatattggatgactaactatcaaatagatggatttgtatcaataccaaatagcttctgttttgttttgctgaaggctaaattcacagcgctatgcaattcttaattttcattaagttgttatttcagttttaaatgtaccttcagaataagcttccccaccccagtttttgttgcttgaaaatattgttgtcccggatttttgttaatattcatttttgttatccttttttaaaagtaaatgtacaggatgccagtaaaaaaaaaaaatggcttcagaattaaaactatgaaatattttacagtttttcttgtacagagtacttggctgttagcccaaggttaaaaagttcataacagattttttttggactgttttgttgggcagtgcctgataagcttcaaagctgctttattcaataaaaaaaagaaatgaaaaagatatatgaatatgacaaagtattgctgagtccaacaatgttgttttaagactcttaaaatacggtacctggcaatgtttatttcataaagaattgtgaacttcttgaatctagggagggggaatgtagtgaagggatgtatcaagtggggtggtgggagggggaggcaaggttatatgcactttctcatgatttacagagaagtgaataactgcaaagtgaagttgcttcttctacttcagtcttctctcactttgatttgctagttgttatcaattaatgacaattacaaacctactgtatctctaatacagtgtgactggtcaggtatttcagttcttaggaaggaagtgccaagtttgtttttgggttcctggaacagcgctcacctttgtttagaacactggtttaaagggataatcatctctgtcacattagactatccatcatgaccagcaaatactcattttaggaaaaaaaaaaaaaaa

SEQ ID NO: 206697 - DNA, 1000 bp, Homo Sapiens
gtgcagccagtctgtgctgggcacaaaacccaaggacttctaaagtgggaggactatgcagacacctaagatttgtttcagaagcaaacggaatgtctttgctgcttttacattctcttttgtaatattcttccttaacaccaaggactttgtgcagtgtgcacagtaaccgtcactgtgccagagtcatgctgccactgagacacagcagatgcacagcttcatgctgcctccgtctgtttcaccactgtttgtgatacaataaaggaatgcaaaactcaattgctttgcaagagtgtccagtttctacagaagtaatagcaagatgatgaacaatgaaattcacataacaaatacacaaggatgataagccaataccctgaatacacacagagacaagagacacttgctatatagtatgcatgtatgcccaacacacacacacacacacacacacacacacacacacacacacacacacaccacatatcagcaccatttaaagttaggcatttgatatcagcaaagctagtgtgttaggggtcagcatggtgcctcactgagaaagagggcttgctgctcaatcacgaagacctgagttcaggtccaggcaaccatgtgaagagacagaacatggcgatacatacctgtaagcctcatgctatgtgtgcagagacaggaaaatcactggggcttgctggctgccaacctagctccaggttcaatgagagaccctttctcaggaaaggaatgtgaagaatggcagagcagaacacctgaaatcaccctctggcctctgcttgcacccacaggtaaacacgtcttcatatgcatacacttgaaaaccagtaaaaaaataaaagtaccctgtagtaagcaggatagaagcaaacatgtggatttctgactcttggctctcactataatggcatttcctgtaagcaggcagatgggaaataaagatacattcaaaacaaaaaaaaaaaaaaaaaaaaaaaaa

SEQ ID NO: 206698 - DNA, 1000 bp, Homo Sapiens
cgccatttcttcttcctcccttcacccatcctcaaaggttttggccacttgaccaggcagctgatgaccctggcagggggccgggtggtgctggccctggagggaggccatgacttgaccgccatctgtgatgcctctgaggcttgtgtctcggctctgctcagtgtagaggtaaggggtgggaaggagctgggaggtggcaggccagagggctgaggggccagcaaggggtcagccagcactgggagccccttaggaagcttttccttggtcctaaggaacagctaatggccaggctttctgagtatgcgtttgtccaaaaaggccatgtttgcccctgttgtgagggatatctggggctgagtggggcagttagaggggtatgcatggcaaccctactccccaccctaagccttctcttctttcccctgccagctgcagcccttggatgaggcagtcttgcagcaaaagcccaacatcaacgcagtggccacgctagagaaagtcatcgagatccagagtgcgtgaggacacgtagaggggctcaggctgccaagggggcacggagcttgtgggagcaccaggactgggactgttcatgtgggtgtcctctgccctccctgaccccttgcctgtctctcgtccacaggcaaacactggagctgtgtgcagaagttcgccgctggtctgggccggtccctgcgagaggcccaagcaggtgagaccgaggaggccgagactgtgagcgccatggccttgctgtcggtgggggccgagcaggcccaggctgcggcagcccgggaacacagccccaggtaagcagcaacccgcaccacctctctgccctcacccctgctggtgcgccccactcaataccctcccctgtgcttgccccacaggccggcagaggagcccatggagcaggagcctgccctgtgacgccccggcccccatccctctgggcttcaccattgtgattttgtttattttttctattaaa

SEQ ID NO: 206699 - DNA, 1000 bp, Homo Sapiens
acctaatagaaggaatgaattttatgtttcatagcagattagggtgcctgtagttagacaaaagcatattttactcaggtgatgaacaccctaagtacccttaatcactatgcattatatacatctaacaaaatttcacaagtactgcatacatttgtaaagataaaaaatattttaaatgaaactttgaactttgcaaaaaaagaaaagggttgcacaaataatcatatagtttcctcaacaattaggttaaacttctctcttgtcttttctcttcacccccaacccatacttgagagattttataaatgattcatatagtttaatatttatctgtgatcttctggaaaggctaagctgtggattatgactactttagccttaggagctctcctttgattttaaagtatcttcttacccatcaaagtggccacaagctagttacagttgcagtaagcaaaattgccctaaaaaaagaaagaatggactttcttagtccatttgtgttgctataaaggaatacctgagtttgggaagtttttaaagaaaagaggttttttgtttttgtttttttttttttttttttttcccccccaaacttttaatttaaaaaaattttttttttttttaaaggttttttttttaaaaaaacccaaattttaagggtacatttccacattgtccaggttattaacatatttaaacatttcccagccgggggtgccccccccacaaacttttaattaaccataaggtatatcccccaatgctatcccccccccctccccaaaccccacaaaattcccaaaattttaatatccccctcccaatttccatttaatcccatggttcaatcccccccaaaaattaaaaatacccggtgttgggtttccggttctcgcaaaattttacggaaaataagggtttccaatttcacccatttcccaaaaaaggaacaaaaactcatccttttttagggcgccatattatcccagggtgt

SEQ ID NO: 206700 - DNA, 1000 bp, Homo Sapiens
gatagccagcaccagatcccctatctccttcctaagcaaacttggccagaccatctctcggaagcgttctcccaaggataaaaaggaaaaggacttggatggtgctgggaagaggagaaagaccagtcaatcagaggaggaggaagctcctcggggccacagaggagaaagaccgaccctggtgagcactctgacagacaggaggatggacgttgccgttgggaaccagaacaaagtgaagtacatggcgacccagctgctggccaaatttgaagagaatgcgcccgcacagtccatcggcatacggagacagctgacacaagagcgtggggccagccagccgtcctgctgcctgcctgggcaggttcgccctgcccccaccccccggtggaaacagggctccatgaagaaggagttcccgcagaacctgggaggcagcgacacatgctacttctgccagaagcgggtctacgtgatggagaggctgagtgccgagggcaagttcttccaccggagctgcttcaagtgcgagtactgcgccaccaccctgcgcctctcggcctacgcctacgacatcgaggatggtaaattctactgtaagccacactactgctatcgactctctggctacgcacaaaggaagagaccggcagtggctcccctgtctggaaaggaggccaaaggacccctgcaggatggcgccaccacagatgcaaacggacgggccaacgccgtggccagctccactgagagaaccccaggttcaggcgtgaacggcctggaggagcccagcatcgccaagcgactgaggggcaccccagagcggatcgagctggagaactaccgcctgtccctgaggcaggctgaggcactgcaggaggtaccggaggagactcaggccgagcacaacctgagcagcgtgctggacacgggcgccgaggaggacgtcgccagcaggtcagcacgcagggctgcagggcgcccacccgccacacggccc

SEQ ID NO: 206701 - DNA, 1000 bp, Homo Sapiens
aagaatgcaaaggaaagcaaaaggatgggacatcttttggagagtatggcggctggtacaaagcctgcaaagttgatagtccaactgttacaaccactctaaaaaaccttggggcactttacagacgtcaaggcaaatttgaagctgcagaaacgttagaagaagctgctatgaggtctcgtaaacagggtcttgacaatgttcacaaacagagggtggcagaagtgctcaatgaccctgagaacatggagaagcgcaggagccgtgagagcctcaacgtggacgtggtcaagtacgagagtggccctgacggaggggaggaagtgagtatgagcgtagagtggaacgggatgaggaaaatgaagctcgggctggttaactgacttgctcagcgtcccatggatggcactggatctttaaaacgcagtggttcctttagcaaactccgggcttccattagacgcagcagtgagaagctggttaggaagctgaagggaggaagttcacgagagagtgagccaaagaaccccggcatgaagcgtgccagctctctgaatgtccttaacgtgggtggcaaggctgctgaagatcgctttcaagaacgaaataattgtctggccgactcgcgagctctgagtgccagccacactgacctggcccactgagagccagcagggctaggtaacctgtcttgggagtgtgagaccgccccgccctgccacgcccctcaccgccctgcccggaggcgccagccgcactccttggcttcccttcctagatagtgacgtccaccaaccttggaggtgccttttcaaaacacccgggaggccgtgcctcagcattctgttacccggcctgcagccccagtgccaggagccaccccgaccgcgacccggccaggctggctcagggaggccgaggtggcgctgaggtggcttcagcacgctggggattggctcctgctcacggatgctgttgcatttcctgcctgccacctttt

SEQ ID NO: 206702 - DNA, 1000 bp, Homo Sapiens
gaaacattaaaaaaatagaccaactggagcttctttgctttcttagagtcttgctctgcggctcgggctggagtgcagtggcacaatcatggctcactgcagccttgaactcctgggtacaggcaatcttcctgcctctgcctccagtacagtacagtagcagtaccgacgtgcagctatgccaggcttttatttttctagagatgggttctcactatgttgccctgacaggtcttgaattcttaggctcaagcaatcctcccacctcagcatcccaaagtgttgggattacaggcatgagccactacactagacttagagcttgtttttaaatggagaaattttcttttcctaagacttatccaaaggcaatttttaccactgccatataaaaaaattttgttgcatccctatatactaattcacaggcttgcttctactggaaaccatgaaaacaatacagtcttggtgaagttctttccaaattttgaaagtctgtatcagagaaatgaaaacaaactaggtttcttaaagccaagaaagttacggaatctccggagcaggtcaagtccatccaagctaatgctccacatggcccctgcacgttccacctcatctcccaggatgtccagacaccagtgggtcagctccgtgagggcaggcagttagctgttttgttcactactatatcctcagcaactagagactaccagggctgaagtgtgcacatagtaaacacatatagagtaaatgaaagaatgagctgcctcccagggtagtgtccttcctgacattgccagaaagttcttccttcaatccagatgagacctgccccccggtggcatctgcatgctgacctgctatttctttctttttttaatttttttgagacagtctcactctgtcacccaggctggagtgcaatggcgcgatctcggctcactgcaacctccgcctcccgggttcaagcggttctcctgcctcagccccccaagtagct

SEQ ID NO: 206703 - DNA, 1000 bp, Homo Sapiens; identical to SEQ ID NO: 114894

SEQ ID NO: 206704 - DNA, 1000 bp, Homo Sapiens
gaccaacacttttgcaatagtaataatcctttatatttgatcccgtctcactaagaggcctgggcccctgacccctctgacgtttccccatcccgggtgccatggggcctccgggcaccagaaagccagtgtccccgacaggacggcgcacccgcatccttcacctggccattacctcttcttcctatccctcttgtccacgccagtgtctccaggagccaagacgtgctccaccccagggacgtcgcccgaccgggcagctctgtggagctcgccaagatcttccaggcggacgtcgtgctggggctggtctaaggcgccctcaccgtgcttgctctcgctgccgacgctatttttccaccagctgtaggagaagcccgaggaccactggtcccccgggtagcccaagtaccactggtcctcctggctcctgacgctacgggtcttcctcgtggcgtagactgccagcttcggagacccctcagcccctccccgcttttctccaccccaggaggccatcagtagcgagctactgcctcggccacaacctcccagcaggatagcccgcggtttccaatctgcgaaaggaggaccgccaagccagaaatgccaagccaagcgatcactgccacgccaagccaagcgaccaccgccaagccaagcagccaccgcaaagcctcgcgggtaaggccaagccaatccgttacagaccagtgcgcctgcccacctgtgacgtcacggaacctgtgacttcactgcaactgcagctccagcctcccagaaaaagactccttggcctgcaggtggcgctgcagctccagcctcccagaaaaagactccttggcctgcaggtggcgctgtagctccagcctcccagaaaaagactccttggcctgcaggtggtgctgcagctccagcgccaacctgggctggctggtcctccctcggaggtttcggggtggcggcgcctagcctgcctgtcatgagtgctgtttcacag

SEQ ID NO: 206705 - DNA, 1000 bp, Homo Sapiens
tgtcacctttgaccttgacatccgattccaacaggtcagtgatccagtggctgctgagtttagcttgaacacccaaatgtacctgctctctaagaagagtctctggttgtctgatggatccatgggattcgggcaagagagtgatgttgcttttgcagaaggtgatataatttatggtcgtgtcatggtggatcctgtccagaatctgggtgactccttttactgcagcattgagaaggtgtttctatgcactggagctgatggctatgttcccaagtatagtccaatgaatgcagaatatggctgcttagccgactctccttcactcttatatagatttaaaattgtggacaaagctcagccagagacacaagcgaccagttttggaaatgtcctatttaatgccaaactagcagtggatgaccctgaagccattctcttagtgaatcagcctggatctgatggatttaaagtcgactcaacaccactctttcaggtcgctctaggccgagaatggtatatacatacgatctatacagtgagatcgaaagacaatgccaatcgaggtattggcaaaagaagtgtggagtaccattctctggtgagtcaaggaaagccccaatccaccaccaagagccggaagaagagagagatcaggagcacaccctcactggcatgggagattggtgctgaaaacagtcgaggaacaaacatccagcacattgccctggaccgcaccaagaggcagatcccccatgggagagcacctccagatggcatcctcccctgggagctcaacagccccagctctgcagtcagcctggtcactgtggtgggaggcaccacggtagggttactcaccatctgcctcactgtcattgcagtgctgatgtgcaggggcaaggaaagtttcagggggaaggatgccccgaaaggctccagcagcagtgagcccatggtgcccccacagagccatcacaatgacagctcagaagtttga

SEQ ID NO: 206706 - DNA, 1000 bp, Homo Sapiens
tgtgatccgcccgcctaggcctcccaaagtgctgggattacaggcgtgagccactgcgcccagccttgaacattatttttattgtaattatgtaaaatgttttttgtggtttctgggtcaaaaagaaaagtgcatataataaagttgtatattaacacacatctgtattatatgcacttttattttttcccttatagtacatgggtataaaaaccataattaaatgtaaagtattcctcattcattcattttcagagctatgatttttgtaggtgtagcgtattttattaaactgtatttttgtagacagcaattttggttgttattagatttcgagggatctccctctatcttatagaatgtcacaattattagccctggtcatacatctttataaaaatatttttgccgttgtccatttttgttatattcaaagaagttatactgcttggtcgaagggtaatgattaagttatttggtcacacataccaagttactgttcatcgggattttaacatttttttgtctcactgcaaatgtgtgaaggttcatatttagccagcccctgcttagcagactatatggttaggcttttgggtttttttccattggaagacgtgagaaaatggtatttttgtttctttattattttcatttcattttatatgaagtgtgtgtcaacgcatctatttttatacggttattgaaaattttatctattttaggtgttctttattaaacatattaactctgattcttcagttttgatttgttttagcttgactgtttacttgtggtgtcctttgccctgtgaatttttaatgtaatcaaatgtacctaatttctcattgcgtcttgattttgagttatagttttaaaaggttttccctctcccacttgtagaaaagttgaccagattttcctctgtgtatagttttatactttcacatttcaatctggtccttttggaatttaccctgatgcacaatatgatgaattc

SEQ ID NO: 206707 - DNA, 1000 bp, Homo Sapiens
tgagaaaattggagctacaacttttagcgtttaaaacaatgtattagtgaagccatctggttctggacttctcttctcagtatgttttcgataacttccacagtcttttactagttacaggttgtattacacttattcagagaaatagaagcaatagaataaatatatacatctacgtctatagctgtgtttgtgcgtgtattcatagatatgcttatgttaatatataggacagagccctttagagttgccatggcggtgtctgcacagggggactttctcggccatctctggaatgttttagagaacctttgttcttccactcacctcatttcagtgctggcccttgctggcatcagcaagcttctacccctcaccagaggaaacagagtattaccccattaacacttttttaccaatctcctgcgtggagttctgcaaagacagtaacaggcagccagatttggaagcctcagagctttcctggccatcactgccactccttgtactccaagcaactttctgctccccagatgaggcacagaattatgtctacagagaccttcagccttggaaggcactagacaacagctccagggttcagtacaataattgtggtagatgagtaccacagaagcacttgcctccctactttgccagccatgacctggtgtgtaaacataatgagccacctaacctcctaacaatctgttcctgctgagaatgggccagcctcacatgacattcccctacacacaaaatttgacattaaatatttatccttttgtatctggattattttacatactataatgtcttaaaggttcatccatgttgtagcatgtatcatcattgcattttttttttttttgagatagagtctctctttgtcacccaggctggagtgcacagcaatgcaatcatgactcactgcagcctcatcctccctaggctcaagcgatccttctgactcagatggacctctcttgtgtctgggaca

SEQ ID NO: 206708 - DNA, 1000 bp, Homo Sapiens
gtgtgtgtgtgtgtgttgtgctgttgttgttcgtaggcctgagtttgggctgggagaggaaacagtgggctccttgttgggggggacaaaaaaaaagctgctttctggctggtcctagggggaaaaatggtaggaagaaaccaaacactgagagactgactagaattgagattctcaacctccaacccttttttacaataaatattttgtaatgacacttttactgtcctaaattgagattcatagatgaggctcacgcctgaaatcccagaactttgggaggccgaggcggactgatcacttgagctcaggagtttgagaccagcctggcctggccagcatggcgaaaccccatctctactaaaaatagaaaaattagcgtggtgtgatggtgtgcgcctgtaatcccagctgagacaccagaatcgcttgaacccgggaggcagaggttgcagtgagccaagatcgcaccactgcactccagcctgggtgacagagcaagactccatctcaaacaaaaagaaagggaaggagggagagaaagtcatagatgatataacctacctacatacacaactttaaacagaaagcaaaatgcttccctttctgtaacgtaaaggggaaatgaaagaaaagtaacttgcaataaaataacataaacagtattttaatgtgtgagtgccaaggcccgactaccctagaagtcctgatggagtaagcagatgcttccacctattcacagaaccacggggatgaaactgctaccaacacaggctgatccaggtgctgagttggtgactcaactacctccagcatgttgccatcaatgaagtgatttaacaaaatgttgaacaactcttggtagcaaagttaattttccctaattttacacacaactataattgcattcctagaaagttcactgtatatttaaaaaaaaattttaaaactgtattaagttataggctcagataattaaacacaggttttcactacgtga

SEQ ID NO: 206709 - DNA, 1000 bp, Homo Sapiens
tctcattttggtgctttaagatttatcataataaaattaaaacgcttttggcctcttaagtcactagcctgaatttgacccatactgaggaaagtgtaaaggatgtgtaaaaatgggtggaatgtctgaaaaagtgaagtactgagagataagtgaacttttaaaagagaattgagttggggtttttttatttcttatttttattttttgttttgtcttttattgcttctgtcctttatcacatttaaaaattcctctcattacaaaggtccccaaaaccaccaaatttggttctttccaggagtatcaaatgatttggacatctttagtcatgagagagtagtaaacaacagtactagataacactgactactcatgtcagtttcatcaaggctaataactttatgggtagagaaactgagttattttgccaattttataatgaattttcttaaaccaaaaccctgacatatttgtgcagcagtgtcttgagtttgtatccaataagatctatttgaggaaatgtattttgaggaatacaagaattgacaagattaaaatttatttgatgtctaaataaaatacattatttgtaaagtagtttaaatgcaaatgcacatgactgacttttaaagtcatgtttaattttgatttacataattttaaaattactaaaatgctctattttgaattttaagtatttgtgtttaattcatatacattaaatgtttaggcagacatccaataaatttttttttttttgagacggagtcttgctctgtcttccaggctggagtgcagtggcgcgatcttgattcactgcagcctctgcctcctgggttccagcgattctcctgcctcagcctcctgggtagctgagattacagttgcacgccaccatgcctggctaatttttgtatttttagtagagacggggttttgccatgttggccaggctggtctcgagctcctgacctcaggtgatctgcctgcctcggcc

SEQ ID NO: 206710 - DNA, 1000 bp, Homo Sapiens
attattctgcattacacaatagttttttggccttccttattttttttttaagatggagttttccctcttgtcgcccaggctagagtgtaatggcgcgatctcagcttgctgcaacttccgcctcccaggttcaagcaattctctggcctcagcctcccgagtagcaggcatgcaccaccacgcccagctaatttttgtggttttagtagagacggggtttcaccatgttggccaggctgttcttgaactcttgaccttgggtgatctgcttgcctcggcctcccaaagtgctgggattacaggtgtgagccaccgtggccggcttttttttttttttgagacggagtctcgctgccaggctggagtgcagtgacccgatctcggctcagtgcaacctctgcttcccgggttcaagtgattctcctgcctcagcatcccaagtaactgggactctacaggcacgcaccaccacacccagctaatttttatgtttttagtagagacggggtttcaccatgttggccaggatggtcttgatcatctcttgacctcgtcatctgcctgcctcagcctcccaaactgctggaattacagacgtgagtcaccgcacccgaccctgagtctttatattgtctttttgctgtatagtggtaatagtaaatgacctgtatacttttttttctttcttttttttttttgagatgtagtcttgctctgttgcccaggctggagtgcagtggcacgatcttggctcactgtaacctttgtctcctgagttcaagcaattctcctacctcagcctcctgagcagctgggattacaggcgcccgccaccacacccagctaatttttgctttttttttttagtagagacgagatttcatcacattggccaggctggtcttgaactcctgacctcaagtgatccgcccgcctcggcctcccaaagtgctgggattacaggtatgagccaccgtgcctggccaatgacctgtatact

SEQ ID NO: 206711 - DNA, 1000 bp, Homo Sapiens
cctgaatcatattccttctttcttgatttatttatttcttaatgaaatatgtcctttagtattttttcaagtgaaagtaggaaattctgtgtcattgtgcatctttaaacttctttattccaccttctctcttaaatgtttaacttttcactgagatttatcttgtcagcacattgaagttactccttcattctcttttggtctttcctaatgctgatgaggtcttctatccacctgattgttcctttgtaaattaccttttatctctatttgatttcaaaattctctctttgtccttgatgttctgcaattccactacaaagtgactaggtataatttgggggtttttgtctatttaaattttcaaaataattactcattgctttcttcagttttcaagaaaggtttcagccatcatttcaaatatttcctcttccctatcaataatattatttgttactggaattattagacatatgccagggcttcttgatatttttttccatgccttttaaatttcctttaatatttttcttttctttttctctctctgttgcatttttgtatgctttgatctacctattcacttatttttctcttcatctacatctagtctacatactctctattattgttttatttcaattatttgtgattttatttgactgaaatctctttttggcttacactagtgggagcagggaacacaggattctatagtgttctgaagagataatgctataagtgattcgaaagagcaaatgcctctgataagactgtaagatgcacgagagaaaggatgtttcattatctaggtagccctactacccagtaaacagcctggaaaatagtatgttctcaataaatgtttacagtaatggattaaatataaaccaagtaaatgttaaacttcacaacgatataccttaatattaatatgttgtctttagtaattgtcagtagttcaagtacagtaattctcaaaccagagatattaaaa

SEQ ID NO: 206712 - DNA, 1000 bp, Homo Sapiens
gctgtcaagaccaagtgaactttaacaactgaccagtatttgttttttaaggcatggccagcaaacagagattcagcggaaggactgatgccaaatttcagtggatgcgtagcaaaccctgagcaaagggctgactttgcccctctgctctgagaaggagacaagctgggtgccgtctcctagccctgatctctcctcccagtccttctgaattcttgccctaggccaacctggcacctcatttgaggtgagatgtgacatgtgccctgagactctgaagtgtcaagtggtaggtggagagggagcacatgccatcaggatctcagatagtctgttctgttgacacaacttgggtctgatcatgggtccaccatcttaataattattttaaataacactggtagttgtagggactccgtaaagtcaacatgctggaccaggtatcccatgtacattagctcctttaaacctcacagcaacctgcagggtaggtattattgacatattgatggaatactatgggaagaggccccatagtgagcctgagacttcagaaatgctcagggctgtggagctccttcctttttggttgttgttgtttggttggttctgatgtgctctcactctttgctttctaacctggctctgcatcctgtgtctctctcattcctccttccccatctcaggtactctagcttttcctgccctcccttgcacagccagacctcctggctctgtggatccaggggaattggcctgaatcacagagaaactcccttatcaggaaggggaaattgatgatgggctcttgtcaatgttgatgctttccatctgcacctctttagggataccagctgctgcctgccagccccaggtgatgtgaaaggaacaagcaaccaaccaccacacagcggtttgtaaattgtatactatacctaaagttcccaacctcctaggcgaatggaaaacccaccattctcacttgcacaaatgcaaagtt

SEQ ID NO: 206713 - DNA, 1000 bp, Homo Sapiens
tacagatgaaaacttggacaagaatttatgagggtgatgagtacatctcatgtgattttatctcaaggccatgttatccctcacattttgaagatactgaccttgctacttgtttagctaaatatctatttgatgtacatgtgtcatttctattgagggacatctatgttctttccaatttctgtctataataatgtgaacagcgatgaccatagttgagaaaaagtctttatgtagaataaagtatatagtgatataactaaaccttaagatacattgatctcaattgccacgagaaactactacattgatttaccatagtggctaaatggatttgcacttccaccagcaacgtgtgggtgtttctcttgttctatatcctctccagtatgatctcttgtttggttgatcctagtaattctgacaagtttaagagtgaatctcaaagtagttttgatttgtatttttctaactactaataattctgaatatttctataattgtttctcaggcatttaactttcatgtattgagaatttgctatttagatctgtactccatattatattttcttttttttaattagaaattttattcatttacatttgaaatgctatccccaaagccccctataccttccacccatcctggcatatggaatagtgtctggatttggtggtcgtataggggatggatccctgtgtggggcagtctctggatggtccttccttctatctcagctgtgatctttgtctctgtaactctttccatgggtattttgttcccgattctaagaaggatcgaagtgtccacactttagacttccttctccttgagtttcctgtgttttgcaaattttatttttggtattctgagcttctggactaatatccacttatcagtgagtgtatatcatgtgtggctttttttgtgattgggttacctcactcaggatgatatcttccagatccatctgtttgcctaagaatttcatgaattc

SEQ ID NO: 206714 - DNA, 1000 bp, Homo Sapiens
cactgagttgatgaaaagacggcaggattccattaagttcaaagttctctagcattggacagaaaagccatctacatgtaaccgattttcatcaagttcagaggctcaaagatggaggtggaaaagacagacctcaatgaagagccggagaaactcaggagtcaattgagtcatcagcccaggtgagtgtggctgcttggagtctctgggtgagcaagtaactgccagcggcttcttcctactcaaggcccggatagagcccattcatccaggcaacatccatgagtgttgatagaacattcatccaagttctaaatgggctctgggaaggggccgtccttgcgcccagagtgaggatgcggtattggccccgtggggagctgaccggctatggggaaatatttttgaggaaatcctggccgccttcccttccattcccactggctcaaaggagccaaggccttcctccctcttccgggcaagtcctccactttgcttccgacattacaagccacttcagacccttcctcccagcacagcccgaggagggggaaaccgtttcctggccagtggcgagagctgcaatagagaaacagttttacacacgcagagccggctaaacaggacactagagttttattgttactcacatcagcctccctgaaaatgcagagaccagggtctctcaaggctagtttaggggaagagagtcgggtgggtaggcaagggcgcttgctgctgactggttgggggtgcagtcgtcggggtgtgggaaatggtccttgtgccccgagtcgcttctgggtggcaccagggaggctgaccggtccagggggggaaatcagttgtcagacttgcaaaaaacctgaaaagacatctcaaaggccagtcttaggttccaccgtagtgacgttatctgcgggagtagttgggaagttgcatattttgagctccagaataaaggggggtaatcctttgtgtctccattttagcagaattc

SEQ ID NO: 206715 - DNA, 1000 bp, Homo Sapiens
aattgctaataaaagaggagcaatggagtaaataacttctccaagaagctcaacgctaaagggaaagcatgagttcctaagcacaggtagaagaggtaaagaaaaagtaggaaaaaaaggcttagaaacagataggtgtgtaggttggaggatacaaaaccaggttgtgaagttgcacagtctctcagaggccatctttcactctggtctgtgagaatgttgctccctagagttgtgaaacaggtgttaccaactcaccccctacactgactccatctttgctataaattggaaagaaagaacatctattctcaatagagcaaatacaggcatatcatggtggttttgactggttgggatacagaaaataaacaaacacatatgtagaatttatcaaaagagctaatgtcacaatgcaaaggaagttgaatctaggaataaacaaaatgttggccacatagcattggaagctcagaggatggtgggccactcatggggccctttacttacactgtctcatttagtgttatcaagagtcctgcaataggatattattttttataaatgagaaaactgaagtccacagtggtgaagtaacatgcacaaactcatgcagctgggaagtgatagagccaaaattccaaagacaatgaactttcccctgtagcacgcggctttacatacaaaaaagaataggatatatgatccctgctctcagagctcacacactattaggggaaaagatatataaataactgtaaaacaatgagatgaatgggaaactggtttatgagcaaagtactatgggaatataggcttgtaaatccattctctcaggcagctgtatatttaccgtagacagggaaggagaataagaacgacaaaggcaagatagtaatacatttccatgatgatacagtgaatatccttcattgccatcttaaataggtattcataatttaccatttagaatcagaaatttcttaagtttatgaggtta

SEQ ID NO: 206716 - DNA, 1000 bp, Homo Sapiens
acatagcagctgtctttccccactcccctgttgtttccactgcctcataagacttcccaccactcacaaagcacagcgcttttcctcacaaagctgagtgggctccctaggttcaggatggaagtaaataggagtaccatcttaccttcagggacggcccaggagtggggtagcagccacagaagtggtaacatctgtagcagcgcagctccttggttctgttcatgacccataccttcttgccacacagtaggtaggagctaccaacccagccaacccagcttccccaactccctccccgagagggtggccttagatcatgttttgccagatcatttccaataggtgcccttgtcattttgtctaaaccaatcagagaagcgtagggtttaacatcatcagtcactggggagacgcctggggccagtaacctcctgaagacttggctgtttgaccagggcagagtatggcatgtaactgggctgggaagcccagtggaggaatgttgcttcctggtggagttccctctttggtttcaagctgtcagcctcagtctgtaagcgaccagctggctcttcagagcagtgccacctcctggcagaatgctgcaatggggaaccgcatcttccccaagtaaacccccagggctcttcggaccctgccttctcctccctcctggctcttcctctttctcaaaaaaacttattctccttcaggcattagctctaattcatttggcagacatatattgaaaatacaagaaattctgggtgttgggcccagggctagaaatacaaagatgaataggcatagtctgccttcaaagagcttagagtctagtgctgggggagggggccaagggataattacacaacaatgtaatgtattcaaataagaatgtgccaagtgttttggaagtcgcagtaattttatgaggatgcggaataggaggaacataatcaggcaggctcctaagacttgaaggaaaaacaatttggcc

SEQ ID NO: 206717 - DNA, 1000 bp, Homo Sapiens
acacaaagccccctactgaccctgtagtgggcaaaccgaactcctcatttccagctccactattaccttaaagtgagggactcatcttcctctctcaaagccggttatctgttatcccatgtcagaaaaacacatttgcaaaaggaacaatcaaaaaattattattttaaacaatatttcagagccgtaggcatcttccaaacaacagtgagagccaggcttttcttgcctgtagttccagagcatccagggtgaaggaggagggtggaagacaaggaccagcttacccttcctgagaggccagcagcactggggtcatacttttgaagagaggccaccatccaactctgagcatcactgctagaggaatggtgcctatgctccatgaaataaataattattacctttctgatgagaccacctaactctcagatttccaccagaccccaaaatagaagctgatagctatcaccagaatttccctgaattcatagctcgactcttgatgtcctctggcaataatgtatatttttatttccatgtatcttctttattgttttcgcctcccttctttccaagactctctactccccctaacgaaacctcatacctaaagagggtttttatgtcatgattatattatcacaatatatatttaggaatatatatatatcttttatggccgcccctgtggcacatgggagttcccaggctaagggctgaattggcgctgtagctgccggcccacgccacagccagcacaacgccaaatccagggcgcatctgtgactttcactggagattgccgcaaggcctgatccttaacccattgagcgaggccaggcaccctcacggagacgttcagtccttaacccaccaagccacagcaggaactccttttaggactattttaacgtgagtggtgcacgatttctccctattttaaaactaaggaaatggaaacctcagaaacgaacagacttatccaaagaagaagctt

SEQ ID NO: 206718 - DNA, 1000 bp, Homo Sapiens
gccgaggtgggcagatcacaaggtcaggagatcgagaccatcctggctaccacggtgaaaccctgtctctagtaaaaatacaaaaaattagtccaggcggggtggcgggcgcctgtagtcccagctactccggaggctcaagcaggagaatggcatgaacatgggagaggaggtggagcttgcagttagccaagaccgcgccactgcactccagcctgggcaacagagcgactccatctcaaaaaagaaaaaaataattcttcccaggtttttttctaaaaatgttgagaagctatctttatccgttaaaatatatttttatgtttgttctccaggattaagtttcaatttcatttttttcccttatggagatcagtggtcccagtgttgcttattgtaaaatatactatcttcacttaacaacaatgaaagctgtgttacaaaatctgtttcccagtattagtgcaaaatatatttctctttatgattgtactcagattaactagtttgcaggactgtgtccagagttggttccttccggtgggttcgtggtctccctgacttcaagaatgcagctgtggaccttcctggtgagtgttacagttcttaaagatggcacggaaccaaaaagtgagcctaggaaggtttattgctgagagcgaaagaacaaaacttccacaccctggaaggtgaccccacctggttgctgctgctggttgcgggtggccagcttttatccccttatttcttcccacccatgttgtgtttctgtcttatcagagtgcccttttttcaatcctctccactattgactacttttagaatcctgctgattggtgtgttttacagaggctgattggtgcattttacaaattccttgtaggacaggaaagttccccaagtccgcactcgacccaggaagtgcagctggcctaacctctcactgccagaggctaatttccatcctggtatttctcaggcccatagatagtgtgaattc

SEQ ID NO: 206719 - DNA, 1000 bp, Homo Sapiens
attaactttaattatatattttatttaactcaatattctcaaaatgttatttcaacatgtattataaaaattattgctatcttttacagtctctttttacactcaatcttgtgaaattaatgattcttcacatatagcatgtttaaatttggactagctacatttcaagtgcctgtcagcacatgtggctagcagctactaaattggacagtgcagagctagcccctttctcactgcctgacaaaggtaggtgctcaggacaaagagtgccttgaggcttcaccctttagcttcagaaggcctactgtagggctaaccacccaggagccaggtggggtaagggggggccccactctcctaaagcctggatggcagtcctgccctctttcccatgaaagagggcttgagagggggaacgaagacagagctcctgcaaggggaggccgagtgccttcatctcccagttcacccctgccagaagagactccttttgcaggtagaggatgagcccagaagttggggacaatggcccattcctggcctagatttcctgtaggggtgctggactgagtggagaactatagggtggagcccctagatggggagctacttctggccccagcacccttcccccagtgtcttgcagccccaagacagcacaagacagcctggggctaggtagtgggacaagcgtgggcagcttccctgagagccaccagcccagtcatggggactgctcaggggagacgcgggggccctcttaggaggggtctgcaaacctagagcataggaaacactgcctgggagcacttcacctacaagggcctttagcggcttcagggcccagccacacccttctccacgtacgtgttccagacccagtcaccccgagcagggagaaccaaccctcataataagaactgtggagattggacctgtggtataagtagactccctaccacctcctgtatttcctaggctttaatagggccaggtggcc

SEQ ID NO: 206720 - DNA, 1000 bp, Homo Sapiens
aaggaaagatttttaagagctgtgaggcaaaagcaccaggtaaccaataaagaaatacctatcagattaacagtagatttgtcagcacaaacgctacaagctagaaggaattagggtccaatcttcagcctcctcaagcaaaacaattatctgccaagaattttgtatccagtgaaactaagcttcatatatgaaataaagatacagtctttttcagacaaaaaaaaaaatgctgagagaattcaccactgccaaggcactactacaaggactgctaaaaggagctctaaatcttgaaacaaatcctggaaacacatcaaagcagaacctctttaaagcataaatctcacaggacctataaaacaaaaatacaacttaaaaaacaaggctgggtgtgatggctcatgcctgtaatctcagcactttgggaggctaaggtgggtggatcacctgaggtcgggagtttgagaccagcctgaccaacatggagaaaccccatctctactaaaaatacaaaattagccaggcatggtggtgcatgcctgtaatcccagctattcaggcggctgaggcaggagtatcgcttaaacccaggaggtagaggttgcagtgagcccagatcacattattggactccagcctggacaacaaaagcaaaactccatctcaaaataaataaataaataaaaattaaaaacaaaaacaaaaaaccaaggtacacagtaaaaaaagataacacaatgaatggaatggtgcctcacatctcaatcataacgttgaatgtaaatggcctaaatgctccacttaaaagatacaaaactgcagaatgaataagaattcaccaaccagccaggtgcggcagctcactcccataatcctagcactttgggaggccaagacgggcaggttgcctgagctcagaagtttgagaccagcctgggcaacatagtgaaactccatctctactaaaatacaaaaaaaaaaaaaaaaaaaagaattc

SEQ ID NO: 206721 - DNA, 1000 bp, Homo Sapiens
gaattcctggactcaggtgatccacctgcctcagcctcctaaagtgctgggattacaggcgtaagccacctcgcctggcccatattattattattgttatgattattattattttttgagtcttgctctgtcacccaggctggagtgcagtggctcgatctcggctcaccgcagcctccacctcccgggttcaagtgattctcctgcctcagcctcccgagtagctgggattacaggtgtgcaacactgcacccaactaattcttgtatttttagtggagacggggtttcaccatgttggccacactggtgttgaactcctggcctcaagtgatcccccagcctcggcctcccaaagtgctgggattacaggcgtgagccaccgcacctggccccttgagaattattcacaaaagaccaggggccaggtcctctctgctagctgccccctgccaggaggtctgtagagccaaagctgagggctctggtgggaccaagggtgtccccagggtggaggaagcagggccggtcctcccctgccctgcccagcgggcctgacacagtcagagggcgaaaggccaggctttctggtcgggaaggggcctgggcgaacgtcacagctgtccacttggatgggccaggatccgtcatgcagaccaactcgaggtttttggtcaccagctgggtcaccccaggtcctgtctccttttttttagagaaggagttttgcttttgttgcccagcctggagtgcaatggcgccatctcggttcactgcaacctctgcctcctgggttcaagcgattctcctgcctcagcctccctgagtagctgggattacaaggatgtgccaccacgcctggctaattttgtatttttagtagagatggggtttctccgtgttggtcaggctggtcttgaactcctgacctcatgtgatccacccgcctcggcctcccaaagtgctgggatgacaggcgtgagccaccatgcccggataat

SEQ ID NO: 206722 - DNA, 1000 bp, Homo Sapiens
ggttgcagtgagccaagatcgcaccactacactccaactgtgcaccacagcgagaccccatctcaaaaaaaaaaataataataataataaaatcatctctgccccaaagctatttcctcagatgcaaacattttccttgaccatagccaattaacctctcaacatctaatccacctccctttggaactggctgataccttgagaaacctttcttctccacagagggtctgccagttcagatgctgaaaagtttttctatctggagaaacccataagccatactattagacctatgccccaaagagctaagctaagttaaacacacagtgtttacaaatgagcagctgaaaaggcacacaagcttaagttgcagaagacacacacttgattttccttgctatggagggccctttagaacattccctacaaagttattttagaatgtgaagagacagctgggagcggtggcttgagcctctaatcccagtactttgggaggccaaggcgggcagattgcttgagcccaggagtttgagactagcctgggcaacatagtgaagccctggtctctacaaaaaatagaaaaaaaattagccgggtttggtggcatgcgcctagacccagctactgggaggctaaggtgggagggatggcttgagcctgggaggcaggggttgcattgagctatgatcgtgtcaccactgcactccagcctgggctacagagccagaccctgtctcaaaaaaaaaagaatgtgaagagacagagaactgaatgcaaagaccctaactcaataaaactttgttttcttcacatgcaaaacaatcagaaatgctctttgttttgtaatctggccaccagccactaggcccatataggggtggaggagcctagacctgctaatctcggcgcatgtgagtggggttattgctgtcctctcaacaagaacccagttttgagagacaggacttgctggatttcctaggctgactaagaattc

SEQ ID NO: 206723 - DNA, 1000 bp, Homo Sapiens
tcaggcatatttataagcaggtgtttttatttaaagacttagtccacatattacaagtattctgatggactcatcaaagcagatagggaaagttggccagtctcattttgaatgttacgatgtagccgaacatttacaaaactgtctttgactttctttctttttaattttactctaagttctgggatacatgtgcagaacgtgcaggttcgttacataggtgtgcgtgtgccatggtggtttgctgcgcctatcaaccaatcttctacgttttaagccctgcatgcattaagtatttgccctgatgccctccctccccttgcccccagctccctgacaggccccggtgtgtgatgttcccttccctgtgtccatgtgttctcattgttcaactcccacttatgagtgaaaacaggcagtgtttggttttctgttcctctgttagtttgctgagaataacagtttccagcttcatccatgtccctgcagaggagatgaactcatccttttttatggctgcatagtattccatagtgtctacataccacattttctttatccagtcttatcattgatggacatttgggttggttccaagtctttgctgttataaatagtattgcaataaacatacgtgttgaaatttttattttatcacggtcaaacgcttaccatgagagccaccctcttgacaaagtgttacatgtataatacggtcttgttaactctaggcacaactgctgtggtgtgcacagttgtacccagactgcagaactgattcatgttatataccaaaaccttatacttgtggaacagcatctccctacgtccctctctcctcatcttctgaaaaccatcattctactgtctgcttctgtgaatttgactattttagattctacatgtcagtgacatcatgcggtatttgtctctctgtgtctggtgtatttcacgttaacatcccccaggttcatccatgttgtggcaaatgacagaattc

SEQ ID NO: 206724 - DNA, 1000 bp, Homo Sapiens
aaaaatgaatgaaaagaaaaggaatggggataaacaatgatagaaatgactcatagaagatttcagttgtttccctggtctctgaacacttacacaaccctcacatcattccaataatgataacactgaacacaatcagaaaatattcactgaacatgtaccatgtgctcaacttattcattgaatcctcacacttccacgtagaagtgttcaaagaaggccaggcgcggtggctcacgcctgtaatcagccgggcatggtggcaggtgcctgtagtcccagctactcaggaggctgaggcaggagaatggcgtgaacccgggaggtggaacttgcagtgagctgagatcgcgccactgcactccagtctgggagatagagcgagactccttcccaaaaaaaaaaaagtgttcaaagaaaaacttctggccaggcacggtggctcatgcctgtaatcccagcactttgggaggccgaggcaggtggttcacttgaggtcaggaattcaagatcagcctggccaacatggtgaaacccctttgtctctactaaacctctttgtctctactaaagatacaaaaattagccaggcatgctgtctgtagtcccagctacttgggaggctgagtcaggagactcacttgaaccgggaggaggaggttacagtgggctgagattgcgccactgcactccagactgggtgacggagtgagactctgtctcgaaaaaaaaaaacagaaaaaagaaaaaaagaaaaacttcagctgaattcaatataaaagagtcaaattgagcaatgaacgattcgtgaatcaggcagcctcccgaggcagagtaggctcagagactccattgcaggcatgtggtggaagatttatggacagaaaaaggaaagtgacatacagaaaacagaagtgaggtacagaaacacccaattggttacagctgggtgtatccttatttgaacacagtttgaacagttggctacatatgattggcc

SEQ ID NO: 206725 - DNA, 1000 bp, Homo Sapiens
gcttttttaactgaaacactagagtaacaatcttggcatttttaaacgtatataattatccctatatataaaactattttaacaaaaataactattttcatacaaccattttaactctagaataaaaatactgttatagtgagattttttcaaatatttaatttagtagagtcaaatgtttaacaaaaataaaatattatgaagtatatagtatatattttaataaaaggctaataaactgaatcaggtcaataagagaagcaaaatactggtttataaaactaaggccttcaagtgacagggggccataggaaaaaaacaacaaaacaaaaactaaggctttattcatttataagtggcaaaagaaaaaatttcctatttccctattccctaatgatttaatgtaaactaaagcaaagagaatgcattagttcactcttccttagaaacctacaccatctactaatttgctaatgaaatcagatacatgagttctacatgatcagtgttgtgacttcacattagtagagacgctacttgagttgcactgtcactgggttccagaaagagaatttcctaacgaatcactaagaaagcttcttcaacagatacaggacgggctagtatcaaaatatagaaaaaaaaataaagtagagataatgctttgtctgttgaaaaatatttattaaacttctctaaaagggattacataaatatattatctcaactactataattagatgtcaattccaattccttagtaatattttcaagatttaccccttaaatataggcgtatgaaaaaccaaaagcatcaacaaaagttttatttatataaaaagatttatgctggaatgttaaaatctaatattttgattttgaaagcaagttgattttttaaaaaccctgaaaacagtagagtgaactggcattccttgaaaagctgaacaaaataagtttagtaaaaacaagtaataaatttattaattcagaaaggatc

SEQ ID NO: 206726 - DNA, 1000 bp, Homo Sapiens
aaccggtccgtccctcccctccctccctcccccccgccgcctcctcctcctgccgctgccgctgctttggctgctgcgtcatacgccccagagccgccgggacggaggggctgggcctggggaccccccggcctccgcctgcacgcccccccacgcccggacgtgccctctccgcgcgggggactcgcctaggtctcctacgtctgcccctgcccggctcccggcggccccagctgtcaccggtaaggaggcggcaggaggcgctggtggggggcagggagccgggggtcggcgcggggcgcgggcgggagagcctcgccgccttggcctcgggtccgggctgggccgacacaagtcccttctcggacttgccgtcctggggagtagagaccgggactgggacacgcccccctcccggggcactcagagaagttgtctaacccgggggcagggagccccgaatttgagggtgacctgacataacctggcaccaggatgattgttcttaatgagacgcgcaggcctggggagacagccgtttctgctctggaaaacatctccagaaaaggtcccaaaacacgtctctgggcaacaggacaccctaattatgatacctctaaactgagtagcctttgcttctacaaccataatttctcctaaaatttcaaggccagtatataatatcccaggagagctctggaagctgggaaactagcaactaggtttggggtcggggggagggctgttagttaccgagaggagagccagtcactagagttggaagaggactcaaaaagctggtgatgggtgcccagtggtttcctatcaaggtgtctcagggatttggagatgggggcacagatacttcattcttgatggcaaaataggcaaagaaaatggggaggctggccgggcccggtggctcacgcctgtaatcccagcactttgggaagctgaggtgggtggatcatgaggtcaggagttcgagaccagtttggcc

SEQ ID NO: 206727 - DNA, 1000 bp, Homo Sapiens
gtctctatctctgttttggtaccagtaccatgctgttttggttaccgttgccttgtagtatagtttgaagtcaggtggtgtgatgcctccagctttgttcttttggcttaggattgtcttggcaatgcaggctcttttttggttccatatgaactttaaagtagttttttccaattctgtgaagaaagtcattggtagcttgatggggaaggcattgaatctataaattaccttgggcactatggccattttcacgatattgattattcctacccatgagcatggaatgttcttccatttgtttgtgtcctcttttattttgttgaacagtggtttgtagttctccttgaagaggtccttcacatctcttgtaagttggattcctaggtattctattctctttgaagcaattgtgaatgggagttcactcatgatttggttctctgtttgtctgttattggtgtataggaatgcttgtgatttttggacattgattttgtatcctgagactttgctgaagttgcttatcagcttaaggagattttgggctgagaccatggggtattctaaatatacaatcatgtcatctgcaaacagagaaaactggacttcctcttttcctaattgaataccatttatttctttctcctgcctgattgccctggccagaacttccaacactatgttgaataggaatggtgagagagggcatccctgtcttgtgccagtttttgcccattcagtatgatattggctgtgtgtttgtcataaatggctcttattattttgagatacatcccatcaatcctagtttactgagagtttttagcatgaagggctgttgaattttgtcgaaggccttttctgcatctattgagataatcatgtggtttttgtctttggttctgtttatatgatgaattaaatttattgatttgtatatgttgaaccagccttgcatcccagggttgaagcccacttaatcatggtggataagctt

SEQ ID NO: 206728 - DNA, 1000 bp, Homo Sapiens
tgacgcaaaaccatggcaagagttccgggagcaccaaggcaaggtcacaaaagtggcacgatgaccctaccctgggatgcagctcagcctgacccagcccaactcaacccagctaccctggaggctgctatgagctgagccgggagctgggaaagggcccagcattcctgtccttctgccaaagccggcttcttaggaccccagtgttgtggctcctcctttggtcttggtttctttcccaccagattataactccaccagagtaggactttatctatcttgtgtactgctctattttcagtgcctagaactgtgcctgtcaatcaatacaggctgctgaaaaggctagaaatacaggatcgttgatgtcattactgttacagtgctgttcccgtgggaagcagcctgcatctctctgtagacagctccaatgtcagccattggagaatttgatggagattgaagtcaaaacataatcataggggaaaaatgcacaacaaataaaatatttccccttttgtccagacttttcagacaccccgtatttactggatgagttgatctacaaagtgaaaggcataaattaaaggctctctaatgtttctcctcctctgaaaccccatgattcagcagcgtctcccatgtgtgctcaaaagttggacgtgcctccagcctaccctccaaagcagttgccataggctcttttcttccaaggttgggagggacagttcattccccaagaggcctctccaggggcggaggcgggtgctggggctggcctgtctgcagctccctggccctacccagtggggatcgcgtgtcagtactggggtttggtgggctgccaaggggtgagccctgaggtggttttctgggaaggatagatgccatgtgtgactcagaaccaagttagggaaaaaacaagctcactcaatctctagcaccctctgcctggcctggctttgcccatgagctcataaaagaggaagctgggccggcc

SEQ ID NO: 206729 - DNA, 1000 bp, Homo Sapiens
tagtggtgcacgcctgtgagtcccagctactcaggagactgaggcaggaggcccgcttgagcctgggaggtaaaggttgccatgagatgagattgcgccattgcactctagtctgggtgacagagcaagactctctcaaaaaaaaaaagaaaaagaaaacaacacacacacttaaaaataaattgatgacatcacagaagggaaaaaataaattgatggcatcacagaagggatcatggcagacgggaggcaggactagactgaagctccagaccgggcaacatgcggaggcttgattgcaaatgttagctccagactgactgcaagaaaaaatcagcaatctcaagaggacccacagaccctctgaagaaagcggactgctcctgcagcacccgggagaaaccccaaatattgggagtgccccaactgcagaaatgggaaagggagaccctcctctcccaaacacacacccccactggagaagctgaaggtctgtttgcaggagaagtttccaactttacctggagctgagtcaagttagagaggcaagcgaaataacaggggtagaggaagcagcagaaaggccctgggagtttgctgggtccccaagcaggccattcctgcctggcaccacagggatccattgggagggtggccagaggagcaggggataaaactccccagggagaaggaattctctagctgaactttgtaacaatttgaacagggtgagaagcctcctgaccagaactcaaggtagggtgcaaatcctgcatgcagacttcaccggcagggggaaaactaaagcccttttctcttgcagctgggaggcggatagcctggggcaagcctgctgcccgcctgtggcctggaaacagactcagagttgtgagaggggcacggtgggagtgagaccatgggagtgagaccagcccttcagtttgtgtgggagctgagtgaggcctgtgactgccggctttcccccactttactgacaacc

SEQ ID NO: 206730 - DNA, 1000 bp, Homo Sapiens
gcaatggtgtgatctcggctcactgcaacctctgcctcctgggttcaagcaattctcctgccttggcctcccaagtagctgggattacaggcatgagccaccacacctggctaattttgtatttttagtagagatggggtctctccatgttggtcaggctggtctcaaactgccaacctcaggtgatccgcctacctcagcctcccaaagtgctgggattacagtcgtgaggtgagccactgtgcccagctttgttactgttaatagtgctgcaatgaacatacacttgcatgtgtctttatggtggaatgatttatattcctttaggtaaatatccagtaatgggattggtgagtcaaatggtagttgtttttagctctctgaggaatcaccacactgctgtccacagtgattgaactaatttacactcctaacaagtgtataagttccttttctccataacctcaccaacatctattatttttttacttttttgtagccatcctgactggcagatgatatctcatcatggttttgattttgcatttctctaatgatcagtgataattgaggttttctttaacacgctagttggctgtatgtatgtcttttttgaaaagtgtctgttcatgtcctttgcccattttttaatggagtgggttttttttttcctgtaactgtgtttaaattccttatagatgctagatattagccccttgtcagatgcatagtttgcaaaaattttctgtcatttggtagattgtctgccctgttgtttattttgctatgaaaaagctcttaaatccaatttgtccatttttgcttttgttacaattgcttttggtgtcttcatcatgaaatatttgccagttcctatgtccagaatggtattgcctaagttatcttcaggatttttataattttgggttttaactctttaaaccatcttaatttttgtacatagtaaaaggggtccagttacgatcttctgcatatggcc

SEQ ID NO: 206731 - DNA, 875 bp, Homo Sapiens
actccttggggaaagggcaatcccccgagccggttcccaggccgggtggagaccaactctggggtctgttggtgggagagtggggagcccgtcttctgctgagtgctgccgccccttcccaggacagcggaggtggaacttcgtcgcgctgcaacccccggctcggagatgggatctcactatgttacccagattggtcttgaactcctgggcgcaagccatcctcccacctcagcctcccaaagtgctgggattacaggatcctggggcgtcctttggcagtcgattgcaccctgcactagagagaagtccaggaatgatatattcttgggctgtatttctctaccctggagttcatccagttcatcccagaaacactgacctgattactgtgacaaagtctgatggatagaccctttctgttgaccttgtggcgtttttctttcatgtggaagttggaagacaaggtgaaaggggccaaaagttacctgctttggtgaataggagtgctctacttggttctcagaacatgggccctcgtttaaagctgcagctgtgatcctcggctgtctgttggcattgacgggacctgatgttttacgttattgttattctataagaacgggcagcctttccctgcacatcggcctgtgggactaagagttcacatctctcatgtcgagctagcagtggaaattccagtgacccaggaagtccttcaggagcccaattccaacgtagtaaaagtggccttcactgtgcgcaaggctgggcgttatgaaatcacagtgaagcttggtggattaaatgtggcatatagtccctactacaaaatttttcaacctggtaggaaaactttaaataaaaaaaaaacc

SEQ ID NO: 206732 - DNA, 1000 bp, Homo Sapiens
agtgactaagaatggatacgtttgtcctccaaagcaagatctttcttttttccttccagaaagagtaactgcagtaattaggacccaattgatggcaaagggatatgatctaggtgagtccattggggtgcagttctggagggggaattcaggaccttcttcttacctcctcctacccctgcaaatagtctgagactcactaataactgacagtggtattcaaattggaacagtggttcttgcctctgacctttgcatatgctcaagtagtcatctgtccttctttctcatcctctcctctttattcctttcttccttcttcccctttccctccatctctattcctccctccttcccttcgcttctccttcccttctccctccttccttccttcttttcttatcttcccttcctccccaccttgcctacctctcacatttccattttccaaaaaaccttttttagccccttttgtgtgccaagcacactgcatggtactggatattcctgatggagctcatcttcccttccatgttcccttttcctttagcaaacttcactgccaacaaaatgtgttaatattctctgtgtaaggtgttctgctagattcagggaggtccgtggcttcagcgtgaatctgaaggatagagctggggagtgtttttaaatcatgatgacattgttcataaagattgtgtcacacagattctactacctatattttggggtgggagggagagacagggaatgtagtttaagaaaagcaagcatttatgtctgccagtgttctcaaatgagctcatgtatgaagtgggacatggaactcgctgacctttattggcctctgcattcagactacctggggttgaattctaactcctctgccttctgactttatgagcttgggctgtttacctaacttctcagggtgtcttagtctatttttggtttcttataacagaatacctgaaacttggtaatttatgaagaaaaggaattc

SEQ ID NO: 206733 - DNA, 1000 bp, Homo Sapiens
cggcaggcacagtgaggctggtgtggcggccctgcagggcgggaacctaccccctgcccggggtccagagcggggtcaggcagaggtggtggggcctgccacggcagtgtggctgtggcccaaggcaggtacccaggctcatctgtgggactcagaggctggccacaccacactgcccacagggagttcgctgagtggccctggctcctgctcctccaccgtggctcccagctcccctgggcacacccacggccctgaagctgctccatttgaggatgggaaggggggaggggccgggggggcaacagctctgagtcagcacttcccgaatgtttgctgagggacatccaaaaggtggacatctgttccaaatgctgggacacgggggtccacctccagccacccagtacttgtgctcgagaggaccccctggtgtttgccggtgttgcttggagccttctgctgtctgggaggccctgccctgggacctggcaacaggctcagctccgactgtgcagctgggccctgtccttcctcccctgcctgtcctgaggatgctggccccgggggtgccctgcctgtaacccacctgcccccagaaggcaatggtggggccccttctctttgcatgcaccccctttccttccttccctggaggctcagagcagtgggcaacatggggagggaggtctgtgcggggtggccggcccgcctgggagggcccagggaggacagcgcagaaggggcagctggccagagctgggccgaggcctgcggccaccttaaaggcgctaagcagggagggagggtggcgggcagtgggggcggggcttccagctaattcattaaaatgtgtcgggagcgtgggaaagaggagagtgtttcttcccagcagcccagacacctggtagaagggctgagaggatcgagatcaaataacaaacactcagcccgggccagcacaggccgcggcggaggaaggacgcccgggcaggaactg

SEQ ID NO: 206734 - DNA, 1000 bp, Homo Sapiens; identical to SEQ ID NO: 203676

SEQ ID NO: 206735 - DNA, 1000 bp, Homo Sapiens
gagggatccccccattcattactgaaatccatgctatcttgccgtggatggtcacctgcacaacaaaagaataagtaaataaagtcaacaatgacaacagtaaacctgaagtctatttaatcttctgacatcgtggtttagggttaacaacattctcccttgtgacaaactaagacacaatgtatgccaaatcactgatggtgtttattaccaattagagcctattttctgagatgtcaataggaaggattttacacttaaaaaaaattagcctaagatttagtaatttatgcaatgttaaataacaacaatatgagtcatggggagattaagagtttgttatttagcccactccctgttactactctggacaaactttcaaacaaattagatccatctttcattcaataaatgacagtgataataagacaaagctctggttacattctagtaggaaaagaaacaaaacaattacacatataaggaacagtgacataccctacacagagaatcaacacagggtgatgtaacaaatgtgactggatagctacataagactgaatggctagggaagaccagttaagaaggtgacttcagctaaaccgtaaaaaaacaagaaggactcaaccatttataaatcaggattaggtattccacacagaaataacagcaacagagagaagaccagcacagctgataaaggggagaactgtaggaaatggggcaagaactgtaagaaatgcggcaggaatacatgtgggttttgcaagcaatagaaatggtctgccttttacctcaagtaaagtgagaagatattgcagagttcgaagcaagaagataacagtatctgatttatgcttaaaaaaaaaagttctttatgggtcatgtgaagtttgaaaggcctatttgaaatccatgtgaagatagccaggaagcagctggatagagaaattacgaatttcagagaaaggccatttctggagagagagatttggaattc

SEQ ID NO: 206736 - DNA, 1000 bp, Homo Sapiens
tgttttgaaacccctttctgctcattgtttgtcatctgaattttgagtgttgaggattaaaggaaagaatgtagatccttcatcaaagctttgtgtcatccatcaatttgataagtatgccttcatgctttcgatgtcatcattcaagtctttgtacaaaagataaataatatcaatacaaacattttgaaaagttatctttttctatcttctaacatataatacttacacatatacttacattaaataaaaatattgtttactacttacacgtagtttctgtgcttcttgactagccaaaaatccagttctgtggagttattaatttttttaagctggtacccttctcaccataaccttccacaaataatttcatgatggtcaacagaaatacatttctttctccccaggtagagtcagctctctgaatggaaaccctagagtaactcctgtgttattaacaaatgaaaatattatcaggagcagcacccaagaatgagaactaggagataattgagcaatgcatctcatgaaagtgtacaaagtaaagaaaaaaaaaacctcctttttggcccatgattgttaaacagaatgcagagttgacttctggattttcaattaatttttctgtcaaattcttacttgacttgactatgccactgctcttgggtttcagcctgagttgaacacatattttcaagacttaagaaggcatcccaaaaacaaaattcagaaattatatatttcttatactgaacaatctgtgtccatgtgtgaagagtaaagaaggaggatttagttggaaaatatctataaaatgaagtacatctgtaggcatagaatggaatgatcattcctctggtcttgtagtgagcagaagttttagattcctatgatgtcatatcagcacttaacccagaagtgtctgaacactgtgagctaataaattaacttggattgggtttctgtctcttttagctgaaaaagacctaattcagta

SEQ ID NO: 206737 - DNA, 1000 bp, Homo Sapiens
ggtaggaattgaacaatgagaacacatggacgtaggaaggggaacatcacacaccggggtctgttgtggggtggggggaggggggagggatagcattaggagatatacctaacactaaatgacaagttaatgggtgcagcacaccaacatggcacatgtatacatatgtaacaaacctgcacgctgtgcacatgtaccctaaaacttaaagtataataataataataataaagaaattgacactagacaatacagaagaagggttctgattattcaagactgcttttttacttcttttacaatatggacttttctatgatatgggcactgaaactaaagcaaatggtggaataattggtaccatataggaacatttttagagaaatgataaagcaaaaaatacagacagaaattatgatgttcttctgtagttacaacgagtgttcctgcctctcctgcctcccgttccacctcctccaccccttccacctctgccactcctgagacagtgaggtcaacccctcctagtcctcctccttctcagcctactcatcttcacataagaatacagtatataatatgtataacataaaaagtatgtgttaattgactgtttatgttatcagtgaagcttctggtcaatagtaggctattagtagttaagtttgggggaataaaaaattacacatggattttcgactgtgcaagagtcagaagccctaacccccacattgttcaagtgtcaactgtacttccatattatacaaactcttcctgagaacaaataaagagaaaatactcccatactcatgtttaaggcaagtataatctttatatcaaaatcaaaccaagacaacacacttacagaccaatctcactcacaaacatgcttgtcaagaacacaaacaaaatatattagcagaacaaatccaagaaaaaaagtaaagacatgaatcatgttcaaggttgcttaaattttagaaagtatattatagaattc

SEQ ID NO: 206738 - DNA, 1000 bp, Homo Sapiens
tcggaggccttttcaggagaaagtgtggatttgaactgaagaattgcataaaaaaggcagggggcgggcatttggaagtcctttggtcaaaaacacctttccattttcatgttggagcctccaatacattatatgttccatgcagaatacgaaagaagtctgtgcaagatacagacccagattgaattacttactattcatttcgtgtcacgtcaacaaagatgggaaccagttaaggaatgggggtggatctttataattgagaaattcagatgttctgaactttgggacctgagatgatctacaaatccagacatgggccgagacatggcaatacgagggaagaactcaagcaggaggagaaaagactgcctatccaggcaatagcgtgacttagaaacaggatttgagtaccacttcatggctaagcatgtgcgggatggaaccggtcttcctgggcttacatctttgctttgcctcttctttccctgtgatgagtcttggggtaggcctcaaaggctgaatcttcaatataaatacaacagtgaatgaacaacaaatggttattttaaagatctatcttggatggctatttaatttcactaaaccccaggttgctcacctgttgactggaacaaacaatagtcccttcttcatgcgggcatggtgagggttttaaccccgcattgtccacaaagaccacttaaattatagtagatgctcagcaaatctgagctattatttttatcacgactgtcagaggtcagatcaggcttcggggtcagacacacctgggttcaaatcccagcagggccacttactgttggagccggggcaagtcagttattctccctgagggtcagttttctcatccctaaaattccaactaataatactcatctttcagtgatgccgtgaggtcttaaaaataatataggttcagattgataaaacaggctggcacaaattggatggcagcaaatgtccttgcagccctgtg

SEQ ID NO: 206739 - DNA, 1000 bp, Homo Sapiens
tgtgttgtgcatatatacatatatatgcatgagcttgtgtatatgtgtgtgagtgtatgtgtctgtgtctgtgtatgaatgtgtttgtttatctatatgtatatgtgagtgtgtttatgtttgtgcatgtgagcatatatatgtgtgtttgtgtttatatgtatgtatgtgaatgtgtgtatgtatgtctctgtatatgggtatgttagtgtgtggatgtatgtggttccaaatatgtgtttgtgtgtctgtgtgcatgtttatatgagtatatatatatatatatatatatatatgtgtgtgtgtgtgtgtgtgtgtgtgtgtgtgtgtttctgcatctctgtgtgagtgtgtgtgtaagttttcattttaatgtagtctaaagacaatatttgatattttacagtaccattaatgcaaacttttccaaatcttctggtagtatttttgtgaatagaagatgcataatgtaatggaagtgacaaacatgccacaatctggcatagaagctgtgatgcagtgtctatagatacataaagtgtcacatgacctctaagaagcctcttgcttcacaccagtatatgacattgaaattcagcagttttggggacatggtgttaagcaaaggttggcacattcatcagagacttagacaacctgtaaagtttaagactcttgcttcctttaaaaaaacatgtaggaaatatttttcaggaagatggaaacatttttggctcactatcttttgctgtttattgccccttgtggctttatctgatttttttttcctgagtgactcctttcatcaaagttgccagtgaagagcttctcatggtttatgatgttctgtatgaagaagtgttgttactgctctcatttatgttctgtttttacttgtttattaagaaaatatgtatgataatacaccaaaagctataaaggcaagtggaaaaatagcaaagtattggtataataaattgttatcaacaaactgctgtat

SEQ ID NO: 206740 - DNA, 1000 bp, Homo Sapiens
aggctcagatgggaactcaaagttgtaagataagctcttcatttattttccttaatcagggctgtcttggttttcctgcccctggggcaatagtggcaatgtgaggaacagagaccttgcccctttgtaaaggaacaagtggagtaaccactctggacctatcattggacctgactttaactcagtgtttctcaacagtgcaaccaaatgtcaaaaatcacagacaaacattgtttgcacttgcttgttagttccaggattaaatagacagtcttttattacctaagttctaaaatgttttggttttattttttccctatcataattttttaaatttagttttcctattttatttattctaagctctttcatctactcacatatgatgacccccaaaggtaaagcatactaaccgcttcttatatatacattcatatttttctccctgatcaaaatccattacagatcatatgagtatgtctatgtgtgtctgtgttcacatttatacagatttttaaaaatcagcattcatttttgaaataaggatcatattataagcacttttttgcatgttgcttttttcctttctagtactttaatggggtatttctccaagctatctgttagctctaatttacagaataatttattcacttctctaacaaaaagcattcattctatctcatttttgatactttgaacaacactgaaataaacttttttatacaatttgttaaagcatgcttatatttgtatttttataagatatattcccaaaagtaaaatcacctgatcaaacagcatatatcttttttctaaagaaaaactgaagacactttatttttatcattattgaagttaacaattgacaagcccattagagaaaacattttacataattttacatcactgacttagagcccacacatacatgacaaagatagctaaaaacatatgaaaaaatatatctttggaaataaacacagcattcctctggcta

SEQ ID NO: 206741 - DNA, 1000 bp, Homo Sapiens
aggctgaatttcttttaaaattgcattcacgtaggttataatgcctaagcaatctacttttggctgctgctgtgatgttgtacagtgacttctgtaaatcaggctcaatttttccctcactaatcaactggccatagagaacttcccatgaagacataggtatagattctattattcctacctgctgatgaagcaggatagttaattggaaaacacttatttcatgataagcagctcatgttttcatattttttttgcattgataggacttcagtttctacaatggtccaggatcaatcaagagttctttaaagaaaacatttattttgtcaaagaaagaagcattttgttccaaatcctaagaacaatagtagtggtgtgtcagaggctctattgcatctggatataaaaacaaaggggcacaatattcctgaccagttgggaattattatcttgatctcaatcccatcaaaatgtggcagcatgacaagtcatgaagtaaaaggcccaggtgataaaatgaggtctccaaaatccaaagcatcaaagttcttagttagtggtcagggctgcaaagtgccataattttgcactttggaaggtatatcttgagaatattgagtgtatgagacaagttaaaaggtcatgcagccagacgcggtggctcacgcctgtaatcccagcacttagggaagctgaggtgggcggatcatgaggtcaggagttcaagaccagcctggccaatatggtgaaaccccatctctactaaaaatacaaaaattagtggggcatcgtggtgccctcctgcagtcccagctacttgggaggctgaggcagcagaattgcttgaaccctgaaggcgaaggttgcagtgagctgagttggcgccactgcatccagccttggcaacaccgcgagactctgtctcttaaaaaaaataaaaaaataaaaataaaaaaatgtaaaagttcatgattaacacctctgttagcttctgatc

SEQ ID NO: 206742 - DNA, 1000 bp, Homo Sapiens
catgcctagccttgaagattttttttttctcttaatttgagacagggtcttgttatgtcacccagtctggagtgcagtggtgcgatctcatttcactgcaacctccacctcctaggcttaagtgatccttccatctcagcctcctgagtagctggaactacaggcacacaccaccacgcctgcctaatttttctgttttttgtagagatagggtttcgccatgttgcccaggctgatctctaactcctgagcccgtctcggcctcccaaagtactgggattataggtgtgagccatcacgccaggcaccctgaagatttttaagacaagaaattatccacttcttagctgccaggttgtttttgatattttgttgtttggtttttctcttcataaatgtaaccatctaatgaaaagtttgaaaaataggaataaaaagacagcgccttctcacagcctcatctgcccatcctaattcatttagggcactggttttccttcccattgtgttgcctggcagtgagatagcaaacgtttcctgcacacctactgtgtgccaggctcttggccgagtgttttgtatgtactctgtgatttagtcttcctgtcaaactcatgcaattcggaactctgttgttgtaagcttgagagactggctcagactcatacagcgtgtgtggctgggggtggcagggtgggaactggaattcaggtccatgtgagagtaaacccaagctttccatgcctggaaaggagaaggtctttttaagcagttgtgttcacagcaaacatcccatttcgcattctgctatttttacttaacagcacattgtcgactgagcgaggtggctcacacctgtaatcccagtattttgggaggccaaggcgggtggatcacttgaggtcaggagtttgagaccagcctggccaacatggcgaaaccccatctctactaaaaataaaaaaaaattggccgggcacagtggctcactcctgtaatc

SEQ ID NO: 206743 - DNA, 1000 bp, Homo Sapiens
accaacccagcactccagggaacctcttcacttggacttctggcatctagaacaaatatctgttgctctaagcctcctggttagtggtacctgttagggcagccccaggaagctaatgcaccaacccagagtcctctgtgttttgttcccaaacctgcttataccagtggcctttgttattgtaatgaggtaattgagttaaacattacataagcccatcgctctaagtatgaaaagagagctgcagctctgaaaactgcatcaactgctttggaaagaatagataaaggtaagttcttaaatctattgcagttgaattaggttgggcaagtcaaccatgaaagatcggaaaataaatcatatgaatctaaaaggattctaacctcagattattttatatatgacttcaagttctcagtccaccccaaagaaacctaaactagaaatgaaagattgaatattacaagtgtgttttatgagagggagagagagattggaattccaatcaggggagctgtgctcaaagaaaagggctttgccttatagcaaatgactaacaaaatgacatcgtgttatatgtttcatgttaaaacgaaaatatgtatggcacccatgttgcatttttttatctttccccactttgtccaactttcacttaaccaaataacccagttatgtcagtttagagggtttttctcaacatccaagctctttctccaaagtctggctgcgctttgaaaaaaatcctaagcaaatggaagagggaaaaaagatcttagatacttggcgtctgtgtatttggccacacttgtgagcaccccatagctgtcctccaaattctacttgctattattatttaatgattcattcaccagttactgtcatttcctggctatggagatttcctcctcagctgccagttccctgaaggcagggccctatcgcatagcttgttcacataagagtccttccctgcacggtgtttgtaaacataagctga

SEQ ID NO: 206744 - DNA, 1000 bp, Homo Sapiens
tcccaattaccctgatttgatcatgatacattgtatgcatgtatcaaaatatcacatgtgtccaggtgcggtggctcatacctgtaatcttatcactttggcaggctgagtgggtggatcactttaggtcaggagttctgagaccagcctgcccaacatggtgaaaccccatctctactaaaaatacaaaaattagccaggcgtggtggcgcgttcctgtaatcccagctactcgggaggctgagacatgagaactgcttgaacctgggaggcgggggtttcagtgagccaagatcatgccactgcacttcagcctgggggatagagcgactctgtctccaaaaacgagagaaaaaaaaaaaagaaaccaaaaaactcacatgtaccccatagatacgtatgactaccgtttgtcaataacaaaagaaaataaaatggcaaccacacacacaaaaaagttgtggttctgagcatatgaatcaggctgcttagacttgaatgccagctttgcctctcctggcttagtgacctggaccacaaagaagaggccctaatccagcctggggagaagttagggacaccttcctgaagaagatgcctcctgaacaccagcctgtggaagaggggttgggaaggccattccaggtagtgtcaatagcagggataaaggctgagaggcaagaatcagtatggggtacgtggcaaagtcagcagcagtttcatgttgctggagcagagagtagaagggtgggatggggagagctgaggcctgagaggcaggcagggctgggtcatgcaggccttggactttattcagaatgaggcgggcagcctccgaaggttcagcaggggagagacaggtcaactggacattttcagtagagtaccctggccacggggtaaaggctgaacctatagaaggacaagtgtggaggcagagactgtagttaggaggctgatgcaagtatctatctggaacgcaacaaaggtcaggactcag

SEQ ID NO: 206745 - DNA, 1000 bp, Homo Sapiens
tgacaaaaattatttagaacttgtagggtggaaaaattgaaagtgccattttctggctatttggaactactgtcgagtttgtattggggtcaagcggcattgcagaagaaaataagatggttaaattttaggtcaggtgagagttgaagaggttttaagttcttaagaacacaggctaagggagaagaaggaggaatggaaggtgaaagcttgcccatagtgaaggaggcaagcccagagaaaagacagtagagacacagagaaggggtgggggtttcttgccctccagaaaagcagagaaggggtcggggtgtggaaataaggggttggggcacagagataagaggtcagggcatggaaataagggatcggggcacagagataagaggtcggggcacagaaataacggatgggggcacagagacaagaggttggggttcctgcccctcccccagaaaagcgggacttgccgctaagggtgaaggaccaaggcaggcgtccctgcgtggtctgacaccactgaaacctgggtgaataatcagagaggcatccttgcaatgattaaacaccaagggacggctgccttccctagtccgtgactggtgccggagttttgggtccacagataaaagtgtctcctttgtctctaccagaaaatgaaaggaattgaaattaagagaagggagagattgaagtgtggcgccaagattgaaagaagaaagacgttgagggatagtgagagaggttggagaagagagtaaaaaaggctgcttattggatttaaaattggtgagatgttccttgggctggttggtcggaggaccagaggttgtaggtggatctttctcatggagcaaaatgcaggaggacaggggattgatctcccaagggaggtcccccgatccaagtcacggcaccaaatttcactcgtgtctgtgtgaagagaccaccaaacaggctttgtgtgagcaatacagctgtttatttcacctgggtgcag

SEQ ID NO: 206746 - DNA, 1000 bp, Homo Sapiens
gactggagtgtggtggcgcgatcttggcttacggcaatctctgcctcccaggttcaaacaattctcctgcctcagcctctcaagtagctgggattataggcacctgccaccactcccggataattttgtatttttagtagagatggggtttcaccttgttagccaggctaatcacgaactcctgagctcaagtggtccgcctgcctcagcctcccaaagtgccgggattacaggcgtgagccaccgtgcccagtgaaagcaagactcttaaaaataagctattacgggccaggtgtggtggctcatgcctgtaatctcagcactttgcaaagctgaggcagcaggatcccttgagcccaggagttcgagaccagcctgggcaacaaagtgaggcctcctctctacaaaaaataaagaaattagctgggcatggtagcatgtgcctgtggtcccagctacatgggaagctgaggcaagaggatcacttgagcccaggaggtcgaggctacagtgaactgtaatcacatcaccacactctagcctgtgtgacaaagcgagaccctgtctcaaaaaataaataaacaaaaaatctgctgggcacagtggctcacgcctgtaatcccagcactttgggaggccaaggtgggcagatcacttgaggccaggagtttgaggccagcctggccaacatggtgaaatcccgtctctactgaaattacaaaaattagccaggcatggtggcacatgcctgtaatcccagctactcagggggctgaggcaggagaatcgcttgagcctgggacgcagaggttgcagtgagccaagattgcaccgttgtactccagcctaggcaacagagagagactgtctcaaaaacaaacaaacaaacaattatgctaacatataggtcagcacagtcgtttaacaaatgcttttaatctaaatatttatggaatgtttaattagaaaggtttttaatcaataattttagaaattttta

SEQ ID NO: 206747 - DNA, 1000 bp, Homo Sapiens
caggggttatagccagggatgggagtagagaggattttcactttttttgttgtttgtttttttgtttttgagatggagtctggatctgtcacgcaggctggagtgcagtcgcgcgatctcagctcactgcaacctatgcctcccaggtcaagcgattctcctgcctcggcctcccaaggaactggaaccacaggcgcgcgccactgcgcccaaggattttcacttttaactgtacagtgaagcacagacttctgagccagactgcttggtctgaactctggtgtcaccacttagtaagttctggtttgaatgtactcactgagtggtcttcataaattacctctctgcacttgagtctcctgtctgtaaaatggggataataatcattacaacgaagcctcataggattctggtggagaccaaatgcattaatacatatgcaaagcatttggaacagctggcatatataagtgccatatatctattattaaaaatttttaaattatagaatggattaatttttggattttataagcagattccgccccccgccccgccttaaaactgttatgaaaaagcaagaaaggccaggtgcagtggctcacgcctgtaatcccagcactttgggaggccaaggtgggcggatcacgaggtcaggagttcaagaccagcctggccaacatggtgaaaccctgtctctagtaaaaacacaaaaattagctgggcgtgcgggcacctgtaatcccagctacttgggaggctgaagcaggagaattgctgccactgcggaggttgcagtgagccgtgattgcgccactgcactccagcctgggagacagagcaagactctgtcttgggataaaaaaaaaaaaaaaaaaagaaaaaagaaaaagaaaaagaaaaaggaaaggggaaaatttttttttagacgaagtttcgctctgttgctcaggctggagtgcagtggcgccctcttggctcactgcaagctccgcctccc

SEQ ID NO: 206748 - DNA, 1000 bp, Homo Sapiens
atcctgctcctcctggcacaggatcttgggcagctctactgctgattcaaggcacactttcccgatagtgacatgaggtacaatatggattgggatttcgattctctcatacctgtgaggcaatcagttcaggtcagtttttaaaccctgagttgttataatcagaagttctctacagttttaattggaagtttgggatatggcatactttaaagattaagcattgctgtaattcatttagtgatgcaacttcaaagtggatagagttcaaactgggttcgtctggagagcaaactaaaagcccgtctgcagagccagtattccctagttccatagagaatctaagaccacttctgtaaatttaagagaagccttgagagctcaaggtccttacgtctgctccccagtcaggggaaatagctaattaatactgtcttcagtcaagaagttgccagtgaggttgaacaaattaatcacaaaagtctggagaagaggaactacagactcttcaatgactccatcacattcattatgtaggtgggattactcacttgttctaactcagtgtttaccagtggccctcacttcccattttctcccctggggggaaataggtaagaaattcacaaatattcacatgctcatgctagagtgggagaaacagaaatgtttgttactaaggcccaaccaatctacctctacccacttctcaccccaaatacacctaaactctacctaccagcaggttcagtggagaattcaggttgaaggcccctggcactgtgaggccccactggcacatggtggtaaggcagcttaagatctagcttccccatcccagcagaacatgtctagtccccataccacaacctagatggaacacaaatggtggggcattacaagccctcccctccccacacccaagtagtcagggtgtgcttccatctaaaatcatatattttcagtctgaagaacttttaatatttcttgtagtgaattc

SEQ ID NO: 206749 - DNA, 1000 bp, Homo Sapiens; identical to SEQ ID NO: 114847

SEQ ID NO: 206750 - DNA, 1000 bp, Homo Sapiens
aattattttagcaaaaaagcatgtgtgtacatgtgtgtatatatatgtatatatatataaaacacatagtatatgtagtatgtacgtgtgtgtgtgtatatgcatatgtatgtgtatgggaggatgtagggaggaagagagaaaggaaggggggaaaggcaggaagggagggaagggaagaaatagagaatgcacagtgggacaaaatgttaataacaggtgaatcttgagaaagggtatatgggtgttcagtagtattcttgcaaatttctgtaagctggaaatttttcaaaataaaaacttaagtggaaaaagaaaagaaaagcagctggaatcaaataatccagtaggcattaaaaaaacaaaacaaaacaggttttctgatcctttgagatctaggcaaagaacagggtaggaaaaacttccaaccttcctctacaacattaaattccttgattcaatctatcaaactcctctaagtaggatgggattatgttatcgaagatacagttagcccccgcttactcctgcaggatatgttccaagacccccttgtggattcctgaaactgcagatagtactgaaccttatatatatactgtgttttttcttatacatacatacctatgatatagtttaatttataaattaagcatagtaagagctcaaaataataatgaaatagaacaattataacaatatactataataaaagttatgtgaacgtagtctctctctctgtctcaaaatatcttattgtactgtactcacctatttgcagactacaggttgaccacgggtaactgaaatatcggagtcaaattgtagataaggggggactatcatacacagaaaggcatcacaggtatgccactactatatccagccccttaatttcatttcatttcactaaagagtgtatagaggtcacttaccttgccccaccaaaatacccatcttgcatttttcggagtgctgccaggatacttgaattcaagct

SEQ ID NO: 206751 - DNA, 1000 bp, Homo Sapiens
tcatttttggcaggatagcccttctatttcaagaatttgtgcttagattacatatatgaccatcgccggtgctccacgatcctccacgaacatttcactgcacatatgatcagatccactgcttaccactattttcaatccttttcacctcccactatcttgacgtttctgttttgattcattggtgtggctggagaacttgcataagtattttctgcagatacactatctgagtccttgcatctctgcgaatgtctcactttaaccctcactggtgaggaggggtgtagtggccggtcgaaggactccagagcttcaggctcttttctcttgtggttcaagaggatttgcccctgatttctagtgctgtgtgttgtcaatgctaagtcaggtgctggcctgtctcctttccctttgaaataactggctctttctctgtggatgcttggagattttctttgcgtccttggaactcaggaacttgtccgggaaccacctaactgagctctgggtcgatgccccttcagcttgcgggttcaaatctttcttcagatccggggagctctttcctcttctgtttcttcagttgttctctctctgccatcatttctttttctcctggaactccagtcatttgaaccttcacatttataaccaccttctccctcaccattcatttattcttgctctgtattttgagatatttctccccctttgacctacaggctgctgattctgtttgcaagagaactgtcctctctctagttcgtttttcaattttaaatctgacagtcgtgcttggggagttccctggtggtctagtggttaggactcagtgtattcactgctgcatcccaggttcaatccctggtctgggaactgagatcccacatcaacctgctgcacaccacagcagcgccccccccccaaaaaatagcatgctttgtctgggtaagaagctctttggcagtaagtacctttatcaactcccgtgaagctt

SEQ ID NO: 206752 - DNA, 1000 bp, Homo Sapiens
tggtatagcaggttttttcctttttttttttttttttttttgtttgtttttttgtcttgccagatacatcagcaaatatatgttcaggacaagaaggttgtgaagcaagaaaacgaatgaaatcccaacgatcagggggatgttaaaggagctttactacccattggcaaatgttaacaaagattcctggaaagaagttcagttagcacagcgctgaggggcactcttcttcctttggcctccgtttcacagagtacttgcctgagaggggccccttcgggccccgtggccaggcagtgccctgatagcgcccgccttctccaagcctcacttgtgcattggcaaagctttctgcagccttaatcccatcacctcctgccagccgtgttgtgagcctgcctttcctcttagcatctccctcttggcagactggcgagcgagtgagcaagggcaatgcttgtctgcagccactcagctagtccatgcagaagccaggaagtgatcttagagctgtctgactacagatccttggcctctccctctgtggtctgaggaaaattcccctgacctcagccttgagtcacctctgaggtcgagaggtctgcggaggcagaggaaggctgggacacaccagtgcacaccagctcagccatctcctggctcaggagcatctctagagcttgccgacacatctcagttggcaaccctggccgccctcccctgcctccagagcccctatccctgtcattccccagccttgcctgcttaggctcagaactgaaatcccaagaaacaaagaggcgattcaggtgcaaatatccctaatgaataaagaaaggagattcacttgccagattatttaaggcaagttgtcaaagccatttctctttagcaagcacgttacttctgggggcggggagtgcggggatgggggtgagggcctgtaaagggcaccagccactctccaaagcctgtcttcagattccctcctggaaccagt

SEQ ID NO: 206753 - DNA, 1000 bp, Homo Sapiens
tctttctacacagacacagtgacaatctgatctctcttgcttttcctcacaccagtgatatcaggttgttgatcactctgtccttcttgagacactttttgcatatgtgctccatcaatttctgagagaagagtattaaaatctttctttgattataaaatagtctatttctattttttgttctgtcagttttgcttcgtgttttgaggactcttttattaggcacatgcacctttataaattattctaatttcctgataaagtgtcatttaccattatgcaaactccctctttgtatctggtgatcctcattgtgtagaagtttgtttcatctgatattaatagttattccaatgatcttcctcttaccatctgcatggctcatctttttgcatccatttattatcaacctatctgtatattcttattaaggtttatctcttgttggcagcatatagtttggtcttgcttttttacccatcctgataatttctgccctttgattggagtgtgtataccattaatatttaatttaattactgatcaagttcaatttacctctaccattttatcatttgcttctgtttttcctccatgtttgtttttgattctatatctatcttttttgatctatgtattaatacatatatgtatgtgtgtgtatatatatgtatatatacttagagacagatgttaaaaagactcaatttttatagttttttaaaattatactttaagttctgggctacatgtgcagaacgtgcagatttgttacataggtatacacatgccatggtggtttgctgcacccataacctgtcatctacattaggtatttatcctaatgctacccctcccctagcacctcacccccatgacaggctccggtgtgtgatgttcccctccctgtgtccatgtgttctcattgtccaactcccacttatgagtgagaacatgcagtgtttggttttctgttcctgtgttagtttgctgagaatga

SEQ ID NO: 206754 - DNA, 1000 bp, Homo Sapiens
ctccagcctaggcgagagagcaagactccatctaaaaaaaaaaaaaaaaaggtgttataatgcattgggctgtattctacatttgggtttagtacaattcagttacagtcaaagtaaattgctgaatagaaacatattatacgtttgtgtgtctaacataaatctcccctgccttttcttaatccccagtgttaaaaggaagctacataatgactgggttatgaaaattagatatatttcagccctaaattgttttggatcctgctccttagacagtaatcattcattagttttggaatccttgaagagactcgaggataatttgtaagtatagtaatttatatacatgaacagtctgtgaatttcaagctttttacaatgataaaaccatgacagctttgaaactttcaaactggctttaaaaaaatcggacattaactattccatttgtttgggaaggttaattagatttctcaggaagaaattgaagccacttatgcaaatttgaacatgacgtgtcctaacatcaactgtgcccatttgttgtttatttctatcatctactgaaattaatcaatacgagtgcatctataacatatttcaaaatatagttctgttggtaaaattttataattttaaaatcattcttacaggtcagttggctaaccaagagcttgtgagtatgatctgtagaccagtaatcatgtttcatgtgtaatatacaagttggcatcctcatagaaaggttcatttgaatattgtcttattttcaatctggttaaatatgtattaataactagaaaaccgatattgtatcttaatttggggttttaaaattgcattgagatgtatgctacaacatgaatgaatatcaaaaacattaagctgaataacagacgccagacaaaaagactgcatatggtatgattccatctatatgtaatatcaaaaaaagggcacatttatagacacagaaagtacatcagtggttgcctaggac

SEQ ID NO: 206755 - DNA, 1000 bp, Homo Sapiens
aaaaaaaaaaagaaagaaagaaaaaaaaagaaagggaaaaaagaactgcttaggaactgtggaaagtaacaacaaatacactcaatgtagacatctcagcaagctgtacacagtctcagtccactgtgcgaagttagcaccccaccttgtggaaaacagtaggtggtgttcagtggaagaatgtcatgttaattttagaagagctggttgataaatcctgcaaccaccaaactgccactgattcttatataaacagaaaatgcaaaaccaaaaaaagaatgcaaaccaaaagaatccctatttattacactagcagcaaaacttttgtacttccaaaataaaaggatatgagcctcaaaatattggtgcttgtggtatgtgtttggattatttctgtagaaaatatttatttagatatttataaaaaaataaatatttcatattagtaggtttttactcccactggggcttgtatctcttcttagttttgtttctaaaaaatagctgttttctaattgtaactttagaaaatacagaaaaatattcaaagacaaaaccaaaaatcaaccaatatctccctactcttttgaagaagcccccaccccaacactctatctcacagagatctctccctcctctgcattcaaagcactcattgtcctttgcttatctttgatttaaacatacacacacacacacacacacacatacacacagtttgaaagttcttctggtcttctcagtttcgtcagactcttcgcgttatttatcattcctgttactttcttggcaccatgtcttctggagttctctgtcactttgctctgttcccaactgtttgttctctaggaccacctatgaagtcttcacactggaactcccttcactgctgtcctgagaattcccttcccttctctcctggactgaggcccagatccctggaactgagtctcccttttgggtgccccttgttttggtggggcacaccctctgtgggagg

SEQ ID NO: 206756 - DNA, 1000 bp, Homo Sapiens
ggtcacatctagctccaagatactgtcttcgctgaaggccagagaagacaggccccattggctgagaccttaaacagaaaccaggaggatgaagagtcatgggcccaatgtgccctagggcctgttcccatgttgaaactacttgtcttcatatgcttcctagcttgccctcgctcctttgcagcagagggccctgctcctgggtgggaggttcctgggatttcctgggaccagacctttaaagtgccacctacttctgtgagtagaatcggattggcagggacaaaactagattcaagaatgtccctccttaggtgacccaaagggctggcactggctcccccagttgggggtgtgcaggatggttgggaaggaatcctattattcattcagtaaacacttatgagtacttactgtgtgcctgaagtactgaactgggtgatagggatacagcagggaaacaagatagagcaagtctttttttttttttctttgttgcccagcctggagtgcagtggcacaatctccgctcactgcaagctccgcctgccgggttcacgccattctcctgcctcagcctcccgagtagctgggactacaggcgcctgccaccacgcccggctaattttttgtatttttaatagagacggggtttcaccatgttagccaggatggtctcgatctcctgacctcatgatcagcccgcctcggcctcccaaagtcctgggattacaggcgtgagccaccgcacccagccaatagagcaagtctttttcctcctggagcctagagttcaagacaaatattcttaatattttttgtgccatggacccctttggtgatctagtgaagcctaatgggacctttctttttcttttcttttctttttttttttttttttagatggagtctcactcttgttgctcaggctggagtgcaatggtgcgatctcggctcactgcaacctccacctcctgggttcaagcaattctcctgcctc

SEQ ID NO: 206757 - DNA, 1000 bp, Homo Sapiens
tagtttattctaacaccaatgcagcagggaaagaggggaataaatttgtatatccctgataacaagtgacagtgaatatattgtcatgtgcttgttggccattcatatattttcttttgtgaagtgtctgttttaatcatttgcccatttttaaattgggttcctggtcttgttattaaattataattgtgatttctatattcttgatgtaagtcctttctcagatctatggtttgcaaatttaccatttcattttttttagtgattcaaagagcaaaatttaatgaaatccattgtatcattttttcttatatagtttatactttttgtgtcctatcaagatttttgcctcttccaaatttgcaattatttttcctatttttttcttctgaatttttatagttttaacttttatgtttagatttatgaaccatctcaagttaatatatgtatatggtatgtaataagggttgaggttcatcttccccaaatgaatattcagttgtaattgcacctttttttttttaagtctatgttatcacccattaaatcactttgacatctttgctgaaaatcaattggtcatacatgtgtgaggctatttctggactttctaattttttcccatgatacatttgtctatccttataccaatactctacttccccagttgtttaatctttataacaattatttaagccagtcaatgtaactcctacaactttgctcttcttttttaaaaacttttatttgtaaactgccgtttttatatagttctatgaattttagcataagggtagattggtgtaactaccaccaaaatcaggatacagaacaatccaatctaggggtagcctatcaagacagaagtattttaggcaatgactatactgttttagcccaatgccacaggggaaaacaaacaaacaaacaaacaaacaaacacttttggcctgaccacactcacaccagcaaaagctgagtgggaaagctagaattc

SEQ ID NO: 206758 - DNA, 1000 bp, Homo Sapiens
taaaaggaggactggatacaaaaaatgtggtatatgtacacaatggaataatattattccttcaaaagaaggatattctgtcgtttgcatcaacatggatgaaactcaaagccattatgctcagtaaggcagtctctgaatggcacataccacattacctcacttatatgtgaaatcttagaaagtcagagacatagaagtagagagtagaatggtgtttaccagagtttggagaacgggcatggaagggaaatggaagatgctgatcaaagggtacaaagtttcatttagattaaaggaataggctttagtgatctattgcacagaattgtgattctaataattaataatgctttgtatatttcagaattactaagagtagatttttgttgtttttgccgcaaaaaatataagtatgtgaggtgatggttttgttaattagtttgatgtaatgattcaacaaagtaaacatataccaaaatgacacactgtacgtagtaattatatacatttattaattgtcaattaaaataaaacttataaatgaaatttaaaaggagagaaatgttagagggctcagatctgccagcaatttcaaaaattactacaaagctatgtggcagaccaatgaaatagaattgagaatccaggaataaacatacatttatgatgaccagccaattttcaacaaggatgtcaagactattcaatggggaaataatagtttttcaataaatggtgggtagacaactggatatgcacatgcaaaaggaaggaaattgtactccaacatcacaacatatttaaaaatcatctcactatgtgccagagacctaaatatgagcttcaaattaatcaaactcttagaagaaaactttggtgtaactgttcgtgatcattacttaggcaatgtttctctacaataacaataaaagcacaagcaacaacaacaacaaaaaatagataaagtggacttcatctaaataaaagcttttgtggt

SEQ ID NO: 206759 - DNA, 1000 bp, Homo Sapiens
gtgcgatcgggccacacccagattagcgggcacagcacagcggggcagtagacaccctcagaaaaggtgccagggggcggctggggctggacgggcttgtgcactcatcagtcacactacttttaagagctgttaccagattaccttaaaaaaaaaagctgtaacaggctgaggaggcaggaggattgctcgaggccaggagtttgagactagcctgggcaacagagtgagaccctgtctctacaaaacataaaagaattagccaggcgtggtgatgcctgtagtcccagctactccggaggctgagcgggtgggagaatcgcttgagcccaggaggtcaagacagcggtgagccccagcctgcgcgacagatcaaaaccctctcaaattgaaaagggggttacctcgtcgctttcattggcctttccatgattcctgatgggatgaggactttcttcatggaattaccagccagtttcctgctctgcgaatgatttctccacatctctgctcacttttccatatcggtttttgtcattttctttagcaacatataaaaactctttaaatattaaggaccttaatcactcccatgtgtggcaaatatttcttatttcttccccaactatttctggctgctgctgtttttgtatttcaagggaggcgagggcgggtgcagcaaagtagccgaggttgccctggtcaccggccccccgccctggcccagcctgcctccacttggggccacctccttccccgttggcacttctgcgtctgctcctgtggggccacctccttctatgtctgctcctgggcctgctggctttgacgtgtcttcctcctttcacttcccccggtggtcatggcatgaggaatggaacctcatggaccatacataaggccccccaggccttactcactccagcagaccctacggaccggactgtgtgggacaggcatgcggctggcagcagccccaggagccacctgacgggttagg

SEQ ID NO: 206760 - DNA, 1000 bp, Homo Sapiens
ctctgcttcggagctcaatgagctcctcttctctgaaatctcaatgcccttgttggttgcactaatcaattcaatacttaattatatacaaagcttgattgttatccaataattttactacgtatgtcttgcctcctcacttaaactgtacatatttacaagacagagactaggtcttatacttcattgatattctcccagcaagccccaagccatggagtaggtgctcactacatattatttaaatgaataagtcatattttcaataatattgtgtatgttagatgacaatacatagaatgatcaagagcacagactctctctcttcatagttgtgtgccaccaggcaagttattaacatcctttatgccttagttttcttatctgtaaaggagggataatagtttctaatccacgcacatggaattcttagcctggcgcccaacgaatgttcaatatatgctatcagtcaatatttttattattactacaactgcctagtaaagtaagattagattgactaaccagagcatttctcctacatgtgacgtcaaattaaatcagaagtttgcttgatgagcatgatttggtgagcatgatttggtgagcatgatttggtgagcatgatttggttggctgtggaggccgtggactgtagcggagcaagaatgggcattaaaatctcacctctgactctggctgtgagaccttggctttcgtgagcttcagtttgttcatttgcaaactgcaaatagtaacagatatatcccattgagctatcgtgcgggccagatttaatgaatgtaaagcacctagcctgacacaaaatggaactttgataaaccattctctaaatatcatcaagcccatagcgtccctccctacagagaccgtgtctgcttagtagatgagacatttgtggttgttcattgactcctttttttctagaaagttctagtcctctagagactcattgtaatacctttgtccctctgaattc

SEQ ID NO: 206761 - DNA, 1000 bp, Homo Sapiens
gatatgaaaacaagctcatcctcactgatcattagagaaatgcaaatcaaaaccacaatgagatagcatctcacgccagttagaatggagatcattaaaaaatcagaaaacaacatgctggagaggatgtgaagaaacaggaacgcttttacactgttggtgggactgtaaattagttcaaccattgcagaagacagtgtggagattcctcaagggtctagaagcagaaataccatttgacacatcaatctcattactgggtatatacccatgcacacgtatgtttattgcagcacggttcacaatagcaaagacttggaatcaacccaaatgcccaccaatgatagactggataaagaaaatgtggcacatatacaccatggaatactatgcagccataaaaaataatgagttcatgtcctttgcagggacatagacgaatctggaaaccatcattctcagcaaactaacacaggaacagaaaaccaatcaccacatgttctcactcataagtggaagctgaacaatgagaacacatggacacagggagggaaacatcacacaccagggcctgtcagggggtggggggcaaggagggggagagcattaggacaaatacctaatgcatgcagggcttaaaacccaggtaatgggttgatgggtgcagcaaaccaccatggcacatgtatacctgtgtaacaaacctgcacattctgcacatgtatcccagaaattgaagcataataaataaataaataaataaaatgaataaatttttttaaagataagaaaaatcagtgagggaagggggacaaagaggaagtatttactttaccaggtcagtattatactacacaaccatagtcataaagacagttcaatattggcattaaaaaagaaaacaatggaacagaaaaggaagctcaagaaaatatccaagtatttatggaagcttgatgtgtgagaaaggtggcatcacaaatgaatgtgaaaagaattc

SEQ ID NO: 206762 - DNA, 1000 bp, Homo Sapiens
agacggagtgtgacacagaagtgtcagagggggccagctcttgttgtctaggagactttctgatctcactcatgtctggaacaaaggagagaagagtcttccccatcccaagcctagctcaaagaaataaacattcacaaaaatttcgtagcttccaatcttatagcatcatccaaatccctcccaatttgtacccacctcccatcaacataataacccacctcttccagggaacagagccaaggaggtttaccttttaagggctttgtcttctgttacgatctgccatggtctacagcataaccagttaaatcttgatctctttctgtccagcttcttctgtcttcctgacgcctagtgtccatatgtcaaaatatattgatatatattttagaaatggagacaatcagccattaaaacagtagttcccagcctttagggtttcagaaaccaatacttttaattttaattcacaggccatgattccattaaagaaagccagctgaacacaaaaatataggaacagcatcatctctgtgtaaaggatactccaaattaaataagcttggctttataaaaaaaaaaaactcactatattttctttacttttcacatttagtcttagaccagggaaacttgattcttttctcattttttccacaaagaccaatatttggaaattacttctttaaagctcataacgggaaaaattttaaagccgttatgttaacacggaagtacgccagtgtccagattcctgggatgggcagggagtacagagagaagaagacgtctgccctccagcagggcttactccaattctattctttttccatggctcaggctggaccttgacattgacaggcgcagctcctaaatcttcctttgttttcaaattcatttctcccaggtcgtctggactgtaagctcctctacagtgacaagtattttgcttcatttttgtttcttcttctcatctccaaagccaggactagggtga

SEQ ID NO: 206763 - DNA, 1000 bp, Homo Sapiens
atagcgggtagggagtcttcacagatgcacccacagaccccctacactgaggtctatgactccatgaatttggctgtgttttcatttttgataagcccctttccactgctaggcctcagtttccatatatgtgaagtgaggaatgcggactgtgttttctcttggcctccttccagctctgacagtctgtgaatctcctggaagccagctctgggtccagtcctgtcttggggaaattagaccagaaaggcacagagcatacacaagaacccaacagcatcttctgacacaagaccatactcccactggcacatagtatctttgcttacctaattatatgcatggacacacaaacacacacatgtacacaccaggcaagaaaactcacaaccgggtcaggcgcagtggcttgcgcctgtaaccacagcactttgggaggccgaggcgggtggatcacctgaggtcaggagttcgagaccagcctggccaacctggtgaaaccctgtctctactaaaaatacagaaataggctcggcgtggtggcacacacctgtaatcccagctactcaggaggctgaggcaggagaatcacttgaaccccggagatggaggttgcagtgagccaagatcacaccactgcactccggcctgggcaacagagtgagactttgtctcgaaaaaacaaaagaaaacctgcaaccattgacacatgcagccacccacaccctttcttgtggtcacctcaccgtactcggcaccatcacgtcctaaacacagtgtcccataatcatcatctcacaaaatctcagtcccagacttctgcctaccttgagcagatggggcaactgctgggtaaccagctctttgaactcgttgacgctgaggctatccttccggccctcctgccttgcaaaggtgaagaaggtggtgaccacggtctcaatggactcctctagctctgtcagtggttctgctgccattaggaccctgaggccaaagc

SEQ ID NO: 206764 - DNA, 1000 bp, Homo Sapiens
ttgccacaaaatgtttatcataaataagttttcagcagctggtatcatctgaattgtcttctttgatatgctgatgaacaaattatgttcatagatgtcctgacactaaatacccttacattcttggagtaaaatctactattcatggaatttgatcattagtgggttctatgtactatttctttagactattcttagtagattttcactactcaacctactaataataataaacaaagttttgttggctttatcaaatgaattgatgagtactccatctttttctattgcttagaatagcttaagtaacatttgaattatccattgtctaaaagttaggtgagactcacttatgaatccatttggtcctagtggcatttgcaatatctttaatcacccctccaggctcttctatgataatcagtcaattcaagtttcaacttccaataattatatacctttctaggaagtaactttatttattttttcaattttgttgccacagtgttgcatgtagcactcactcatgattcttttactccacattatctgtagttatgtgccctttcttattcctaaattcctctatctttgctatttatctttttttccttgaataagcttgccaatgacttgtctattttgttgctggtggtgctcttttcaaagaatgggcttttggattttttttttttctagttggtataaagcatttttattttcactgagcagaaaaagaagctattgattcattaactgtgctgctttattggcatgtagctatgcactgttcacacattaatatataaaactcgtcagtctgttttattttgtctgatgggaaaacatgaacagtgagatttcttatgcaaaaagtgaacagttcaactatgctagctccatatacctttattaacattccagagacttatcctctcaacatgatctgatttctgtaggataacttttcaggaaaagtattttctgatcagtgaagctt

SEQ ID NO: 206765 - DNA, 1000 bp, Homo Sapiens
ttttgggccttaaacactttgtagcatcctttttacacctgtgactgctgcctttattccataatgcatgagcaaaagtgtggttggaatttaatggtgtgactttttaggggcttatgtaggagcactatgatccttttgcaaaataggagcagctttatgtcaggataaacatgggatttcagacatttcttgcttatcattgtcagttttaaggatttcttctaacacaggacatatttttgtctactgtgattgtaaaatctattggcttaatatcaacattgctatatgataatttttttattaatttggtttccaaagaatattcactccatgtgcaattgattcataggcagataaaaatctattagtggaaataaaagatagtattgaagtgtcaatcaaaatactgttaacaatgtcttcttatgtcacttatggtcatctggtgtcatgggtagttatgaatttctcctccttaaactattgaccctttatatttgtctgaaagaaaaggtcacttctgtgggtatcagagaggatgatgcaggcagcgactgaatgtatttcaatattaaaaacaacaacattaaaacaagccaacacgactcagcatggtcacttctatctttactattactaatatatttccccttttttcatcacagctttttataactatgatgccagaggagcggatgaactttctttacagatcggagacactgtgcacatcttagaaacatatgaaggtgcgtatgcatcttggtatcttttctcttacattttgggcagatggcacaccttctcagtgcctgctgggcaaagcattcctctgttacagacacataagacagtcatgcttccttctcaggctcccttttcttgcagatggatactgtttcaggtaagggtagtagtgaggctgttgtttaatactttctgaaggtgaacttaaaactgaaattcccatttttaaactccttggctccttatt

SEQ ID NO: 206766 - DNA, 1000 bp, Homo Sapiens
tgtgaacccaggaggcggagcttgcagtgagccgagatcacgccactgcactccagcctgggcgactgagtgagactccatctctaaaaaaaaaaaaaaaaaaacagaaattaacgtcttggggtcacgtgtttacttctcatgtgacaggcaacgaaaagagagtaggacacctgaatgtgctttgtactaaggagtggtattaagaactcggaaactgaccgttgaaggttctcgggagctgaacctgaggcctcctatatgtaaggcacacgttctatcactgaactacatctcctcatgccaagagatatttgtgtcgtcctccaagtactattgcagtatatgaaaacaataaaaatatggaaataaaaaataacttaaaaattaaaaaggtggccgggcacggtagctcacgcttgtaatcgcagcagtttggaagttggaggcggtcagatcatttaaggtcagaagttcgaggccagccgagccaacaaggtgaaaccctgtctctactaaaaatacaaaaattagccgggcgtgatggcacgtgcctgtaaccccagctgctcagaggttgaggcaggagaatctcttgaacctgggaggtggaggctgcagtgagcggagatggcgccactgcactccagccttggggacagagtgagactctgtctcaaaaaacaaacaaacaaaaacccaaaaaccctaaaaaggtatttctccaatctaaagatgtaaaaaattaaataaaatgaaaaataaaggaatatctcgttatattctgtgggtctccattcctgtgttcattgttttagcactaagtgttgggtttagaagcaggatttgtgaccattttaagttggaagacccccagctgtgggggatattgaagttttggcaaataaagcttgaaatggaacgcagaatactggaaacttgcgttagaaaactgaccagctttttcctgaataaagcacttctgctattgctgtttgct

SEQ ID NO: 206767 - DNA, 1000 bp, Homo Sapiens
atcttgatgtataaagttgcaacatgtttgacagatttaagcatatacttctttttgagcagtcagcagataattatagactatttgatttctttcttattttgtagagaaggggttctccctacctttcccaggctggtctcgaactcctgggctcaggcgatcctcccgccttggcctcccaaagtgctgggattacaggcatgagccaccacatccagccagactatttgattttttaggatgcttcctaagaaaggatccatccctcgcttccttccttctttttcctatcgagggatagtatacatattacagatttcatagcctatattaatcctgagtacttgatggatttttacataggtacacatccatgtgaccaccatccgaataaagaaaggggacattgacagcaagccagcgagcctctgtgtgcccctttcccatctatactatcctcctattggaggtaactacaattctgattttttttcttttttttttttttcagacaaggtctccctctgtcgctcaggctggagtgcagtggtgcaatcacgggtcactgcagcctggacctctgtggctcaagaattctgattctattatcatcagttttgcctgttcttgtacatacagtgtgtgctcttgtgtgtggttccttttgttcaacattctatgtttttgagctgcatccatgttgttgagcatacaaacagctgttttgacgttgttgtcattgtgttgtattccattgtatgactatgctaccgtttatctgtctgttgatgaatttgagctgtttccaatcattgcctattaacaaataaagtggctagtaacattcctgtacatatctatttgtgcagccattctcttgggtacatacttagggttagaattgttaggtgagaaggtaggcacatattaagtgttagaaaagtctgctaacacattcccagaggttgtacaattttagactcctactggcaagatc

SEQ ID NO: 206768 - DNA, 1000 bp, Homo Sapiens
ccagccctgaggtaaacccggggtctgcagaggtacactgggcaccaccttgccccagaggcccctcactgctgccttggcatcaactcccaccaggcttctggggcccctgcgcacctccctctctccgacccttaccccaacccccaacccccccacttcccttgcctccacctccgcaggactcctggtctcccaccccggacacctctctatgaacaccgaacctcagccagccggctccaaaactgatttcccaagcaccggagctgccaattctctagcaaggcctaaggctgaaacgccaggattctggggagggggaggcttcctggcctccaaccgctagacgctgaaattccaaagtcccctggttgatccagttcctggaaaggacaccagaagcaggacccagggaccctggcactttatcagcctgggtccccactgctcaggcggtccccacccgcatgcgccctgctgccccgcccccctcaggcgatgcctccgcagccggggctgcccgccgggcctggagcgctctctgtgcccggaccttgtaattatgtcccacagcccgggaaaccgcgggcctcgcagcatctggctgcggttgcgaacttttgtttcaagatgcgcgactatttatagaaggaaaactggtaggatagtaatttcctaggagcaagaggagaaattggctgcgtctttattaaatgggggtgggggcgaggcgatgtattaggactgcaaccgcatggggggagggggtggcgcagggagcgggaaggcagcggctgccccctctggccgcgtcaggcgaccccggacgtggcccgcgtgtaaaggagggggagggggaagggaagagaaggggagggagagcaggctctgaggtttaatcagtagcatccagcttaaattcccccaaacggcggttccataaatgaaacttctttttaagtcagaggccagagcatatgcgtcccattaggaattc

SEQ ID NO: 206769 - DNA, 1000 bp, Homo Sapiens
tttatttcattttattttattttgagacagggtcttgctctaccgcccacgcaggagtgtagtggcacaatcagggctcactgctgccttgacttcctgggctcaagcaattctcccacctcagccccccaagtagctgggactacagacatatgccaccaagaatcattttaatatctgttcttattttatttttttaatttaattattatttttcttttgagacagagtctccctctgttgcccaggttggagtgcagtggtgcaatctcggctcactgcaatctctgcctcccgggttcaagagattctcctgcctcagcctcccaagtagttgggactacaggcacccaccatcatgcccagctaatttttgtatttttagtagagacggggtttcaccatgttggccaggttggtctcaaactcctgacctcaagttatcctcccgcctctgcctctcaaagtgctggggttacaggtgtgcacaaccgcacctggcctctttgcatattaggaatattaacaacttttttgggtgagggtgtacggagttttgctcttgtcgcccaggctggagtgcaatggcgtgatcttggctcaccacaacctctgcctcccgggttcaagcgattctcctgcctcagcctcacgagtagttgggattacaggcacccaccaccacgtttgtatttttagtagaaatggggtttcaccatgttggccagcctggtctcgatctcctgacctcaggtgatccacccgcctcggcctcccaaagtgctgggattaaagacgtgagctaagctaccacacacggccttttccttttctttttctttttttttttttttttgagacagggtctcgctctgtcatccagactggagtgcagtggtgcaatctcggctcacttcagcctcgaccttctgggctcaaccagtcctcctacctcagcctcccaagtagctgggactacaggcacaggctaccatgccca

SEQ ID NO: 206770 - DNA, 1000 bp, Homo Sapiens
atatgtgcctgtcggaaaggctttattgttctaggtttttcatcagatcttggattgatgtatggctttgagactagaacaaatgctctagagggcagcacagagtcctaaatgcccccagtaagagggaccagtttgagcagagagagctttgcactggcttcctggagttttataaagccaaacctcagtgacgaggcaggctgcgggcttggagaagagaacacaatctgttctgagatgactggcgcttcaggcacatgatgcctgtggctggtgcgtgttaattcatgcgcagagaggtggtggtggtggttgttccccagccatgtttttctaattataatgaaaacaaacacacactcacacacatacacaccaaggaaattcctgttgctatacagggaatacttaagttatacagctaatgcctttcaggggccccttctccagcttggatgtgccagcctactatgtcattctccagggtttctccatcctgtttgaaggtgatactgatttctgatgtttacttgcttatttgctgcattttttcttttcttttcttcctttgttttttttttttaattcacagaacaggcagtggtgacatgcatgacaggcatttgggatcagatgttgctgatccagaagcctaggtgtggccattttgtcatggcaactgttaagcaagtaaatagggtagagtagtcatctgacttatctccagcgatgttcagtttgttttgaatttctactctgtgacacttctgctctgaagccaagcatagatagatggtacctttcgttcaactcccaagttttcatttctctcaaatgaagttaagaggtttttaaaatagaaacacatcgatgtgagccattttcagactggatgggtttcctgaaccttgtctttttaatgctttacttctgctcttttagatcaatttctaagcgccaagaagagctattactcctttctcctagcagagaattc

SEQ ID NO: 206771 - DNA, 1000 bp, Homo Sapiens
aaatgaaatatttatcttaaaaactcactaattctattgaattaaagacattttccctgtggctacaattattccttaagacatcacattcagatgtcacatgaactcattcaaagctgaccttgtctctcttgcccattgctgtactcccagcatctttactttgcttgtcacacaataggtatgcaataaatatttttaaaggagtcaaataaatgtttttcacatattcagttagaatatacactcagatgttacactcacttattcttttgtggcactcatttataacccatttcctaattcagatgtcaaacacacactcaggtattttacatatatttttttcagatgtagcacacagtcctccacatatcatacatagtatcttagctgtcataggtatacaactgttacttacactcttttggacattactcacatattataacacataccctaattcaggtgtttaatacaaagtttagatgaatagcttgcttacatggatgccacaaacacccattcaatgtttaattgaatgttttaattgggatattaaaaaattcagatattacacatgcagatgtcaactttgacaatcacacattcatcatgatatcaaatatactcaacaaaatgcaatacacactctcttagatgccaaacactcattgagaagttataatgttttttgtcattacagtcattcagttgtgaacccctcattgagtagtcttatacgttcatgcagaggacacaattagttttaatctacacattcaaatattatccacacatttaaaaggtcacattcagataatacatatgcaaactatttgacatgttgctcacacaatgaaatggaatatacccattctaaggttaaacccttcattggatgtcataaccacttctcagatcaaaatacacttaataggatgcaaaccacatattcagctagtccacattctaaggtataatccatgttcagtctata

SEQ ID NO: 206772 - DNA, 1000 bp, Homo Sapiens
atacacacactctctctctatagatatatgtatacacacagagagaaatacgtccatcgtgagagtcctagattcatcttaagtttcaccgaaagtgcacttagagtaaaatgtgcccactctgagggtcaaacctacctactgacgtgtaagttgtgtttgtgagacattctcaacagcatttgctttccctagcatagtggttttcatgttttcctcacacctgaatgtcctcagtgcaaaacctgtcagaattcatttcctttgctgttcttctttgagaaacctccagggttttatttatttattacataccttttaaaagcatagagacaaagactggcaagtggtatatattactacattagtcttagttctccagaaaaagaaaacgagcaggatacacacagacacacacacacacacacagagatttacattggctaatgtgattatggaagcagagaagtccaaggtctacactgagtaagctctagacccaggagagtggaatatagttctctaccaagtccaaggcccaaggcagaagactgatgtcccagctcaaagacagtggagcagagacttctttcttagcctttcattctattcaagccttctgtgggttggatgaggcccactcacactggggagggcaatctgctttactcagtttaccgattcaaatgtcaatctcatccagaaacactctcagagacactgtgagaaataatgtttaaccaaatatctgggcaccccatggcccgttcaaactgacagaaaaattcatcttcacaaatactctcaataaaagtgactaacaaatgtagcatcatgtcctgcctgtttatcccatgacaattaatgtattccagcccaacattgtcttcctttctcttacagaagcaacatgtaacagtttcattgaaagtaaggttgcccgggcacagtggctcacccctgtaatcctagcactttcggaggccgaggcgggcagatc

SEQ ID NO: 206773 - DNA, 1000 bp, Homo Sapiens
tgagtgctccgtctccctgagtgctcactctcccttgggtgctccctctccctgagtgctccctctccctgcagtgcaccctgaaccctcttgctccctctccctggtgtgttctctctctctgcgtgctcctgctccctgagtgcaccctctccctgtagtgctccctctccctgcagtgcgccctgcaccctcttgctccctctccctggagtgttctcgctgagtgctccctctccctgagtgctccctctcccttgggtgctccctctccctgagtgctccctctccctgcagtgcacgctgcaccctcttgctccctctccctggattgttctctctctctgagtgctcctgctccctgagtgcaccttctccccatagtgctccctctccctgcagtgcaccctgcaccctcttgctctctctccctggagtgttctctctctctgagtgctcctgcttcctgagtgcaccctctccctgcagtgctccttctgcctggaatgctccctctgcctggaatgctccctctgcctgcaactttctgcccaaagtgctctccactctcttctcctgttgagaagctgctcatactccttgaggctcagctcaggcgaccgcctcccaggaaggcttcctggactcctccatcgcctcctctgttctcccatgcaccatgcccaccccctcatgcttcctttctcaccacattcaccatctgtgtccttatcttccctcctcacctctcctgcctctagccaggctctgagctcccaaatggcagaccagggtctcatgcctttggggaggcaggggtctgtcccagtgcctagcccaaaggaggcctccgtgagtcggctgctgaaagccaataatcccaggcaccctggctgggaaggatccagccctgtacaccatccccatccttgaaagagtgatcttattcatgtatatctggagaagctggaaggatgcttagagagcgtctctacaacct

SEQ ID NO: 206774 - DNA, 1000 bp, Homo Sapiens
tagtatgatactttctggggactaagccatgaacaaaacagtctagatccctgccctcagaagggttacagtttatgtgattactattttcatgagtaaaagtgaagaaagccatatggaaagatttttatcttgcaagaaaaaacaattatgaaactcttttaacataaacacactgaaactgtatcaaagcaattgtccaaattgtatttatacccaagaatttctttaactaagagagcataaggcatatgtttggaaaaccaccctctttatctttgaccgacttgcggataaatatatctctccattttaaaccaagaagggcaatcatgttggtgatccagatcactgagaaagcccagtgtatcccatcttttatctttgttggcaatggaacttttctatggcccacactttacaattctttgtcattctaacccatccttcccatccttatttttttttttttgagaattgctaaatggaaagctagcctagaagcaccaagtaaatatattcaaggaatataagttgtttaaacattagaaaaatttttgcactcattttttagctgtattaggaatgtcaataatcctgtagcaaattttcacagagaactttaagaaattcttgcattggtcgatttcaatttgaagctttttggtttgtttgctttttaaattttcatgttctaggaaactatgattctggttgttcaggattgttattattatagttgtgtaaaattattttattttgtgtgtattgtgcacagcttgggggggggcgggaaatgcactaattgtgctcttccttataaatggtacatattactgacacagacaaataaagtttctaattgtttctgatttaatcactagtgatacagcatattctgtatgaaatgttttctcctttctcattgtcatctacttcattttttgttttcatgttttgaagaaataaaaaccaaaatggcaaaaaaaaaaaaaaaaaa

SEQ ID NO: 206775 - DNA, 1000 bp, Homo Sapiens
tgcacagccagactgagaaccactgctttaccccatttttggagtaaaatgaattaccctccttaggaaatctggtcgctctatgtggccattcctttagttcctgcccctcctccacagaaacacaccattccaaatctggcagctaatttttcatggtctttgtttcttcaaaattattttcaggaagtcttggtgaatatatgttggggtataaacagaccacaaagaaagaccccataggggtattctgttgatggattttctgcacgatcttttctttttcattcttccattatacttcctggaggagggactacccctttgttcgtcatttagttccagctgggtaccaggttgggtatttggggaggtttacagattaataaaactagaccactaccctccaggagttttcaattttagaagggaagtatataaatgtaattctaggtttaattttctaaaagtcacttcagaggaatacaaagtattagggaattcagaggcagcagaggcagagtgaggtggtgtggagtgtgagctctgcagtcactgccttggtttgagttcctgccccaccgcttcctacccacagaactctggccagtgcttgagccctcctggtctccaggactttgttggcacagtggacatgccaaattttttgatgagagacatgacgagttagtgctggtggagtgcacaccaccgggcccagtgtgagggtcagtcctggtgagctgctgtgctctgtgcgttgcctgaagctttccagcaggccttagctgatgctcatggatccaaaccatcaatagtaagttactaagccttatctgctgctccttaaattgacagagtcaagaattaggtaaccagggaggagccacagaggtgtgtgaatgggaaactagacccagtcctggaagatgagcaggaaatggagtgggagacattgataccccaagaccctagttaggcaaaaaaaaaaaaaaaaaaa

SEQ ID NO: 206776 - DNA, 1000 bp, Homo Sapiens
tgtaatccaagcttgtaagtagatttttaaatgaatcctttcgacagtttgtttgaaaaatgaatatttgccttataactgagctattcatttgaattttcctgctccaggatagagaagcagacctttatttaacaaatattcattagaactctggctcatatgttaaaagccatcctatcaagtacttgatgaaccaaatggacacatgagatataaatctttagtttggtaaatattacttgaagccagtgtttcttgcccttggcagtgttaacatttggggccagataattctttgtggtggtggctttcctaagagaatgacgaaccacatccctgtcctctgttctctaccaactaaatatcagtagcacacacacaccccaccctcctacccagctgtgacaaccaaaaatgtttccagacattttcacaggttccctggtggggaaaatcatccccagttaagaaccacttctctaggagccacagttaactaagccaattgccagagtttattgaaagattctaggttagttttccttttcttttttggcggagtgggaggaggcatgtgtgataattaaggtgttatgttagaagtgtttgtttttaatatatgctggtctcgctttgactttctttaattaagcttcagattgagaaggagaggggctgggcagtggggtgaagagggaagaaaaaggcagggattatgaagatgtggtattcaaagagtagggtttggataggcgagcattccaaagtatgtctgctgcaatgggaaaggagaggtgccactgcccgcagaaattgatggggggcagggacgggtgttagaaaatggccctaattactggattctgaaacactgaatacactccccctaggaaaaggttttaaactattatcactcttttaagccttagaaaaactagttaagactgatttctcatcttttattccttctcctcttgctaaaaaaaaaaaaaaaaaa

SEQ ID NO: 206777 - DNA, 1000 bp, Homo Sapiens
caccttttttcttgttttggagacaggtccctgtcgcccatgttggagtgcaggggtgccatcatggctcagtgctgcctctacctcctgggctcaagcaattctcccgcctccgcttcccagatatttgggaggctgaggtaggcggctcacttgaacccgaggaggttgaggccgcagtgagctgtgatcgtgccactgcactccagcctgggtgacatagcaagaccctgtctcaaaaaaaaaaaaaaaaaaaaaggccaggcgcagtggctcacgcctgtaatcctagcactttgggaggccgaggagggcggatcacgaggtcaggagatcgagaccacgataaaaccccgtctctgctaaaaatgcaaaaaattggccgggcgcggtggcaggcgcctgtagttccagctactggggaggctgaggcgggagaatggcgtgaacccgggaggcggagcttgcagtgagccgagatcacatcactgaactccagcctgggcgacagagcaagactccatctcaaaaaaaaaaaaaaaagagagaacctcatgtctcaggtttctgagtcaatagcagataaaactaattgtaatttacctaagaaggtaagaagggacgaccaggtcaaatgttgtgcagatgtggataaaagaaaaaaggacattcatttgtgctactcttatttccaaaattttaaattcaatgtttcaagtcccttttttttccagatatggtaagttttacgttttactagcatgttttaaaaacattaatcatatggaaagaaaaagatgatacattttaacactactacgatagcgtctatgactcaacaacagaaattgttgttagcagaaccagcaaaaaaccattctgtcttgggggaaaattgtttggttgaaaggccacagaagagatgcatattcagtaagagtaacgagaggcaaacacaataccataagattgttttgcaaagaaaaaaaaaaaaaaaaaa

SEQ ID NO: 206778 - DNA, 1000 bp, Homo Sapiens
tttctggccagaaagtggtttactggagtgctgtgtctgagtattacatgatctgaggaccatgaggtccagctttgggagtatggagagtttgagtggagtagagttatagtcccatggtcttctgattcacagacattcatgagcgataagtatctattgagaaagtggaagcatgatttttatgacctcctcttgttgtggggaaatcgatcaacggggcctatattggttgggttctacaaccaaatagaatgtgttcagcaggagtcatgttttgggctcctcacaatgttcagtgttagttctgttcctttctcttgcttccacataggaaagactttgacccaatgaggaattagtcattgtcctttgggtacacttccggaatttgataatcagttgggcacttgattctagtacatttgctaaaagtaattaataccctgcaattggaagcatgcagcaagagactgggaatgctaagtgaaaggtcagaattgaaagagtggaggaggctgttgacccttaggcatggatgatatgtctgagtgagaaagcaagaagagtagaagacagagccttactttataatcagaattatgaaaagaggagccaatgagagggaaagaatgattggcttgagatagattggtggaaactggagaagattgaatttaaagaagaaaagtgggccaagttcagtggcccatgcctagaatcccagcaaattgggaggctgaagctaggagagttgcttgaggccaggagtttgagatcagcttgggcaacgtggcgagacccctgtctctacaaaaaataattaaaaaaaaaattagccaggcatgttggcatgtgccggtagtcccggctacttggaaggctgagacaggaaggttgtctgagcccaggaggctgcagtgagctatgatcacagcactgcactccagcctggttgacagagggtatccccgtctctttaaaaaaaaaaaaaaaaaaa

SEQ ID NO: 206779 - DNA, 1000 bp, Homo Sapiens
gatctctcagtggctgttaaaatataaacaagtggaaaaaaagtatacaagttgatagcagctgttcatgtattcttgttttgctaatacctgtgtagagaaagacagtttcacatgcagatcaccatacatttttgcttaaaggttacactgggtaaactgtttgtttatcacattacatctgggtgagattttgcatgtgaccaagaggaagaaatcattcagtcccggaaatagcaactgctatgtaaaaccacatccttgactagtacttcatctttccacagtcattcatctgctaatcaggtgaaatatcagctcagcagaacaaagcaagttatacacaaatttcccccacattcacactgatgccgtacttagtaattctggttctaccattcccttttgcactttttgcaagtcaaattcatgtggaaaaatgttctgtttgtagaactcatagtattcacttatagtgctcatgtcaggaatggcaagtgagtaagagcccctgataatctgcttttgttagaacgtaatgcaaagataataaaacatgtccacttcttttctagttctaatcagtttttagacatcaagatttatttactttgcatgagatttgtttcctattatttgaatatgtgctatacgcttgaattagaaaaacctgcttgaatgtattgtcagttattaaagcacatgtgactaagtttgcatttgtcagtattgttctactgtttgtactgaaagtctcattttaaaattgctacttaacactgtactataccttgtaattttttagattctccacttgtattctttaaatgtttccagatgcctttagttttagctgctgtaaaatagctactttgcgttatttgatatagaattgttttttaaaaactccatttatttatacagagacatttataatattttacaaacattcttatattctgaataaatatttctaattccaaaaaaaaaaaaaaaaaaa

SEQ ID NO: 206780 - DNA, 1000 bp, Homo Sapiens
tttgctctttttgtttgtttatctactttaaacagtaaagacatctacatgcttatccatttgcaatagtgctgcagaagttactttatcaattattccatagtcaagggaaactttagacaagatataatgaatttggacactgcaagtaaaagccatatactaaatggcaatcagcgttcattatcttaaatgtatatatcctgtgtgtggcaaaaaacaagaacaaaaagcaaaaaacaaaccaagggttatgtccttcaacctttgtgaatccccaaaatataaatatggaactgtttatacaggcttctgtctcctaaatcttattttcttgagagtcacatttcatgcccttatcctcacatcacaatggaattgcctttcagttttactaaagttttctcctacttgatagcctttttcataaacaagattttaaaaattacttcacaagaattactacacgtatagcaagaaaagtacaacacagaggggttgagatgtgaataccaggcaatctgcgaggcttatgacctagctaagtatctctccagtacagcagttcaaatctatgccttggtcaaaattcactgaatgaatatattaagagtcattaaattatacctttggaattgcccgcaagtcctttaaatggaatgttatgtgtagaaatatcaaggttctgctataacaaatacagctcagagcagaacaactaaagtatatccatgttatgatctaccattatagatatagatctataggcacagagttaagctctggggaaaacaacaacaacaacaacagcaacaaaaatgggtactgaagacaaatcatccatctaggcatataaattaattatctttttgaaagtgaaatgagcagccatatttaaatagcattcatgataatcccattgatatctttacactcttcggaaagtttaattctatcaagcaaaaatacccatgaaaaaaaaaaaaaaaaaaaaaaaaaa

SEQ ID NO: 206781 - DNA, 1000 bp, Homo Sapiens
attaagaaaatcatagtcaaattacctgtaaagctaaagttaagactttgtgatttgctttccataattgagttctactatcttttttaggaatctgtaacttgcttttcacaaatatgaattctcttttctgttattttataaaaacgttattggaggatgcatacataggagcacataccaaagttttaagatttaaagagcaagctaagtattatacttcttgctattctttctccttatcaaatacaatttctcaatcctcatgttaaaaatgccttgaaaatttaagaaaagatgaactagacaaatattttgtaaatactggctgtctgcccctgtaaactgcaagcataaatagcatgcaagcaaattagtatttactagtaaatgaaacaagttgtacatcttgccttcacatcctacctccaagaaatactgagtttggagaatatgtagaaaaaggtaacagtgggattataaactcagcataattacacacctgaacatgattccttcagagaaaggatccaagctgtctacaagctcgagttcggcgtcccctcccaaattttgagacgtagtcttgccctgatgcccaggctggagtgcaatggcgcgatctcggctcacggcaacctccacctcccaggttcaagcgattctcctgcctcagcctcccgagtacccgggattacagaattatgttcagcaatgtgaccatctatttgttcaagtttcaacttaatactaagtgcatctttttgaagagcatgttcattttcttgaataacttttaattcttgaagcagattgcgatgttctttctggatctctggtaaggattcctaaacaccgaaaagaactgctagatagaattttccaaatagagccatcattttcacattacaaagatgaaggaattaccaatctctcctcatgccccttccattttaaaataatttaagcatttaaattcataaaaaaaaaaaaaaaaaaa

SEQ ID NO: 206782 - DNA, 1000 bp, Homo Sapiens
gttgtctcaaggggccccaacagccatcccacagggagggggataacagcccccatttatagataagggagctgaccggatgctctgagaagtggcaggtgttgaaggaaggataaagcagtgatgggccagaatccccaaggttcccttttttgttcatcaggcccttcctgagatgtgatttttaatcttttaactttttttaattaatagcaatgcgtggcctcatatttctatgaaccatttagtgatactcccgcttcctgcatgccacacactgtgctgggaattgctcatgggttgtcctgtttcatcttctccgtagccctgtgagatcggcaatattagtccccctacagccaaggaaactgcccagagccacacaactcttgaggggcgaggagggcttgaacctgagtctgcccagctccagaactgagcttgcagccattagccacagctgtctcctgcatgtctgagcaaagaaaggcctttacacagcatcaccctgtgccatcccatgcaccgtgggactcagctaaaggactgtgcaaagagggggctcctgagttggatttaggcaaaaggggcagaattcgtttgatttttagagaaaatctctggagagtttcttttgattcatagaattccttttagatttctttccagcataccaactagctttagtagtgctgctacaaccagctcttataagtaagagtgaaaaagtattcttttcttctttaaaaaataagtttttcttgcttatagttaattctagaaaggcaatactaaaggtatatatttttttcaaaatgctattttttactgcacttgataattatcctgacagctctgatctctgtaatagattcactcttcagctctgggcagaaccagaggcagggttcacaccaaatttgtaaataccatatgtgggtctggtgtccaggaacttttttctttctgttaaaaaaagaaaaaaaaaaaaaaaaaaaaa

SEQ ID NO: 206783 - DNA, 1000 bp, Homo Sapiens
atgctggttacttctacttctttctcttcccttttcccagtctatcataatttccttgagagcaggcaccatgtcttatttacccttgtatttcccacagtacttcccatagtgagttacccttagtaaatactcagtaagttgaattgaatttaaattacctgtaagtcttaaaatgtgggattaaattaagatatattgtcctggaaatacccaaatgtctatcgatggatgaatggataaacaaaatgtggtatacacataatggaatattattcagccttaaaaaggaatgaaattctgacatgtgctacaatatgatgaacctggaagacattatatgtgaaataagccagacagaaaaggacaaatactatatgattccacttatatgaagtacctagagtagtgtaattcatagaaacagaaagtacaggttgacatccaaaatctgaaatgagaaatgctccaaaaactgaaactttttcaatgccgacacgatgctcaaagaaaatgctaattggagcatttcagattttggatttttggattcgggatgctcaactggcataatgtgaatattccaaactctgaaaaaatctgaagtctaaaacacttctggtctcaaggattttggataaaggatactcaatgtgcaacatgtagaatggtggttgcaaggtgggaggagagaatggagagttactgtttaatggtacaatgtttccgtttgggaagatggaaagttttggagatgtgtgatggttatggttgcgcaacaatgggaaggtacttagtactgcttaactgtgcacacttaaaaatggtaaaaatgataaattttgtgtatgtcttaaaacaataaaagaagttttttaaaaaaaaaaaaaaaaaaaaaaaaaaaaaaaaaaaaaaaaaaaaaaaaaaaaaaaaaaaaaaaaaaaaaaaaaaaaaaaaaaaaaaaaaaaaaaaaaaaaaaaaaaaaaaaaaaaaaaaaaaa

SEQ ID NO: 206784 - DNA, 1000 bp, Homo Sapiens
gtgtctcatttggttaagcctatcatccagggctgtggatgatagttccacttcccctgtttgtctctacctatcctcagggatatgtctgtcttttggcactcatgatgcttcttatgggttaaggcaggggcaggatttttgccagggaccccaagatggtggggatctggttgtgcacttcaatctcaccttttctagtgtggaaactgtgaattggagggaaatttcccatgtactaggtgcagggcagtatgtggggagaggcatcacagaaatagaagtccaattctcttactatctacctcttacatctctgtgaccctgggaactgtctcattctcatgtttgagttctgggatactgctggtgataatctcagtgctgtgtatttgtttttgttttttttgtaggggagagtgacactagcttctttatattccagcatcttggaactggatacctagtgtctcttttccctttttttcctattttggcatgtactattatgctgtgacccatcttctgtaaattatctgctcccttcatctttcattgtattttctgtattggctttttcccatcagcatttaaatatgctcatgtgaaatcatgccccaaagagttaaagaaaccagtaactaacagaaattcttgagtttacaggatggcagataaagaaacaacttactggccgggcacgatgtctcacgcctgtaatcccagcactttgggaggctgaggcgggtggatcacgaggtcaggggttcaggaccagcctggccaggatggtgaaactccgtctctactggaattacaaaaattagctgggcgtggtggcgggcgcgtgtagtcccggctgctcaggaggctgaggtagaaaattgcttgaacccgggaggcggaggttgcggtgagctgagattgcgccactgcattccagcctgggtgacagagcaagactctgtctcagaaaaaaaaaaaaaaaaaaaaaaaaaca

SEQ ID NO: 206785 - DNA, 1000 bp, Homo Sapiens
caggtgagtaagtgaagcttcatctgtttacagccactctctgtcactcgcattaccgcccgagctcctcctcctgtcatatcagtagtggcattagattgtcctaagagtgtgacctgaaccctgttgtaagttgctcatgcagggggatataggttgttcactccttagaattgaattccttatgatctgtcaccatctcccgtcacccccagataggaccatctagttgcaggaaaacaagctcagggctcccactgattctacattttggtgagttatataattatttcattatatattaataataatagaaataaagtgcacaatgaatgtaatgttcttgaatcctggaaccatcccccacctcaggttcctggaaaaattatcttccacaaaaccagtccctggtgccagcatggttggggacacctggttaacagatgtgagacccctttgccttgcttggaataatgtgcagatatacattgtgtgaatgacatctgatggcgccatcttgccctgtagatcattttagggacgcctccagtatttcatgaaaattaaaatttcttctaatgatgaacaaaatgatactcagaagcaactttctgaagaacagaacactggaatattacaagatgagattctgttcatgaagaaaagcagatagaagtggctgaaaagaaaatgaattctgggccgggcacggtggctcacgcctgtaatcccagcactttgggaggccgaggcgggcggatcacaaggtcaggagatcgagaccatcctggctaacacggtgaaaccccgtctctactaaaactacaaaaaattagctgggcatggtggcgggcttctgtggtcccagctacttgggaggctgaggcaggagaatggtgtgaacccgggaggcagagcttgcagtgagccaagatcgtgccactacactccagcctgggtgacagagcaagactccatctcaaaaaaaaaaaaaaaaaaa

SEQ ID NO: 206786 - DNA, 1000 bp, Homo Sapiens
agtggtatgtgtgcgtgtttggctcttggggcggggcggaaagcagaacaaaggagaatttaataagcgagaacttgtcaggggctagggtcagttctgaggctgctgcctgtcaagaacatggctttcttcctgcccccctccactgctgctaactggagtctgaccttcgagaaagagtgaaaaaagacagcttctgtttgttttgctgcaagtaagtggctggactgattggcccccttcccagaggccctgcaaggacttcagatgtggtcagcgaggtatgtggatggtgccagcctgccggccctcgtccagccaaactgcaccaggaacaggcaagggtcccagagaaacagcggggtcagctgctgccgcctttgctcctgctcttaatgctgtcctatttcttcctaagaggaagctggtttgctctctcaagattgatgggcaaagttttatatgaccacggtctccacttctcacccactgaacttacagcttgaaattaacagaggcgaggcccatctggaaaaatgcatttgacaaaaacttgatcaaatgggggatcccctgaggtgggtggcaaagaaccagaccacttggaatcctaggtgctgtgtccctgtatggacctgctgtttcttttggattccattagggttaagaagcacaaattctgaagctagatttgagtttacatttctgctccagtacttgggagttacagtgaccaagtcatttaatgtttctgaacttcagtttcctgatctgtaaagtaggatgggtaggttgggcgtagtgggtcatgcctgtaatcccagcactttgggaggctgaggcaggaggatcacttaaggtcagaagttcgagaccagcctggccaacatagtgaagccccgtcactagtaaaaatacaaaagttatttgggcgtggttgtgggcgtctccagcctgggtgacagagtgagactccatctcaaaaaaaaaaaaaaaaaaa

SEQ ID NO: 206787 - DNA, 1000 bp, Homo Sapiens
atttgcctgtttttagttgctatccagttttcttacaataatctctctgcctcagtctcctcatcggattacttgtcacatgtgttaaatccttcttttaattgatggttctgttgtatatatcttttatatttatataggtagcctcaactctcctttttttggagagtggtaatagaaatataaataataaatagttgccctttggtttccccaacctgtggtgacaacaagataataaaacagatactgatcctatataaaacaggcaaaaaggctttggtacaatatgggaatcatgatgtgggtttggtggaaaacgagcaaagcaccttgtaaggatcttgtagtctgaagattaaggtgtgcttggggtaggtcatgtcctcccagctctgtgggatttgtagcacatcatcccacgtggggaggagagtgggcacgggcatgagactatttattagcttttactgtgtcagttgttgggttatgtattttgcatttgatatttaatttaatctttgtaatagccagagacttggatcttattggcatcattttccagatgagcagagctaataaatggcagaactagaattcaaatctgaggctctctggcactgaaaacaacaacaaaacatgtttctactcttcaaagagactttttctcctggattgtcacttgtccttttctttctctttctctcctgacattggtatttaaaatgagaacctaggaaacttgtttcttctaacctaatgtttttgaagcagttttaggtccttggagatgtgccttgatgtgtctatacaatatagtatttggtattgttagatataaagaagacctgaggccgagtgcggtcgctcatgcctataatcccagcacattgggaggccaaggcaggcagatcacttgaggtcaggagttcaagaccagcctggccaacgcagtgaaaccccatctcttctaaaaatacaaaaaaaaaaaaaaaaaaaa

SEQ ID NO: 206788 - DNA, 1000 bp, Homo Sapiens
tggcaaaattatacctttacgattacttactaggttttagaaatctcacttttctaacaagaggtattatggtaatcataagttcaaaataattaaagttcatttgagataattaaatcaaaacctctagtctgggttggagggtgataaagttatctggcgaaatatatgaacttctgttaccttcctcttctgctaaatgaatggtaaaatgaatcctgatttgtttaggcagtttacttatgaagttgggagaatttttttttttctttaaaggactgagtctggctctgttgcctaggctcaagtactgtggatcttggctcactgcagcctccacctcttggattcaagcagttctcctgcctcagcctcccgagtagctgggagccaccatgtccagctgatttttgtatttttagtaaatgagttttcaccatgttggccaggctggtcttgaactcctgacctcaagtgagctgcctacctggcctcccaaagctctgggattataggtgtgagccactgtgccaggcctgaggttgggagaaattttgtccatttctttagaaccaaaattggcaaccagagagtatttggatgttacacaaaatatttagtttccctttctagcctaaattgggttgtttatagcacccgtctctccatttgagaaaaatggttaggatgctggtgcagggatgaggccttattaaaacagagaaggtacccaaatggtggttcaaacacaggctggctaataagctgtgaggtgacttaccaaaaaacaacaacaacaaaaacccttgaacttctgctttcaacttctactttatgctagattatttggtccaatcttcctggtctaacacctggctacatataacaacaaacatctgcttgaatgtgttggaaaggtgatgattaattgccaggctgatatattaaataaaatggaaatctcaaaagttaaaaaaaaaaaaaaaaaaaaaaaaaaaaa

SEQ ID NO: 206789 - DNA, 1000 bp, Homo Sapiens
tttatagtaacccaagtttccaccaacagaggaatgaatggctaggcaaaatgtgttgcatacacacagtgaatgttactcatccttaaaaaggaaaggaatcctgcagtatgctgccacatggatgagccttaaggccattatgctaaatgaaatgagtcagtcacaaaaagacaaattctgtgtgattccacttatatgaggcacttagggtagtcaaaatcatagagacaggaagtagaatggtggttgccagaggctggggaggaaggcatgagagttattgtttgtgggtatggaatttcgtttgacaagatgaagagttctggaaatggatggtggtgctagttgcacaacattgtaagtgtattcaataatattgctgagctgtacactttgataaattttgttatgtgtattttaccacaattaaaaaaacaaaaccaaacccttatgcatggggaaaacaaatgactggatggaaataaaacaaaagcttatagtaatgtggatttttttttctactttcctgtgctttccaattttcctctagagtgcaatcaataacagtggaaagaagtccctggagcccagtgcagtggcttgaactgagaatgcactcactggctgttgcagccaagactccagttctcgcctctctttccctgactcccctgtgcccacctttcccctgcaggaaagtatacccggcgggccagggggcttttgtggttgggttatgtcttcatcttgtctgctctgtgagccatttacttctcaggcacagctctgggcgcaagggcagcctgtgccacagatgtctgttgaacagtggattcacgtctgtggctgctgtatagatgatcacacgcctgatggcttcaaacaacagaaatataccctctcacggctctgggggccagaagtctggaatcaggatcattgggctgaaatcaaggggtcagggctgtgttccctctggaagctctagggggaattc

SEQ ID NO: 206790 - DNA, 1000 bp, Homo Sapiens
cggagggagtggacgtgggggaagggcaggtgggcatttctggagcaatactgtcatcaagaggaactggcttggcaatcccgcgcacccttcgctgtgctcgcctggggaggagtggcttgggactgtcctgggggaccaggcaggactagggcaggtgctcgggacggatccgaggtctctggaggtccgagagaagcaggctccgccgcggggtcgggcggtggaagccccagagagaggcgccaggactagctggacagccaggacgccgggccgttcccggacaggaagccacggctcgggagcctggtggcggccatgatctgggcgggaccagcggaggcctccgccagggagcctgggctcggggccttgggcagtttgcctggtgccccttcccgtgggagcaaccggggtgacggcctagctgggtcctcggcccgggaggctccgtcggccacactgcacgcctgcggtgtgaggagggccgactgccagtgctgagttccgtggccattggcgttggtgcccgccgctgctggccggcgccggggcgttcctccttgcgtcctagggaggaaggtgggccgcggggcatcccgcggggcccgtacccagacggttcttgacgaggtggacgcaaggccaggcccggcccggcccggcccggccaccctcagacgccgcgcacccgccttgttgagacttgccaccctgtcttgttgtgtccatgtccccgaggttgtcttggaggcgggccgttccccgtggtgctcatttctgcctgggggccttccggggaccccgcttgtctttgggggtgcgcaggcccttgccctgcgatcagaggcgcaccgaccgatgagttcggtggcaaagcttgagaaatggagactctctgggcatcggctaagggggcccggggccttcccaggcctgctggagtccgggaagccgggggcacccagaaggaaggacccgtcggactctgcctggg

SEQ ID NO: 206791 - DNA, 1000 bp, Homo Sapiens
aagaaaggacattctttcttacctccaagcctgagattgcatagtccatagagcaagcaccagattggtttcctagaaggatgttataggcatcgcttctgcgtgaaaaacatagaaattattcttattactggatttgtcttgtctaattaaattgaatttgtagcacagctataaattttttattaaaaaattgattcttcctggctgggcaaggtggctgatgcctgtaatcccagcattttgaaaggctgaggccggcagatcacctgaggtcaggagtttaagaccagccaggccaacatggtgaaaccccgtctctataaaaatacaaatagtagcctagcatgatggtgggtgcctgtaatcccagctacctgggaggctgaggtgggagaagtgcttgagcccaagattgagaggttgcagtgagttgagatcacgccattgcactccagcctgggcaacagagcaagactccatctcaaaaaaaaaaaaaaaatttctaattagtaatatattcaggtagaagggaggacaaattcttattgaaccaatacaaataactacatagtcacataaagtaaatgtttttattaaagaaactttgtgcaagatttaagcaatattgctaattaagggtatgttaatagacaaaaccaaatattgtatgtcacaattctttacaaaataattatttgtatgtttttcttggcaacttattagctttgtttttatattaagaatttctgcaaggtatttttttcctcaacactaagaattcagagtgttttatttagtttttacaaatttaataatttgtacatttaattggagattaaaggtagattaagaagaaagaaaatgggtttctctcatgttcattaaagtagaaaattaaactagcctcaattaaattgccttactgaggccctttaatcctaaataacaacctcttgtcgtgctggtcttgagttaagcagtctactttcatgaattc

SEQ ID NO: 206792 - DNA, 1000 bp, Homo Sapiens
acgcctccctggaattccccagcctgtgctgctcagaacaccatttccaggaggtgataatgagaatccatttgttacaagatgatggcttgaaataacactttgcactttcttccttttatctttttgttctacatctttcaagaggttgctcaggctgtggctttcctggactccctataggtttttgtggctgactaaggttcatcttgtccctggggtcactgttgagaagagctcagttgcagaggatctggatttttttttttttttcctctgtgggtacagacagaagcttctagaaaagagctggagacttcgcttttggaggctgtgttgaatacccattgcccactcttcacaagaagacagaaatgcagagaggcagtctcttgttgacaaatcctcttggttctcttggaaatgcaacagaaccatggagcttcgtgaagcccatgggcttggaaaggggcctcccgaggtacccagggtggatggaaagctgcagggataagtgctcctcaagccagaagtagcccagatggcacagtctatgctgagaatggattcatcaccagcctgtgtgctggaggcttgggccagatgaaccttgatttagagaggaagtaaagcattttttgccttggtttgtgcatcagaattcatcttcatggtgtgcaaatgacgaggctggattctatacagtcagcactgagaatggattcagcacaagcccgtgtgctggaggcctgggtctgatgtacctggatttagggaagaagcaaagtatttttctcatttattgcatgccttagtttgtgcatcagaattcatcttcgtggtgtgcaaatgagaaggctggattctacacagtcagcgttgagaatggattcatcaccagctcttgtgctggaggcttgagccagatgtacgttgatttagagaagaagtaaaggatttttctcatttgttgcatgccttggtttatgcatcagaattc

SEQ ID NO: 206793 - DNA, 1000 bp, Homo Sapiens
gccagagtgactggagagatggtcacagtctatgggctgcacaggatggaggaggccagggaaaaggcagggtgggcagttggggttcagggagaggcaggtgcatgctgggaggtcagaccctgtgaaggctttgggggcgtcaggttgggtaggctccagacactctcgctcacataggattccagaacactgctacaaggctctgagtgtttgtccctcacataggattccagaacactgctgccattgtctgaatgtttgtcccccacataggattccagaagcctgctgctggggtctgaatgtttgtcccccatctaggattccagaacactgctgcgagggtctgtatgtctgtccctcacatatgattctagaacattgatgctagggtctgtatgtttgcccttaacatatgatttcaaaacactgctcctggattctgaatgtttgtccttcacataggaatacagaacactgttgctggagtctgaatggctgtcactcacatagaattccagaacactgctgtgaggatctgaaagtttgaccctcacatgggattccagaacactgctgcgagtgtctaaatgtctgtccctcacacaggattcccgaacaatgttacgaggttctgaatgtttgtccctaacataggattccagagcactcctgctgtgctctgaatgcttctccctcacataggattccagaacactgctatgagggtctgaatgcttatccctcatataggattccagaacacttctgctgtggtctgaatgtttgttcctcacataggattccagaatactcctgccatggtctgaatgtttgtccctcacataggattccagaacattcatgctggggtctcaatatttcccttaacataggatttcagaacactgctcttggggtctgaatgtttgtcgctcacataggattacagaacactgctgctggagtctgaatgtttgtcagtcacatagaattc

SEQ ID NO: 206794 - DNA, 1000 bp, Homo Sapiens
gtgtaggggcagttggcctgggtggggaagttcgggtttggacacagagaggtttgtgttccaggagccacccggcaggaatgggcgatatggaacaggagaggggccaggactgcaggaagagccagaggtacaggagtggcaaggaactcaaggcatgattcggggcaagagcacccacacatatctggacaccagagggaggagaggagccagctatctaaggagggtgagcagacatgggagattcagacacacggagaggacgtgggtgggaagtgactgtcaagagacagcttcagcagagtgggaagggcaaaggccgattttggcagggacaggcagtgagtggatggtggggaaactgaggcccagcaggaaggggctgcttgccagagaagttgagagatgacatgatggaaagaaactggatggtctgttgaacaggcaagtatggttagaggactatcttttttaaaggccaaagaatggtcaggcacggtggctcacgcctgtaatcccagcactttgggaggccgaggtgggcggatcatctgaggtcaggagttggagaccagcctggctaacatggtgaaactccgtttctactaaaaatacaaaaaattagccgggtgtggtggtgcgcacctgtaatcccagctacttgggaggctgaggcaggagaatcgcttgaacctgggaggtggagactgcagtgagccaagattgtgccattgcactccagcttgggcaacaagagtgaaactccgtctcaaaaaataaattaaaaaaaaaaaaaaaaaagagccaaaggagactaaagtaagattgagggttgtgggatggcagccaagagaaagggggagattacagatgctgggcagagaaagaactgatggagagggacaggcccctgaggaggtggacagataggtagctgttatcacctccactctacagacaagaaaaataaggctcaaagaggttaagtaacttggcc

SEQ ID NO: 206795 - DNA, 1000 bp, Homo Sapiens
atccacggggctttgcggccagatgaacgcctgtgcatcccgaaaatcctcacctttagagaattttcgccgtgcgacgaatcccgaaaacgctcacctcaaccccgatcggtgcgcatcagccctgctccccgaattccctcacctttcgccagaaccccatgccgctgccgacggcggcccccgaaaaacctcacctttaagccattagaggccgcaaaaccccgtcggatgggccttcagaagctttctttcccggaaaccctcacatcaagacgggctggaatcccgagaaatctcacctacgccccaaatttgcctaaaagaagggcagaatcgctgctccgtcgacctcccgaaaagtctcacccatgcctgtgcagctgtggatggatcggttcaggctctgtgcggcctcacctttgctacgcccccgaaaaacctcacctttcgcaattttgtctgtgagaaggcatcctgaatccgctcacgatcttccctgcatcggctcacgctgatccctgaaccccatcacgtcgagtcctggaaaatctcacctcatatcccgtaaaatttcacctagtcggccgcaatcccttgctgggcaaggcttcccggtggcgttaacgtttttaaccaaggttcaagggtgtttacttctaatactctcaaggcgcccccggcgagttttccacagaaccccaattccacctccagacatgtctccagaaccgcaacgctcggcatgtgaaacaatcatcgttattcgggtcccaaccgataatctttaaaaaacagggacttaagtgacgttcttcgctttgtttcacggatttccagcgtctgtgtgagcaaaagcagccaagatcgagccaatggtcagcgcaggtagtaaaagaacaacagacaaaccaaaagcgtatcaaacaaaacgtattccgttattatcgatacattctgtttctgcgccacgaccatgactctcgacgagatccggcaa

SEQ ID NO: 206796 - DNA, 1000 bp, Homo Sapiens
atacgtcccatcaatatctaatttattgagagtttttagcatgaaggttgttgaattttgtcaaagggcttttctgcatctattgagataatcgtggtttttgacgttggttctgtttatatgatggattacgtttactgatttgcgtatgttgtaccagccttgcatcccagggatgaaacccatttgatcatggtggataagctttttgatttgctgctggattcggcttgctagtattttattgaggatttttgcactccactccactccattctattccattccattccattccatctcatttcattccattcccttccactctactccactccattccactctactccagtccactacactccattccatttcattccaatccattctattacattattttatttcttcaggaactcactctgtcatccaggctgtagtgaagtggcacaatctcagcccacatttcatttcaccgtgccattccattccattccattccattccattccattccactccactccactccactccacaccactccactccgctccactccactttactccactccactgcattcctttccattacatcccattccattcctctttattccactctactccactacactccactccactctaccccactccattccattccactctaatccgttccattcctttctttcgatagaatctcacttgtcacccaggatggagtgcagtggcacaatctcagctcacatttcatttcaccattctattcccttctattccattccattccattccattccactacactcctctccactccattccattctatttcaatccactcaactccactccactccattccatcacatcccattgcattccactccattccactccactccactccactccattccattccactccatcccatcccattccattacattacattccactccactccactccactccactgaattc

SEQ ID NO: 206797 - DNA, 1000 bp, Homo Sapiens
cagatcaattagaaaatgtagataaggggaagaaataactcattttagtacattttcttctagatatgtccctatgcaaatatataaatatgcgtctatctttctatatacttaacatagtattgtgtggttgcttaagaaaacttaactattgtgaatacaaaagtttcagtctaagccattagtcaggttctcactctgtgggcagctgcgcatctgctgtggggaggtgccagggccgggctctgctgggaggcctgggcaaggccacatcagaggggagggtcagggccaggacagcccagggagggggccaggaaggaagaggctgatctcccactgacaacctgaccggatccctcacagtggtcgccactgggaacctgctggacttagaggagacagctaaggccccgctgtccacggtcagcgccaacaccaccaacatggacgaggtgccgcggccacaagccttgagtggcagcagtgttgtctgggtgagtggttgtgtggccagcagatcggtgatcctcagcctgacctctgggtgagcctggggctgctccagggaccaggccctgggacccgtgacttgtgggcctctgggaggaccagacccagcccggtagtgcccaggcgcaggataggggatgaacaatgtcccttttgaacctgaggctgcatccccaacaggcttggctcccagcacagctgtctcctcacaatgcttggcctcttggcctgagcgtccacggctctgcccaccacaagaccagccaaaggcgcccttgttcttggtgtggcagagctcgctcctaccacccctccccctcagccgcctgaatgaggacccagagacttgggcagtcaccagcttggtccctgactccctcagggactcagggcaagccccctgacctctctgtctcagctttttcatctcagtaagggtgatgacctctgccaacggaatctccccgaggaacctgaaatttaattt

SEQ ID NO: 206798 - DNA, 1000 bp, Homo Sapiens
ccctcctcctttcattatcaggtccctggtttcaatccggggagcctgggtagttctaggggatggctttctcccaccccaagtggtcaagtgacccaagcctggccagcgagtgcccatcttgggacctttgctgggtttcttgaaatgaatctctctcgtgcttgctcttttggtgtctttttccctctgtctctctctttctctttgtctctttccctcctctctgtctctttctctcactctgtctctttctgtctgtgcgtctctcactctctgtctctttctctctgtctctctctgcatctttctctccccctccacctctctctctctctctccctctctcctccctctctgtcccaccgattagatatataagcctgaaatctcagtgtccattttgctccgcctgcagacagcctgccaggagtgaagctagccccaaggaaagtggagctgagctatggagaaagatttctgatgacatggtttgggttctggatccagccctattttcagacctcttggccacataagcaagttgattcatcttctgagttgagtttctatccccagccaacccagcatggcaggagtgacagcaaccagccccatgtggctcctgcagccctgcctctgccctctgcaccctgtggaggctgagactctcgaatgcccatcagcaggccaatggtgtcgtcatagaatggagcccttctcagcaaagaaaaggaacaaaacctatggaaacacacaacagcgcagaagagtcttaaaatgatgttgaaagaggccaggcacacagcccacacactgcatgattccatttagaaagttccagctgaaacagatctgatccatgctggctagtccatgattgctgggacagaggaaggggatgactgccaaggtatatgagggaagtttttgaactgatggaatcttccagatcttggttgtgatggtggttgcatgagtgtaaaactcaacatttgtt

SEQ ID NO: 206799 - DNA, 1000 bp, Homo Sapiens
agccaccatgcccagcccagttattttagagtattattgaaattatcaaaggacacagagaactgagcagactgagccaaaagctaaaacctgacagaccctggagtataaaagaaattaaaagaaatataaatcccacaatacaagtaaacctatagtcttttttttttcttttttttgagacagagtctcactttgtcacccaggctaacgtgctgtgacaccatctcagctcagtgcagcctctgcctcccaggtacaagcaattctcctgcctcggcctcccgagtagctgggattacagatgtgtgccactacacccagctaatttttgtagagagagggtttcactgtgttggccaggctggtcttgaactcctgacctcaagtgatccacctgccttggcctcccaaattgctgtgattacaggcgtgagccactgcactcggccaacctatagtcttttttaaaattttatttatttatttatttatttgtttttgagatggagtctcactcggacgcccaagctggagtgcagtggcacgatctggactcgctgcaacctccacctcctgggttcaagcaattcttctgcctcagcctccccagtagctgggactacaggcatgtaccaccatgcccagccaattttttttgtatttttagtagagacggggtttcaccatgctggtcaggttggtctcgaacccctgacctcaaataatctgcctgcctcggcctcccaaagtgctgggattacaggcctgagtcacagggtccagccccaacctatagtcttttaaatcactttatttccttctcttctttttcaaaaggggagaatgcaccgaaaccttacggaatcggatcagagaactagaagcagagggcaagaagctcacgatggacatgaaggtgaaagaagaccaaatcagagaactagaactaaaagtccaggtaaggggggaacaaaagacttcccttgtatttgaattc

SEQ ID NO: 206800 - DNA, 1000 bp, Homo Sapiens
agctctccttggatatggtttcggttttaaggctgtttcagatgctcttcctttcgattttgtaaaccagtctatttcattttttaggcagtgcttttacatgaagacaaaaagaaacaaaaaaacaacaatatttttgagtccccagtcaggtatgtgggttttaaaaaaaacaaatgtgtgttattttatttactgcatactttaccacatgccttttgagactttttctccaaatatgtgcttttaacagggattggacatcagaatcacttgggggaactttaaaacatatagttgcccatcctctacctttatttcctaaagctaattcttcagtggttaagcatgggcctgtgtgttttgtaaattccaagtgatgtttataccacccatgagtggcaaccagagtcttcaattatttgttccagtcccgtgctttttgttgctgctgtcttgccagcagtgttttctcctcctggagagtatttgccacacacaaagtaaggaaaaaaactaatctctagcctgaactccactgttacctctcagctacttcatttattcattctttcaacaaatagctatccagcctctcccctccctttccaagttcaggacaccagcctcaacactgaagatacagcagtgaacaagcaaagccccttctctcatttactctgcatccttttcagaagaggtagacaataaagagatacagagataatatgtcatgtggtggcaaatgctaggaagaaataacaaaacaagaaaagggaaagagaatggttggctaaggaggcagcatctctggtaaagtaacatttaagcaaagaatcaaatgaaacaaaggggccagtcgggggaaattggtgttagactggtaaactcagagatggaaacaggtgttgtcctgcagcatcactgaggcagtgtggcaggagtggaacaggattggaaactcgagagacagaagaaatttaaaaaaaaaaaaaaaaaa

SEQ ID NO: 206801 - DNA, 1000 bp, Homo Sapiens
cctcccacctccttgaattctggtgaaggcagtcccacaagtttgtgttccaccggttgaatagccctgttaggaaggcatccattttcccccacaagttcccataaaagccgtggggctgacccttactggactcaacttggggcatggccccatccttgacctaagtatggcccatggggctgtgctgaaggtggttccttagagagaataaatactgggcaggcaaaaacaatataggtgctgactgggcctagggtattctaggatattctatgtcttactactcagggtatcatgctctggtcagcagcatcaccattacctggaagcttgttggaaatgcagactcatagactcttaggccccactgtgggatctcatggatcagaatctgttcttaacatattcctatgcacattggaatttgagatgtgtgcagtgctggagcaagtcagggaactctggcccatatccatctcttcttcatggcatatccctgtatacacactgggcacctccatctcccaccagggctcacacctttgaaaccctaaagcagtgtgtgtcaagagaggccccaccatgatgaattgcttttagatgttcctatagtttcctttaagaccaggaatcagcatttcctttgttagctaggtaaaaataatgaattggaaaaaaagaaaaaaccaaccacaaaagatggtccaggttttcctcacagttaaaataactggttacatgggtgggaattgctgcataaaggcttaaatctattccttaaaaacaagctgtgtatacagttctccttttcttagctaaacaaaatgaactgggtttcaaaaattggagatgaatgaggttcttataataatcagttgcatttacttatcagctcttgttcctgttctcttcatttcctttcagattgaggcatttttaatgaggagagaagttagaaaagggggtcaggaaaactggaaaaaaaaaaaaaaaaaaa

SEQ ID NO: 206802 - DNA, 1000 bp, Homo Sapiens
gatcctgctgacagtagctacatgccgtccctggttgtagtgtcaggtaattcagttagtttacctaaaaagaagtaccttctataataaagacgcctttgtttgattctttacccattttttcctaggtggaaattccctgaataaccttattgaactaaagacaatcaatattaacccttctgacaccacagtgccccttctgaatgactgcacagaggtaagtagctatgctagtgttccatttggatgatttacagatgacaagggaggtgacttggccatttctatactagcattgagcccagtttttccccgtttaaataattggttctttctgttttaaattttgacactttaaaagatacaacttattttgtacaactgaatttgctgcttatcagttcagcttgaaaaggaaacaaatttcattctcactctctttggtagcagaggtatacttggtaactgctcctagcaaaagttttcatcaggcattttaggttgctgattgcatctgaacacttcggttttcattaaatatctcagtttctggtggttttcctgaccatatatgtgacgctgaagttgcttttttgtcgtcacacctgttggcatcaagtgctgaacttgtcacggagtggcaattttttggttaataaggcagctttcaaaatgagtctaagtttatctctggaaaagtttgaaagaatcagtgaaggttcttttaaacagtacccacatactacagatcagcaattatctctctctcaaatttttagtaaacctttccacataggatgtcagcatgatttttaatacattaaatatatgtaaaataagacaaattaagatacttttgttggccgggcgcggtggctcacgcctgtaatcccagcactctgggaggctgaggcgggcagatcacgagctcaggagatcgagaccatcctggctaacacagttaaaccccgtctctaccaaaaaaaaaaaaaaaaaa

SEQ ID NO: 206803 - DNA, 1000 bp, Homo Sapiens
ccaccgcacctggctaatttttgtatttttagtagagaccgagtttcgccatgttggccaggctggtctcgaactcttgacctcaggtgatctgcccgcctcagccacccaaagtgttgggattacaggcatgagccactgcgcccggccaatttttttttatgttttgtagagacggggtttcgccatgttacccagactggtcttgaactcctgacctcaagcaatctgctcgtcttagcctcccaaagtgctgggattacagctgtgagccaccgtgcctggccttttattgtttgtttttgagacggagtctcactctgttgcccaggctgaagtgcagtggtgtgatcttggctcactgcaacctctgcctcctgggttcaagcgattctcctgcctcagcctcctgagtagctgggcttacaggcacccaccaccatgcccggctaatctttgtatttttagtagagacggggtttcaccatcttggccaggctggtgtgatcatggctcattgcaaccttgaattcctgggcacaagtgatcctcctgccttagcctccccagtagagctgggactacaggtatgcgccaccacacctggctaatttttttaattttaatttttgtagagatgggggggcaagtctcactatgttgcccaggctgttctcgaactcctggccacaagccatcctcccaccttagtctcccaatgcgccggaattacaggtggctcaggtgtgagccaccgtgcctggcttttctccactatcttgaaatcagatgggaggaggcttttttctgggtgggactgaggaggcacactgaagtcccccaggtcatcggggctgggccattgcctttttccccaccctgtgtagtcgtggacagaagcttgggatgggatggagaggagagaatcgtgctgtgtgtcatgtctgttgttcaagtaaataaaagttgccctgacttcaaaaaaaaaaaaaaaaaaaaa

SEQ ID NO: 206804 - DNA, 1000 bp, Homo Sapiens
tacaatgctcaactgtttgtttagctttatctcacttggggaatttattcctgtctgctgcattgtaggtagctgggtaggatatatttccacttgctttttaaattagttcttcacctccattgacactcgttttttggttttctccctatagtgtgggttggtgctagacaccagtctgacccacagaatgggagctatttcatccatctttcctccatccttccaaaaaccacatatctacacaaggaaaaatttaatacatctaggaatttttttttttaattacaagctatttaaagagatgaatgtggccaaagttttacacaattgaaaataaagtaaaacagacggcatgtgtttaaacctgagtttatcaggcatggcaggaagttgcaggagagagaggcagtgacccaagccagtgcacttgatgttcatggacatatattttttttaaataataaattaaaacattttaaatagaagcataaattgagttgtttgttggcgctgagatactgcccactgtgaaacaaagctttgactagttttttgtttgtttactttcttcaggggggaggggggcaagtttgggtaggaaagaaagcataaatgaacgtgaccctgaggtgaagaggtatatgaacagcctttgcaatgtacaaaaagaaaaaaaaacaaaaaacaacaaaaaaaatagagcaagtgaaaccaaaaatgatgttcttggtgtttttctataatgtagtcttgttagcttttttgttactgtaacaatgctgatctcgaactgtaccaaaatacatggagactaacaaacagaaccacatggaactttcaaactgaaaaaaaaatttgtcacaaaaactttgttgtcatagttaagttgattgtagatggtaattgaatatactcctttgaaaatatttcatcaagtatgtttcctgctcattgtgatacattaaaaaaaaaatatgagcaaaaaaaaaaaaaaaaa

SEQ ID NO: 206805 - DNA, 1000 bp, Homo Sapiens
gtgattttgatactatctttagagttttgcattggatattaaaaaatatattggcacaatgtattggaagaaaatgagtagtatctggtttaatttttaatatttagggacattttaaaaaaatcaatgttttaattagactaaaaattctttatattttttatttactttttaaagaaacatctgtcaaagtaatattgattccaaactgatgtttgtgtgaatttacatgtctattttcatgaactaagaatagagtttctttgagttgaggagaaaaaaatatatatgtgggtccatttattaggttaaagttgacccattcagtgtaaaaataaccatagtgtgtgagctaaagaaaaaaaaaagtaaatttctcctttatattctaagaagctttaaaagaacaattcaggggttattgataactgctactctgtcggtcattgtctctatatgcagtaaaattttatggtccctttataggaatataaagaattcaaaacagtttttcaaaagatttttttccttggacataaaaaattttgatgctattctatttttgtttttattacagcttaactgtatgctgttaaactctaggatgtatctgaatctttcctttttttcccccctcctccaaatatataaatctgtgctctcacatgtaatgtatttaatttttggaaaatttaatgctatatagtaaatcaagtgtgtgatttaaagtaatcagatcactttgattcttttaagttttcagaatttcttttttccacaggtaattttggagaaaataattaccaattaactgataataagcacgctgtcctctgctgtaaaaagtctgaatagatactgtgtatgtttttatgtccatgaacttgagctactcgtgtgcaattatgtgtatgggaatggagtagtgttcatgatttgtatctatatcatcatatggatgtatatttattaataaagtcattactttaaaaccaaaaaa

SEQ ID NO: 206806 - DNA, 1000 bp, Homo Sapiens
atatattcaattatcatcaaaccccaggctcttgatgtgggtgagctgtcttcccaagatcacccccaggagttggctcaggactggaaagcagagggggcccattggagggaggatggagttcatagtgagttgagggcagtagttaacgtggggttggagccagacacatacaagttcctatcctgattctgccacttaatagttatgaccttcaacggtattctacctctctgagtccgtttgctttattcaaaaactccaagttgctgggaggataaatgagattgttattgtaaactgcccagcacctaagatgcactaagatgtggtagctcttatcacccttcctagaaaggttattccggatggggactgatgctgtccaggagaaatggatgagtagagggaaagctgtttgttcttaatagtagaatgaaactcacatgtgtcactaaccaaggggcctgccctgctgggacaggcctccccttatagcccactccaaatctatccttctcgagttcccactcactggaatctccagccttccagattttctgggacctggagttggccagtcaccaccaccatcctatgcagctttccctttattactggaggaagtgtgaagataactttttccctcaaacgattgtaaagagcttaaaggcattaagatgagagacgggccaggcgcagtggttcatgtctgtaatcccagcactttgtgaggctgaggtgggcggatcgcgaggtcaggagttcaagaccggcctggccaacatggcgaagcctccttctctgctgaaaatgcaaaaatcagccgggcgtggtggtgggcacctgtaatcccagctactcgggaggctgaggcaggagagtcgcttgaacgtgggaggcagaagttgcagtgagccgggattgtgccattgcactccagcctgggtgataggagcgagactcttgcctcaaaaaaaaaaaaaaaaaaaaaaaaaaa

SEQ ID NO: 206807 - DNA, 1000 bp, Homo Sapiens
atagtcatttattgaatgtatactatgtgtatcagtattatgtttcaaactcaggggaatgtagaactacaaaatgttgcgctaatatcagtttcttccacaacacttagctttcttaataagccctgctcttggttagaaaagcagaaatgtgttaatgtttttaatgcttttcatgctatttgaaaagcacttttaatttctctccttattttggtaagctttggccacaacattgggaagagttaaacatcttaggtagattttcaacttactgttatcttggtttaaattttatacaaatatgtttagaaaattttatatgttgtgaggtgtaccattaataattttaagtactatctgctgtacttttgataaagaattttattgaaaaattttagttttaggccaggcacagtagctcacacctgtaatcccagcactttgggaggccaaggcaggcggatcatttgaagtcaggagttcgagaccagcctggccatcatggtgaaaccccatctctactaaaaatacaaaaattagccgggtgttgtggcaggcacctgtaatcccagttactcccgaggctgaggcaggagaatcacttgaacctgggaggcagaggttgcagtgagccaagatagtgccactgtactccagcctaggtgcagagctagactatctcaaaaaaaaattagttttagagcagatagcatcatagttactcctgttagtctttttgttctgttttgttcatttaatttctctgaaactgccagtgtcattatcttttaccacccagttcatgatcagcttggatccagtcaagcaactgatgtatttgagactgtttgagtacattttcttatttttttttcttgtggtatcacacttgtcatcgttaaaaacagtagatcttctggtgtcactcttgtcaccattgaaaacaatgcttctttttcaataaactttgaattggaaaaaaaaaaaaaaaaaaaca

SEQ ID NO: 206808 - DNA, 1000 bp, Homo Sapiens
tatgagatatcatctcacaccagttagaatggcaatcattaaaaagtcaggaaacaacaggtgctggagaggatgtggagaaataggaacacttttacactgttggtgggactgtaaactagttcaaccattgtggaagtaatcttttaatgatattttcttattatattgctacaggcaacatcagtagaagcctatctagttacactaaactaaagatcacattcaccattcttacagccaagtggttgctggtcccctcataacttttagttacttaagttgagtaaatgtctaattgtttacaaactaaattgactaaataaggtcaaggataatgtttttcattgattaaccatttattatacatataatctattgaatataaaaagattcaccttgaaataatatttgactatataggtacatatctgtaaaagatgaccaccttaactaaatcagattttacatttataaattttatatttaattagtcaaatcaatttttaaatcataactccttaatctcataagaagcaataaatgcataaagcattatattaaaataccagggttacttatgtcattgacagggaaaagactttgtataaacaattatgcaccatctatttttgtactcttactcatgatccatttaaaagtctactcagctctagattagataccagaagaccctctaagtaactgataactgagattcgggaccatgtcttgtttgccattgtgcccttggaatttaatacaagtgcctaacccacagtagggttgattgattcactgattagttttactgccatgtgcctataactataggttattctctttccttttctatgttgtgtttattctatttattctctacaatatataaaatgtatttgttctctacaataaatgtgtttattctctacaatatataaaaacatattggactactattacataattaaattactctttaaaaaaaaaaaaaaaaaaa

SEQ ID NO: 206809 - DNA, 1000 bp, Homo Sapiens
aaaccccgtctctactaaaaagtgcaaaaattagctgggcgtggtggcaggcgcctgtagtcccagctgctcgggaggctgaggcacgagaattgcttgagcccgggaggtagaggttgcagtgagccgagactgcgtcattgcactccagcctgggcgacagagctagacaccatctcaaaataataaacaaataaaagaagttgtgtaaacactatttgtgaacatcaaagaaaggctctgtgtggtgtgtctgtccacagtagatggggatggaggagccatgggaggccgcacagggcagagagccaggattcactggggcagggaattggactaactgtggactcccaagaacccctagagagtttgggatggatgccgggcttctctttccccatgagaagggattttgatccaatatttaaaatcttccgaatgacagaataacccttgctgctatctggactatatacttttgtaccataatttagctagttcctcttcatgatcatttagatttttccaattttccccctttattatacttttctcagcaataaaaatattgcatctgcttccaaacagatacagtcagtttatatacactaatagatacagtgctccccacctcaaaaaaaatagacgaagctattttgaagatgatcccctgaggagctggcatgacttagagcccatagttgccctgtgctacttccatgatgttaaatttcaaagcagagattacattttaattataatagcatgctttagagggattcacagcttaaaaaaacaactggaagcaaattgtacatgcaagtgattaaatgtcttatccatgtgatttccattctcaaagcttgatttataacacttggattcctaaaatctgttcttgcctttttctttccaccatattatgagttatctcagactgctcatgataaatgaggtgactaccactgatttttacaatgacaaaaaaaaaaaaaaaaaa

SEQ ID NO: 206810 - DNA, 1000 bp, Homo Sapiens
cacacacacaggtacacgcaacatatttagtatgcaaaatggaagtattattaatagtggttcaccattcttttacttttctagttatttctcaaggtatggttcacagacccagggagacctttacacatgcttaagattgggtaccattgctttaaacaaacacagcctctggctcctcatagcaaacaataaacttattccaccaggagggaaaaacagaaagaagattcaactacttttggcaaatatatggcaaccttgtcccccatactggattactccctcccatactatacattcactggccacttgtatcgattaatgttttcaaagacagagaactacagttgtccctccgtatccaagggagaccggttccaggacctctgcagataccaaaatccacagacgcttaagtcctttatataaaacggcatagtataacctatgcacatcctccaatatacttcaaatcatctcgtttacttataatacctaatacaatgtattataaatgccatggaaatcattgttacaatgtattatttgtaattattgttgtattattggtttttattgttataaaaattttttccaatattttttatcaggagttgattgaatcagggatgtggaacctgtggatatggagggccaactctattgtacagaagacataaaaaaaaaggaaaacctgggccaggtacggtggctcatgcctgtaatcccaacactttgggaggccaaggcgggcggatcacgaggtcaggagatcgagaccatcccggccaacacggtgaaacccggtctctactaaaaatacaaaaaatcagccgggcatggtggtgagcacctgcagtcccagccactcgggaggctgaggcaggagaaccgcatgaacccgggaggcgaaggctgcagtgagccgagatcacaccactgcactccagcccgggtgacagagcaagactccgactcaaaaaaaaaaaaaaaaaaa

SEQ ID NO: 206811 - DNA, 1000 bp, Homo Sapiens
aactcaggcacaatggaaatacttagatagatgctcttaaattacatttaaacaaaactatttacaggcgatctagtaaaaatctgtgtctttaatgggctatttttaatgtttcctaaacaaattattgtaggtgggccaattttccctctttacttgttacttagaagcccatttggacatgttctaccccgatctggttctctcaccccactggctacagaatagtgtgtttttgtttgaaagggtcaaaacattaagaatgtgacatccaaaatatgtgctatttttttttcctggagtcaaaacccctaaagtataaatcgtttttaaatgaagaaagcagtgccaaaaggaatgaaacatatttggtccttctccaaaacagagagatagcactgaaacaggaagtggatgatttaaatatccactcggcatcttggcaacatatttatgtttaagggacttaaggttaaaaggtttttgtctggcctgggaacactctatcttccctagggtttggaggtttggggaaaacttttaacaacttatcaaatatttgcaattagccattttttggagaacaaattgttactgagaatgtcataggaaatgttccctataagctgcatgctaccattactctcctgcttcttatgataatctctttagccacctagcttcatgtggtagaaagttattattttctataaagaaagaagaatgtggttcgagttcttgtaactacttctcccaaagttggaactacacagaatgactgaataagcagaatgcaaaattggggtttaattgattttgtgtgtgctgtttccaaggaccacttagtgggcccattcttatagctagaaatcgacaatatcgggagtgtttacacaaggaagtaggccttctcctacttcccacccttcagagatgagagactgctattatccatttaccagcgcaccactggaaagaatagttaaaaaaaaaaaaaaaa

SEQ ID NO: 206812 - DNA, 1000 bp, Homo Sapiens
agtatcatccaactaaatatcagtgaatgcctgttttaatatttctccaatcttattcatagttacaaaatcaggacaatttatttcttctattaaatgccgtttattgaactaagcattatttcaaagaaaaaagaactagtcattgaaaagtaattccttttttagatacctcattaaacttaacaatggcatttaaacacttctgattattgaaaaattaaacatgcctaaattatttggtctcattctactcatagccaaaatttaaatatagcttatcaagtggtttctgaaaggtatagagtaaaaatgcattcttcctcagctctttttctgtaccaaaaagcgctatctaggaagcttagcacagaactgaaagtgaatcaataggaagatgttggttaaagaatatataattagttagattgaaagaatgagatcaaggaatctattgcacagcatggtgaatatcgttaatgataatatatttttgaaatatgctgagagtggatgttaggggttctcaccacaaaaatgacagctatgttaagtaatgcatttgttaataagctggatttaacattccacatgtatgtatacttcaacatcgtgctgtacacaataaatacatacaattttatcttttagtttctaaaagatttaaaatcaaaatgaattttaaaaagtagaattaggccgggcgtggtggctcacgcctgtaatcccaacactttgggaggccgaggcgggcagatcatgaggtcaggagatcgagaccatcctggctaacacggtgaaaccctgtctctactaaaaaaatacaaaaaaaattggcctagggcagtggcaggcgcctataatcccagctactcgggaggctgaggcaggagaatggtgggaacctgggaggtggagcttgcagtgagcagagatcaagccactgcactccagcctgggacacagagcgaggctccatctcaaaaaaaaaaaaaaaaaa

SEQ ID NO: 206813 - DNA, 1000 bp, Homo Sapiens
ttaacaggggtttgtctctgcccttttgagcctttggttttctacctggctcaggcacccaggtttatgttttctagatcaaaactctgcatggtctccctgagagactggagaagagctgccaatcaggatggattttttcctacacaggtatgacactgcagccacttcccttcttgggaaaattaaacttcattctgaagaatgtcctgttggtggtataagccaacccctgccctcctaaaaggggatagataattaaatttggttaattagcaatcagattcactggggaattgaaacccgtacttccctttcttctgtccctccaccaaagaaccggaacaaatggcttcatgtctttgtccagtctttctgcctaaagcaaaatagcatatattctccaggctgaaaagtagattcctcctcacccctactcaagacggccacatttcaatccaggctcttgaagacagggtctaatgaaaggatttctgttctttctctgtctgttccctctggcccagcttctagtcctctccttatgtccccacctccatggcagtggcaagagacccctgagagtcaatggtgctaacgttccccacctatatacccctatgtagtttatcgagatttgaacccagcacctgggtggctgtgttgggcggatacatttcacgtcctcaagaccacaaccctggcgacaggtctggattaattctgtaaagtagcaatctatatcatgctaaattcctgcactgaggttctacctcggctgaactgactcgtggatggttaagtttcctggggtggctggaacccatttactaagcctctaattggtttcattttggctcaagttgcatggtttcccgaatctatgcacctggagtaagcacttttctggttgccactgaaaagcatgccggcaaacgctgctctgttaattgctgtaataaacagactttattataaaaaaaaaaaaaaaaaaaaaaaa

SEQ ID NO: 206814 - DNA, 1000 bp, Homo Sapiens
cctgattccaggttttacatggagaaataacctgagggactttatttctatccaatgccctggtttccatcctgaccagaggatgatgacatccgctgataggccatgcttctgtcttctcttatgtgcctcatgccaagcctcgaaatataccttctggaccatcatttccacatctaccttgtgactagaagtcctagttatggtattttgaaatttatgatccataatccttgccagaaatcctgcagcgaaccatggcatggcatcatcctagtcattgatttcaatcttttgccttttgctcccctagaatcttgggccaattgcaggagggggctctgtttgtctctcttccatgctctgaggattatataggagcatcccagctaaggctggagtgaaggggttggggagagttgagcaaaggctaacttgaccaataggctcaatagattcagtcttgttggccaggcccacttgaagggttttttgtttcatcttggagaaggacagtgaggtcatggtataattgttatgagtaaagtcaagaacagcttctaggtaaaagtaattatgtacccaaaaggagttgaagggaaaatcaatttaggtttacattaaacatccttcaagttcttatctttaaatggagtttcagtgtctcccaaaggctggatgagttttacagttataaccactggattgtgagaccataggacatttgaacaatcttttcttctacccatctagaaaagcatcttttttatataccaaatttttacacatatatccacatctgtttttgaaatctagagcagaggtactcaaagtttggttcatggactagtgccagttcacaaattgttaatgttttataatgagataagtacggaagttgagagtaaccatttagaaactgtgtaggaatttaaaaagtaatatctgacaaatttaataataaaaatggaggcttgtaagaaaaaaaaaaaaaaaaaaa

SEQ ID NO: 206815 - DNA, 1000 bp, Homo Sapiens
tctgctattaagaatactatctgggtaaagaaatgctttctgctttctttggtggaaatagataagagtgagcagacttatattcattcattgaaattcagataaattcataaccaaagttttattatatatatactgataaggtgaagagttcaacactaatctagtttgaactccatagatatttaaaaccagctattttaatttcttttagctttaagacaatgctgaaatatgtacttaattttctgaatactttgctctttatagttgccgtttcatgaatttgtgatattagacttattgtatgaggagttttgtatttttcttctttgaactttttgcttatagtgctttgggcacagaccttcccaaaccttagtatttctggatgaattttttgagagtgcacaacattggaaaggagcttttgcataatgccagcaatgtagctgaggaaatgggtctggaggaaaatgagatttgacacctgtaacagaggataaatatgataggggccagagtgccttatacagagtgtgataggaaagctcaaaactaacagaaacaagcaatggaagagtaaaggcagacagatggttgcagagatcttagtttctgatgctagctgtgttattaacagactgtgtattatttgaaataatttatcctcactgagcatctgtttctgtacctgtgaaaaatgtactagataatctttgatatatcattcaagctctacaattatcttcttttgtgacacagagacagacaagaatagagattatcaatgttatataaaaggatgttacttaccaaacaagtttctgaggtttttgttttttgttttctgttttgtttctttttaggtaccaccttcccagactttcttgttactgtaacgtttatttcttcaaacagatcataaagcaagcagatattatccaggtgtgcaaaagtgattaaccatgtgattttcagaaaaaaaaaaaaaaaaaaa

SEQ ID NO: 206816 - DNA, 1000 bp, Homo Sapiens
ttaggttttaaattgaggcttactccttcatacatcctaaatgtagcaagcctgtcatttgtctttagtcttataatccttgttttatctctaggcaactgtggcttttgagcaccttacttctcctatgcatatccctaatctaccagataataaaagtcattgggcgtctatagaaagatgctgtacccttctgttgcctaaaggtgtcattcagagcaccctcaaatagtcaggtcagcccccttaattaggctctgcaactggatacagacagagtgaacgctaagactaggtcagggccggatagactatttcttccttccctgcctccctaagcttgttccacatgcattaaccctcctatgctgcttatcatgaaattgcctcgtggggagaacagatcgattcagcactggacaggtcagcctgttacctcagtgtaacttgatccatctcgattgttctctgtgactcctccattaaaaaagaaggtgaccctctgaccctggagacagtgtcgccggggcttctggtgccttgtaataagctctacatccctattcctcttctgattttaacagattcccgagcaggtgaagaaggctcgatcagggcagtggatcatgccgtgatcggtggcgtcgtggcggtggtggtgttcgccatgctgtgcttgctcatcattctggggcgctattttgccagacataaaggtacatacttcactcatgaagccaaaggagccgatgacgcagcagacgcagacacagctataatcaatgcagaaggaggacagaacaactccgaagaaaagaaagagtacttcatctagatcagcctttttgtttcaatgaggtgtccaactggccctatttagatgataaagagacagtgatattggaacttgcgagaaattcgtgtgtttttttatgaatgggtggaaaggtgtgagactgggaaggcttgggatttgctgtgtaaaaaaaaaaaaaaaaaa

SEQ ID NO: 206817 - DNA, 1000 bp, Homo Sapiens
gcggatcacctgaggtcagaagttcgagaccagctgggccaacatggtgaaaccccgtctctactaaaaatacaaaaattagccaggagtgatagcgtgcgcctgtaatcccagctactcgggaggctgaggcaggagaatcacttgaacctgggaggcggagtttgcagtgagccaagattgcaccactgcactccagcctgggcgacagagcaagattctgtcttgagggaaaaaaaagcccctaaggcatgatgccactgaaggccaagtcagccacgggccatatgtggccagaacaggtgagcagcatcagtctcattgctatggaggtggtgaacccagtgattgggctggtgggctgagggtcatccttgtcttttctcctctggtacagcgcccggggttcctccaggcttcaccctaacacgggctgagcagagaaaaaggaaaaggtggcaccgagattaggaaggagctagggaggggctggggagtctgggaagggtgagcaacagttgacaatggagggaggaaagtaggggatggggagaaccgaagaaacgacccagccattcttcgcaccgtccacactggtatcggcaggaagtgacatgttatgttttaacttataagaaaaagattttagcaaagttctgatttttctgtgttttaaaaattataataatgccaccacatcctgattgttaaaatatttatacttaagaagtttcctggctgggtgtgttggctcgtgcctgtaatcccagcactttggtaggtcaaggcaggcggatcacgaggtcaggagatcgagaccatcctggctgacacagtgaaacccatctctactaaaaatacaaagaaattagctgggcgtagtgggcgcctgtagtcccagctacttgggaggctgaggcaggagaacggcatgagcccgggaggtggagcttgcagtaagccaagataactgtgtctcaaaaaaaaaaaaaaaaaaaca

SEQ ID NO: 206818 - DNA, 1000 bp, Homo Sapiens
ctaccactaataagtagcaacaacaactaatgtaattcttttgctgattaccaaccatttatttgccttggtgttcctttggaatgtaattatttctagctagttaaaattcttaaatacctctaacaggtaaattaaaaaaaaaatcgaactagttgacagaaaggattaaatagtcaaggaggcttccattatggcagccataaaatcagtaaacataggaaagggatattttatcattatttttctctgtgcagatgaatgagaacagccacatcatcctgtgtggtcaaatttctcagtacaacaaagatgtgccttatcctcccccgctatcccctgctatagaggcaatccagaaagaaagaaacatcacaagggaaagatttctggtattaaattataaagacaaatttgagcctggcattctacagctgagtcagtggtttaaagaaggaaagctaaagattaaagagacggtaataaatgggttggaaaacatgggagctgcattccagtccatgatgacaggaggtaacattggaaagcagatagtttgcatttcagaagaaatctctttgtaattgctgtaaatgtcatcaaggcaatcatagatttcttttccattttgcatattttcaaagatatgttaaaaaatccttagactatacatagctcttgatttaaatgtgatcataggtgttatttttagttgcatagggtatttgatacaatcattaatggatcatacacaataggtttttaaaaattaataacttttagtaattacttttattaatttaaaatagaacgcttgagaggcactttgtaaagatttgttaaactggaaacgttttacatgatctgatacaaccattaatgaatcatacacaataggttttttaaaattaatattaataacttttattaatttaaaatagaatgcttaaaataaaatagaatgcttgagaggcactgagtaaaaaaaaaaaaaaaaaaa

SEQ ID NO: 206819 - DNA, 1000 bp, Homo Sapiens
ggatatcaccatgaccaataaaaacaatctgtggcactcagcaggtgcatgtcaacatgggcaggttctttctccccgtcagcaggacaagaacatctcccctatccaaaaggcacccactgaggatccgcagttctctggaattatgctgagcacccagatgtgtgcaactaagccctgagcagtcgatgtggagcgcacttgaaggcacttcatttttttttaagatacactcttaggagtttactttaacccacttcccagctcatagcacacgaggagaggcagacattttaaccttggtaagacctgacaaatgacaatagttggaccccacagcaatcattacttttgtagacagcaaagttatgctccttggcttcaggtgaagacccccagatccaggccagtggatttacaagtgagagtcagcagcactgggcatttcaggcaatagctctgaacaagccctttaccatgcgggtaggtaaaccccagaatatacagatgccccttacgatacatgggtggggagggtatgtggccgagagagcataagcttaggagacagagtggatttgaattccactgagcttttggctgtggacccatggggacgtggcatatgtctcgctgagccttagtttcctcctgcatggaatagggagagcaatagtacctgcctcattcagctaacgtgaggatctagagcagcatttgcataaatgacgcgtggggcacagagcagactcaacacagagcagcttacgttatgaggcttggcaggctgggagctcctgtcggcctctctcctcagctctgtgcccactgagctcggcacaagggttggcccatgacaggtgtttattatgtggaaataaatgagagggacaagacatttgctgatttcttcactgtttccaactgggaattcaaatgtatctcacgttcccataccctcacaataaatctgttcaggagaaaaaaaaaaaaaaaaaaa

SEQ ID NO: 206820 - DNA, 1000 bp, Homo Sapiens
ttaaggaaaaaatagctatgttttaggtaaataactctgaaataaactggtacaacaattgtaaaatagaacatatttaaatgtcaaggtgtcttttcttaagacttcaggaatttgtattgaacaaagtctcaagttaagtagcaataattatgatgcataaatgagactggcatctattcatttattttattcttttttggggtgatgggaggtttcaatccagtgcttcacccgtggtgccaccgtggctatctttttttttatcttacagttttttaggagatttcaagtcggcagaactaacatgattgatttttagtttttaaaatactgatttttttagaaactttttctaaatcaaaacctactaagttttattttgttatttatccagagattttgatgtaaaaatgccttcatttttaagattacttaatactggatttgaaaattattttggatgcttataagttttctaaaacttagataattagaaaaaatgcctaagtttatgatgttttactatgctgctttttagatggaagaaataagcagtttttactttatagtacaaataagttttgttcacaataaaatagatatcctacctggactaatactagatgtacaaggtagtggaattatttcttatattgctttttccaaaaagtaaaaaccaaaaatgtgggccgggtgtggtggctcatgcctgtaatcccagcactttgggaggctgaggcaggcgaatcacaaggtcaggagttcaagaccagcctggccaacacagtgaaaccctttctctactaaaaatacaaaaattagccgggcatggtggcacatgcctatagtcccagctacttgagaggctgagcagcgcaggagaatcacttaaacccgggaggtggaggttgcagtgacctgggatcacgctactgcactccagcttgggcaacagagtgagactttgtctcaaagaaaagaaaaaaaaaaaaaaaaa

SEQ ID NO: 206821 - DNA, 1000 bp, Homo Sapiens
cgtaatatgtactatgtgcttgctatttaataatttaccagtcttagtcttttttattcagactaattttacctttttttaacctatgactctttagttatagtagtacaaaaaagtagttttagttatagttttagttgtagtacaaaaaagcattttctgtaagcttaatttctttccccttcccgctttcccagtcagatgactttagtgatttggagttgtgtgctttataagtgcattcctcagaggacttaatattactaagattttagcaaacactgaaatatgtttaaacactgttatcaatattaaaatagcaccgtttattgactttaatatgtgacaaccactgtgctgagctatgtatgcttcccttattcaatctatgtaaaaattttggggaagtagctgagacttttttatttccctgacagagctgggattcagtggttggtttcttgaaaaagctaggttctttgcctaacagcagcttagctcctcaatttagggaatgaaagcaggaatgaaaatggccagagttttcgctcctcagcttgtggaggagcttgagtacatgaacctcaactaagcccctaacatcaagggaaggaaaatggaaaggagaatttttagacctttaaagcagagaaattactggtgaatcatgtagcacaacaggtacctttagctttttcactgtgatgctgtatgactttctaaggtagtcagcatagtttgtagtaaatgattcttattactggaagtgtaagtggagtgttactcactagttatttaaaaaacatttataaggctattaaaacatcatctggaattaaagcagcataatttacctcatcccccacttttaaccataaaaccctattaccaattttatttcattaatttatttgctattttaatattttaagaaactacattttaatcacatagacaagcagataagtaaggcttcttctaccaaaaaaaaaaaaaaaaa

SEQ ID NO: 206822 - DNA, 1000 bp, Homo Sapiens
tgttctgatcatattctttatcatgtaatttatgttcttttttactaagtattatgtgtggttattatagattttcacaaagatatattgctggtaatatattttattgtgtagtcttataatttacttaaccttctttcaattgttagaaatttaggctatttccagattttcagtattgtaaataatgctgtgatgaccaattttgtgaataaaatgtttttgtgtatttcagattattcccttaggatagtctctcagtgccaagttgtcaaaaacatctctattttgcttatcttcctgctctcttgctgccttagggggtagtaaactgaaacataaagtaaacatgcatacaaataaaaaacataaaacaaaaataagcaacctgatggtaataggtgaaagtggtaacctgttttaactttgaattcttgccgggcgcggtggctcacgcctgtaatcccagcactttgggaggctgaggcgggtggatcacgaggtcaggagttcaaaaccagcctggccaagatggtgaaatcccgtctctactaaaaatacaaaaattagccgggcgtggtggcgggcgcctgtaatcccagctacttgggaggctgaggcagagaattgcttgaacccaggaggcggaggttgcagtgagccaagatcgcgccactgcactccagcctgggtgacagagcgagactccgtctcaaataaaaaacaacaaaaaacaaaaaaaacttaaaattctttgcttgttagtgaccttgatcatggttctctttgtacgatagttgggcatctgtatttccacttgtgtgaatttgcctttaaattttggttatgggtttcaccttttaaaataatcaaacatatttatcttttcctgtgtgataggtttttttctgtatcttttcctgttaaacacacagacccctccccaatctggacattgaataaatattcattttcctttgtaaaaaaaaaaaaaaaaaaa

SEQ ID NO: 206823 - DNA, 1000 bp, Homo Sapiens
gtgtactgagctgcagcctctgatactctgtcacgtttccaaaaatggtatccattaggatagaaagagaatggatctgcagaaatgtttacctttcaactgctcatgaattcaggacactggatagaaagactcactccccaaaatgagaacagggaagaggagacccggcgacactaagtcaccaggtccaaggaacgtggctccctccccagggtcatctcacctagatctttctctcccaggtcatctcagctcaatctcaataaccctatgaaagccctggtctgttgtgttccttcaccgtacagtttctgtaataaaaagtgttaatccatgttaatctgtgtgaaaattattgcgtgcaacagtattttctcgtgtacctctttttcctatgtgaattgtccctcttttttatttataaatgtctacttttgtttttttaaagacaaaccaatgtgttgtagacctatatgtaacctattccttagtctcatattataggtatgttataagaatggatattttacttggctttagaatgttttacaagaaaactaattcttaactgatcaagtccttgctactaaaatgcttgtgtttttcatcatgacgtcgtgtgcttctaaattaatcattttcgttgtagaaaaatggagtgaatttatattagtcttggaaactaataatagcattgtaaatttatgagatgattttaacagaaaaaatatagaagaatatagttattttaattgtaatattactaactgtagggtgagaaaaaggggggggggtcccattgtggtgaactatgttatagcttgttactcatagtttctttttgatcattttttcggtctccgaggtgaaatgacttattaattaaaatttgtaaactcacatatgcatattgtatatgtgtagaaatgtaatcacactttgtcttggaattacattaaactgtttgaaatcactgtaaaaaaaaaaaaaaaaaaaa

SEQ ID NO: 206824 - DNA, 1000 bp, Homo Sapiens
tttcaaaggaaagtaaaagctgagctttactgagtgagtgtttactgactaataaggcaagaaaaaacatgatgagtgtactttacatcttacttttgtgggctcttaatttttttttctagtttgttttcagtaaagacagtgggttttctttaaaataatttttttcttttaaatttgcacaaattatcttaggtcagtattttggttttaatcattaaaacatttttagagtaatgtaatttaacaaatattttaagtgattatgtttccagaaatggattctttggagagaactcggatgactatcagttttggccctgtaagatcgtggagatctgtaagatagatacttatataacttacataaaatatatataatatattacttatataacttatataactagctattattttatataactaactataatatgacaaatcctttgctagtagtactaacaacgttttataggagcacaattaattttacttaggataagtgttgttattattgtttttattgttgttctgttagttactcaaaacttcattctaattgtgccctgagtttgttaaaataccatactgtatttttgtgtaacatgtaaataggcattaatttttgagaaatagaaatgtttatccttaatgtatttttaatttgctaacattgattttttattttctttcctgaaatagcttatttcctaaaatgaaagaatttattctcagatgaataatttttatatcagctattcttatcaggtaaaagtttaattattttttatttataatatatgtaagcaattctcaatgctgctctttaagaaaaataaatatgattatattaataataagctttaagagttgaaaatttaagacaagtcattttgtatactgaagtgaattctttgttatttagtgctgataattgaataatgagtagctcatattaaaaatgatgcaaaaacctggtaaaaaaaaaaaaaaaaaa

SEQ ID NO: 206825 - DNA, 1000 bp, Homo Sapiens
tggccacacagttggctgtttgtactcattgctgccagctgtctcccagaacagtcatctgctctgtagggggagaaacagggacatgaaaagccctggaaggttgtcaggaagcaattttaaatttctaatatgtaaacatcggggctttggcatattttgaaccattttgatgataggaatggaggtggtaggagccaccctgattaagttcttgttgagaataaactggtgcaccagacatttacataggctgaatcaatgttgatggcagccgtgtttttaatccatgggcctaaaacagtgtccctcatacctgtctcttgctgaggcccctgtcgcaggtgagccatgtctgacttccgagccttccatcgactgctcagtccacgtcttcagccctatttcccaagcttacctagtgagtcctccttgactcaggctggttcctccattgtttctgccacctgcaggccattggtgctccttgaataccctgtggtgtcatcgctgactcatgcctccaaggctttcccgctctgacggctctgtgtttcctattgcttcatatagcttgcttctgaattagcatgcgatatgtgacactcatatgttatgtatcttggtttagtttttacagaaagatgaaagactcttaaaagggatcttggagttgttcttgtacatcttttatatctcctaagcctttgatgggcacttgttccaaatgggaaagaaaaaaaagatgaaaaaaaaaataagccacccagaatgcagatgggacaaactgttggtgttagagcatggtggtcacccaggcctagagtgtggggtacacaaggaccactgaactaaaactctctgatggtctggatcaggctattgagtagagcaacgggttgtagagtgcctggcacgcaggtggcaatgagattggggaagcaagggttgtgcgtttgttaattcagagattgtataaaaataaaaaaaaaaaaaaaaa

SEQ ID NO: 206826 - DNA, 1000 bp, Homo Sapiens
acctgagttgttttttggcatgatgatcagaatcttacattactcagaaaacatctgtcctgcaatagtcagtactattgtgttgtaagtctcctctacagagtaacttgcagcagttccttagcaataagtatgatagcaaataaatagcaaagaatgtttccattctaaatctaaaactaattagattcaatcatcattaggcaatgacttcattaggcaatgaagattaacaataggtaattgttaatcttcaaaatctatcaatttacacctatttaaaaattggcatttaatgactgccatttgatgggtttggttaatattctgttcttggccgggcgcaatggctcacgcctgtaatccaagaactttgggaggctcaggcgggtagatcaattgaggtcagaagttcaagaccagcctggccaacgtggcaaaacctcgtctttactaaaaatacaaaaattagccaggtgtggtggcacacacctgtagtcccagctactcaggaggctgaggcaggagaatcgcttgaacccaggaggcagaggttgcagtgagctgagattgcaccactgcagtccagcctgagcaacagagcgagagtcagtctcaaaagaaagaaaaatattatgttctaattaccttgaaagaggaaagaaaggcttgaattgatcaataccagtttgaataagatacttatgtgaacaagcattctcaacattattattaaagtaaaactactcagtttacagaatgggatctgaaactacagctttttgctattaaaccaaatacttgtgatctactttgtttgagcaaaacagcattatttgttatgttaatgatggttaatttccattttattggttttatgtttattttaatttgtaaatgttttagcatttattattgtatgtgaactatatttacctattttatgttgataaaaatataaaaaatattaaaataagtatatattaagtttaaaaaaaaa

SEQ ID NO: 206827 - DNA, 1000 bp, Homo Sapiens
attggatccatctcaattgtgcacttgaacagcagtgatgtaaatgtgcttatttgtgttttcatttttaactgtgcagccttaccacacctattttgaaagctgatcttttgtcctcttcagggcttttcccttgtgccatgttgtctccagcaatatatgtggcttctggctcagagcttctgctgaggcagggcctcgcgctgagtcacatggctccttggaacaagaaaactttctcagaagtccccacacgggtgggtgacagaaacagtttgtggcaacacaaatctctctccatggtggagaaacctttgcttatccactgtattctactcagtgtatagtgatgacagatgtactagaattaaaccagtcaagtgtactggcccggggtgagtgttaaatgtgtatctcgcctgtggaacctactcagcagcttggtttctggggttgggggcatatttatttcttaaagccaaacctctccttcattggtttagtgtacataagtctatttagatacacttatcccactttaatctccaccagcccctaaactctctcctgtaccctctgttgctgaagtggcctcttcacctgggccctggaaaagccgatggaaaaagtctgttcctgcagccaaggcctgggtcccaggtgactaggagtagccataggaaggtgaggaaggagaagtgggcatgtggtgtcatctgtagtccaaggtctctgcgtctcgtcagtgggtgcagtgccttccccctcaggtgtgagcgtgatggactctagactgccttccatgagtgttggtcatgctatgatgtcatcatttgccattaaaacccagtttgtatgatgccaagaggattaattgtgcaagtgactgattcatttaaattgtaatcacatcccttttctgcttcaccaacctgaactgtttttaaaaatatcattaaaagtctgttctctttccttttgaaaaaaaaaaaaaaaaaaa

SEQ ID NO: 206828 - DNA, 1000 bp, Homo Sapiens
gcctgaatcatacagtaaataaatgttagaggaaataagctatcttagttacagtgatattgttgtccataatttttttcctctagaataccagctcccatttctgcaatttcacttccatgagcttcctgaagatgaaaagagaggtttccccaccagttcagaaattctctgaagtctttcagggcactcatcaccagtgtggcagacaagccccttccactctcctgaccccagattgtctctggggttttgtgctttaggaagtattaggatggcagtgccgagctccatggcttcccacaaactgcgggtcacgctgcactttctgaaatgcacccctcaagatcttagagttttagagaggacccacagaaccaaagaaacacttaccctctatagttgcagaatcttgcttcctaaccatctgacaacattagtagatgtttgttttcatatccagttttctaatggtgtttaatttctaaatgaaaggcacacatgattggttcatttgcttttggaccctttatgtgacctccaggtcacccactggatatggctcctgaggctgccactaagacctccttaacctggtgggatcttcaccaagagatgggcagggttgggtggaaggtgctggccctccaaccccagtagggtgacagatactgccgctcttctcctgatcttccattcctaggcttctcttctctgaccctgtctactcccctgccccagccccagatgtctttttcttccaaggaaacaggttccctcctgaaaagatggagttcctgggctaatttgcctctgatacagtttggctaatgagtgactaattcagcattatttacttttcagcagagtgacaaagacctcgatgatgccttggataaactctctgacagtctaggacaaaggcagcctgacccagatgagaacaaaccaatggaagataaagtaaagataaaaaaaaaaaaaaaaaaaaaaaaaaaaa

SEQ ID NO: 206829 - DNA, 1000 bp, Homo Sapiens
ggaggataaaatttggagcaagattctcaaggaagcaacaagatcctaaggaaaggagaaagagaccacctactgcatttctgtcactcgctgaaaaggacactctgtcagaaaatcttctagcaaacttcaaagggcaaaatcaccccttgttactgataaagcccagagagcttcagcagctaacattccctggacagggcacagcaaggatttgaacctaggtcagtctggccagaacacccacaagctttcctcaactcagtgtgctatctccccacgactaggtcactactgctttataatcacctttgtagccaccagtggattttgctcatcagtatttttcaggcaattgatactttagatattcagctgcaagacgtatgcagttttcattgacatcttttggagaaactgacaaacctggacttgacttaatgcctttggaaccttccaagatgttatataactctagatagaaggctgggcctccatgatgtcaggaatgttgcattcttatttccccatagataaacccatttgtccacaaagtcaaggagtcaggcagaggcccttgccatggggctttttaggataaagcaacaagcctggactttgctctacaacagggttttgcatagggagtggtatgaccagatccctcaagaaagaaagcttagagaccaggccagagtccactgcagtagcccagtcaagagaggatggtgacttggacttgtagtagagccagttagaatgaaagaaattgacacattcagaaatggttttagagatagagtcaaactggacctgataaagaactagagaagcggagtgaggataaagagaagagccatgactgactcggaagattttgtcttgaaaaacttgagaactcaagacagagtgaaataaaatcacatgtggaaaaaaaaaaaaaaaaaaaaaaaaaaaaaaaaaaaaaaaaaaaaaaaaaaaaaaaaaaaaaaaaaaaaaa

SEQ ID NO: 206830 - DNA, 1000 bp, Homo Sapiens
catcaagtctaggcacattccagaggccacgaggggttttatgccctgaaacctggattccatccaagccacaaggggtttgttggggaaagaaagagagatcagactgttactgtgcctatgtggaaagaagaagacataagaaactccattttgttctgtactaagaaaaattcttctgccttgagatgctgttaatctgtaaccctagccccaaccctgtgctcacagaaacgtactgtgttgattcaaggtttaatggatttagggctgtgcaggatgtgctttgtttaaaatgtgtttgcaggcagtatgcttggtaaaagtcatcaccattctccagtctcaaataccaagggacacaatgcactgcagaaggccacagggacctctgccccagaaagcctgggtattgtccaaggtttctgcctgctgagacagcctgagatatggcctcatgggaagggaaagacctgactgtcccccagcccaacacccgtaaagagtctgtgctgaggaggattagtgaaagaggaagacctctttgcagttgagataagaggaaggcatctgtctcctgctcgtcctggcaatggaacgtctcgctgtaaaacctgattgtacattctatttactgagataggagaaaaccgccttatggctggaggtgagacatgctggcggcaatactgctctttactgcactgagatgtttgtgtaaagtcaaacataaacctggcctacatgcacattgaggcacagcacctttccttaaacttatttatgacacagagacctttgcttacgttttcctgctgaccctctccccaccattagcctgtagtcctgccacattcccctcactgagatagtagagagagtgatcaataaatactgagggaactcagagaccagtgccgatgcgggtcctccgtatgctgagcgccggtcctctgggcccagtgttctttctctataaaaaaaaaaaaaaaaaaaaaaa

SEQ ID NO: 206831 - DNA, 1000 bp, Homo Sapiens
tgcaaaataaagataagacttgctaccaacagtttctctgatggaatgggtactcattccatcatggctatggctacagcaggaatctagataaacattttctatttcacatgactgaatttgaaaaacaacagcatatacatacatcagagactttcagacaatagagcaactacccccgatttctaagaccttagagcaccttctgggccgaactctgattaaattactattaggatatttatttggcctgaacaacacaatgtagctgaaatcatattattcaatgattaagtcgaaaaatataaaaaatagattaggcctcccatcttactgaaagttactttatgattataaaacaaaatacgttacatgctttgtaaatcatcttggcacagctaatactcatggcctcacaaagtattaccacagtttatgacgacaccaattttaagtatgaaactgtggtaaacacttaggactgggtagcctcccctttaaatacaatgtcaattctgagttacctcccctttgatgactactgccaattcttaagatcattaagataaaaggagacttaaaaccaagtatttaaaaaaatgcttttgggactcttctttgtatctgttctctactactttataaaatgggtaaaatttactgttacagctctagaaatttaaataagcatacttaaaagcttcagtcactaaacctttttataattcattatcaaataccaaacatgtaaatatatctaaattatctatttccaagcaaaaaatgccctccctaatgaacgaaaaaattaataaaatttattcgagtaccttgcttttctcaaaacagtctagtttttcatttaacaaatcaaaacacatactcctatgcataatcaacacaaaaaaggcaataaaattctaaaataactctgtctcagcagtctttaattttcaaatggtcaaatagctatcctaatcaaaaaaaaaaaaaaaaaaaa

SEQ ID NO: 206832 - DNA, 1000 bp, Homo Sapiens
atgacagtttattgtagtgtcctgctagttgaaaggtgacccttaaaattttgatggattttaacaacagattttatggtaatagtttttctattatttgtcacatttgacacttttaaaatttgtttaggctcgaaaggacacagaagcgggagaaacgttttcatctgtccaagccaatttaagtaaagcagaaaaacataaatatcctcataaaggtaatactagcagaaaaaagtaagatggagcacttgtcttcatggaagtaaattcatgataatcttgtttaagtatcctattcagtaattatgtattgttaggtagacattatttcacaggactattagagcatattgaacttagaaactttgaaagctctttggatgctagctggtacagaatgcccatctgctctatgattactgtgagaattgtgttaaaactcctggcttcttgttaatttccaagtatagtgcaatatgtggatttcaatatataaagatgaagaacctagatgttttgagcttttcatgtcagaggtagtctcagagttgactcatagttggccaggtcatcttcagctctcttgcttattgcctgtaggttttattcttcagtggttctgatagcaaatcatctgctagtctagatgatcttagtcctataagtaaatgtatttatagatttactataaacagatggtcttgacactttaggactttgggccttcagggtatattctgtgctaagattactcagttgaaaaatgaaagaaaagttgatatagattatcattttccaaaaacaacaaccataatcttttctttctccctagtaaaaacagcacaagtttcagatgaaagaaagagctacagtcctaggaagcaaagtaaatatgaaagttcaaaagaatctcagcaacattccaagtcatcagctgacaaaataggagaagtctcttctcccaaggccagttctaagctggcaattataaaaaaaa

SEQ ID NO: 206833 - DNA, 1000 bp, Homo Sapiens
atcaacatatcagaagaattagtcaactaaagtttgaaaacctatgtagcagagatctggttcagaaactgcttctatactatacatttaaaaattaatcagcaattgatggtattatttttatattaagaaatgataggaacattgacactaatgtggaggaatttgccaaatattttatttcaaaatttagcctctgatatcataaccacaagatattttaaatcaacagtttctaagcatactaccacagtttttatgacctctccatcatcttgtggtttctagagattgacagatactatgtttgttttatagatatggtaattaatgaaacaactttaaattgtcttccattctttcttcctcagttcatttctttttgtcttcccactgatagtctttggcagctcttgaataaattctacctgttggcatcaaggggaagaaaattagcctggaaatttttatctttacataaagccaattatatagcagtttgattatgaattctaggtggaagaattagaatagtctttggaatgggttttgggtaacagccaaaatagggaaaagggtattgttaggaaagttgtcttgatattaagtatttactgtgagtccagtaagccaaaggaccaaacaaaataggttcagggtttcattttaatctcaaagattctgattcttacccatatgtcatcagttcagtttgggacatgtggtgcagcatgtgtgaagaaaatattcattaaaatgtaaaaataaacacttgaaattgtccacaacactgagcaaatattcgttataattaggatgcctacctttctgggatatttgtaaggtgctgtagtttttttaacatgctcctgaatctcctttattagttgttcttgatcatgtgacttgtaatcaggatttagaacgacaaaagcctttactacctaaaataaatatttgaaacaccaggaaaaaaaaaaaaaaaaaaaaaaaaaaaaaa

SEQ ID NO: 206834 - DNA, 1000 bp, Homo Sapiens
aaagagccagcctggtgatgtggacagagtgctaaagcctggcctcacagccaagtcatgcttggtggttgaaggcgctcctgggcacctgtgccacccgcaggccaaggcttccttcatcaggatgtatgccgtgccaggcaggggtgggggctgaatctcaccctgtctaggtggggctgcagatctagaggctgggggccacccggacctggggagcagagagctggtgggaacccccttgcctgcagctgggagcctccctgggcttcatgggcagagctagccacagaggagccataagcgcacaggcaccgtctcactattggcatctcggttgggtggaggcaagattatggggaatcgaatctgttcacccacggtgtgactgtcacagaggggaaagtcagtggcccccccagtcctgtgtgttccagcctcttactggttgtcatgcctgccccattttaatagggcatggatacagtgtagctgtttgtgtggtgtctgcatgtcatcgcttttatacataagaagacattgttatttcactcctgtggaacttggttgtcaagacttggagagagggagccactggcatctgtaggtggagccagggatgctgctaattaccctgcagcacacaaaaaagagatgcacaccggctgcaccatgtcagcagcctggcctggctggacgagcacacgctggtcacgacctcccatgatgcctctgtcaaggagtggacaatcacctactgaggagccccacccccgcctctggatggaccgaatcagggactagagtttaactgcagcggaacatgtcatttctctatttctgtgacgcgcccccatgcccccaccccaccacaagaggcaggagggcccagtcatgaccctcgtctctgcagggtgtctgtacacgttcttctgaaagctttagacagtaacagtttgcacatgaaaaataaagcgagcacctaaaaaaaaaaaaaaaa

SEQ ID NO: 206835 - DNA, 1000 bp, Homo Sapiens
aaatatggaaggtaccagagtaaccacagaagaatttgaggcccccatgcccagtgcagtctcaggagatgacagccaactcactgccagcagaagtgaagagaaagatgagtgtgccatgatttccacaagcataggggaagaattcgaattgcctatctccagtgcaacaaccatcaagtgtgctgaaagtcttcagccggttgctgcagcagtggaagaaagggctacaggtccagtcttgataagcaccgccgactttgaggggcctatgcccagtgcgcccccagaagctgaaagtcctcttgcctcaaccagcaaggaggagaaggatgaatgtgctctcatttccactagcatagcagaagaatgtgaggcttctgtttccggtgtagttgttgaaagtgaaaatgagcgagctggcacagtcatggaagaaaaagacgggagtggcatcatctctacgagctcggtggaagactgtgagggcccagtgtccagtgctgtccctcaagaggaaggcgacccctcagtcacaccagcggaagagatgggtgacaccgccatgatttccacaagcacctctgaagggtgtgaagcagtcatgattggtgctgtcctccaggatgaagatcggctcaccatcacaagagtagaagacttgagcgatgctgccatcatctccaccagcacagcagaatgtatgccaatttccgccagcattgacagacatgaagagaatcagctgactgcagacaacccagaagggaacggtgacctgtcagccacagaagtgagcaagcacaaggtccccatgcccagcctaattgctgagaataactgtcggtgtcctgggccagtcaggggaggcaaagaaccgggtcccgtgttggcagtgagcaccgaggaggggcacaacgggccatcagtccacaagccctctgcagggcaaggccatccaagtgctgtttgtgcgaaaaaaaaaaaaaaaaaaaaaaaa

SEQ ID NO: 206836 - DNA, 1000 bp, Homo Sapiens
tcctacatgactgttatctagacataaagcaaagtgcatttaattcaaaatttggttcacaatataagtattttgtaaaagccagctgaaccagcattttatcaggtggaaatctctgcaagccaaattgctgatactccttcatgcagatcaacttggtgtcccagtcagaatagaacagcataattacctggagttagggggagtatttctgcactattacttgtcagggagagaagaaacttagaattgtccctcaaaggagtgtcaagaagtatgaataaatgtcctttcaccagctcacaggccagaaatggaggacccaagtcaactaggtgaaactactagcagacccagctttcccataataacctaatctgcaaattgttctattaaagtctcattgttttcaggatgcaatgaaagtggatttcaaaaggctttggaaaaataagtggaacatgactgatcttgaaaaaaaaagcaaaagcttaaatatttgatacaagtttacttagctacaacatactttacattgttgcctttagttatctcacaggcactgacattttatatttagaaaatacttttaatctttctaatctttttttgtaaatattagtgtccattctgtatgactcgctaacctactttgcaaggctttgggcaacattttagctcattaacttcaagatgatgtgtcatctgtataggtcaaagaatgggacttctgaactgaggaatttgctgttgacagccaaagtatagtgtacaagattgatgtaacttgatatgtatttttgttgaagttttttgtaaaaaaaaattatttacaatgttatttgaatgatttttttaaatgctgtgaatctatatttgttgttttatatattaaaattcatttgccaaaaaaaaaaaaaaaaaaaaaaaaaaaaaaaaaaaaaaaaaaaaaaaaaaaaaaaaaaaaaaaaaaaaaaaaaaaaaaaaaaaaaaaaaaaaa

SEQ ID NO: 206837 - DNA, 1000 bp, Homo Sapiens
ccagatgagagaaaagggacagtcccctctgtatcctcgttgtctcttagtaacatcaaattgtagttaaaaaaattttaaactatgtacaagctacaaaatagcatctcttccatggtatgtttgagtgtgtaattttagtttcttttctggttgtatttgtggtagtcagatgtgttggattgattccaactggacagagtaaggaattccagcatcctcttcctgcttgctcgtgttaccccacagatcaaaccctcaattctagttggggatgctgtctagccccacaccatgactgaagccttaagcactgttgcgcctccatgtgctttggatcagcaaccccagtggtattctaccagagcattgtgggaaagcagatgtatagtcaggtcccaacagcaaattgttgggtgtgagagttctaaagtataggggtgagggaagagaaggatatgaactcctctgaccttaagccagcattcatttaacttttatgtctacttaacaagagaacctggagaaaactaccgtattcaagagattaatcaaaatcagtgttttagccaggcgatgacagagaagcaccattcctcaccctccattcttgtaatgtctgtaataaatttcagtgcgtcaggatggatgaacccaagatccagtgaatgattcagctgttccaagccttacattttccatcattcatcatccattctcattcagtgtaacctcttgcactattgtggttaattttatgtaaaaccagtttatgtttttttttttttaatatgtgcctatgtaataaagtctacacactggctatctctgtagaggtgaggttttgtttttagttgttctactgattatatccttttctgagctatgaaaatgaattattaataaaaaatttttgaacaaaataaaaaaaaaaaaaaaaaaaaaaaaaaaaaaaaaaaaaaaaaaaaaaaaaaaaaaaaaaaaaaaaaaaaaaaaaaaa

SEQ ID NO: 206838 - DNA, 1000 bp, Homo Sapiens
ggtcattcccacccccaccccccaccccaagtaaagctaagaggctgaggcatacctccttgcagcctagctcacttacttgcatgtgatgcacttccttcccatgcctgcctgtcccaaccccaccccaccttcttacacatagcctttcttgccctgtgaatacccatttctacacctctctatttgcactgatgctgactcaatcagtgtgtcacctcatccctccaaggctactgtactaccttccaaaatggctgccttcgttccactcttttttctcacaatttagtttccacagagaagccagaatgaacaaaagtgaaaatctgattttgttaccaacctgttcaaaatttttctgtctctccctattgcccttcaaggaaagcctatgctacatagcacaacattcaaacccttcatgttccaagtcaccccctttttttgccagcccttagccaactctacattccagctgtgcagaagctccagctgctttcctacacctcctgcaattctctatgtctaggactttgcttgtgcctttccttcaccccctgcaattctccatgtctaggaatttgcttgtgcctttccttccacctccaatgccctccctccaactggctaagtcccaatgtatgtatataagaatttagaggatacctcttctggatttatcccaggccccaacttcagcccccagccttccccatcaccttgaagctgagtctggctgaaattcctctattccctaccctttccagtcacaacacctaccacactgtttagcaagttcctccttctttttctgtctcagcagctagaccaggagctccctgcaggtcaagaccatgtgttctctgatgctttctcatggcaaggggagacatagggttgcagtagtgagtgggcatctgttctcagaaggcagtgcctggagcactataagtacttaataaactcttgtgaaattaaaaaaaaaaaaaaaaaaaca

SEQ ID NO: 206839 - DNA, 1000 bp, Homo Sapiens
agactgcaccccttcgaccaccctactgggcacctgcctccagcccctgagaactccatcttcccctagttctgcccaggagcccctgagaaccccatcttcccctggttctcttgcccactcccctgctggggctccttcctggcactgaggaggggcgctcccaatgctgtgaggcagcggggagggaccgtgcacccgtggctatcagagcccctccgctgtcccaccctgggcctgggacacgggcctggggcagtgtgtgtctgctggtcatgtgctggtgccagttggggaggaatcagctgtctcggtggattctgagactcactgtggggcgggaagaagggtcttcactctgccattcagggataaagtttaattttatttttctacacattttgccaggtcaggcattttgctagtaagcaggatgcccccaactctccctgccatggaggattcttttttttaagctttgggtgcttttttaatacttttttttttaatgtggggaaggagcttgctctgacgtcaccctcctctcccctgactcctgtcctgagagctgtggatgccgcctcctgccctgcctacccctgaaacgtggggaatgggggccccaggacagcatcaggacttttgagtccagctgccagcaatggttccaactcggaggcagcgcctcttggtccccatttctgtatagcaggcgtgtgtgtgtgtgtcgaggttttttattttttgcttaatcaaactccattcccaaatgcactccatctctggctctgagggcgctccctcctctcagccgggcagcctggcctctcctgcccagacctgcggtcccagcatcccccagagccagggaacaggcccagcgggagggggttttatgttttgtttcaaacagaaaacacaaccttatttttctttacaaaagcaaaaaaggaaaccaaaaaagatacagcctttgaataaaaaaaaaaaaaaaaaaaca

SEQ ID NO: 206840 - DNA, 1000 bp, Homo Sapiens
acaatcatgattttctacttgaataattacaattcagaaggtatctggataaatagatacatgtctagtgaacaatttgtaacaataacaggtaaggatcaggaaattcagtattcagtttgtcagatttgccagaatgatgaaagtatttgaacatgtgtgtttgtttcttatataattgtattgagtggattgtttgactgggaaatctgggctagaataggaaacagaagatactgacttctaccctaatagatgggccccaatttagcaaagataaactgactttatttttagtcctttttatattaacttaataaattctggagttaggctctcaagaggacagagggactgtctggcaatggccagccagacctttactgccaaagaacccatttcatattgcgttccactgattgagattgattcagatttttgcactgtagatgagcgtatgtctcagtgctgccccaagccccagggatttctcattatgttcaaatgtcctagtgatttaccttaatcattgcaaacaattatgcttatgaagtttacttacaaacaagcaactgagtcactttattttctttagtgtagtatgtgaaggcactggttcaacaggatggctccagaactgtgtttttctaatgtttggtaaggggctagtgagaattttaatgatatggtgaagaaaaatatatctgtataattaatttattatattggtgtatgggctgtgagttcaccttttagtggtcatttgtcatttcataacaactatgcattttggttcactgtgatgatgatctatatttagtgactgcaacatgtttataccactgattcaaattccatccatgatgaagttatacaaataatgcatatattgataacttttattgcaaaaatgtaaatttaaaacttgtataatgttcttgtgctttttaaaataaaatatatgtgtatatttaaaaagaaaaaaaaaaaaaaaaaaaca

SEQ ID NO: 206841 - DNA, 1000 bp, Homo Sapiens
ccagggtatttggatgacgttctttaaacctaaccacttgctctgtgctgtctaaatcccatcagccgtacatgattcctttgcttccctctatttcccagcttttgttgtcagagggtagatgaaaagttggggcgaagggatttaacaaaagttactgcatccgtaaagatttgtgggaagatttaggtctgaaaccataccattagaaggtgtttagagatgatctagataaggaaatacaggaccatttggtcattctttcattcaccagacagctatttagcacattctgctagtggctccgcaggatatatctgatttaaaaaataggaaccacaataataatagctgcttatgcttatggagcattgccatgtgctagataggcaccatcctcagcccttggcaggtctgagctcctttatttcttccaatcaacactatgaggcaggttctgtaaccccccttagggttaggccactcgggaaactgaagcacagagagtttaagtaacttcctggaggtccgacgcgtaacatgtggaggtgctgggattcaaaaccaggcaatgtgggtcccgggcactcttgaccagtgcctgtacttcttccaaggaatagagcaagggaggtcataccgaatatcacagtgtcacctaggaagcccaagggaggtattcccgttaatctgcagccaaggccgggcgcggtagctcatgcctgtaatcccagcactttgggaggccaaggcggatggatcatgaggtcaggagttcaagaccagcctggccgagatggtgaaaccccgtttctactaaaaatacaaaaattagccgggcgtggtggcggacgcctgtaatcccagctactcgggaggctgaggcagagaactgcttgaacctgggaggcagaggttgctgtgagctgtgatcatgccactgcactccagcctgggtgacagaacgagactccatctcaaaaaaaaaaaaaaaaaaaca

SEQ ID NO: 206842 - DNA, 1000 bp, Homo Sapiens
ctccatgcctccccaacccttcccctggctttagtttctttgtagcactggtccccgcatgacctgtcgttgctttactttctcgcatcacttctccctgcctccagcacatgcactaaaatttaaactccatgcctggacaaaatcaatgtttgttaaataaagtctgccagttctgtttgcgatttttcagaaacaaggaaagaaatcctatataaagttgatctgtgctttggcaatattcatttagggtaattgcccttttttcaaatggctgtgcattttttatgatgatgaatataaagtatttagcagaaatattttttattaaagttgttgagcttatggaatgaatgtagcagcctatgtgaaagaaacactgtgctagagagttgtctttctgccacgtgtaatcattacatttaactcaagttctccatgggagatccatgcagagatatgaaaataggacggacgtctcttccttcttaaaagttgctccagattttggcttcaagtgcttcctgttttttgccctcccttatccctggagttccctctatttactttcacaaggactcttggtataaaagatatttgtatacctgggtgtgtgggaaggaattgaaggcaaaggtagcagtcatttcaagctgaacatgttaagtggtaatcgagcacttggtttttgtagtacctcctgtggccatctccacagtgtcatatttgaaagaaatcttgtgtaagcattggtctaagggtcactgactgtgaataatgaatgcggtgacagcatggccatcttagagacaggcaggccagatattggttactttgattttagttgacaaagtttatttgcttttaagttttaaagcaatacagcagtgtgaacttcaagttgtaaactttcatttagaaagtttaaaatttagttgaaatataaaatattctgaatttgaataaaaagttttaaaacttaaaaaaaaaaaaaaaaaca

SEQ ID NO: 206843 - DNA, 1000 bp, Homo Sapiens
tcaggacaggactgtttgggaggttcttcttttcttactgtcactccaaaaataaaccttggatttgtgtgctggggagaaatgagtatagataacatttaaaacgttttcctaaaccttagtattcatatggtagctgatggttcctctccccttcattactgttgcctgacgacggtccttgctgatgctgtgaactaacaaagttgtctttttgtttttaagggaacccaccctggcgtctggacagcaggttaggtttgggtggttttgagctagcactgctgtggggcaggggtggccgctccctggtgaagctaatgctgtggaagctggaatgttccttcctaaggagtgggatcatgcccctaccccagcagaggtatctcatcactcgctcatgtgcgagattctaaataaattttgttcttgggcatcttctactaggcctcctataaaatagatcttgctgtttttggtttgtgttaatggaacctcactttctagagataattctttagttttttatttaggaagttttcaaaatatacaaagcaggaatgtaaggaacccgcatcacctcaaattcagtgttacccacacttgaccatgcttgccccagctgtgccttttttctttccttgggtattttgttgctaaagtattttattattactgttttagagacagggcctcactcctgtcacccaggctggagtatggtggcacagtcacatctcactgcagcctcaacctcctgggctcaagccatccccccaccccagcctcctgagtagctgggactacaggcacacatcactgcgcccagctaatttttaaaaaatttttgtggagacaggttctcttcatgttgcccaggatggtcttgaattcctgggctcaagcagtcctcctgtctcagcctcccaaagtgccagaattgcaggcatgagcctgggtgctagagcgaggccctgtctcaaaaaaaaaaaaaaaaaaa

SEQ ID NO: 206844 - DNA, 1000 bp, Homo Sapiens
gggaggcccaggcaggtggatcatgaggtcgggagatcaagaccatcctggctaacacgttgaaaccctgtctctactaaaaataaattagctgggcgtggtggtgggcgcctgtagtcccagctactccagaggctgaggcgggagaatggtgtaacccaggaggcagaggttgcagtgagccgagatcgtgccactgcactccagcctgggcaacagagcaagactctgtcacaaaaaaaaaaaagaaaaaatacggccatgtgcagtgcctcatgcctattatcccagcaatttcggaggctgaggcaggtgtgttgcctgagctcaggagttcaagaccagcctcgccaatgtggtgaaaccctgtctctactaaaaatagaaaaattagccagtcatggtggtgcacacctggaggctgaggtaggggaatcacttgaacttgggaggtggagattgcagtgagccaagattgcgctgctgcactccagcctgggtgacagagtgatgagactcctcaaaagaaaaaaaattacgtttctgagtcctgaaaaattattaataaatatttgttatatagtttctttgaacatgtggtcactctgcctgcaaacgtaaagacttttaattttcatagagtgaaatatacacatattcctctgaagataaaccttaggtgtaagaaaattatgaagtgagtgtttggtaaatatgcatttgtacatattttcagaagaaaacacaattattggaacaaaataagtttttaggtgattaatggaaaactaaacaccttgaatatgctgaaagcaaatgtatactttctgctttgtatggaatttattaatataaaattttatggcttatggctcggattctccccagaatccgtgtattaaagcacaggcaactttgtctccagaaataacactcttgagtacaacaataaaagccctcttcaaacacactcaaaaaaaaaataaaaaaaaaacctaaa

SEQ ID NO: 206845 - DNA, 996 bp, Homo Sapiens
gagccatggacaactgtttggcggccgcagcgctgaatggggtggaccgacgttccctgcagcgttcagcaaagctggctctagaagtgctggagagggccaagaggagggcggtggactggcatgccctggagcgtcccaaaggctgcatgggggtccttgcccgggaggcgccccacctagagaaacagccggcagccggcccgcagcgcgttctcccgggagagaaatattattcatctgtgccagaggaaggaggggcaacccatgtctatcgttatcacagaggcgagtcgaagctgcacatgtgcttggacatagggaatggtcagagaaaagacagaaaaaagacatcccttggtcctggaggcagctatcaaatatcagagcatgctccagaggcatcccagcctgctgagaacatctctaaggacctctacatagaagtatatccagggacctattctgtcactgtgggcccaaatgacttaaccaagaagactcatgtggtagcagtcgattctggacaaagcgtggacctggtcttccctgtgtgatgttgaccatcactgccatcacatcacctttttttaagtagtaagaataaagccactgtatgattctcttaatagctatacattaatcctgggcaacagagcaagactccatctcaaaaaataaaaataaataaaaaataaaaaaataaaagagcaaactatttccaaataccatagaataacttacataaaagtaatataactgtattgtaagtagaagctagcactggttttattaatttagtgactattcattttatctaaatcagtgaagatttactgtcattgtttattagtctgtatatattaaaatatgatatcattaatgtacttacaaaatagtatgtcactgtttttatgttcattcttaaaaacataacctgtattaataaatgtgaacatttgcttggtaaaaaaaaaaaaaaaaaaaaaaaaaaaa

SEQ ID NO: 206846 - DNA, 1000 bp, Homo Sapiens
cttatttcatatttgcagtgttgtagggtaatgcagttgcttttaacaagccataagtgaacttctgagaatttcattcaaagtaaacagttaggagaatataagatcctttgaagtgattctaccagttttctaatttttttctttaagaatttcttaagcattgtgaaatatatttatgtatttaaacttttagaaatttatgctgttaaggaaaaaattattcatgacaattgttaaagatggtaaggaagacacttgttacagataggtacagggagcactgcaatggagtcttgcagttggggagagagattgggctctactctatatactacaagtaaaagcgggaatttatagacaaggatgtgggtgtggttggtggatggaaaattactagggggcaacattaggaataagagaggattctggccaaactgacctaacaggattcttgttgaaggcaggccagggtgatcagacatcacctggaggatggtgaaggatgaggaacctaatcagatatgaggatgatcagataaggagaatggctgacttgacttagtaggactcttgctaaaattggacaacgtagagacaaacaaggaagtccaaaagttgaggaatagttgaaaaagaacatggaatagctcgagtggagtttgatcaatgagagaatctttgtcaatattttctgacacctgtatctgaaaatatcaaatagttacttatattaggcccatttagaaaatcaaaactgttgtattacattagaattagtattagtggcaggggcacagtggctcatacctgtaatatcagcactttgagaggctgaggcaggaggatcgcttgagcccaggaggtcaaggttgcagtgggtcatgatcaggccactacactccagcctgggtgacagagtgagaccccagctcaaaaaaaaaaattagtactagtattgaattagaaaatttaatataagaaaaaaaaaaaaaaaaaa

SEQ ID NO: 206847 - DNA, 1000 bp, Homo Sapiens
tatgtgccaggttgaagagagtgtgccagtgacaggaagtagtctaaaaaattaacagttatggttttaataggatctgaaagacaatctttaaagaaatgggagaaattgggggtatcagtgaacctataccaacctctctttgtacataaatatggtgatgtagctagatataaaaatcagtgtcttactggcaccatttacagtttagaaaacaatctttttcttaaaaatgcccatctgatttctatttttaggagctacttggatttgtatgtattttttctacgtgaaaatatatgtactcttcacttttgttccagtactataattgctcatgcactctttctcccctttgagaacattcagtgaaatacaacttcatcaaagatttgctcaaaggagaagaatcgcatgagtgtgaaaagtagatgctcgtagccagaacagaaaaggttacacatgatcatggcacagaagataggaggtttgacttggtgggccataatgtttattatcctttttgaaataacagggaccagcagcagttttctcaggataaatgctctaccccacttctctatgaacaggtgtggggaggcttactttccattttcatatttatacacctctctacaaaagcaatttttaatgaaggttagtggaattgttaaaaatctgagaggaatgatgactggaggtgtttggggtttttttctgtattcattttttaatgagaaaagttttaaatgtagtacaggttagacccaactactaccttactattataggacgattctatgtttctgttaaagtattcaagtagctttctctgggggaaaaagtaccacttggacacttaaaggaattgggatttttgtctactttggataaggcagttgacttcttaagtaaaagcaatagtgtaaaatgtcattttgtttggaatgttaagtgagcaaataaaaaacatgttgaaattgtaaaagaaaaaaaaaaa

SEQ ID NO: 206848 - DNA, 1000 bp, Homo Sapiens
cacagtgccttacacagaaactttaataatagataaaaatatttgtatcaccttctgggtgccaagtttgatgctaggaaataatccaatgggctataaaagtatgatttggtaatttgtttggagcatgggtaaatgaaaacagtaagaatacataataggcttatataaaagttttgaagagagagcggttatgctgttggggtgtggctttgaagggcttaaaaataatcaggggtgttgagttttgatcccaaggtttaagaatgactttaataagcatgcaagttaggatatagtttggtcctaagtgcaaaaaaaatctaccctgaatccaccctaagcagaaaataaatttgttgtgaacaaacaatagatacatggagcagtttacaggatctgagaaacacctgaaaaatgggatcagaaaggtggacgctgggcagctctggggctgctggtggagggagctgaagccacatctctgtagagcgtcccccggaggatgagccaactccaacccttttctgtctttttctgcttgagattcaaattccatggacaaacgttcaaatgtcccagtttgagtaaaatgtctaaaccagcctatggagataagttattttcatttgacaaaactgggttgcttctatcagaaatggggaaaatagatgttggatagcaaaagtccaccatgtccaggccaggcgctgtggctcgctcttgtaatcctatcactttgggaggccgaggcaggcggatcgcctgaggtcaggagttcgacaccagcctgaccaatatggtgaaaccccgtctctattcagaatacaaaaattggccgggtgtgctggcgtgcacctgtagtcccagccactcaggaggctgaggcaggagaatcgcttgaacccgggaggcagaggttgcattgagccaagatcatgccactgcactccagcctgggctacagagcgagtctccatctcaaaaaaaaaaaaaaaaa

SEQ ID NO: 206849 - DNA, 1000 bp, Homo Sapiens
aataatttttcaaaatcatttttgattctgtacactagcaatgaataattggggtttgaaaaaatttgtaaacatttataataatacatttaagcatttataatacaagaaagtgagacactgaagtgtacctctaacaaaatacacccaagatctgtgtgctggaaaccaacaacattgaggaaagaaactgtaaaaggcgtaaacagatgttcctggattgagagacgtaaacagatgttcatggattgagacacgtaaacagatgttcctggaatgggaggcataaacagatgttcctggatcaagaggcataaacagatgttcctggattgagagacgtaaacagatgttcatggattgagaggcataaacagatgttcatggattgagaggcgtaaactgatgttcctggattgagaggcgtaaacccatattcctggattgagaggcataagcagatgttcatggtttgagagacgtaaactgatgttcctggattgagagacataaacagatgttcctggattcggaggcataaacagatgttcatggattgagaggcataaacccatattcctggattgagaggcgtaagcagatgttcatggtttgagagacgtaaacagatattcctggattgggaggcgtaaacagatgatcctggaatgagaggcgtaaacagatgttcctgggttgggaggcgtaaacagatgttcctggattgagcctcaattagatgttcatggattgagagcctcagtgttgcttcacattgacaagctcactctagaatttatatggcaaggcaagggaactcgaattgccaaaataatttagaaaataacagagttgggccgggcgcggtggctcacgcctgtaatcccagcacattgggaggccgagacgggcggatcacgaggtcaggagatcgagaccatcctggctaacacggtgaacaccatctctactaaaaatacaaaaaaaaaaaaaaaaaaaa

SEQ ID NO: 206850 - DNA, 1000 bp, Homo Sapiens
cagcaccatcagcattcacagagagcctgttagaaatgtaaatccttaagctccatcccaggcctactgaatcagaaactctgggcatcggacccaacaatctatgcttttacactccctccaggcaattctgatgggtatcaaagtttaagaatcactggtctctactttttttcatgtattttgtacaaaacagtttatattatcttcttattcattacattaattttgtacatatattttctttcaataattaacttttaaattccttatggacaataatcctatctttgtttgtaccagctctatgagttataactgaaatataataaactgcacattacagtatataattggatccattttgacgtacatatacatccatgaaaccaataccttaatcaacgtaataaacggggatctcaccccaaaagttttcttttgctaccttataatccttttctctgacccctttgctgacctacttcccccatctcaaggctaatcacttatctgctttttgcctctatggataagtctgcattttgtagactttcatgtaagtggaatcctacagtatatattcttttttatctggtttgtctcaatcagtataattattttaacatatatccatgttgttgaatcagtagctagttcctttttattactgaggtaccatcaaattgtataagctacgatgtgtttattaagttactgtcagtggatttttgtgttattttagcctgggctttttggggggtcacgaggtcatgagctcgagaccagcctggccaacatggtgaaaccccatctctactaaaaatacaaaaattagttgggcatggtggcacgcacctgtaatcccagctactcaggaggctgaggtaggagaatcacttgaacccaagagacggaggttgcagtgagccaagatcacgccaccgtactccagccagggcaacagagcaagattctgtctagaaaaaaaaaaaaaaaa

SEQ ID NO: 206851 - DNA, 1000 bp, Homo Sapiens
ccaaacactttaaattattgctgttgcggtttatgcttaattgtaacattctcgaataaaaaccaaagcaaaactccaaaaagaatactgtgattatagttcaccttattcctttttctattctttttttccttcacttgtttttcacttttctcttcaaaaatggccattatcccttgcttcttttcccttctttcctggtggctgtatttatttttgttcgaattattttccatgagcacttttgaaaatcagtctattaagggattttagagttcgtaaatctttttagagtgcctggggatagggccctaagactaaggtacttattaaaaaagagtgccaagaggtcttatatactttgatttttaaatttgaaaataaaaagttttggtttttcattcatcacttggactacatgtttcagttctgaactatttcccttgggctttgctaaaattaataacaagcttttcaaaactgttatttaacagttaactcctctagcccataaaattttctcaagaatagaaataacaaaaatttaacttcaataagaaagcaattactggtcatccaccaaaaattaaatgcataaggtgaaaaatttattttatacacctcaattatgttaaatgttataacacatatcggaactataaaagcaccattgctttattgctattagtagttgttgtacctatacctatcagttctgaaggatttttttgttttatttttggtgaaattttatcattctctgactggtccagaaaatttgggttattttctagtcaaacaaatatagagcttctataaatgtgaacaaaaagtttatttactagtataaaaattttaagtaacaggccaggcgcagtggctcacgcccataatcccagcaccttgggaggccgaggtgggtggatcacgaggtcaggagatcgagaccaccctggctaacacagtgaaaccctgtctctactaaaaaaaaaaaaaaaaa

SEQ ID NO: 206852 - DNA, 1000 bp, Homo Sapiens
tcagacacagcgggatccaggtttgcaaacagtgccatgaggactcactccctgccgtttggttctgctttttgctgtgttcattcattcccaggcaggctttctctgcccaatgctctgagctgcctatgcaatggaggagtgtctctttctcagcaattccagggaaagttaaaatttgaaactcattggcccagtgtgggttacgtgtccgtcttgaaattatcactgtgccccagagtgtgggaggccctgattggccaggcctgggcatgtgcctgccccttgagccagaatcaaagtcatatggactgagaatggggagggccctagagaaggaaaaccaggcactgttcccagcaggttaggagtgcctgctgggcaggtaaaacaacagcatcctctcaacttctctggggcgcttgagactgaccggtgcccctccctgttggacacctcctcctgtgacctttggaccctgcgttttcagggcttcccggcctctctgactgaagaggccttctctgcatctttacccaggccatcttcttaccctgcttctggctgaggctctctccaaaagccccgtactgaggctctctccaaaggccccgtactgaatcactcacctcattcctgctaagtgtgtgttgtgaccagtgctccgattatgggcacaggctctgtgtactctcgtcgggatggtatcattgttgccattttacagatgaggaaaccgaggctctcagtggtggaaggagcagctagtgaagcagatgcacaccagggtccttgccttcagctgccgtagccctccacttccctgatctcgctgtgtctgtcaccagggccctccagctctgaaactatgtccctttccttgtggtatctgcacccagccagccgccacctttcctcccacaaccgtgaacctctcagcctgtgtggacaggcgtagctttggctatacatgacaaaaaaaaaaaaaaaaaaaaaaaaa

SEQ ID NO: 206853 - DNA, 1000 bp, Homo Sapiens
atttcttggaatgtaaactggaactatttctggaggaatagagtagcacaaacaattcagttgtctctacaaaagatgctatatacatttccccctagcttttctattatgacatgtaccaaattgtcacaccattcaagcacctgtaggaaataagagtttaaagaaacaaatgttacagatgagttctagagtgctctaagaagctgatttaaagaaaagattaagcctccacctagagttttatttttattttttgggatggagtcttgctctgtcacccagactggagtgcagtggcactgcaacctccacctccatgggttcaagcgattctcatgcctcagcctcgagtagctgggcctacaagcacatgccaccacgcctggctaatttttctattatttttaatagagctggggtttcaccatgttggccagactggactcgagttcctgacctcaggtaatccacctgcctcagcctaccaaaatgtgggtattaaaagtgtgagccaccacgcccagccccagaaataagagtttagaacgtctgatagaaataaattcatgtagaaataaattttgcaagagattgcttaactttttttttttttttttaaattaataaaaaaacaaagatgctcccataatactctcagatagtgaagaagaagaaatgatcattttggaaccagacaagaatccaaagaaaataagaacacagaccaccagtgcaaaacaagaaaaagcaccaagtaaaaagccagtgaaaagaagaaaaaagaagagagctgccaattaaagctaacagttgtatatctgtatatataactattaaaagggatatttattccattctgagaacactgggtattttttattcacaaatccattataaaatctagcaggattttaaaaatagttttttgtttttaatgtgctttaaaataataaaccttctggagcaaaaaaaaaaaaaaaaaaaaaaaaaaaaaaaa

SEQ ID NO: 206854 - DNA, 1000 bp, Homo Sapiens
gccacctggaaggctgggagaggccagcaaagtgagcactgagccccttctctccccaggcagagttgcagcagaaggtggaagagaatgagcacctgaggctggagctgcagatggtagagaccgagagggtgcggctgtccctgctggaggagaagctggtggacgtgctgcagctcctgcagaggctccaggacctggtaggctcacaggagagctgccacactcagggaagggaaaggagctcttgggagggagccccacttgtgtcaggcaccaggctctaggctctccttacagtaggcagctgttatcccattttacagatgcagaaatggaggctcagaagaaccaaccaaaaatagggttggggggctccccaggtcattttaagaagctaataaaactcttgtatgtatccttttctggttctgttctcaaaaccagaaaaggataaatggaagaaagacaagaaaggaaaattataaactaatgtgacatttaaacatggatgcaaaattattaaatacaatactagcaaaccaaatctggcagtgtttaaagaaatgcaacatgaccaagttggacttatcctacaaattcaaggatgattccacatcaaaaaatctattaccaaaatacaccacattgcagattaaaggagaaagaccaaatgatcatctcaattgatgcagaaaaggaagtcaataaaattcaatctcctttgattataaaacccctcagcaaattaagaatagtagggatcttccttcaccagataagggctctcagccaaatacttcatgcagatctcacactgactggtgacgtgttcagaggaatccccctaaaatcagatgtggctgggcctggtggtgcatgcctgtaatcccagcactttgggaggcctaggtgggtggatcgcttgagctcaggagttcgagaccagcctggccaatatggtgaaacccccacctctacaaaaaaaaaaaaaaaaaaa

SEQ ID NO: 206855 - DNA, 1000 bp, Homo Sapiens
gtcattggggtgactcgtggaacccctgcctgtgtgagtaagcccgctgccttgccaactgcctgctgtgtgagtctcaaagacatcagatgtcatcaagccacaaggacttcttggtcattcttaaggccatggcaggagcacagttcaaaatccaattcacaaggcaacgtctggaagaaagaatcaagtatgtgtgtagtgcatgatgtacctcagctactgtagtgaaaaattgttgggatgagtctttcaccatgttagtgtttttttttgttttgttttgttttttgagacagagtcttcctctgtcacccaggctggtgtgcagtgctaaatatcctgcagtgcataggagaggcccacagcagatgtgtccagctcaaaatgccagtagtgccagggctgagaaacctacctgaagcctcacagtggcatggtccgtttcagaagtatgtgggagagaaaattgaaggtgagaggtctgtagctctcctgaagtcaggccacataagtactttgccaggtaggtagtgcctagtgacagggatgtactagaaagaattcctcttgagcttggccttgggtctcgtgcagacatgttcatgtgacattaggggaggctgtgggcctcaggcagctaaggagtaactggcaagttttgtatggagagtcgggaagacagaagcaggggcagccgggagtggtggcttacctagtaatcccagtactttgtgaggccaaggcgggtggatcacttgagatcaggcgtttgagaccatcctagcctggccaatatgatgaaagcccatctctactaacaatacaaaaaaattagctgggtgtggtggcgcatgcctgtcatcccagccacttgcgaggctgaggcaggagagtcgcttgaacccaggaagtggaggttgcagtgagcccaaatcatgccactgcactccagcctgggcgacagagcaagactgtctcaaaaaaaaaaaaaaaaaaa

SEQ ID NO: 206856 - DNA, 1000 bp, Homo Sapiens
tctcattaaatatacatatatgaagtgtttttattctacttgaaatatcttgacttaaaaaaaacgactgttagtattgatgaagcaaatgaggcagtgactacattatggaaatgtctaagtattttttccggaacttcaactttttctttttgttttacataaacatttaagcagctaggaacttttagttttaattaggtcagttgaagttctctggtgaactaaaaaatctacattttggttggggataaagatttgattttaaaaacagcttgaatttaaagcaagaaaaagatgaacgttatagttttaaaatcaatattagcagagccatagataggctgagctcttatttggggttctgagaaataactcagtttaaaacttctttaactgcctcccttagtacccaggctagcccatggtgacatcagggatattcattactgattggcctctagtattccaagggtactactatagatattacaatgatgctgtttactaagtgataaccccgtatcttacaggactgactttgactcaataaaccactcagcctattattggaaagtgccataggccttgagaaagtatagttacatcctcacaaatatatgaagttaagtcactacttacaaggaaaaaaaatgtaaatacatttttctttctggaaccgaactcttattatggggaaataatagaaataaagaaaatgtaaaagcatgaaatggaatgtagtcttgatcaaacatttcagcagacctcaatttgcttacaatctgtactcaaaaagtttataattcaatcagaattcaaaaagtattttgtgtgtttgtgatgtattagcatatacacaaaacaaatgaggggaatgtatataatcttggtgaaaagttgtatgggagttttttgtacgattcctgcaacttttctataaacgtggcattatatctaaataaaaaattaccaaaaaacaaaaaaaaaaaaaaaaaaa

SEQ ID NO: 206857 - DNA, 1000 bp, Homo Sapiens
tgtccctcagagcagctgggacgtggtctcttaaaaggcctcaggcttggcctggggacctagctaactcacagctgctgatgagctctgtggagctcctgctgcccaggaagctggtgaggattccaacctcgctgctaaatggtggatggtggcgtccctgaggtagtgtagggtggaagctatggtgcagcttgggaagcaatgcagaatttctggtatttgtgagtccttcacacagcaggctccctaagtacacaccagcctctctaagtaggaggccccagtgggagagatgggctttgactctggggtcaaatgtagataattggactatggacagtggctggctggtcaccaacaatggtgtttgaaacaaacatttagaggccatatttgggcttataaaaatagttctgggccgtgcatggtggctcacacctgcaatcccagcactttgggaggctgaggacagcggatttcttgagctcaggagttgggagaccagcctgggcaacatggtgatacctgtctgtctctttaaaataaaaaaatcaatgagttatgtgatgggctcatggctacaggtggagaaaggcagtgcatatgcagcctcctccatccttgactaaggctgacagagggctgggcccaccactgctcaccctgaggcctcgtcttctgactcccctcctttcatttctaggtggcattggtgaggctgtgtccagtgcagtagtgggcgagcctggcatcactgtcacccacctggcagttaaccgggtaccaagaagtgggaagccggctgagctgctgaagatgtttggtatcgacagggatgccattgcacaagctgtgaggggcctcatcgccaaggcctagggcgggtatgaagtgtggggcgggggtctatacattcctgagattctgggaaaggtgctcaaagatgtactgagaggaggggtaaatatatgttttgagaaaaaaaaaaaaaaaaaaa

SEQ ID NO: 206858 - DNA, 1000 bp, Homo Sapiens
cttgaacatacttccacgacctctctccttcaaggcaaccccaggggttcaattcaaacattaagctattacgggggcccttggatgctgaatgtgattgtcccagggttcagcctgcacctgggcactgccagcccgttcactgcagccccacggatagttgtacacaacaagccagttttttaagcctttcctgtttcttgtctcaacaggtgggcagctcatgttctcatttttaagacaaagcaaagctccaagcctgcagcctcatggggtggaccccaccttgtatgtcatttggttatcttccctgtctttactgattgttcattataaagtgggagaaataatgacagtccctacctcataagatcataggagagtggagagaattaaaaagaattacctgcagactagaaaaataaattaaggccgggtgtggtggctcacacctgtaatccccacactttgggaggccgaggcgggcagatcatgaggtcaggagatggagaccatcctggctaacacagtgaaaccccttctctactaaaaatacaaaacattagccgggagtggtggcaggcgcctgtagtcccagctactcaggaggctgaggcaggagaacggcgtgaacctgggaggtggagtttgcagtgagctgagatcacgccactgcactccagcctgggcaacacagcgagactccatctcaaaaaaaaaaaaagaaagaaagaaaagaaaaataaattaaaaagataaaaagagttgccaccctgctgctcatgtagggagtgcagatgtcaacaactacctgcccaaccattcaggcagccatccccccttccgtgtggcaagctccaggccctcatctttgccatctttgtatatcttcaatagtttgcttcctccccagctccaaacacagttcaggttatcaaaacctcagggaaatatttgttgaatgactgaaaaatgtagtcaattactcaattcattgatc

SEQ ID NO: 206859 - DNA, 1000 bp, Homo Sapiens
ataacatgagctctggcacttgtcagcctcagacaggtcatgactcagtaaaggatggaacacttccttgctgacacagacttggagattgagaaagcaacacaggccacccaatgggagaaagaggacatggtacagtgaaaggccagtgtgctggacatggggagggccatgctatgcactctggtgtctggattaaccactgggaccagccctgacttcctgcatggctgaagaggaggctgatgatgcattgggagttggcatcctggctctcagtgctggaaccctggaccacctgggtgagactaccagactgagagccctccctgcccttactctgtcgcccaggctggagtgcagtggcgcaatcccaactcactgcaacctccacctcctcgattcaagcgattctccagcctcagcctcctgagtagctggaattacagatgcccaacactacacccggctaatttttgtatttttagtagagacagggttccaccataacagccaggctggtctcaaactcctgacctcaggtgatccacccgcctcggcctcccaaagtgctggggttacaggcgtgagtcaccgtgcccagcctggaacatttgttgtttcaataaacagctgtgcatttttgccccctaaaagcaccattggacaaccacaatcccaggcctgatgctggcagtcataggggatcagatgtcctcccgtattctctatccacaaaacaggaagcttagctgatgactcctggaggcacactcaaccctaaactatgatataatcctgcaggaaaataaatggtatcccaagatgttcagtatgaaaatgcatgtggctttgtgggtattttgcaaagaagcgaatgggatagtatctgttttcttcactacaatctcagggaatgactcatggaaacatcagtgatccgcaagcagattatggttaaactaaaactcctacgaggctgtctccaaaaacttgagct

SEQ ID NO: 206860 - DNA, 1000 bp, Homo Sapiens
tgaggacagagcatggaccccaggcaaatgcagtgacaatcacagagcacgctcctaccacagccacccacgcagcctgaggcatagccccctggaaactgcctcggccttcagcaccccactttggaccagcagggcaggggggttcctcctctgagaagtcctcaaagctgcctggaaggagcagacagtgcccccagacgccaatctgacagggggcccaatctgtctctgagcaggtggcatgctggctcgggggccccagaccacaacagaaggtcacctgggaagagagccgcagccctacacaaggctcgtgggcaggaaccgtcccagccacaggagcagacgcccttgcctggcccctcagggggccgtgttcacacaggaggccttctcagaggtggacaccaagcacttctctctcttgcgcttgctgcgggactcagctggggcagcatcaggcccagaaatcggtgctggacactgtgtctccacacagggccccccatggaagctgctgaccagctgtgccagaggggccggggccctacccccaggagcccagtccctgcctctgatgctgctgctgctgggaccctgctggcagagctggtggctgaactggggcagcacctccctctcctgccccaggcctgggccgggactcagctggcactggaatgaggaactattggctttcagaagccaggagaccttagggggctgaggaagagagctggacctgcccccaggcgccctgatcccagcccagggcagtctcctccctcacctagcctgggacatgaggcagctcaggtgtggccttaggggctacccccagggaaggccaccaaccatagcgggccacggtgtgggctggcctctgggtgtgaagggctccaggatctgggctgcagaggcgggactgtgcgaaacagaacccccagctccacagccaggccagccccaggctcctccccagacagacatccccggg

SEQ ID NO: 206861 - DNA, 1000 bp, Homo Sapiens
cacacagtttctgtgggtcagcaatgtgggtgcaatttaactgggtgcctgtggctcaaggtccctcctgttgcagtcgggatgttggctggggctgcagtcatacctcaagtgttgatggaggagaatttgccagagtcactcacaggttgctggaggtttcacttcctccaggttgttggactaagggcctcagttctttaatggatgttgcccagaggtctccctcagttccttgccatgtaatccactccatagggcagctcacaatgtgccagttgccttcctccagaggacacaagtgggagaacccaaaagacagaaatcacaggttttttgttacctaattttggaagtgacatcctataatttctgccctattctattcactagaagtaagtaaaaaagtgcagctagggctgggcgcagtggctcacacctgtaatcccagcactttgggaggccgaggtgggcggatcaggaggtcaggagtttgagaccagcctggccaacatggtgaaaccctgtctctactaaaaatacaaaaattagccgggtgtggtgatgcacacctgtaatcctagctactcaggaggctgagacaggagaattgcttgaacccgggaggcggaggttgcagtgagctgagatggtgccactgcactccagcctggccgacaaagcaagactccatctcagaaaaaaaaaaaaaaagtgcagcccaagttcaaggagaggggattacataagggcaagaatattgctggggagatcactgggggctttctgagaggtcacctaccacagtaaattatattatttttgaatttcactacacaataatggagacactgtatttgttattaatatttaaaggagattgttgagcctgataggtttgagaactgcttttaggtagtgatccagtgtccaggaggtcaggcataaaacattcatagtgtctgttatcagtggagtagataggtaaaatatgctggat

SEQ ID NO: 206862 - DNA, 1000 bp, Homo Sapiens
tgacttcattggattatgcctgggacgaacccaccttgccaccttttatcactctgactgttaaaggggcagggtcctctgagatcaactgcaacatgaatgatttccaggataatcggcagctttattatgaaaatttcatttacattgctgctacatatacattctctgggtaattcttgattaaattactgttcctataaagcagaaggttctaattattaacaggttttaaatgttaagcagtttcttaggagaccaaagtacaaaggaagattctttcattctttaccaaaccctgggctcagtgtctatcttaagaggtcatgtaatttaaactcttgacttttggctagattaaaatttatccaaagagtcaagacccttcttgtgttaaagatctctcccaagaattcattctagtatttaaattttctttttgctatttattagtctgttttgcctgtttcctcttttgaaactgactaatcttcatcataattattcaagtcatcattctgactctcctcccaccatcccattgagaatactggttaagcagacacctaagggtctgtcttaatattcacctaaagccaaatatagtagcttaatttcacagaaattccattgccttagaattataatcttcactgttgtttgactagttgtatttagaaaagtcagatgaagaatattgagcttattttaattctgttagattgccacgcagagattcaaaacactgggctttcagaaagtagtcattctaccaacatataaatatagcttattgtttctgtgctgaaataacagggccaattttaaagtgtatctgtgaagaaatggaaaatagcttaatctttaacattacaaatataaatcacctgatgaatagggcgtttaaagtcacattcctttccaaaatgttcggaacatttttgcatatgaataagatttttatacatgcctggggcccagaaaataatctctgggtttt

SEQ ID NO: 206863 - DNA, 1000 bp, Homo Sapiens
agtggcacccacctagactcaagtaaggaaagtcacagactatagcgttagaggataatggattaaaatggcaagatattataactaggaaatagtttaaaaatcatcattcccttacccattgccctctaaccacctctattttgaaaccacacacttccaaactctaattttggatttccaaaattttaaaatttatatatcacacagtacttagcagaccactaaattagagttgaccaaaatgagagtgatcccatagaaagatttatgtattaagtacatacatcaaaatgtacattttaagttttcaaataatctacatgtaaatcatcagcaatgttcacaggaaaatataacaaattggagattccacactttaatacacttaaatgtataaaatgcacatgaaactggtaagatatttttaaggaataaaattaacataaagcatcttattaaagcataggaaattatttcattgctatcctatgagttaaatgtgtgtctatcaaaagtttatttttaataagtactatcaaatctatactcactttaatgcagttataaccactttattaagtaataaggatttctataacttctatgtatttatattttccaaatgtgaattataaaaacattaaaatcatttaccaacaaatttatcttaaaaactataaaaatttcaacaggtaaaataaaattgcaagaccacaaaagctacttagaagtctttttagaattctatttagaatctctaacctgtttttccttcatgctgaaaagcttaccagtgtcatttgtataagactgtttcataccattgataaatcagacatagcaattcaagaccccccaaaatggtaaaaagcctgagaccattcactactttttctcttaaagcactaagaaaccagtgctgcttgttattgcaaatggtaaaacatgaatttagtacagttacgagatattatctttctaaagaaatttttcaagc

SEQ ID NO: 206864 - DNA, 1000 bp, Homo Sapiens
atactgaagaatatcagactcaaaggtcaagtgtttaagattagggagaaagcagccttaaaagtacattttaaagagcctcacaggtcaacaagtcagccttagagcctgccatgcaaccaccacttccaggctgctaggggaatcagaaatgtcactatctttcaaacttagaatattgattatatccactctactcataggggctttattccatgacatctcttagttagcaatttaagaaaatgatttcatcctatataatgccagattagctcaatgacgaaaaatgttacactaggagctcttcgatacacacttgagagctcttacccaaaatgttattttccctctggactttcctgtgttgataagttctgtttgcttccaattgtggttcactcttgtggatctttttctcagagacctaagtgatcatcattcctagagatatttgtggtacaaattctttattttcaagttctgaaaacctcatactaaaaagtcaccctttatttctcacttttaaaagcctgaatgggcactcttcctcatctttcatgaagttaaagtcttgtcacaattcaaattccctagatgaatcccttaaagaatcactacacagtgctgactctccaatgtgcacacttgaccagcaggacgtgtatgtttatttcaaatatttgagtccttttgcttgatcttttcataagttggtctcacttcagtcccctgatggctttaaatcgtggtactttgctcacaatttctcagagtagaacatttttagagaaagatctagacatctctgctttttctaggaaaaataaaaacataaaaactaaaaaccccgcaactctcaggatagaccggattatgctgaggtaacaaattaaccctaaaatcccagtggatcatcaaaacaaaggtttctattttgtttcactacatgctcatcacaagttagtgagatgctctgctcctagggctactcaggcac

SEQ ID NO: 206865 - DNA, 1000 bp, Homo Sapiens
cacagtgctcagccaacacctcaatatattaataccctgccctcctggagcttacagctcagctaaataacacctattataagcattatttgggtacaattccacttcctcttttgcctccttcttggcatgcaaaatattcgttgttgcctttctgggccctgattgttcagcacattctcttaaagacaactttttctcagcatggaagggaaagtctaaccccattagatacaaataataaggccagaccaatgttaatactggggctattggaggaaaaccctcttgaagggtctttagtgaggatgacccaatatggcacctgaaatatcattaaggagattaggtgctaccactcataatatatagtggctgggtgtttaccaagaactttcacacacattttacctctccctcacaactctctggatccacagccaacctgggagcccagccctggaggcgggagggcagagcacatctatctgactccaaaaccagcgctcttgccctttgtccaccgtgggtaactcccaggcacccagtggtgaccacagattatacaggcaaagttttcatccctggctggcctcccagtctcttagcaactgggtcacctccctcaatgcaggctaactccccaacttggtccaaagtgtttaaagaaaaagtccctacatgtcttccaaaactgaacagaaactgttttttttttttgtaactttggcacttgggacctccatgtatttgtactggaaaatgtgatcagaatgaaataagtaactatttcttttcttgagatagggtatcactctgtccccaggttgaagtgcagtgcagccatcactgcagcctcaactgcccaggctcaagccatcctcccacctcagcctcctgagtagccctgaccacaggcacacaacaccacgcctggctaatttttttattatgtgtagagacaaggtctcactatgttgcccaggctggtcttgaattc

SEQ ID NO: 206866 - DNA, 1000 bp, Homo Sapiens
ctgctctatcccaaaaaggatgctgtttagggcatattgtcaaggataggaactaaaacttgagagctgaccttcattctttcaggttatcagaatcctaacagcaagtgtgcaaactgcaagtgtgcaaatacagagactcataaagcatagttaaagaaatggtaggaagtgaacctttataatttaatcaatattcaatacacatcttgatgtttgatgtgatcaggcatggggtgtttagattatcaatcaagatgagtgccaaagatcattcaactattgatccagaacagagatggggaggtttggagctggggtggttactaatggtgaggaaggtctgtgtctaggagagaaacagatttgccagtgtgtttaccatcaatgcaaaacactagagggaatgaggccagaaacgtgattcttcctgggcttggagaaagtaaaatgcattagcctccttttccttcttcaattatttaagtttttattagaataagaaagcatgctacatatgccttgtatttatttatttttatttttataaatgtatgggggtacaagtgcaattttattacatgcatggattgcatgggggtgaagtgagggcttttagggtatcaatcatccgaatgatgtacattgcacccattaaataatttctcatcacccaccctctccaaccctcccacccttctgagtctccagtgcctattaatccgctctctatgtccatgtgcacacattacctagctcccacttataagtgagaacatgcagtatttgtctttctgtgtctgagttgtttcacttaagataatgccttcctgttccatccatgtagctgcaaaagacgtgtttgcattcttttttacggctgtgtagtattccatggtgtatatgtaccacattttctttatccaatcctccactcatggacacttgggttgattccatatctttgctattgtgaatagcgctatgacaagcatatgag

SEQ ID NO: 206867 - DNA, 1000 bp, Homo Sapiens
ctcccaaaatgctgggattacaggcatgagccaccacacccggctaatttttgtattttttagtagagatggggttttgccatgttggccaggctcgtcttgaactcctgacctcaggtgatctacccaccttgcctcccaaagtgctaggattataggcgtgagccaccgcacctagcccatttttgtattttttgtagtgacagggttttgccatgttgcccagactggttgcccgtgaagtcctgggctcatgcaatcctcccactttggcctcccaaactgctgggattataggcataagccaccccacccagcctggacacctgatttaaattcttttgggtgtacacctaggagcagaattgctggactgttcggtaattccgtatttaactttcttttttttcctccaatttgagagcaggtactgcttaagtgcttagattagaaaaacaatcacagtagacaccttagctcattcttctaataagtctgttgatccggttctccctgttgccagcatgtccactttctacaaaatgggtggtctttttctttactctaccttgtggagaggataatttgaagggctacaggaagttatttgcttctttgaagcattttccaacagtatagatctcaagaatcagatcctccatgcaggtgatgccatatttaccaagagataaagcaatcaaagtgtcatctgtcaaagcaatttgcttcttattgatttttgccataaccatgctggtagattagttcatttactgacttcagctttgggtacccccatgccatatatggttctacaatcctcagcatgttcattgaagccttgttgagcttcacaaaggttccactgaagatttaacaaaggcgaagaagctgcaacacctttcggacctttgggttcacaccactgatacctctgatcctgatgacaaacggcaatttgggttttgcaggtacatagaagttgccagcttttctggcc

SEQ ID NO: 206868 - DNA, 1000 bp, Homo Sapiens
taagctttagtgtcatagtcatagcagtagtattttcaattggtaaaaagaaaatggaccccaaaaaagaatttcagtgaaagcagtaacagtcttctggcatatttctcacctttctttctaccttaaaggttcaaagttcctaagtaatctcagaaacctaaaatagtttattctctatcctcactattggtttttaaaaaacattttgcagcatggaccactgctcgtgtacagatgctctccaacttaacaatagggttatgtcccaataaacccattataacttgaaaatatcttaagctgaaaatgcatttaatacaccaataaacccatcataaagttgaacaatcataagccaaattataagtcagagaccatctgtattagcttaagtcttggaatggtttattttttagatgccatttagccacttatattctcttctattttattgtgagaactaattcccctcttacattctgtgcttgacccatgctatacttagtgtgaacaagagccaccttcttctcatgacttctatttttttgtgaaaatttccttcactcattcacgacatttggatttgaaatcttacctacttaagtactttaaaaaatcattttctaccatctttcttatcaggaggctctagtgattccttctccacacttctaacttctcatcttcacactccttgtcttcctaacttcactacagtaagtgttttacatgtttagaactcagctcctttactatgattgctaaccatgtaccttaaataaaccgtcttctagttttttgtttcttactctcaattataccttttagaaaagaattaagagtagaaaaagactgctacatagacattcttatgatcttcagaaatgagcacagatcatgcttaatgaaaaaagatttccaaacaatgctgcatatgtccagagaaaaggtggcagaaatgactgtcgtttgggggcactattgtctggacatggcc

SEQ ID NO: 206869 - DNA, 1000 bp, Homo Sapiens
caagaataccttggcaatttcccccaaaatagctgttttatacattgggttctttgactagaatttaataaatctaaatctaaaccaacagatgacctacctcacccctttatcaactgcttatatttgcaggaaagtgacagtaaaggctagttaccaagagaaattgaaggaggagtaccatgacattaggtccttgtctctggtcttcccccatgtcaggagtactgccattcctatggtttggctctgagtcaacaatttctcttactgggcttaggctagtttgccttcctttctgtttcatagcaaaaggagctgattaacacagggttctctctttttctctccctctgtctctgtctctcactacatatacatgcggacatgtatattgaattcatacaaataccttcaattacatcaagttgaattgcaaagcccctaatttactgcagatatgcttagattgatatttctatgcacaagacttgacaagtaaaattttttctcatgaatccttctctctcctaaagtaatataatttaaggaacagatctcctgaacacaggatatacataggaacccatggaattttcatctctctaagttcttttactgaacagagaccacaccattaaagaggaacattttgagttctctaggttagcatattaaaaaggtgaaatttacattaaaaactttttagttttaccttaccaaattaaggatccttatttcctttatgtcaaagcagataatcacgaagacctggtaagaacagctgactttctggtcagccattttatcactctgtttttctccttaaggaagattagcacatccttttctactgttagtgttctagtcatgctaacagtagctgcagaatcaagtctttcctagagaaagcctaactgtttcagtgttgtcctggagtcgattccatgttgagtgacatcaggttggtagcttgaaattggctatagtgagagaattc

SEQ ID NO: 206870 - DNA, 1000 bp, Homo Sapiens
ctgactggtgtgagacggtatctcattatgattttgatttgcatttttctaatcattagtaatgttgaacattgtttcatatgcttcttggtcacgtgtgtgtcttgaaaaggcagattttatgtatttgcgtatttatttttttcacaggttttttttttgaaagtctcactctgtcgcctaggctggagtacagtgggataatctcggctcactgcaatcttcgcctcctgggttcaaatgactctcatgcctcagccacttgagtagctggggttacagtcatgtgccaccactcctggttagtttttgtcttttttttttttttggtagagacagggtttcatcatgttggccaggctgttcttgaactcctgacctcaagtgatccacccacctcagcctcctaaagtgctaggattacaggcatgagccatcgtgcctggcctgaaaaagcagattttaaacggcaattcattcttctatcccattgtgaactatacagttgatggattttccatcactaacttgaaactctaaattggcttccttctgctccccagtaggtttcagggctgcctcttcacatcttagtttctgagaactcttggattttattaaatagtgagctaaacaaaacaggattgtggaaggggccccttgacaccacacttacctgccctccctcaaagtccctgatctcaggaaaatctaacacctatgaagaaaatggggataaaaaatgcatacaaagattattaccaaaaacgaaagattcgttgtgtaactaattgagattaactgaagctctgccatagctcccagccactgcccccactcaccttgcttatatactctaactctgctaacgaactgtcaagtgtgttggaatgggcagaatatggggtggggagtgcataatctgtagagcttctacagatacagtgctaggtaggtcctttctataatatctcatctcatcttaaaagacttgttggcc

SEQ ID NO: 206871 - DNA, 1000 bp, Homo Sapiens
agagaagcatgtgctctgtgtggcccctcatgggagggagagagcataaggaagtctgtgcatgggctcctccaaactttgcctgtcttttctgcttgtgatctggctgtgtgccctaactacattgctgtaataaatcttggttgtgattataactatatgctgaatcctgtgtttccaactataacaaacaagaaaagcaggaataacatactatagaagtgcatgaggcagttaagtactaaagataagtagctatttatgttatttttttctaaattttcagatgtttctaacatttgtcaacgttttcaaatgtgtgttcttttgttttttttttctcactttaaatatttgcttttgttcccaattttatactggtaattttgcattcttatacttaaagaaggccccagatgttacaagcttcaagccccacaaaacctggatctgtctctgtcttggatccaagacttgctgcctcatgttggttttcctgttgtcacttcatattacacagatggggaaattaaagccaagagaggggaagctaaccttacttggcaaaactgggacaggatccagttcttccaattcccagtttaatgagtgctctttccccctattctgtaaagttttttggtaacttgtctgtaaatatcggtcatggtacattgtccactgggtggcactcaagagattgaaatttgagttccttctctttgagtagttgggtagtcttgaactagtccctttccctcctgggacagattttcccagtttgtaaaataaaggggctggatttagtgctctttatagacctttctctctcagatatttcctgagtttttcattctagaaatgctggaatcatatatttgtaactgaaactagtaatcttcttgttcttgagtcttcttcatctctaaagtggacataaaatacatacctctcgtggttgttgtgaagcccgtggcactattcatggtagagcaggtga

SEQ ID NO: 206872 - DNA, 1000 bp, Homo Sapiens
aataactctgagaacctctagggaaggctaacctgcaagacaggaactgctgcgctaatcagcacagtgggcacaagaatggaactttttttttcttttttttttcttgagacagagtcttgttctgttacccaggctagagtgcagtggtgcgatctcggctcactgcaacctccgcctcccgggttcaagagattctcctgcctcagcctcctgagtagccaggattacaggcacccactaccatgcccagctaattttcatatttttagtagagacggggtttcactatcttggccaggctggtcttgaactcctgacctcgtgatccacccacgtcggcctcccaaagtgctgggattacaggcgtgagccactgcatccatcctggccaaggatggaacttttctaaagaaattattcccaggcactcaagaggaaaggcaacaaataaaacagtgttgaagtggatgtgcactggtctctgtttttgtgtgtgttttttttgtttttttttttttgagagggagtctcgctctgtcgcccaggctggagtgcagtggtgtgatttccgctcactgcaacctctgcctcccgggttcaagcgattctcctgcctcagcctcccaagtagctgggactacagcgcctgtcaccatgcctggctaacttttttgtatttttactagagacagggtttcaccatgttggccaggctggttttgaactcctgacctcaagtgatccacctgcttcagcctcccaaagtgctaggattacaggcgtgagccgccgcacccagtctctggtctgacttctttaacaacaagctgtgggctggctggatgtagttgaggccaataaactcccaactcagaccatgaaaacaggtgaaaacacaaaagtccacaatccagcacaggtgatctcatctttcccccacccccaccagggttcctctacgtgctggcaggggtgagattgggtgacttctctggcc

SEQ ID NO: 206873 - DNA, 1000 bp, Homo Sapiens
gtgtgactatttggagtggctgactctgggggcagggctaggatgagcactcaagtcctgcctccccattccaggggcagctttccatctcgtcctgtgaggcttgtgggtggcagacttggacactaagtctaaatgaccctaagtttgagggactaggaatgtcatcagggtttagggggcatcagggaaggcttcctggaggaaaggtctcctctggctgatgggactttgagatagtggacagggtgtcctgttgggaggggaaggagggcacgacaattgggttcaagtgtgacactctcccagggctgctgaaagaaggctggttgggtgtttctgcaggtggcccgtgatgtagccgtggtggccggagggctaggtcgccagctgctacaaaaacagccagtatcacctgtgatccatcctcctgtgagttacaatgacaccgctccccggatcctgttctgggcccaaaacttctctgtggcgtacaaggaccagtgggaggacctgactcccctcacctttggggtgcaggaactcaacctgactggctccttctggaatgactcctttgccaggcaagggcactaggctggggaggactgtgccaccacaggtgaccttcccatcactgtgggtcgcaggtggggcagggagccagggtcaggtctgtgttttggggtggggatggccatggtctggttggggtctgggcagcgtgaggatgtaggaggtgtcatggcatggggtgctgttggagggggagttgctcagacttctgcctccccatgcttgcgagtctttggttgggaccttggttgttaacacctcaaggttacctgggaacctgtcacctcccccttgagcaaaacctctgggactttgtgtgggcaaataccaggccagctatctgagccatttatggggcaaccatgcccttctgtttgctctcgcccccaaagcccagcccaggcaccttagtgaccctaagagg

SEQ ID NO: 206874 - DNA, 1000 bp, Homo Sapiens
acccctacagtttcggagtttgctgctggtaccggcttgttgcgtgccaggcgtttccagagtttgccgaaatgctgaatcaattcggggttttctacatcgcccaaacctttgcgcgcgacgataacgatatcccatccgaccagtgagtcctggtggagacgaaacgattcgcgcatcagacgcttgaggcgattgcgctcaacggagagttttacgctctttttcccgatcacgagccccagacggggatgatcaagatcgttgttgcgcgcaaggagcaggagatttttccccggaaccttgccggtaggggagtcaaagaccgccttgaagtgccggggagtaagcagacgcttttcccgactgaagtcctgactcacctccagtgccggattatcaaactgccagacgcgcacgacctttggcgcgacgacgcgacaggacggcacgaccgttcttggtagccatgcgagcacggaaaccgtgggtacgagcgcgtttgatagtgcttggttggaaagtacgtttcatgtcgtgttacctggttcgtccacaacgggccggaatggcccccgttttaagagatcggcgattctagagaaagcaagcctctaggtcaatttccaaccagcttttcctttatctatgtatgtccgggtacggggttgtgagccagggtcggctagatataaaaataaagaaggaaagtatttaaagcttttctgtaaagcttataaagactagggacgtcctcatctgtggataactgactcaagcccttctagtccgtactgtacagagaatgacaacacggttgagaaacggtgtcctgcctgtgctgcgccatcggaaaacctgtgtgtggaaccgtcggttatccacaggcgagttacccacagagtttcgccccgagttgtgcaatggcctcaagtggggttatccacagagcttatgcacataccgctggtcgtgtttattcggggtaaggcgttgattc

SEQ ID NO: 206875 - DNA, 1000 bp, Homo Sapiens
taccttatttttttttccattctcatttattgaaagaatttattgtcccttaaactgttgagcttgaatctacgaaagcaagtagatgatatattccacgtgatatttatattatttacgttctatacatatattgataggataatgaatatctttcgtacagaaagagttgaatttgcaggaatatagtactgtgaagtaagtaccagattttggtactagttgtacggaaaggactgttaccaaaacattattatcagtgacaatgaagatttgggttgtattttattgagaagatttccaatagcagattcactaaaacgaaaatacatgtgatgattttgtgccacaaatgtgaatgtccgtttgctgcgataatctaagacgatcttgtggagtagttggtacttgtgtccagttatacttggaaaacatgatgctaagatattaattcaaaattctaatggtatattatacaaattatactgtttatttttcttttactatacaaaataagatactagaattaaggtttagctttataggctaatggagatcagggttccttttatacctttcatcttttggcagataaactggttctaagaagccctaactcggtttcttttctgattactaatctttcagataaaaattcatttcacctgtaagatgataatagtccgtcacaggcctagttatatcttatctaagcttcgcttctctttcgtttatatacttctatgtctggatgagcggtattataatgcctggcgtaattggcgtttacgacgctcttcttcgtggcacggtatcagcatatgatcatattcgtataaatgaataagtagtttcgagttaatctaagcatctactaccgtaacacttcacattatgatatttgttgaaacacgttgaaataaattcgaagcatctactaccgtaacacttcacattatgatatttgttgaaatacgttgaaataaattcgaagcatctt

SEQ ID NO: 206876 - DNA, 1000 bp, Homo Sapiens
attttatatgatcttaacatttggtaatttgatttaattggcaatataattatatattttagtttgttctttattctttttcaaattttttgtcatcaggccatacataattaccctgcctaatgacttcaaaattttaaagatgttgttggaaattgattttttctaaataaactgtatgaatcacccacgcaattatatagccaaactggcacatgtttgtactataaaattcctaaaaatctacaaaacttatttggttcccttttctataaaaaatattagaatcaacattaacttttaatatataccattttatatccaagacatattaacttagatactggtactacgaattggaaatattcaacaaaaaagccaattcccataacctgatatttacttttagttatttgtaatatttttaaatctcatttgctaattttttgaagatgataaggaggtaactattacttgtacaacaaaaattcgaaaaaatgtagctattagaggaacttagagattaattttataacaaggcacaaatataaagttttatacttcagattaatcgaaaaaatcattttggtacagtagagaaattataccttgttaccttacttctcacaaagatggaaagataactataccaaatcaatttttctttcattgtaaaatacatagtcaaactaatgaagaaatatgagattaatttaaaatttatacaataattcaatgaatattatataatacatgtgatgaaaaataagcctatataaccacaagtccaactatcttggcaatattcattcttatcatcattaatattggctttctgctgcttttaactactcatcacaagaaccacaaacaatattatggctaagtgaaatgattataatatttcactaaattttattagtaaaattatagatttattaatttttaaatattttgattagttgattcgttctcaccacccctatcaccgcagcatact

SEQ ID NO: 206877 - DNA, 1000 bp, Homo Sapiens
ttctgtgcaggcaggtggtgacctgtgctccagatgaatccgagccgtgctagggactcgcctggcggggaagctgcgtgagaattcctgcgccgtggtgaatgcagcagccacgcgcaggggccctggatgctgataattcatcgttagtgagctactgcgagtaattacgtttattcctattttattattattattattactttgaggtaaactcttgctgtgtcacccagactggagtgcagtgttgtgatgtcggctcactgcaacctctgcctcctgggttcaagcgattctcctgcctcagcctcccgagtacatgggattacaggcacctgccccgatggccagctattttttgtatttttagtagagacggggtttcaccatgttggccaggctgctcttgaactcctaatctcaactgatcctcccgccttggcctcccaaagtgctgggactacaggtgtgagccactgcacccagccctactaatattattatttttttggagacagagtctcgctctgtcaaccaagctggagtgcagtgtgtccgtattttattttttatttcattttttttgagatggagtctcactctgttgcccaggctggattgcagtgggttgaactcggctcactgcaacctccgcctcccgggttgaagtgattcttctgcctcagcctcccaagtagctgggattacaggtgtgcaccacaacacccggctaaactttttttttttttttttgtatttttagtagagatggggttttgtcatgttgaccagtctggtctcgaactcctgaccccaagtgatctgcccgcctcagcctcccaaagtgctgggatcccaggtgtgagccaccgcgcccggccacgcacccgtattttaaaccacagtgtcacggagacgtttctaggcagcaaacccacctgaaacgctgatatttacggaacgaaagcctgacatattctgaaggagaaattgttttgtt

SEQ ID NO: 206878 - DNA, 1000 bp, Homo Sapiens
tgaattaccttactatttgcttttcaaaaaatctacatttttttcaaggaaaaacgtataccttgaatgtaattataactccaaaaaataatcttccactcctcttaaacttatatacaaataaattatccaacagttttagctttggattactttctatacagaacattctgatttagtgtaacgtcttaagtgccagtgccttagttcttcctactgtgaattttctaaagtttacaaagacttaattttgactaaatatttttacacatgtgttccctctgcaaaaatatcttttattataaactgtgtggtgttttgtaagctgtattttctgaaaaaatgtttttccacatttattacatttgtatggtttccttcaatataaattctctgatgctgaacaagtttgagtaattccattagagttttcttctaccataaaatctgtacattatatagggcaagtaaaggtattacaaccctctttatatttgtaatatttgtctccagaatactcttttttactttaagagtttaaattttccaaggtctttcaaaagtaattacatttataataattttattaagtatgaacttactgatgttgactatgatgtgagcagatagaaatggcttttccacactctgtataatttttcaagtataaatgcttttatgtgtcatgaggtatgagcatgtcagaagttttgacacattctttgtttgtagagattttctccactatcaattattttgcctacagtaagatgtgacaaccatttaaaagccttgccacattgttcagttttctgaggtttctcactgatatttctccaatgcttaggaaagtttgaggtgtattcataagctctgccaaacttttttaggttcataggcataatctttagtatgaattacggatggatatatttgagcaatacttaaaagattttgccacagtcttatgatttgtatgatttttttccagtatgaattc

SEQ ID NO: 206879 - DNA, 1000 bp, Homo Sapiens
gggaccaaaaccgggaccagaacccacagccaggttctctttcctgaaatcccccgctgcctccctagagaactctagctcactaaatatggcttctaaaccctttgctaactggttacagctcagtctcctgggtagaggccaggctggccgcccctagagaatctaagacgtctggaccagtgaccatctcctctcccctcctccactgtccaatttaatttcttgtccattttctgggcactgagtaggcacatggctattcctcctgctctccctcaagcaggagcagttgtcccagttactacatggcaccctctcttatttcactgagaacactcttaaaatgtcacctccacaaagacgccatcgctaaagccctactccaaatgaaaaccaacgtcactctctagggctgacctctttccctgtttttttttttttgttgtttttgttttgttttgttttgtttcagttgagtctcactcttgttgcccaggctagagtgcagtggcgagatctcggctcactgcaacctctgcctcccgggtccaggcgattctcctggctcagcctcctgagtagctgggattacaggcgcctgccaccaggtttggctaatttttgtattttagtaaaaacgaggtttcaccatgttggccaggctggtctcaaactcctgacctcaggtgatctgcctcctccatgtcccaaagtgctgggattacatgtgtgagccaatgcacccagccccttcccttgctttagttttcttcatgtccttgccatggcctgacaaattgcacactgtgttgctttatccatttactctttgtcttcactaaaacataaactccaggagggcaggaacttttagggttagtcccctgccctatctccagtgcctacaacagccctgcatttaataaatgtttgttgatgggccaggcacagtggctcacgcctgtaatcccagcactttgggaagccgaggcaggca

SEQ ID NO: 206880 - DNA, 1000 bp, Homo Sapiens
taatcctagaacttcgggaggctgaggtaggcagatcatctgaggtcaggagttcaagaccagcctgaccaatatgatgaaaccccatctctactaaaaatacaaaaattagccaggcatggtggcatgcgcctatagtcccagctactcgggaggctgagatcggagaattgcttgaacccaagaggcagaggctgcagtgagctgagatcgcgccactgtactgcagcctgggcaacagagtgagactccatctaaaaaaaaaaaaaagaaaagaaaagaaacaaaaaaatatatattggacacagttgggtatcctctaagaatttggaaattgaagatgtagctgcctgtgagagttttattttatttattttatttttgagatggagcctcgctctgtcacccaggctggagtgcaatggtgcaatctcggcttactgcaacctctgcctcccgggttcaagtgcttctcctgcctcagcctcctgagtagctgggactacaagctcataccaccacacctggctaatttttgtatttttagtaaagatggggtttcaccatgttggccaggctggtctcgatctcctgactcaggtgatctgcccgccttcgactcacaaagtgctgggattacaggtgtgagccaccacacctggccagcctgtgagagctttaaaccatgagatagacatatggttttgcaaaagtttctacataaatcagaatggttcccagaacagaaaggctcctctgtcactttttttatctggttgcttaaccataagatgccaacccaattaacagtcacacccatatttgcattatatctgtttcatatgttccgtgtaactgcctcctttcaaagtgttggtatatttttcaagtcaactggaaccaaaagtatagagaaactgaatgcaagccagctttctgcatatgtaacagtgtaagaatccaggttgtatagatgggtttttgtttgacacagatgttt

SEQ ID NO: 206881 - DNA, 1000 bp, Homo Sapiens
cgcaggggtggcacacgccacacgacggccaagggagggccgaccgaggccggccggcgcgcccgcccccgcccgggacgggggaccgcgaccggggccgaggccccggcccgggccccaccccccgacccggggaaagggcgagcgaccggcaaggcggaggtcgacccacgccacacgtcgcacgaacgcctgtccgggagggaccaccgggccgcgctcgggcgcacgcgcgcgccgaacggggcgacgccacgcggggaggacgggctctccccgacgccgacgcccgggacggacgcctcggggaagggccgcggcaggcccgggaagcgaggcgcacccgggggacgcgccgacccggttcggaagagcgggccgggagaagacgagagaccacgggcgaggccggggcgacggggaaggcgcgagaaaggcggccggcggggaaggggacgccacggggacccctcgagcgcggccgaccgcagccgggacacacgcgcggggcctcaccgccgccggcggcaccgcgcggcacccggggcggccgaccggccctcggcgatccccgcggctccccccaccaccgccgccgcagtcgcggccggtcccccggaaccgtctcctcccccgcacgcgccgcaggccgacccccggaaccctccgggaagcccaccgggccccacgcggggcgccaccaacccggtccccaaggcgcgcgccgggggacgcggacgccgggccgatcagtggccggcggcggcgccccacgaggcggtgccgggttcggtcccaggcggggccaccaacggacgtgaagccggtgagccgctcggggggaagaagaggatcggcgggcggcgggcggggaagagggcacagacgggcgagggccggggaccgtgagggcaagggcacccgggagcccgcagaggcggcggctcggggagaaacctcaggcacggccgggccaccaggaaaacacggccgcgggatc

SEQ ID NO: 206882 - DNA, 1000 bp, Homo Sapiens
cactttatccattttgctatctaaaattgatctgtggtatgattctgaagccaacagacttgtggagacttcctgatgtccagagcatgactaagatagtgtgtttctgaagctagaaagtggttgatggcttcttgatccttagcttccagactatggtaggagcagcgattcttctaacaggccagttctgcggtgttattctgtgagtcattcctggaggccacatttacagcctgccccaccaaccctccaatggttttgcaatccctaaatttagtgacatttcagttatctcttgctgtgtaataagcaccccaaaaacttagtttggctgggcaattctgctgatcctgcctggccccacatatgtgggtgtattcagctgtcagtggccctactttgtctcactcgcatgtctaggattttggcagggatgccttgaaatgttgagacctctctctcctatggtctctcatcattcagtaatctagcctgagcttccttacaggatggctgctttcttctaagagggtgagagtgggagccgcaaagcctcttaaggctaggtctggaagtgacacagcatcagttctgcctctttccattggtcagaattaaaccgagggctagcccagatttacaagaagagaaaaatagacttcatctctttatgggagttgtggcaattgcaaaaaggtgtgtgaaacaggaacgatttttgtaacatcaatctaccacaactgttttgaatccttttctgcttcaaatagctagaatggcttctgttatctgcaaatgaactctggctgatacagaaaacatgcagtgggaccagataagaggctgctatcagaagtgtgtacattagctgataaatgagacttaccagcccgtttctggattattgtcagtttctttactgacgataccctattccatcccaacgtgtccttgtttgaattgattgaaatctttcatttatttccactaatgccaa

SEQ ID NO: 206883 - DNA, 1000 bp, Homo Sapiens
gcggaggcgagtggatcacctgaggttgtaagtttgagaccagcctgaccaacatggagaaaccctgtctctactaaaaatacacaactagctgggcgtggtggtgcatgcctgtaatctcagctacttgggagactgaggcaggagaatcgcttgaacttgggaggcggaggctgcggtgagccgagatcgcgccattgcactccagcctgggtgacaagagcgaaactccatctcaaaaaaaaaaagactgatactcaaatgttcctagtagctctactcataacagcccaaactggaaaatacaaacgtctctctattgatgaatggataaacaaattgtggtttatccatacaatggattattacccagaaataaaaggaattaactattgctacatgcaacaacagagatgactctcaaaagcattatgctaaaggaaaaaagccaaagatcaccactcagcttatctttctgtaaggctaactcaagtcaatctggcaattttgagtagttccaacaaattacattagcaactactttcatgaagttcactgcaaagaaatctgtacgtttctaatatgacctaaaacccaacagggcaagcattcaaggtaaggaccaatactagcaaactcttaaatggctggtttaagttgggactatatgccttgattgatctatgggcgtagtaaccattgggtaacaattcaagataatgacaaatactagcgagttttttttgttttgttttgtttttgagacagagtctcgctctgtcgccaggctggagtttagtggcgtgatctcggctcactgcaacctccaactctctggttcaagcgattctcctgcctcagcctcctgagtagctgggattacaggcacccgcaaccaagcccaactaatttttgtatttttagtagagatggggtttcatcatgttggccaggctggtctcaatctcctgacctcaggtgacccatctgcctcggcctc

SEQ ID NO: 206884 - DNA, 1000 bp, Homo Sapiens
gcctggccaacatagtgaaaccccgtctccactaaaattacaaaagaattagccaggcgtggtggggggcacctgtaatcccagctacttgggaggctgaggcaaggaaaatcacttgaacctgggaggtggaggttgcagtgagccgagatcgtgccactgcactgcagcccgggcgacaatgtgggactccatctcaaaaaataaataaataaataaataactgggtatgtggcacagctacccggtattactgcttaaatcattcagtagtgccaaaagaactataaggaatctgacctcctggactgctgctacttgcatccctcattgttgtctaactcacctgagacataagcctcctgagggcagagaccactccatgtgacatgtccttgtaacctgaccatggcaagcaacacacaagaacatttagggaagatagtgtccaccagtgaagagcagagggcccatctttatggacgatggtgtgtactcgtgaagggcagggagcataattcttccaaatgttacaatcccagtatctcgccgggcgcgatggctcacgtctgtaatcccacactttgggaggccgaggcaggcagatcccctgaggtcaggagttcaagaccagcctggccaacatggtgaatccccgtctctactaaaaatacaaaaattagctaggtgtagtggtgggcgcctgtaatcccagctactcaggaggctaaggcaggagaatcacttgaacccgggaagcagaggttgcagcgagccgagattgcgccactgcactccaacctgggtgacagaacaagactcagcgtcaaaaaaaaaaaaaaaaaaatcccagtatctaacaaatacccaacacatttaaaaactcaaattattgtttgcttaataaactgcatcttcaaaacgatttccctatgaagtccatgctcctgatcctccttcaagcctggccctgactgagcgccactattcctgttctcaa

SEQ ID NO: 206885 - DNA, 1000 bp, Homo Sapiens
gagtgcagtggcacgatttcagctcactgcaacctccacctctcgggttcaagcaattctctgcctcagcctcctgagtagctgggattacaggcgcctgccagcatgcccgactaatttttgtattttaggtagagacggggtttcaccatcttggccaggctggtcctgaactcctgacctcatgatccacctgcctcagccccccaaagtgctgggattacaggcgtgagccacctcacctggccatatttaattattcttttttaagacagagtctcgctatgttgcccaggctggtcttgaactcctgggctcatgcgatcctcccactttggcctcccaaagtgctaggattacaaacataagtcactgcacccagcccttcctaattctaattagaaggaccaaagatttttaataaattctctccaaccatttggcttggaactttccttctctgtctttccattttacctctctttttttttcctttttgccccttcatttaccctaattcactaattaacttttccccccacttttcttttgcataataatatattgctataaaagatactgtatgttctctttcctacattccttttccataaccatttgatttattttctctgaaacttggagttatggggttctcacccttatgatactggaagcagttttggggaacgtgatttggaaatatatcatcccccatctctacaaaaaaaatgtaacaattagtcaggtgtggtggtgcacacctgcagtcccagctgttcaggaggctgagatgggaggatcacttgagcccaggaggttgaggctgcagtgagccatgatcatgtcactgcactgcagcctggctaacagagcgagactgtgtttgaaaaacaaaaaagaaaggaaaagaaatatattatcacttagaggcaaaatcctaaggagattgcaggatgaataaaatttaacatagctacataacaacaataaaactgga

SEQ ID NO: 206886 - DNA, 1000 bp, Homo Sapiens
ttccacaagctgctgtggggacgtgtgttccctcaaagtctgtgccatcttctcccacccctcccgggtagaaggaggggctgaccccagggctgggagaggggaggggactggagggcagactggcttctcggtccccagggggccgcttgggctgttggtctccagagcagggccactgggcactctgtgatgggggagcctttgtctgaaagcacagccccctcgcccttcctctccccatggcttccccttcattggcattaatctgggcaccagctctctccatagcagtgacttccctcaccactctcatctctcagccttgccttttcttcctgacactgtcgccccctcctctcaggagacactgccgagggccacctggcagaaggctgagttaggcagcagggccgggagcgtctgccctccacagggtgggggacagataggctaagcgactcccagcttgctaccctcagtggccagtgtgggcgtgggcggtttggggcgcttggctggtggtggccactgcatcccttaatttatttctctgctgtttctgttcttgagaaattgggggtgggagtcctacacagaggctgcccctaccctcacctgagttgtacatttttttgtgatgggttttattttttattattttattttattttttttttttttgatttatgatgactccacccctcttcatcacccccgctcccaggccaggctcagcgattaagccgagcccttgcgtcctaggaaggggccttgccaacctcagccctcctgccccacactcctactgcggctcagaccaagggctccccctccctcccttcccccctcctgccctatggaacagcccgggtgctctgagggggctgggagggcatggcttggctcccaaagggggtaggggcccggggcacccaggcaaggtggcccctccccgtctagccccctcctccccaaccctgcacttagtttctcctct

SEQ ID NO: 206887 - DNA, 1000 bp, Homo Sapiens
ttggaggaaacacctgaggagaaacaaaccaccattgcctgactggctcttatcagtgttaatagcatctcagcttcctcagatcagttctatcactggcactacagaatccttctctttcttaaggcactttgcattgtagaatgttcctggatgttcatatctagtgtttgaaggggaggagggatttaaactggtcctgtacatagaaggtttgtttgacagaggagaaaaattagccaaggaagattgttgtttaaattcatttgaaaccagaaggggactttttagttgtatgtgtaacacattcattgaattattatcactgttttcttgggacaacatcaagcctaaatactgaacaatatgaagattcttttcttggcctttctgtggattatgtcatatataataattatcagaatcattctacttggctttaaaacatgttttctccaatttttttaaggttcataatttagccttttgtttttatgttgcttagattcttatgtatactgaatattttattaacatgtagcatcaggttgaacatgcttgtcattgatatatggaagatgctatagttagaagtgaatttgttctgctttcttaatcttttccatgcttagcagtgaaaaacaggttttgccccagtagagggattctttggagggtattattttttatgctgctgaatatcatgtctataatagacccgtgcatgcagcctttcctccttattccccttcatgcccccctttccccttcattccccccgccaccccgtttttttttttttttttttttttttggttcttgttgacattacaagcttttaacacatttttgacctaggagccctgttgctggaagtatagtctccagccagttactctcatgatagtactgctataaaactcattcttgtgtggtgttctgtgctatagattctgtgtattgctgttcatattcggagttctggttttgtttttccctt

SEQ ID NO: 206888 - DNA, 1000 bp, Homo Sapiens
gcaccgaccggcgaggataaacagcggcggagggcgagagggcggcggggcgagcgcctccacgcagcaactccggagtcccccgcttgcccgagcgcagtttctccgctgctgtttccaccggctttgtaacactgggaatttacatcctcacccgcacccctcacgcccgaggattttaaactcacctttactctcgaactgagagttgcggtagatgggatttttgccttttccccagatggttgaaggttaagatttttggaaaccccaccacctccttatttctattattatttctgcaagaaaagtataaagagagttgtagtggaggtgagatttgtgatcgggaaagccttcgactccctccttctccgtcttccgcctctctctctctgattagttcctatccagcagcagattgaagcaggagatgattcttctcaaggtttgttcagcagcttcacttctaggcgaaggcttcatgaaccaagtgacgtcaaccaacaaggcttctctctctctcctctctctaacaatgaaagttgctgttaacaagggaaaaaaagagagagaattgtttataccatttcagttccaataataaatgacctatcagctcctaaaggagccaagggagggggttgcttcttctttccaagaatactgtagctttgagtttgcaccgttccttgtcccaggaaaaagttaagaaacttaaaatgttttgttttgcttttaaagaagacaggacagaaaacgggatttaaaacttagtttttaaaaaaacaaaagctacagagtagggagcataggtcaaccatctccacctaaattttttttgttcctaaactcagaattctacaacccaactaaattaatatgccaagattttgcggatgttaaaactcaaaaaaagcagtatgcaagacggtcccggggtaaaattctactgcctttccacggacaagttaaactggctgtaatgtttatgcactaa

SEQ ID NO: 206889 - DNA, 1000 bp, Homo Sapiens
taaaatggagagttagtgtaagctgggtcctttggaaacatcaaactgaaaaggcctgatttggaaaggtgactctgcccaaaaggttggcaagaatctgacaaagatggtttccttccgaggaagactccggaactcaggtgtggccagtctccttttcagtctgtttgtacagctgcggttctctcttaattttggacacagaggaggaacagaacagggagaaataatcattgtagagtgccaaggcaacatctgacccagatgagctcttcacttcctccttccctgtcgttgtagagccagactgggtagaagagggagggcagtgtcctcaactcatcagcctcacaagcaatttgggacccctctggggtggatttcaccaggttgaattagaaccgcagataatacttccctgttagtgaggacaaaccaagcgccagctctgcccttttctctagagtgttgtgttcttgctcttggtacttacaggagctagtctggtgccttgagcaagcttgaagggaagtgggtgtcctcaccagcaaacttccacatctcaactcgtgccctcttttggccacactggccccgtctcttggagggagcccagaccctgtagggagttttgttttcctttcttctcttgggtgtggtgtcttgtgtttctgaatgtgaacccaaagaccctacccctggagaggaagcaccttcctctttgtgttggtctcctcatagcactgtttgctcacagcagaaacggggctgccacagcctcctgcggctctgctgccttctgggccctgcgtgcatggcatctatagctccttgccctgatagtcaatgctgtggcccttcaagcttgtctttcaaagctttcacaatcattacaacttttatcaaggggaataataatctctaggaaaattatgtccactttaggagaatctgtcaagtgtagccactttggtgttgttctgataatatactgtatatg

SEQ ID NO: 206890 - DNA, 1000 bp, Homo Sapiens
taaaatggtgcataataaaacatgaaatatgtagtatgcagatatcatttattagatagtttgtagtgtatacatttagaacatacttcttttgacaaagggtgatctgattgctaatttaccattttattctgtcaggtacaggtgaaacaaattctcatcttgaatgatcagatgcaaaatcatttctgaaccctagagcagaagttagaaataacaaaatggccgtttcaaccttgactggccaaaaataactaataaacttttttgttttaagtcaggcaagtgattttctacatttagcagtttgaaagtccagtgttaatgcaatatttctagtgagaaatgcttgttattaaaagcatgggagtgatagtgtgaaatggtggtgagtgcttctatcatattactgtaggtacttggactggtgcaaacttgattccttttcatccccctgtttaggagctattaaaatattactgttaaaaatccaaaccattctttgttccatgtaataagaaaatagccaaaatcactttagagcttctcaactatttatgaagagctatcctgcttttattgaaagtcactagagttgaatgtggtaagaaaccacttagcctatgtattggacgagaaaatcagtatcatgataaaattttgaattaagagaacccttgtagagtttttaaaaaatgatttattttcaattaggtttaagaaatctatgttatgcagggaggcatatcagatgaatgttgtagcagacaaaagttttaaatcgtgttagacttgaattcatcaattgtttgaatgagggtgggtgggtagaaggataacaaaattactgttagtgtttctttccttacggaaaaagatgtgaatcccagccttatttcagggaagcctttgaagctatgatggacataagtctaaattaaatgtatgtatgtttcattatattgctcttaagactactgaggtggcagtttaattctta

SEQ ID NO: 206891 - DNA, 1000 bp, Homo Sapiens
gaaagcttcaacctgagttctgcgttataaagcctggagaaagctaagcttagaacataacttgctgaagtataattatctttttgtagcaggaatttatgtgccagaggtgagagtctttctggtactgattttttgagaccaaggataaaaggatcgttttgtaagacatgccatggcaatggctggttgggggacagtttccgcccaagcttggcctattttatttttcctcatacctactttcaaagtcatttaggtatttgaagccttatttcccacgtagtaacactttctggcttttgcagtttctttttttgtttggttttgttttttgcatggaatggggatcaaacaacccgaagaagaacacattttgatcaagcaaaatgtttgcttcaaatttcagaagtttattttacagaaattaaattaagtagtttgacatccttttctctgtttcacacatatattaggttggtgcataagtaattgtggtttttgccatgacttttatggcaaaacctgcaattacttttgcaccaacttaatacatctatatacatatatatatacgcgcacacacttgttcagaagttatgttgtggccttggatttgtttttccccttggaaatggttcttaactctgggattttagaaggttagaatattttttcaagagaacagtggtactcaaaagaatgaaaggtggtccctacattttctgtattcatcacttaaaatttttaatttttccgagaactacaagtaacatttgaaccatgctgctgttgtaccttaaacaaaaactcagtgataaccagtatttagtctattaaaaatgctctttttgaagaaaaaagtttggaagtctctgattagccagagtatagtatgagtcttcactgagaaatatggtgacccattttctttgtgaaaacctgggaaaatgcaagtgtgggtatgaagtgtgtgttctgtttgcattgaaacaatgta

SEQ ID NO: 206892 - DNA, 1000 bp, Homo Sapiens
ctgtgtgtatcacaggggagatgggagccatggaaggttcttgagcaagatgggggtgggggtggggtgggctgtggattctgctgatgtcagggctctttgccgacctgatcaacactcacccggctgctcctgccgccgcctcgcctcggagccgggagaccagcttctcacttcctcgcctgatagactcacggatcttggagagtgagctgctgcggcgaagggcctggggaggggccggggatgctgctcagtcccccaggcccatgcagtccccacgcccaccccaggagccgaagcacagcccatcctcacctgttctgcgtcaccagctgtgcctgtgttgggggcacctagggggaaagatgggggacactgagatggggacatagagaagccaccaggagggaagacagacaggggctaggggctcaccgagaggggcgggtaggtcctccttgtggaggatttctttgtacagctcttccgcttgttgatacttgttctgtttcaggtaggctgaggcctgcggagaagggagtgtctgggaacttttcggaccccagttcccaacactgcatccagtcccgcctttttttttttttttgtagagacaggggtcttggtatgttgcccaggctggtcttgaactcctagcctcaagtgatcctcctgccttggcctcccaaagtgttggggttacaagcgtgaaccaccacgtctggccccactttctaatgtgctgacctggccgtatccttcccctgcctaaagccttgccctggggcagagtgggtttggagctcggccttacttcctgccctggggatggaggacaggcagcctcctgtttctgagcctgtctgctgtactttgggctggtggcatggcctcggtgcctcagtcttcccacacgcaaagtggagcgacagctcccacctcatagggacgctataagaactagcgatgtggggaccgggctaagaggggagccggc

SEQ ID NO: 206893 - DNA, 1000 bp, Homo Sapiens
atccagagtcacatggccaggtacactgccatcctcaaccagattcccagccactcctcatccatccggactgtccaagggcctcctggggagcctgggaggccaggctcacctggagcccctggtgaacaaggacccccaggcacaccaggcttccccggaaatgcaggcgtgccagggaccccaggagaacgaggtctaactggtatcaaaggagaaaaaggaaatccaggcgttggaacccaaggtccaagaggcccccctggaccagcaggaccttcaggggagagtcggcctggcagccctgggccccctggctctcctggaccaagaggcccaccaggtcatctgggggttcctggaccccaaggtccttctggccagcctggatattgtgacccctcatcatgttctgcctatggtgtgagagatctgatcccctacaatgattaccagcactgaagtggaaatcctccactctggttccattggccccagacatttagctgtggatacagaactgtcctgtcaaccaccaccaccaccaagcccctgcccctaacaatggacactctgcttccctgcttcttctgcatccctgccttcccactttcaaacctcttgcccactctgctccaaacatgatggagtgataacatcggaacttaaccaaatcatatatgtctattttaatagacactgactgctccatgtcagcctggatagaggtatatgatcgtgtgccaagaatttatcccagactcccctgtgtgacagcttcataataaagttacttaactgtgcctcttcctccttcctctccccacacaggatggatgggcatctttctccttgaccaccctactctcccttcctcccctgatcacctcccctccctgctcttccctggtgatggacttctaacatgagattttttaaaaaaatttctatttcttttataattttgctgagttttcagggtttcttctgtaaataaaac

SEQ ID NO: 206894 - DNA, 851 bp, Homo Sapiens
gggaggggaaacattttccgttaaggaaggttgttgccagtggatttgactccaagggactagagtgtcgtggtgggggtggggaggggctgcagggtgatcattggctactgagcctccacagagagcatgtggtgccctgcctttgggagggtattttgctctcgttagttttgtgggcagcctcagattccctgttgagttgctgttaagaaatggagatttctggctctcattgggtaaggttttctgagttttatatcttattagatcacatccctttacccagaacaaatgcttcactgtcttctgattggcagtactcctgtggctttgtgccttgactcattttgttgtcttcagccttgaaggccccttcccacatggactgacatccactcatgtgcctgatccctgaagcctcccagcacccattcagttgcatccccagggcacaggactttgatctcttctgttgccctcgctaggttctccctggtgggttagtgctttgtatctgtctctctgcccctcactaattctacacccatgagaattagacattattctccttaaatatataaggaccatataatctgtatctttttggtgtgtgtatatggtatctggcacatggatctctgattaccagcctgacatcaacaaatcccctcagttacaacgtataggttaaacaaagcttttaaaagctcatgtggtatgacctcaaggttgctaacctggtcactcatggtaattagaaactctgattggcagctttgtatttcttgactaaaaacctaaataaactgattaggttttaggcgttctttcaaagaggttcttgagaa

SEQ ID NO: 206895 - DNA, 1000 bp, Homo Sapiens
tccagagcagagcccaagggagagaacgggtggcctggcactggggttggtggcacccattgtttgaggcactgtcatggggggcacgaggcaggtcggaagtggagctctcggcttcccatccatccgggtgcgctttctcccaggccttcagtttagcacccacctcctttgcacactgtgggtgagaaaagctttgcctgagtccagccggggactggtcatgcacatacatgacaagtgaggagcactggtgactgcctgccccctagccacagttgtgcaaacccaaacctgccagccttccttctcaaagtggaactgtttatcccatttgcaaataattgtttctcttgtgaaaagatggaccggaattccttccaatgatgtttataaaatcaggtctattttcctgtgtcttccgaaaaacagctcttgtttaaagcaggatccatctctgcataacttaggccgggctgaccatcatcttggatggcgtcgtccttgttggcgcagattgtgttggggggctggttgtttgtgggcgcctttaatattcaaaggggagaatactgttctgattgaggcattatgcccgctgagttgtgatattacatccatcatcttgttcaaataaatagcgccgtatctatatgtcggaatgaataaataaaagtgctgcagcagggaggttgggctggaaaccagaggcccacgatgctctttgctggctttgaaatgcccttgcaaagaagtattgaaaatttaccagcccacaatgagtcttttaaatctccttttccttgctaccaccaacccctgcaccaaccaagaatacgttgccagcagagttctttatttagttggcattggtttttattgaccctgattgaatttgaaattgtaaggctgagagaggatttgcaaaacatttgaatacattttgctcacggtattgttttgtaacttggaggaatttatctttttagccaatcaggtt

SEQ ID NO: 206896 - DNA, 1000 bp, Homo Sapiens
attattaggctcatacaattttattttgcttttttttttttaaccaaccatttaaaaacaataacatctctagatttccagtttatctggaaaaatctgaaggtctggcaacacggggcctgctttcccagttggaattgggcagtggtcatcctcttatctagggcatatgagcccaaatttgttccacctctccctgttgtaatatttgccccgccaccttcagtcatgggtgttacctgctggccctgcaggcatttggctgagtaatcactgtgctggggtgtgggtgatgggggaggacagttcctagttggtcatctctggacgtgaaaggtggttgtcaagtattcccatctccccagctgtttgcagtgtttcctgcacgatgaacaccaggaacctgggaagtgagaagaaccctgggatgaagtcatcctgctggaatgacctggctttcaggctgactgccacccgccccatggggaacctatctccactgctatggccagctatttttttcgagccaggctctcgctctgttgcccaggctggagtgcagtggtgcaatcactgcactgatcctcccacctcagcctacaagtagctgggactacaggcgtgcaccaccacgcctagctaatttctaaaatttttttgtagagacggtctctacaatcgcttgagcccaggctggtcttaaactcctggacccaagcgatcctcctgtctcggcctcccaaagtgttgggattatgggtgtgagccaccgtgttgggcctttgcccagctattttgatgcccagacctgcttcacctttgtgtatgatgccagggggcttcctgagcttggtgtatttttgttgtgtgtttgttttttaagttgggagtttttggggaaaaaaatttttctcctgacattcaatgccagacaacttatatgcatccactagctaccccggattgtaaatcctaggttattcttgggaaaagttgcttt

SEQ ID NO: 206897 - DNA, 1000 bp, Homo Sapiens
tgagaagtacatactctgaggtttatcctaaataaactgaagtctaggcaagtggctgagctaggtttgccatgaatcaatctgctgagtatatttcttggtaactagttcatctttccttaattcagtcaacaaatatgatatcaagtttagtaagatgatgacagttgtcatgtaatactccatctggaagattgtatgcttctcagcttccctaacttttcttaatctaccttaagcttcctttctgaaaggtttctgtctttcctaacagtctcttctttccgccagctacctcttgtgtttaagaattaaaggaagatgagctaggaatcaagaaatacgcagaactgattcctgtcactggcgccaccctgccacttgcccagagctgtggtataaatttttttaataggctgaaataaaaatatgaatagcattttggtattaagcattaaattgataaaggctatgagatacacctgctctcaaccatgttaattttttattattggtattaataaattattacttactaacatattaacaagaattgcattgagaaacaaagcatccacaggccaaatcttctgaatttcaaatgtttatattaatgcgttgtattctagaaaagtagaattgtcttaagtagctttgtaatataaagtcatctatcagcccattacacctattagaatgttttaacctttatttcccacttttttgtttctagactgagtgtacttggtctggtatttgtggcataacttacggaacacataagaatgatacagatactatttaatgatgacctaatacaagcttagatagctaaggtgaaagcttctatggccttaacattttcctcttgaagaatgtattttctgtaataaaatacagtggctacttgaaatctataaacttatgtgaggtctggataaatctgagcaactttcttctttgtgctccaggaacctacgcactatatatataaataaag

SEQ ID NO: 206898 - DNA, 1000 bp, Homo Sapiens
ttaccagacggacttcatcctggtgcgggagcaggacctgtccgtggtgatccacacgctggcccaggagttcgacatttaccgcgaggtgggcggagagcctgtgcctgtgacgagggatgattccagcaatggctttccccgcactcagcatgggcccagccccacggtgcatcccatccagagcccacagaaccgcttctgtgtcctcacactggaccctgagacgcttccagccatcgccaccaccctcatagatgtcctcttctactcgcacaggttccccagtgacctcctgctgaccagctcctcgggggagctgtggaggatggtgcgcatcggtggacagcccctgggctttgatgaatgtggcatcgtggcacagattgcaggtcccctggctgccgctgacatctctgcctactacatcagcaccttcaacttcgaccacgccctggtgcccgaggacggtatcggcagcgtcatcgaggtcctccagcggcggcaggaaggcctggcttcctgaggcccatgggcaacagagcagcctccctgctctcccctcgacccaggcttccaaagacttctctaagctatttccttaagctctggaacgagccccctgttctgctggggaccctcgttccgctctctgtatgtaagctgcgtgcaggcaccggcttttacgcggacacctgtgtacactcacaggtggagtgggcaggtgctagcctgactgcgtgtctgcccatgcaggggaacacggtgctcggggcttaagcccccaacccatcactccctgcgcagcctcggcgtttgcacagtccctgcctgaggcctgagccattccccaaaggcttcctgggccagctgccccgctgacctccgttctgcctctggtggggttgccttccctggccaggtgagtcctgacagtgcctctccctcctggggcctccaaggaaagtattttgacatctctctctcttctgtttttatt

SEQ ID NO: 206899 - DNA, 1000 bp, Homo Sapiens
cgctctaattaggtgccaggaggaagtggaaatgaattcagagccacacattctccatttttcagatcttaaacacagaagacactatcagagatttccaggtgaccacaatgagaaaagggcctttcgtcccactacatcttgcctgggatgcaaaatctttagtttgtttccattattgataaaataaacatatatagtacatgattttatgtcccccatgttcatttaaacaatttatagtgtttattatttgtctgattttggaaagaatacatatttactatagaaaacttttaaatgtagtaaaaaagaagaaaaagcctgctgaaattccctcactcggaagtacttattgtaaacagtctcttttgtgtatgtttgtttgtgtgtattactaaattgtatgtattttgtatatttaattttatatcctcttttattcactcaaaattatacctttagaattttctcatataattaaataacttttaatttataaacttgtgaaaaaatagctttataattttttattttggaaaaataattatttattgtccaagtattaccataaaaatactttaaaaaaagattatgctgctgacaaatttatgttagacttttttctttaatgatttcttcatatgtagttgttgtatagctgagcataggaaattaaaaagcctctttaaagatctgtactgtcttgaggttgatatttaaaggataaaagcaacactattttcatttgtaaaagtaattgacatttaacaaacatcgctaatattttggtttatattcttctggatcattcaatgccaatgtgtgtataaatgaaacaaaaatataatgaattcaacagtacattgcaaatatttttctagtaatagtatatgcagtctacatcatctcttctaatggctgtaagattttccattgttaggatagatacaaatgtatttaattaatatactgttattggatatttatgttgtaattt

SEQ ID NO: 206900 - DNA, 1000 bp, Homo Sapiens
aggacaaatgatttggaagcaaagataagaaggaagaagggtgatccgcccacttcggcctcccagtgtgctgagattacaggtgtgagccactgcgcccagctcttctagcctgttttaacagatatctgcaagaggcttggatcatgctgacctaacccaggaaattttaaatttactccagacaggaaccagaatcaacataacctacgagactttgattagaatctaacaggtacctgagtgccttttgtaagtaaatggctctagttgctcaattggccactgctctgccaccaggatccctagaagagaccagataaacctgaagcacgtagctaatcacttccatgccgtgatggaatgcagtgctgtctgccaacaagtttgagccagtctttcaagatgcatcctgagtggctaactgggcctgcatttcaagttgagccaagggaccatttgctaacgaggggacacacacatgttctgagttcacccaaaacacataccttattattttggggcttttcagcccacctgcctctgctaatcagggctcagctgtattgacccattagaactcagctgggttgaccaatcagaactaagtgagtttggagttttaattctcaattgaatgaacagacctgattgggaacctgcgtgggaactttggctattaaacctgagcattctttctgttctctggaagaaataatgtttaagttgctaacactttatgcattttcctaaaattgaatcaaacaactccttttgaaacataaccctgatatcagggaagtcgtacaacaccgtgctaaataattttatacctctaaccaaggtctgtgccctaatcagcaggaagtgccagagtgtctgtcacccattctccctcaagattgagaaatgaacaatgaaaaaagggggatttgaaaatgcagaaccagcccaatgtggttcaagtttgtgtaataaaataatgcgttgttttactgtt

SEQ ID NO: 206901 - DNA, 1000 bp, Homo Sapiens
ctgaatgattagtgtggaggacagagccacaggcacccatcctgatgccatctatacttatattagtccatttgtgttgctattaaggaatacctgaggctgcgtaatttataaagaaaagaggtttatttgactcacagttacgcaggctgtacaagaagtagggtaccagcatccacttcgggtgaaggcctgaggctgtttccactcatggagaaggggaaggggagctggcatttacagagatcacatggtgagggaggaaagcaaggagaggtcaggggaggtgccaggctgtttgtaatgaccagctgtcctgggaactagtagagtaagaactcattactataaggacagcaccatgccattcgtgcaggatcatccctatgacccaaacacctcctactagtcccgagctccaacactgggggtcgaatttcaacataaggtttggagagttaaatatccaaactatagcactacccttaatggcaactcaggctgatataaagtagcattccctgttttcttgaaaaattgacttcagagttggggattgcccatgctccctaattcccttcttttgagtgctcacatagcctgcttccgaattcttggtattttgctctctgtaaggtcatcattcaggtccaaagaagtctagaacaggatgaggtctcagtgggacctagaccaaggttcttgctcttcagaatcatcacagtagccatggactggactcttccatctcaggcactggctttgccatcatttttcagatgtagccttatcctgcccagaaagactcaacacctcaccaggggaagggatttcctacaaccaaaaccctactgcagttttcacttcttttttttttctttttgtttatatggtggatatttttactttatatagttttattcttatttttactgtttttcattgtttgtttttaaaagcttatcttattatagcttctttgtcccaggtttgcattact

SEQ ID NO: 206902 - DNA, 1000 bp, Homo Sapiens
acaggactcccagcaacctgtcctcctcaccaggcccctccagaggctccctggcccccagtgcgtctcccttttccctgcacaagaagtgggaggctgagtgcggtggctcacacctgtaatcccagcacttaggacggccaaggtgggagaatggcttgagcccaggagttcgagaccagcctgggcaacacagggagaccccatctctacaaataatttaaaaatgagccaggcatggtggtgcacacctgtagtccagctactcaggaggctgaggtgggagcattgcttgagcccagagggtcaaggctgcagtgagccatggtggcaccaccacactccagcctggatgacacagtgagaaaactgtctcaaaaaaaaaaaaagaaagaaaaagaaaaagaaaaaagaaaagaataaaaggaaatggtggggccctggcccaggagggagcttcccaagcctcgggcccctccctgaacttccaccccctttactgtaccccagagcgaggaggagggccgcctgtacttcagcatggatgatggccagacccgcttcactgacctgctgcagctcgtggagttccaccagctgaaccgcggcatcctgccgtgcttgctgcgccattgctgcacgcgggtggccctctgaccaggccgtggactggctcatgcctcagcccgccttcaggctgcccgccgcccctccacccatccagtggactctggggcgcggccacaggggacgggatgaggagcgggagggttccgccactccagttttctcctctgcttctttgcctccctcagatagaaaacagcccccactccagtccactcctgacccctctcctcaagggaaggccttgggtggccccctctccttctcctagctctggaggtgctgctctagggcagggaattatgggagaagtgggggcagcccaggcggtttcacgccccacactttgtacagaccgagaggccagttgatc

SEQ ID NO: 206903 - DNA, 1000 bp, Homo Sapiens
ccttagaaaggcctgcttacaaggctggcccttggctagtatctgaaaactcagctttcaagagggtttctgtctctctaactgatcagagtagctcactgtgcctaaaaagtttatgcaaacaatatgttttatgctgaactcatgctttatttctgggagactggaattttggtatgtgttaattagggggtgcctatgtgataagcctccagtaaaaacgctggagctgagcctccctggttagcaaactttcacctgtgttgttacaattcattactggggaactaagctcatcctatgtgactctattaggagagggtcatgggaattgagtttaatttttccaagattttgcctcatgcacttttttctttgctgattttgttttgtacctctttgctatagtaaatcatagttatgagtaccattacatgatgaatcttataggtcttcctagcaaatcattgaaactaggggtggtttgggggaatctcctgacacaggccctagctgtgagggtggagagaagttttactttttaataaagattgactctgtgattattacagtgactagacactttcggtgactgaactgacactatatttcaggcttaaagtgggcagaagtgccatggggctgatcaagttttcgtccagtgatagaacaactaaccccatgaaataagtctaatgaggtagtaaaaaacaaaaacaaaattgcattctggttacatcccaggaggcaagcttgtttggcacctcagtgccttgtacattattccattgaattcacatggtagccatggaaggcaggaaggacaaaggtttcatcctgctttacaagagatatgagagtacatggtacatgagagttaaaaagactttcccaagttcacatggcaaaaattgaagttcggttctccgatttcaagacctgcctgagctttttccactttgtcacattgactggttacttattgtagagtgatgagatc

SEQ ID NO: 206904 - DNA, 1000 bp, Homo Sapiens
ctttcatagctatctggatgtcacagaattacccatctttccttccagatgcatctttcagtctgattctatccatgctggatggtcatttggatgtcttgtgaatacagtagatatacacacatatgtgtatggatgagagagcaacagaattaaaacagaaatcaacatagtggatgagtttagggagtaattagattttgattagtcaaggatgcataatcttttgtaatattgtaatatataaggtaactaaaaaataaaaatatggggagatgatataaaaaattccagcaaaagataagaaaggaaaaggaacataaaacagttggaacaaatagattgttagtgttcatttatagatacagctcaaccacatactctttacaagagataaacctaaaatacaaggaaacagaagaaggtaaaggtaaaaagatggacaaaagacataccatacaaaaattgatgcagagaaggcttggtgtagtcagactgataacagataaagcaaaaagctttactagaaataaagagggcagtttatgatgataaaaggtattattcatcaggaaggcataacaaccctgaatttgtattatccagtataacactttaagtaggagatttttaatacattgttgttggtaactgatagaacaagatgagaccaaaatttaaaaaaaaatacctatataagacagcatacttaataaaattaaacctttgatgaggcggaccatgaagaaagagaagacctcattaaccaatgttgaggtgaagaggatatcacaaaagcttatgagaagatattataaaaacttgatgtcagtccatttgaaatttagatgaagttatactattagaaaactacaacttaacagacacagcagaaaatagaaaatctgaatagtcctattaaacatgatccttagtggaaagagctacccactagttttgaagtctttgggatttacaaaacaaaaaaaaaaaaaaaaaa

SEQ ID NO: 206905 - DNA, 1000 bp, Homo Sapiens
ttaaggacagttatttgaaagaatgaatttcttttatggagcttaaaggaatagaactagggttacaaagagacagctctttcagtcttaataattatgcaggataataaaaaatataaataaaacttaaaaacagagagcttttgggatcagttctataagtaatttcctaagaggttgtcaaagctggtataggcaccagctcattcaatgtgtttaaacataggctggggggccacttggcagccatgtggtgtggaacacaagcaagccgtgattttcatgaatggatctgttctgtgaggtctcttgttatgctaagagtttgtgattctggttttgttttgtgtgatcttgaaagactgatttatgatctctttccacttgtttactgctgtttactgctcagcccattgcaatatagcttctgcctccagccctgaaactaccctccaaagtagtaactttcgaaaaactaaatccgatggaaattttgtattctttatcttgacctgcctgtgaatctttaacatgttttatctcttcttatttctggaaactttctttatctttggcttccaggggaccaccttctttttgttttctttttcctctatgaccattccccctcagttcttcatagacttcttccaccagtgctgtgtgccccgcctcttatcttggtggtctcgtgtcttatcttggtggtcccatgtactcctgtgattttaattactttcagtgctgatcattcccacgtagtctttaatcgggtcctgattgcaggactgtcagtacaactgcctaccaggtatctccccagattcataaggttgatgtaaagattaaattacttagttaaggccaggtgtggtggctcatgcctgcaatcccagcactttgggaggccgaggtgggccaatcacttgaggtcaggagttcgagaccagcctagccgacacggtgaaacccctgtctactaaaaaaaaaaaaaaaaaaa

SEQ ID NO: 206906 - DNA, 1000 bp, Homo Sapiens
catcctcagacatccagtttgcagtactggagtccagggagaagccccagcagaaggcaagagcagagccgtgtggagcagctgagcctcggtgcgtttacctgctccaagctggttgccacagtgatggctgagtaaaacgtgggccaaaaggatgacaggagggttacaagaggtttcccatacacattcattccacaaatattatttccttctatatgccaagcactgtgttaagcactggagatagccatcaaaaagccaagccctgtccttatagggagacagacaggacgcaagtcaacaattgatataatattatatcaaggagaaataagtgctatgaagaaaataaaacaggataagggaaccgagggtgagcgcagggatggggctcattttgaccaccagggaaggcctctgaggagctgacattagacagaacaaatgaggaactgagccatgtgtatacccagggcaagaacattccaggtggagggaaccgcaggtgaaagacttgagggaggaacaagcttagggcattagagaaacaaggaagtcactgtggctggagcagagtgaggggaagaggcataagagatcaggagaggcagcctggcaggccctttgagtttgaattttattctgagtgtgatgggaagccactcgaagtatttaagaaaggttataggccgggcacagtggctcatgcctgtagtcccagcactttgggaggccgaggtgggcaaattgcttgagctcaggagattgagacacacctgggcagcatggtgaaaccccatctctaaaaaaatacaaccccaaaaccccaaaattagctgggtgtggcagtgtgcacctgcagtcccagctacttgtgaggctgagaggctgaggtgggaggattacttgagcccaggaggttgaggctgcagtgagctatgatcacaccactgcactccagcctgagcaacagagcaaaaccctgtctcatattaat

SEQ ID NO: 206907 - DNA, 1000 bp, Homo Sapiens
aaaagtcttcaaaattctttgtttcctgtattaatcacttctgttccagagtgaacaaatgttttcagctaagctatgtgagaatgtaagaataatatcctgcttgttctaaatagttcatatatttaaagtgtggtcagtatttcctccctgtaccttacaaacagaaaccaccctgggatggttgataccccttacaaagtcgatcttacccacacagactcctgtgtatgcgtgtctgtttataggtgtatatggagtcagtgttgataggaaggatgctctagaagtacttctgttgtttcctagaaggctatgagccagttccatggcatgtttaatgtataattcccatgtatcatgagaatttcactagaatgtcattaaacagcccaactacctcatgtgaaattggctgtggacaatctgtgtcagatgagaaatgtgttcagataaatttaatctggttaatagacttaacaaattaatgtctacataaagaagaaacatgatagaccagatgccaaaggctaaaatgtacatagatttccttggattaatttttaagtcactgtttaattccatgcctagtattcttatgaatgtttgtggtttcatagatttatgcactttgaatatctgtcacgtgcagtgttaatgttacctgttcttgtctctcagcattttgaatgagcatcataatcagagtagaaggcaagttaaactataaaagtgtcaagtggcttgttaacttcttaatttaatggacctttacttagaatataatatgttggagcctcttgggaccaaccgatgagcgacagtttcatgtttagatttgtattgtttctctgtccaagtccttattctctatcttgtggggaggggtggcaggggagggttttactttttttgcaaaaatgtttgaaaatatctgtcagattttatattcgttagttataataaacttatttttaaagtaaaaaaaaaaaaaaaaaaa

SEQ ID NO: 206908 - DNA, 1000 bp, Homo Sapiens
ttgatgaagaaaggcttttttccttcccttttttgggcatgggactctccctttgctctattttgaaactggtgaatattttctttgctccttttttttatcttcttttttttttttaagaaacaaggtctcgttatgctgcccaggctttgaactcctgagttcaggtgatccccttgcctcagtctcctgagtagctaggaccacatacatgtgccactgtgcctggcttctttgctcctcttgttcgtgttctttccccaatttttctagtgcccaagtccctactcttctactaatcatatcttaatccagatctgtcctgtctccacaaatgctccatgctacctaccaatgttatctatttgtcttcatcccacaataaagataagtagtttttcatcaagttgatctcagctaggtgttaagagcaatcttaaataattaatttatatttactaataattttcagaagcactttgagtttaagaaattgtccatatgtcatattttctaatgagtatcagaaatttacttaaattaaggtttatcacttgggtgagatctttgaaaatgatttgctaccgtaaggcatgactgcctggcctgtaaatctgacacaacttttcctaagttgtggctagttttttgtttttttcatagttttaagaattctaaaaatatagaattatttagctaccttaggaagtagagaatatcttatgttggggatattgcaaagaggatttacgtattaaattatagttagacttgatacctaacagtcccttttagcggtcaaattatgtgttcctttctgtgcttgagaacacacaggagctccctcaagttgtcattttttttttttccctccacagcttcagtgttatggcgtgcacagcctttgacacctggatgtgggaggtgtcagaaggcattagttggagggtaggcaacatagtgagaccccatctctacaaaaaaaaaaaaaaaaaaaaca

SEQ ID NO: 206909 - DNA, 1000 bp, Homo Sapiens
gaaatattactgagatgaaacacatttccaagggtatttaaactctcactctgccacctttctaagggtgggaggctggcagagatgctgcaatgcttgataatcatttggccacactgaaatttccaaagggagctcttgccggtgcttaaaaccaaaactcctggacacttagaaaattccatgaatctagcacaaaatatccattcttgcccaagtgtatcccctttctctccagcttaatctttttttttttttttttttttaaagcccaggccaagggtacttttaactggaaactggggaggagggaagaacactagcagggagctaagaggcaggttgctgggtaagccatcctgctcctacctggtgcctgtatctacattgctgagtgctgtgcgccagtgcctttccttcatctgcagatggagcccatctctttccactgggtgaggagaccctctgctactccaggggtaaaccttaaagaaggtgtcttgaagagcccaaaggacactcacgtgctaaggtgtccattttatgcatctttaaaatattttatttaaaaaaaaaaaatagccctgccctgtcttagtgccactaacggcccagttccatccattctgaatggaaaagcggagactgccagcactttccttggtcttccctttgtctcccatgatgtgttgttccctcatccctcccatccatttcactgtgtgtggatggatagcagagggtaccacgcagtccttgaggcagtcctgtgtgattccatgatcagttgtttttgtattttaactattcttccaaaccagcagatgtttggaaattaaggaaaaaattaaattctcatcaatggttgctgttatagttaaatcagtaaagatcttgagtatcaacaaaaaaaaaaaaaaaaaaaaaaaaaaaaaaaaaaaaaaaaaaaaaaaaaaaaaaaaaaaaaaaaaaaaaaaaaaaaaaaaaaaaaaaaaaaaaa

SEQ ID NO: 206910 - DNA, 1000 bp, Homo Sapiens
aggtaagaacagcaagcataggcaagactataaagaggatatccatggaaggtcaattattaacacttatcttttgtgatttttagcttgaggtcccagattttttcacattggtactttgggtgctcttctgggttgatggaagtgatgctgtcagcttccccatgtgtttacttgagtatatgaatccaagaatctgttccagtgaccttccctgctgtaggagtggaaagaagtacagtgtacttcccaatcttccctcccaatctgggcctagagagggagaaaagaagggaagtgcctttaccagtactaggtcccctggattgaatataattttatcattttgagattgttatataaatgaaagtatatagtgtttaaccttttgagattgactctttcactaaacaagatatccttgagatctatgaaagtttttcatgtatcaataatttgttcatttttattgctgcatagtattccacagtatagatgcaccagtttgtttaaccattcaccttctaagaggcaactgcaatattggcagttttgggatattacaaataaagctgcaatgaacatgtgtgtacaggtttttgttgtaaaaataagttttaatttttctggaataaatgccccaaagtgcaaattactgggccatatgatgtgtatttttaactttataagaaacagtcatattcttccagagtggctgtagcattttctattcccaacaacaatgtatgatctagcttttctgaatcctcacctgcattttgtactgtcactgttgtctattttagccattttgataggtatgtagtgataacatagttttaatttatatttccctaatggctacgcatattgaacacctttccaagtgattattatcacatgtatatattatttggtgaaaagtctgttcatgtcttctgcctactttctagtgatataataaactttattattttttgtaaaaaaaaaaaaaaaaaaa

SEQ ID NO: 206911 - DNA, 1000 bp, Homo Sapiens
cagcgaaacccaaaacttaaaagatctgaactttcagcatgcattctgattgctgaaagatttcctgatttagtgcattctcaaaagggctttcccataatctaaagggaaatgtaagcacctatactcttgtgcctgtgggcacttcaataataaaaaccaactttttaaactaatcatcttttatcaatgataaagttgttttcagtcccacactaggagagttcctttaagtcagctgatcaagcataagatacttccgtaaagaaataaactaagaaaattttttatggcttgagaaaattccttgaggccaaattaatatatttttctttgttattttatttgagtcattttaaatttgttaatacaaaatttaagataatttacagagacaatttatccagcttccttctaccttaatacaatgttttgtcttcccattatcctctcttttctttatctgttggtagatgtaaaaaacttccatttagttaatcggaggtgtgtattttttaaattgaaatgtgcccagccccttcagctcacacaggaaacatgaactcttaaaaaactgactagtaaatgcaggagaggtggatacctgatgagacacagcgaaagtgacctgtatacacattacaactctggagtacatattaaagtcgtgctatttccagtggtaaatgtctgacttttaagacattcttttaaatatttgtatcattgttaggatgttttaatcagttgttttttaattccatgtaatatatgtagccctcatcagatttatatcaccatatttctccttgtgtcctaagagaattgatgacaattcgtaaccataaattgttttatattagctagtatgtatatttatttttacccaatggctttatctgtttcccaaaatttgtttgggatttgttgaaagcattgtgtaacttctataaacggctattttcttgtaactgtcagtgaaaaaaaaaaaaaaaaaaaa

SEQ ID NO: 206912 - DNA, 1000 bp, Homo Sapiens
ggatgggctcactcccagcagctcccggtcacccagcagggatggggagggtggccaccctggagctggaggactctggggaggcagggtctttaatttggcagcagacaaaagccagttctggagtcacaccacagtaggggctcacaggggctctgactccccagctggactggaagccctgctgtccgagggtgggcagcggtgggtcctggagtgacccctttgagcaggtgcagggctaaagagcaaggcggaaaggccgccagcctgggtgagcgcctagggcataagggcttgctgggtgcccctgagaagggcgggtgatctgaggaggagaactctgattctaggaacgcttacacggcactgaccactgccacggggagggaggctgcccagcccgtggccccgccctggacatgggagcgcgcagaccttccggagagccgggaagcctgggcaggcacgaggcttcggcgcggctctgggaggttgggagtggcatccgatccttggccgggccctggtggcctccgtggccccaagatcacaagggcgtagcgaaggcgagccggcgatcgcacctcgtcccgcccaccctgcccggactcgcaacgccgagcttggggagggccgggacgcgcagccgccgccgagcgtgaccaagtttggaaacgcgcgcggggccgggacgctggctcggggggccctgccgaggagcggtcgccccctccgctgctccccgcgccaggcctggggccctggagggaggggggggggtctccgaggagtgcctcggtaccccagctcgagttctcgacgggtctctgagccttccccgcgccaggacccggcgcactgtgggggaagccccagccccatgtctgttgagtgttgctttgttattttttttcctcctatgtgtgggttttttcttggagctgtttcataggaattcctgtaataaacagttggtgttcaaaaaaaaaaaaaaaaa

SEQ ID NO: 206913 - DNA, 1000 bp, Homo Sapiens
acacctactatgcacccacaaaacttaagaataaaaaattttaaaaactttgttgtttaagccacctaatgttcggtatcttgttataatagcatgaactaagacaatgagtatactatgttgttatatatttttcattatatttcattttagaaatattttatggggctgggcatggtggctcacgcctatagtcccggcactttgggaggccaagatgggcggatcacttcaggtcaggagtttgagaccagcctggccaacatggtgaaaccccgtctctactaaaaatacaaaaattagctgggcatggtggcacatgcctgtaatcccacctactcaggaagctgaggcaggagaatcacttgaacctgggaggcggaggttgcagtgagctgagattgtgccaccacactccagcctgggtgacagagtgagacttcatctcaaaaaaaaaaaaaaaaaaaaagaaatatattatagtattataggccaggcatggtggctaaaacttgtaatcccagcactttgggagtccgaggtgagaggatcacttgagcccaggagtttgagaccaacctgggttacattgggagatcctgtctctaccaaaaaaaaaaaaaaaattagccaggcatggtggtgcgcacctgtaatcccagctactctggaggctgaagtgtggggattgcttgagcctaggaggttgaggctgtaagaatctgtgattgtaccaccgcattccagcctgggcaacagagtgagaccctgtctcaaaaaaatgtatattatgaatattttcttgtgccaaatactttataacatttttattgactcaataacattccatcatatggttatgtcatttgtaacttaaccaatctaccttttggattttttttttagtggtgtttactataataatatgatggtgaagaatttggcccacaagaaacacttattcaagcctacaattttccctgggcaagggaaggtcacc

SEQ ID NO: 206914 - DNA, 678 bp, Homo Sapiens
gaaaaaataagagtgttcaaagcaggcccggtcgcctgaataccgcagctaggaataatggaataggactccggttctattttgtgggttttctctgtctgaactggggccatgattaagagggacggccgggggcattcgtattgtgccgctagaggtgaaattcttggaccggcgcaagacgtacgagagcgaaagcatttgccaagaatgttttcattaatcaagaacgaaagtcggaggttcgaagacgatcagataccgtcgtagttccgaccataaacgatgccaactagcgatccggcggcgttattcccatgacccgccgggcagcgtccgggaaaccaaagtctttgggttccgggggggagtatggttgcaaagctgaaacttaaaggaattgacggaagggcaccaccaggagtggagcctgcggcttaatttgacccaacacgggaaacctcacccggcccggacacggaaaggattgacagattgatagctctttctcgattctgtgggtggtggtgcatggccgttcttagttggtggagcgatttgtctggttaattccgataacgaacgagactccggcatgctaactagttacgcggccccgtgcggtcggcgtccaacttcttagagggacaagtggcgttcagccacgcgagattgagc

SEQ ID NO: 206915 - DNA, 1000 bp, Homo Sapiens
gtaccaaatagatcctggcaaaggaacaggcatggaagtttccagagcacattcccatgctttatctctcttacaggttttggaatcattttcaaataaaactccccctcacaccacccaactggaagtcattcctgatgtgctgtgagcagaatgggcctgtgattttgcaagaatgcaaaaccacatgaaaatttcaagaattcactgatctgatgcaaaataaaaatttatcattacatcttgaacccaggaagcttacagcaaagagactatgctttatgacgtcagcaatagataattccacgttgcctttgtgatttgtatatatagcttacatttgtggatcactacatagccagattcaaaaatattttacttgttccatccacagttctctacagaaagaaccaatgaacccaataggaacaaattctctgtggaaaacaaagcatagctgtagtagatacgaatccaatcacagaggaaacaggaagagaaaaacatccaagactacagtgaaaactggaaatggtctgttttcgtgatattcgtatgattaagatgcaaattttttcttaggaaaatgtgattgttaactagcattctgttttacatgttgacatttctaacacacacaccactgatttgaacttcaaaatttattttctgattatatatgctaggtctgattctgaagatacaagaattcaatggtggaatttgtctcctgaaatttctagattcataattagaagtgtttattaccaacttctcacttagattaacatcagtgatgtttgattattctggttaaccgctcacatgcataacaataatgctagaaattcaggaattataattttgtgatttatactgtgtggtaaattattcagttctcactgcaaataaatataatgtatatcaatgtaatgtaggtcagaatgtctatggtgagcaaataaaagattattttaaaataaaaaaaaaaaaaaaaaaa

SEQ ID NO: 206916 - DNA, 1000 bp, Homo Sapiens
ttgtgattccagttgtcgacggtcctatgtagacaggtgatttgtgagtctttgaaaggaagtagtgttcaccaagagccagaacagggtcttaaccagttcccgttttgtctgggttaaccaactggtggattaacacgatgacacagacatagtggggagaatgtgggctttggagttggattgtctggatttaaatccagagtccaggtcattgtatacaaatgaccttaggccagttgtttaatttttgtgactcagcttcttcttcatgtcagctctatcctggggctaatgataggacgacaaaggaatttttttttttttttttttaagagggagtcttgctgtgttgcccaggctggagtgcaatggtgcaatatctgctcactgcaacctctgcctcctgggctcaggcgattctcctgcctcagcctcccaagtagctgagattacaggcgacaaaggaatttttgaagacaaaatgaaataatgcatgtgaagagcttaaaacaatttgcacatatgaattatttaataaatgtggttcttactactgtttgtaggaagacatttgaatttagtaaagcacataaaagccttttacatatgtatggataagtccgtaaacaaatacacacttattagtgatgcgggtttagaaagagtatatttcttggtggcagaagttccaaagtcaggccaggcatagtggctcacacctgtaatcccagcattttgggaggctgaggcagatggatcacttgaggtcaggagtttgagaacagcctggccaacatagcgaaaccccgtctctactaaaaatacaaaaatattagccaagcatgatggttcgtgcctgtaatcccagctacttgggaggctgaggcaggagaatcgcttgagcccaggaggcggaggtttcagtgaactgagatcaccccactgcactccagtctgggcaacagaggaagactctaccaaaaaaaaaaaaaaaaaa

SEQ ID NO: 206917 - DNA, 1000 bp, Homo Sapiens
cgcttgctgccagttttggcctgtgagctcactggcctcagtgccaggtaaggacagccaccttcctgggaagaagaggtgaccccgggtctggtggatttcccacaggggccgtcagaggatgtccacagaggcagagcccttggggcctgtgggctgggttgggctggtggatgtggggcctgggacttctccagaagcttacttcctgctgcatgctttgccgactgtccttccacctctaagtgtccatcgtgcctgtgggggctgctgcaggctcctgctccgtcagcccacctgctgctgcgctgctctgggagcgagctccctcatggcatctggaacgctctcctgtcctccctgtgctcagggctggagagagggtggcggggctgcgggctccccgggccttctgggcccagccctgccacctgggcccacctcctctcactgtctctggctcacgcttcccgggcctggagctgggacctgcccataggcatctgaagacacgtcagcctcagccggggggagcccttgcttgacgctctctggcctccgggctgcctctcgcgcccgctctgggcccgctcttcttctcatgatgtctttcctttcacctcctgcgttgtctgacatcgtcgctctcttcataaattgtagcgttttatgttttcgttcataggagtgttttatttgatttttctttattttaaattattacatttaagttctttttattttatgctctaggttttgaagtttttctaatttcttaatttttttgttgttttttgttttgttttgtttttgtttttatgtactgtattttcagtgttttaaccaaacagttgtggctactcatggtgaggaatgaccgctaagagtttgggttctttcagtgcatttggaggtcactgctacacgttgatgtttaggaggttgagaggtttgcctttagtgtccacaggatgaaatgtccgagtcaggccagtcctcg

SEQ ID NO: 206918 - DNA, 1000 bp, Homo Sapiens
tctgcacagactcagtgatctgcaggtgcccagatcattgctatggagggtttcgctcatggacctgggtccccaacactctgccagctgaccatgcccctagtccgagctgagcatccccagcaaaagctcaggagtccaagcacacacagccttcaacagctcagaaataactttccgaatgggttttagaaaataacacgagaatgtcttaaggaacagaggaacctcctttttttttttttttttttttgagatggagtctcactttgtcgcccaagctggagcgcaatggtgcaatctctgctcactgcaacctccccctcccgggttcaagccattctcctcctcagtctcccgagtagctaggactacaggagtgtgccacctcgcccggctaatttctgtatttttagtggagatgtggtttcaccatgttggccaggatggtctcaaactgctgaccttgtgatctgcctgcctcggcctctcaaagtgctgggattacaggcatgagtcaccgcgtccggccaggaacctcttaacttcttttgtgattttgtggggaacaatctgggcaacagtattgaactaagaaaggttttcaaccctgggcaggtcaccacacttcttggtactcagcccccacccagtgatgctgtttgaggctgtgcacctgctggggaccgtgtgtggtgggaggggctccagagagtgctagagttaatgcttttctgtttagaagactatatgcttctcatggcctcttggagttcagcagggccttagaaagcatctcccaaccacagagacgcgctgcctggctttcctgatgatgatgatttggcctgatcttggacacctgcggtaatagagagctcactacccctcacgaggttccttgcgccagcgcggggaagcctccctccatctgcaggtgggcctcccctgtgctggtcagctccctggtgtgtgttacacaggacacagagaagatcat

SEQ ID NO: 206919 - DNA, 1000 bp, Homo Sapiens
cccgaggatgatctttttgatagactcaatgtgagtagatgaagcacacaatgttgaagggagtcccagccagagcctcacagtacctaaaggggagggttgctggcagatgacttgggctctccctttagcctggcctgctctgtggcatcccatacactctctcttcctccctctgagtccacggtgaatctgtagtcaagagaagacacatctgctgcagaacaactgctaaagcactcagggtggggggtagatgagccctaccttttatccttccctgctcctgcagagctttcccttcactgaatgcccagccacccctgctggagacccaaaacctgtccctgatatcttaatagggaaggacaaatttgctttattggtttgttaagcccaccaacctgggccaggcttggtggcttacgcctgttatcccagcactttgagaggtcaagtagggcagatcccttgaggtcaggagtttgagaccagcctgggcaacatggcaaaaccattatccaggtgtggtagtccacacctgtagtcccagctgcttaggagcctcagaaggattgcatgagcccgggaggtggaggcggcagtgaaccgagattgtaccactgcactccaggctgggtgtcagagtgagaccctgtcatacacacacacaaagattgaaatacttcatagagaggcatcatgtaaccctgtattctggaattcttttcctctttccctaacttcccacttgtagggcaataaacttgacaagattgtgactgcactggcataaattactcctagggctgccagaaggagcaggtagtatagctttgacctaaatctgttgctttgtctcctccagactggtattctgaataagcatcttcaggatctcatggagggcttgacagccaaggtattccgtacatacaatgcctccatcacgctacagcagcagctaaaagaactgacagcccgtaagtattgcttggcc

SEQ ID NO: 206920 - DNA, 1000 bp, Homo Sapiens
attattgtcttacaccattttctgcagtgtttcacttaagccaactaatactctgaccttgatttgaaccatccaacagagagtaggaattccctccacaaagcatgttactcattaacatcttcctttacaagtctcttgatgttcattcacaaactcaattacctttttcctccatcaacctcaattatttgcatcattttccatgggcctatgggagtatttaattgaatacatattttttcttctcaaatcaaattttctgaaaaaaatttgtttctatgaactgtattttaggtatattccaggttggtacaaacactaattttcaggggtcattatgtcaaagagcccatccacaccccatggcctacatatgtcaaaggattgttctttattcatccactttctatgaattccacacacgggagataaacttctttttcatccatattaccagggttgtcagggagcaacactgaaggtcacagtgttcagtgaaaccttgccataacttagactaaacacgtttttcccataattttacttcttcaaattctttctttttctttctttctctttctttctttctttctttctttttctttctttctttctctttctttctctctttctccttttctttctctctctctctctctctctttttctttttctttcttttttttttttttgacagggtttcactcttgtcacctggctggagtgcagtggcacaatctcggctcactgcaaccttcacctcacaggttcaagcaattctcctgccttagcctcccgagtagctgggattacaagcacctgccaccatgcctggctaattttgtatttttagtagagacggggtttcgccatattgaccaggcttgtcttgaactcctgacctcaggtgatccacactcctcagcctacctaagtgctgggattttacaagtgtgagccactgcgcccgacgttgagcttgtttctttatgaattc

SEQ ID NO: 206921 - DNA, 1000 bp, Homo Sapiens
atgaaaatcactgtggtagacaaaataatggcccccaaaagatgcccatgcccttaagccctgggatctatgaatgttacctgacatggccaaggggaagtaaggttgcaggtggagtaaaggtagctaatcactaatgttaaaataggtcaatgagcttggttacccaggtgcatccaatgtaatcactagggtcctgaaaaatggaagagtcagggggagttgacgttagaaagactcagttggccattgctggctttgaagatggcagagggccatgagccatagaaatgtgagcagcttctagaatctggaaaagtcaggaagacaacattctcccctggagtctccagaaagaaatgcagctcctccaacactttcattgcagcctggtgatacctactttggtctgataacttgcagaatgtaagataatacatttttgtttaacgcattaagtttgtggtagtttatcagcaggagtaggaaactaatgcaaccactaagagaaaatttttcttagtgtaggaaaattagaatagaggttattctcaggaattgcaacctgagctcttaatctttctgacattttatacataagaatagaactttaaacctagctaatgtgtattttaagaatgaataattgatgcaccattattagcacatatctatattttctcctatttgagaacagattttcaaaaagcaatatgatgattcacatggcacactatgtgtggatttattgactatccctgtagaacagcactctaatacatcactaaaacacagaaaacttataatacaagcaaacattatagcagtatgagagaaatggctttctgtcacacttagcctagtctcagattagataaaagaggaaaacaataattattccaaattcaaattgtgccaggatgtatctgtagcatatgtccttgaaaacagcaaagggtatataatttgatattaggaaacaggacaagctctggaattc

SEQ ID NO: 206922 - DNA, 1000 bp, Homo Sapiens
caatgacaaatgcatggtatgaaaaccccgcaaatgtcaagtagaatatattatacttgaatgaaattatgagttgagagtaggaaatctatgtgtaaccaagcaaattaaataaagtttatgaggaaattatactgctaatattttattatttggcaagctattcagtggaacacaaagatattcttaatgaagtcgaaaatatattttaaaatgtgactgaagtggattaaaaaataatgaggatatgaataactttaaaaaatattcagggataaagagagaaaaataaatttagatttcatacatacataaaatatatttaaaaagttgtgttttttggttgcttgaataaaaggagcagatatttaaattccatgcctttcattttaaagtttaggaaatgcttatagctttccacactgacatttatactaacacagttaatctaatcgagggataacaaaatcaaaacaagcagaattctcttgaccaatctattttcttgatttttaaaagtcagtgtactctcaaagaaacaaaactattattcatggattctgttatttgaaaatatttactgatcatttttactttacaccaagtgatctccagctcgtggaaaaatatgtaaagttgcccagcttcattaagcttaaactcttctgaaggagaaaagaagcaatggagtagggacattaaaggaggagtgtggtgatacggctgagacttctacttgcacactgtggtagctgtgtggagactggattgaaaaaagggcaatgacagaagcttaaattagtatcaaatatggcaatcttataattttaagggtccttgaaataagaatgtataatagttctcattatttcctcaagaaatctctgcacttggccttgtgaaggaagcgctatagttaccaagtggtgggggtgggaatgtgaatttggaaacaacatttggaattattacactttaaaggtaaagctggcaggaattc

SEQ ID NO: 206923 - DNA, 1000 bp, Homo Sapiens
cactttaatattttgtacaaatgaaattactcattcctcctctcaatctgcttttatttttactttttgataaatctgtccagaactatttagcattgaaattagataatggttagctaaattctgttttctcaggccatttattattcacccagattacattctgaagaggctttaactcaatatgttaatacatttgattatcaatataagcattatataacttctctacataagatagttgaatcttaccaacaatgctagtgtaatgtcatattgcagtatgatcatgttacaattcagttttattacagaaaaagttattatgaatgatagagctatttgttacagctactcaacataattggttcttgtctttataccatatagtattataaataagtgttattactactcagcatgatttgattatttctgggtttctaatgggttgtggacttagccagtcaccttgtcttagttcacaggccctaattgacaatggtctctactatatgctgtcatacaccaggatacactcccttcctatagacaagacacaagaataagaatagtttatatctctgctacctgtactacaggatgtcttatccttatctattcttggggcaatggcaataacaatgaattaatataagttatgagtgacctcagagatggggtccctaagattatataaatgtgtccttctgcatctaagaagaaccattaccttatggttatttaggcctccatctgtgttaaagtgataaagtgatgctattgagtcataatacaagctcattaccagtgttgggtcctagcattatccatcattaattgttgagtctaccttaccaagttcactaaaacttcatcattttttccaggttgaatccccatcccttcctctctcatagatgagaattccctctaatctatttattttagttaataaatcttctttccttaaaagccattcatgattaaaaatgaattc

SEQ ID NO: 206924 - DNA, 1000 bp, Homo Sapiens
tatctttgttttcgttagtttcaaggagtttcttgacttctgtcttcgtttcattgtttacccaaaagtcattcaggagcagattgtttaattttcatgtaattttatggttttaagatattgtcttcatattgatttttacttttattgcactgtggtccaagagtgtggttggtatgattttggtttttttttaatttgttgagaattgttttatggttaatcatgcgggaagttttttagtaagggccatgtgcagatgaaaaaatatatatagtctgctgttgagtggagcattctggaaatgtctgttaggtccatttgatcaagtgttgagttcaggtcatgaatatctttgttttctgccttgatgatctgtttaatactgtcaatggggtgttgaagtctcccactattattgtgtggttatctaagttttttcgtaggtctctaagaatttgttttatcaatctgagtgctcagtattgggtgcgtttatatttaggattgttaagtcttcttgttgaattgaactctttatcattatgtgatgcctttctttgtcttctttttggttgttattggtataaactctgttttatctgaaattagaatagcaaccttgcttgtttttgctttatatttgcttgatagatttttctttattcttttactttgagcctatgggtgtcattgcatgtgagatgggtctcttgaaaactgcatgtcattgggtcttgctttattcaattgccactctgtgccttttaagtgtggcctttagcccttttacatttaaggttaatattgatatgtgcggatttgatcctgtcatcatgttggtagttggttgttatgcagactggattacatagttgctttatgtcggtggtctatgtacttaagtgtgtttttgtggttgctggtaatagtcttctgttcccatgtttagcacacccttaaggatctcttgtaaggtaagtctgatggtagtgaattc

SEQ ID NO: 206925 - DNA, 1000 bp, Homo Sapiens
agttgaggccctggtgacttccaggtgatgctcacatatctaatgccaagacttagctctcagattctgtggttccagaaccctggtgtccactccagggcagcatgagttcatgtagagtcagcgaagtttccccctccacactcacactccccacccacaaaattccactatctcttcagcattcctcctactttgcattcctttcttcagtccttacttatttcctggtcccttttagtccacagacaggtaggaagccacaagcagcctggccttttgactctccacttgttctcccctagggtccctccttctggattgataagggtgggaacattcaagctaccgataagacctctgcacccagctcctgtccctccactccctacggctcagctttgaagttccaaaaaccctgcctctgtgacctgattgtgttatcttcataaccaaggtgagaaaacagagaatcactttatggtttcctgtaagcagccttctccaaagccatgatttcctataatgggggtggaagaagatctggggtttctcagaaattacagcactatctggcacagggtaggtgctctaggagctgttagagcagtggttctcaaccagaggcgatcttgctccccaggtgacatttggcaaattctggagacatttctgattattataacttgggggatgagtgctgaaggcatccagtggatagtggccagggatgttcccaagtgtcctgcaatgcatagaacagcctagcaagcaaagaattatctggctcaacacatcaatagtactgaggttcagaaacgctggtttagaaaatggagagaagaggaatggaaagagagaaagatacttccatgaatataaagagtgaggcaccatggcatttttgctctgctgctcttttaatcttcacgtatccacacttcaaagagatgtcaaaaacccgtcatggttctaaacagtatacaggaaaagtaagatc

SEQ ID NO: 206926 - DNA, 1000 bp, Homo Sapiens
ccaggctggaagacgaggagaaggaagagacaccactgcatgctggaggctggagccagagcctgcgcctccgtggcttacctcgctgcagttggtggtgacatcagagaccacagctcggctacagtggtagcaatgtggttgcagtgagccaagattgcatcactgctctgcagcctggcgacagagcaagacaccatcttaaaaaaaaaaaaattgacccagtgttttgcatgtttcagaaaaacaaatgataccattatttaatatgctgcagtaactagaagcctacttataaagttggtggcaaataagtcattggtatatgttaacttcctataatcacttacatgttcctaagagtcactttgtgtatttatataagaaggtcagcatgtaaatgagtatagatagagaaactttttgttgaaaagtaagaaagcttgtctcccttttcctagttatgaaggaaccaccaccacaacaaaataaagcatatactttgtttataaccctgaatcatgatttatggccagattatcctagcatccaactgcctaccttggcatttatcagttgaaatgagtccagagaaaggaattattttttatatatctgctgctcttgaaggagaaaccttctttagaggtcacttgtaagaacaggtgcccaaatcccctatatccaaggcactctgggctgcctgggaactctacaaatcacagttttgaggggttcacttttctggttgaaatttatcatagtttatatgatgaaaggatgacaggtagatactctttaagagttgaggatgtgttatgttaccaaggattgtaaatatttaatgagaaaatgagttagagtttcaataatattgatgggacctattatcactcactttcatctaaagctcagtgttacttcaaagcataaaatcaagcaaacatcccatgattaatttagtttcttacactgctgtgctttgtgtttcattgaattc

SEQ ID NO: 206927 - DNA, 1000 bp, Homo Sapiens
aggcttggctcacgcccccagggccaggaaagcagacacacgggggctgaccctcctgctacacccagagaggagggggccgagggcccaggtgggcccagggacgtgagcagagctgtctgctcaggagggcaggggccaagcctggttctcagacatcagggcatccccaccctcccctgcacattctccagtgactcagtttccccaccactttgcttcccaagcaacacctcctattgtttccccttctcggtgagattcaacacactcattcacttatggaaagttctgcagagccaggcaaaaaatcagaggtcgccaactttgtttaccccagccatcctcagggttgtggcaccaacgacccttgctctcaaaacgcccttcagaacagaacccactttggagaacctctgcaggtgacccaaggcccgagtccactccctgcagctgtgccagccttcggtgccccaccccacacagacacacagaggaggctgggttcctctgagcccacaagccaccctcaggaataagaaaatacaggtggctgtggtgtcggagtggggggtctctcctctgcagagcctcacttgaggaaggctgagatccaggcctgccctgccctggggttaggggttgcccaccatgatgagccccatacccagcaacctgccgatgggtgagaggagcccgcggggaggacaggggctcactggaactgcagccagacgcgcacacaggggttggggcagcgtctccagaacgacccccctgcctgagtgtcgtcccggcaggattcacacaaggacacaggttacgaggttggtgccaggccagggcacctgggtcctggcatcaagtacccaggagcagaggctctggcaggtacaagacccctgaaagcatcccccaggccagaggactgggacagggaccagtcaggcagcccaacaggaggagcccttttcctggggcccagccaggcagctccatg

SEQ ID NO: 206928 - DNA, 1000 bp, Homo Sapiens
agacgttggcggctaagtcgaattgtgttccgtcatctagccgataacaaccaaatgtctggcattcagagagccatgtggtaggaacaggatttgagggccaactgtcgaagctactgggctaccatttactaaggacatttttttaattaaagtatcataagagcattctttgttgacaattcttgacaaaacctggcttatttatatgtatttaaaaaaaatctgtattaaaagcaacaattacacagtagcatatgcttgtctcaaagattaagccatgcacgtgtaagtacgcacggccggtacagtgaaactgcgaatggctcattaaatcagttatggttcctttgatcgctccatctgttacttggataactgtggtaattctagagctaatacatgccgacgagcgctgacccccagggatgcgtgcatttatcagaccaaaaccaatccggggcccccgcgccccggccgctttggtgactctagataacctcgggccgatcgcacgtccccgtgacggcgacgatacattcggatgtctgccctatcaactttcgatggtactttctgcgcctaccatggtgaccacgggtaacggggaatcagggttcgattccggagagggagcctgagaaacggctaccacatccaaggaaggcagcaggcgcgcaaattacccactcccgacgcggggaggtagtgacgaaaaataacaatacaggactctttcgaggccctgtaattggaatgagtacactttaaatcctttaacgaggatctattggagggcaagtctggtgccagcagccgcggtaattccagctccaatagcgtatattaaagttgctgcagttaaaagctcgtagttggatcttgggatcgagctggcggtccgccgtgaggcgagctaccgcctgtcccagcccctgcctctcggcgcctccccgatgctcttgactgagtgtcccgggggcccgaagcgtttactttg

SEQ ID NO: 206929 - DNA, 1000 bp, Homo Sapiens
cacgcctgtaatcccagcactttgggaggcccacgtgggtgaatgacaaggtcaggagattgagaccatcctgcctaacgtggtgaaacccagtctctaccaaaaatacaaaagattagccgggcgtaatggctcacacctgtaatcccagcactttgggaggctgaggtgggcggatcacgaggtcaggagatcgagaccatcctggctaacaccgtgaaacccagtctttactaaaaatacaaaagattagttgggcatggtggcgggtgcctgcagtcccagctacttgggaggctgaggcaggagaatggcgtgaacccaggaagcagagcttgcagtgagctgagatcgcgccactgccctccagcctgggcgacagagtgagactccatctcaaaaaaaaaaagaaaaatttgttttcagatcaattttttaaaaaagagctgccatttatcaatggcttgttattggccttaaattttgctagatacttacacatatgattttacttgatacccgtgaacattttatgaggaaagtttaattttacccattttacagatgagaaaatgggaataactgagttattggcacacggtcacacacaaccacggttgacagacctcacgtatcacctgttttttttttttgtaaacagtaatcctggtgccatttctgtaattataaacattaaatcagtgcttagcatattaatctcggctccctcggcttctcaaattgctggaattacagtcatgagccactgtgcctggccggtgttttcttgttagtctttaaacattcaacagagtacagagggtataatatgaaacttttggttttatgtttaacttaaaaggtaacttttggaccattttagatgctggaggtcatgaactcacaaaatatttgtataaagaacaagatagaaaatatttcaggctttacagagcccacctaattggacggttatatacatcacctgattttgtttttg

SEQ ID NO: 206930 - DNA, 1000 bp, Homo Sapiens
ttacattgaaggaaactgacagtgatgatttgcaggagacttttggttataacttctcctttcttctgtggggcactcgaggtaggattcctctataatattaggaagtcataaaaatgcaaaagtcctatcagacacagagcaagatttaaaatctgaagaataccatgtgcttccatctcctgcagttgttttgaagtacataaatcacctcttggtaacggagtgccaaccttgaggggctacgcctcacagacagccaacaagcaagtccacctttgcccacattcggggttattgcatggcgaacagtgaaggggcttccagggttttctggcacactggccttaaaggctgttgtaaggttcacatgagatcattcacaaggaagcattatgcaaattacaaattagaatgcgctactttggctttgattttaaatctctcaatctggcttagtttaataataatgataatagctaacctttaagcacttattatttgacaagcatacaaacagctgcatacattgtctaatgtaaccgtaatgaatactctatgacttgtacatgatattatcatttaaatcaaacagagaagaaaaaataagacttagagggtttacacaccttgaccaggccacacagctagtaagtgaaattctctctgtaatcaccaataaatgccttggaaactatggtataatctgaaataatttaatacaaatccatttctggaataaaaggcctaggagcttttttctgtcattctttcctctcacaaatatgcatttagcttcttgccatatttgaaacctgtattttctgtaacagtttctaaaaaattctcttttttaaagaaatgtttgttcacatattattgacatggcctctcatgttggtttttctgtgaaatatctgtttaaagaaaaagatgaaaaaaatggactgcaattaaagtaaatttttttaaagcctatgaaaggaaaaaaaaaaaaaaa

SEQ ID NO: 206931 - DNA, 1000 bp, Homo Sapiens
ataatcttatttggggaggaatgggtgggcacagtggggagaggcctccaggaatgtggggacttccagagtgggctccctaaacagcccctcacatttccaatcttgaggttataagctgtagctactgactaattttcgggagctggtgaggcaagcctcagggcagtgccagcaccctgaaagtcagtggctctgcttggcttctgaaaacagatcaactgtcagatatagctggagctacatcctgcttcctttgggcctggggctgtgcttggcttgaaatctgtgtcccctgcccccactggcactttgtccagtcatcgggacctttgactcagatttaggttaagataggaatagggtacctttttcctttttttttttgagacggagtctcactctgtcgcccaggctggagtgcagtggcatgatctcggctttactgcagcctctgcttcctgagttcaagcgattctcctgcctcagcctcccgagtagctgggactacaggagcatgtgccacgcccagctaattttttgtatttttagtagagatggggtttcaccatgttacccaggatggtctcaatatcctgagttcatgatccacccgccttggcctcccaaagtgctgggattacaggcgtgagccaccacgcccagccagttttcctattttctgaattcagaattgacttctctgggaaaactggagatgagaatccgcccagtgctctgatgtccggccaccgccttttgaattttagttttggcaccaggagtaccgttagctttccccttcctctggcccatttgactcatcagcacaatagggtcacaaccttaacttttaatttctaatctggtttactgtctttagggtgtgtatgaaataaacattgacaggctttctggaaaaaaaaaaaaaaaaaaaaaaaaaaaaaaaaaaaaaaaaaaaaaaaaaaaaaaaaaaaagaaaaaaaaaaaaaaaaaaaca

SEQ ID NO: 206932 - DNA, 1000 bp, Homo Sapiens
aaatgtcatctccagctgacatgcttccagcatgtctgttctggtcagaaagcttacccaaaatagtttacaattttattttgtactacgatatacctgctactggacacgcatctgcagattttaggtgcatgctgatctggcacatttattctcatggattgtatgtatggggcattacgtgctccctgccttcaaggagatgctgaaatccacaacaacttgaagggttagacaaacttactgttttaatagctgttataggtacaaattatcctagccacttgattgtcagttgtggctaaatatgttgaataaggaggaagctactgagcccagagaccctgggagaggacatgtggatttgatcggttgtccttgctccttgtaattttagcttcctgcacctgatcactttatccagagcaggaacagctttaaactaatcttgttttgctttaaatgtaaaccatctaggcttctgaattagtgcaaaaaagaaaaaagtttagtaacttcagttaaatctctaagactcacatctctcctgcatcagcatgatcatgatattccccttctcttagaggtgccaccaacggtgacctaaaaacggaggcagcaatgccctgaggatggcatcctgttgctggtgtccacaaggtgatttccttctggatctggacattcttgcttgatggactaaatgcagccatgttttgctttcggcctttccacattaagtctctgctctcttagggacaaatgttatggagtctttttgtgtattaaggacactttcttttgaaagccatgccaggggttatgctaaacaaagggcataataggcatcattcttgtccttaagtagcaaccaattgggaagtatttaatgggcaattggagggtgtgttggagggtaggggtgagagaaaaagcatatagtcagggttcttccagtgcctaagagtgttgctgaggtaggtaatataaacaacagatc

SEQ ID NO: 206933 - DNA, 1000 bp, Homo Sapiens
gttaaccttgagcccaataggggcttcagaactctgctgattgctagtttattaaacatattttaaatatcattactgattataattatccccaaattccatgagcccctgcttgctcttatcttcctggccagtaggtggcagcacaggagcattcaaggttcagggttgcaggaaaaaaggcgcaaaacgttggtggttcagttaaactgcaggacccagtacgtgggggaatttgggaaaccttttcttggctctgcggtggtgccctgcttaccaccaggcacccacccacacaccacatcccagtgagcgtgggcaggggagaccaagggaagaggatgactccacttccgggagctcatttggggaagacggcatttgggggtatgtcaggtgctgtcctggaaagtttttccccaaacctgggtcacacgtaatgagataatgcatttatctgccctgctgtaagtgcttagccagtgttagctgttcatacacatacttcacttcatttaatccttacaacgaaccattaggtgagtcttagcagcccattttacagatgagaaaattgaagctcagagggctggcttctgttgtccagcatcacatgacaagagaaagcaatgtggggctttgaacccaggtctcaaagtccagctgtgttctccttctagctggcaagcggattgatgctgaacctttatcaagcaacacacacagatacttctcaaggagaatgtggggctatacctcccagggcacaggagtgggtagacccagagttttcctgggggaggtgtgatttcagaggaacaaaatcagagaccagggtgtgtggagggaggggctgttgaggatgagagctggtcccagctgctgggctgggaggcaggagaccagacttgcatttcgtttctgctgtcccattgctgtgtgaccttgggcaggtcctggccctctctgggctttcctttcctcatctgtggatgagatc

SEQ ID NO: 206934 - DNA, 1000 bp, Homo Sapiens
agcgagactccgtctcaaaaataataataaaaaataaaacgtgcaagacaattggtctagccaattgccctcagcaccaccccgccattacggccagggtcagagcctagggctgcccccaagctctgtctagcaccagtggtgggaggagtttttatctagatatagacctctcctatgtaagtgctcccacattgaaagagggaaatcatctcccgagtgtctctaacgctgtcctcaggggctctttcatctgactttgagggcggcggccattttgtatcagcctacagcatctgatacagcacaaggaattattggtcaaaatgtgaagtagcagtgacttcccccatcaggccctgctcttagccttgccccgataaaaatgtccaccacaagagcagggcattcaggaagcactatcccactcagagtgaaatctttgaattattgagaacagggcctttccgttttgagggatcagaacgtaccccaggaaacctctctcccagaagaagcctatgaggggaaagcagaggacactggggatagcacggcttcaaggccatgaggtctcaggggctggaaaggtctgagggcggaaaggctgagatggcacagggcttcccttcaggagggacagtgagtcctcactctccctcacaccctgccaggcccaggaggggctgcacatccttctgtaactctcccggcctcatgagacccctaccaccaattcttttcgaatccgtttcttaaatgacatatttatctaaagatatgtatctgcaacttttagggcaattcatacgcaaaagctcagtttcaacactttctgagaattttagctttcctatttcatgaatcattttaaagctaactagagtagaagtgcctttagacattgttcaaaagtcttaaaagagcaaagaagtagacaaaaatttaaaaatacacacagaaacacaaaaggtagttaaaagagactattacatagatc

SEQ ID NO: 206935 - DNA, 1000 bp, Homo Sapiens
taactcagataagcaggaagctcattgccccagttcttggaagactgtagagatttacatagcttaaaaaggtcagacctgcctccagatgcccaggagagagagatctggacgatcagatcaggttgacagtggctccattttctactgtaaacaggacctgttggatgcgcgcggctgatcctggcatgctgctctgcagtctctgaagtgtctcaagcttaatggaaaaaagaatggatatctatccctcattccctgtggagctctgttccccaagcaccagatgcctggactgtgggaatgtcaacacttaaaagtttcatgcagtgtacatgaaacaccaggtacctgtgtcgtctatggttgaacctgtgcttccctttgcagctaagggaacagcttgtgtacaaccataggcaacagaccttcagtaagtgaatttcctcttttctttaaaatggatgtcatcatttggtccttcagagcttcggtaaggcccaacaaaggtaatagcacagggtgtgttctttctctctctctctctctctttctttctttctttctttctttctttctttctttctttctttctttctttcttcctttcccttccttccttccttccttccttccttccttccttccttccttcctttctctctctctctctcccttccttccttcctccctccctccctccctcccttttttctttctttctctctctctttctctctctttctttctccctctttctttctttctttctttctttctttctttctttctttctttctttctttttctctatcttttaaattgacataaaagttgtgcaggtttgtggggtgctatgtaaatcaagatacacgtatacattgtgacttttaggtgttttgatcaatgtggattgcttagagtgtcttatagtcctcgtaaataccctcggccagtcgtgtcctgccatacctacccttgggctcctgaggtagaattc

SEQ ID NO: 206936 - DNA, 1000 bp, Homo Sapiens
gaatcctcccacttcggtctctgaaagtgctgggattataggcatgagccatttatgcccagccagttttcttttttctaattgaagcttggcaagcagagggaaatgtattagggaaatagctttagttttgagtgggtgtcagtagccagctgaagaaaaagcaaaatgaaataggtagtagaaatgagaaagggagagagggaagaagaaaaaaatggatgttggaaagttgttgcatgtctctctggatagctcagaagtatcagttgtggttattgcctcacttggcttttgtaagcatgaaaaagccagggacaatttcaactaccatttctgaccatcatcaaccacaaattttaggcaatttgttagaattttttttaaatgttcttaatagttgttgggtacctgggagatttcagagaaagtaatcacctttgtatatattattaatgtgtttataatagaaattaaattctttgggatgtacaggtaagataagctatatgaagcatagctgttatccaagtcgtgtgcctttgaaatacttggaatttgaagaacaggacatgcagcttatgttataattaatttgcgagcaatatatggcatgatagtattttcttatctaaattctgagtgcattgaaagtttaaagcaaaggacaaaagcttcctttgttcatggcccatattccagtatatttttctgaaactgccaatattttctgatcggtactttcatttttctagttggttaccaaatactgttattggtattatttctatataaaaggctttaagaagactatagtataattttcttaagaaaaaagacatgattataagctaaaatatgccttcggttttgtgtgctacaaattgagggagattgagaatattttaaatcaagggcagacattgagtaaaagcttatgactttggatggatttgaaacatgattaaatgacagagtaaacaaaaaaaaaaaaaaaaaa

SEQ ID NO: 206937 - DNA, 1000 bp, Homo Sapiens
tgagggtgaagtttgttgttgttgttgttgttgtttttaaaaatatattttttaaattataaaagcacatcgttatttatttatgagcggagttttactctcgtcactcaggctgggtgactatatatgtatatatatttcttttttttttttttactcttcaaagttccttgagctttttattttgaaatttggtggttgggctttttacccttttttatagacttaagaaatttagcactttgtgatataagttgtgactactttttccattgtgattgtcttttgagttttttttatgattggtgttgcacattagccatcagttcttttttattgctaagtaatgattcatggtatggatatatcacaatttctctaactattcgaattatttaagagcattttggttgtttacagtttctggctatcataaataatgttatcctgagtattcatgtacaggtgcttgtatggacataagttttcttttctccaaatacatgcccaggaatggaattgctgggtcatatgtgtaagtatatgggtttttgggggttttttttttttgggagaaaataccaagttgtcttcctgagtggctgtaccactttctgtttcttctggtattgtatgagaggtccagtttttctctgtctttgccagcatatttgttattgtcactttttttatttttagatgtttaagtatgtatgtagcgataactcattttggttttaatttacattttcctaatgactaatgatgttgaacatctttccacatacttatttgccatctgtcgacatacttatactctttggtgaaatgtctgtgcatatttttctcattctttaattgaattacttgtttttatgttattgacttttgagagttcctttgcatattgtagatactagttttagtcagagatgtagtttgcaaatgttttcttccagtctgtagcttgtatttcttcgggaaaaaaaaaaaaaaaaaa

SEQ ID NO: 206938 - DNA, 1000 bp, Homo Sapiens
tgtggttgaaagtcacatcaaaagacaaatgtggccacgttcaggaattggagacttactggcatggctctacagctgctcagttattaatcatgcagactaacctgtcaacactgggagatgcaacatagcaaaaggacagagaaattagaattttttgtgcagaaagccctaaattcccacctgaatgtaacttacagctcccttacctactctcacacatgccctcaaacatgctagattggcttatacataggccaacacaaaatacaaacgtgacgtgttcatgtagcctagtggctatatgcctattctccatgtaccctgcatggtagtgctgcaaactttaaagtacatttctttcacagcagtattttttttcataagtggcatataaatgtcattcaatgaaatggggaaatcacgttgagaagttggtctgtcatctcccattgagcaaagactggcaggagataataaaaataaatatgggcacacatgtattaatatacagcacgcatttacaagtttattttccagataaaattgtgctataagaacagctctaccaagacagtctgcaccatttccaagtctcagttaatttacagcaactgctgctttcggagatggctgtgaaaatatggaagttcctctcaagtaggccaagaaacagttctagattttactaagttttattttgtcaggttttttaaattttttcagtgagcgtggtgactgcagaggttagtgctgtgaaaagctgggctaaatattctttctgtaaagtcaaacaggattccatcccctgtgaaataacacaaaatttcactctctaaaagcaacagcatgtaaactagaatgaaagaaggaaattatgtacgtatgcctaatattctttgtgaatgtctttcatttaactaaaattatattagaaaccagattgataaataaaaaattcaaagtagttttaattatcctaaaaaaaaaaaaaaaaaaa

SEQ ID NO: 206939 - DNA, 1000 bp, Homo Sapiens
tcttggctatgcctttgtaattagttacatataccttctgagaccttcagataatcaatgggcctttccccattagaggtaggttcccagcctacaagtatttcctgtgatccatggcaagcctccagagaaaagattcaagctttacactgcccttttgttgattgtcattgaaaacttactttatttcagaaagtatcaaaaataccaaattggtctttcagagagtatgtaaatctggggcttgcccttggatttcacttgttaaacaccctcaaacttaaaagaagaaaatagatctccagctggtgaaaattttgtgccccaaataatatattaatccaagtctaccaaggtaactaagtaatggatgttttctctcttttattacaagcaagaaagttcatttgcagttgtaaaaatgattaccgaactccagacctatttgctataactgattggaaataatgattctgatttttagtctgggtaaacacatacttcggtgtgaattttgataagggaaagacttgtttggtagcccaaggaaaaacaggatgtatttatacagtgaatgttcactctgcagaggaacttccctccagttacatcctcctcatacattagccacctccacacttgacatagatgccaacatgtttcaaaaccaatcttgaaggagcctaaagagttgatggtcctctaggtgaaagacaagaattactgtattgcatttgcttatagggaggtgtgtttttgctaacttgaagggatatactgtatttcaaataagtgtgtgacttaatattttgggatttttttttcctcctttaaaaactggacctgaacacaagctttgagttgatgtttgtaataatctcaggacctgaaagattgtagcatttagtgtgtcttaaaaattatgtactgtaccagccatggatttttgtaaatatacctgtctcccttttttgtattttagtaaaaaaaaaaaaaaaaa

SEQ ID NO: 206940 - DNA, 1000 bp, Homo Sapiens
tctctacaaaaatacaaaaattggccaggcatgatggtgggtgtctgtaatcccagccacttgggaggcttaggcaggagaattgcttgaacctgggaatcagttaaactaaaatacaggtgactgttttggtaggaaaatattttcccaccttcttcttaccttactgatttcatgtctgagagctaagacactttctccaagtgtcttagaggcatgctgtcttcttctggattcaaattgaggtcatctctggggaacctctctacgtggatacaagtggagaaaaacacattaaaatatctgtgggtgtttgagagctgctcacattttcagggaggctgccaacatttatgtttgtgccctaagtattgtataagtccatgccctgagatgttactcatcccagtttcgtgtttgttggtaaagagggagttgtaccttgtagagtttcatttcttctctcccatacattgactcatattggtgattatgtcaaaaactacttaatttgtataaaggcatctccaacagcagtttatataaatcccatatgggaaaaggtcccataagttggaccacagagtatgttgatcacagcctggaatttggactcacacttgcatttgagtcccagcttaaacttggataaggtttttgttttgtgttaatttaatttttacttaaaaattagagcataggccaggcgcagtggctcgtgcctgtggtcccagcactttgggaggccgaggcgggcggatcatgaggtcaggagattgagaccatcctggctaacatggtgaaaccccgtctctactaaaaatacaaaaaattagctgggcgtggtggcaggtgcctgtagtcccagctaatcgggaggctgaggcaggagaatggcatggacctgggaagcggagcttgcagtgagctgagattgggccactgcactccatcctgggcgacagagcaagactctgtctcaaaaaaaaaaaaaaaaaaa

SEQ ID NO: 206941 - DNA, 1000 bp, Homo Sapiens
ggttacctcagttggaaatgcagaaatcacctgccttctgcatcgatctcactggaagctgcagacctgagctgttcctattcggtcatcctgccagcaatctccaaattatttattttattgctcatgtcatcagtttgatatacagttaattttcttcaatttgattcaattttttagggattcatgtttttccattttaatttttttacttttttttttttttttttgagacagagtctcactatctcccaggctggagtgcagtggtgcgatctcggctcactgcaagctctgcctcccgggtttacgccattctcctgcctcagcctcccaagtagctgggactacaggcgctcgccaccacacctggctaattttttgtatttttagtagagacggggtttcaccgtgttagccaggatggtctcgatctcctgacctcgtgatccacccgcctcggcctcccaaagtgctgggattacaggtgcaagccaccgtgcccggccaattttttcactttttaattatgtacaacaatagttgaaaccatacatatactcaggagtggaatataattagcaaatattttcttcagattgttatttgtctttgtttatggtgattttttgacatgtgtaagtcattcagatatatttttatgtagctaaatttattaatatttaacttgcttttggaatttgggctttatttatgacagtttttctgtttccagattaaagaggaatacatcattaatgacaagatatgaaatgcaaatgcacacattaaaaaaaccctaagtatcattagcctttcgggaaatacaaatcaaaactaccatgagataacattgtatagatagataacatccatttgattgattaaaaaggaaatatatggatatatcaagtgatgtaaagactgaggaataattgggattttcatacactgctggtaaacaataaaaataatatacccacaaaaaaaaaaaaaaaaa

SEQ ID NO: 206942 - DNA, 1000 bp, Homo Sapiens
aaaccaacttaaaattgatcatagacctaaatgtaagtgcaaaactataaaactattagaaaaaggcctaaaagtagatattcatgatgttgggctaggcaatgatttcttacatatgatactttcttacatctacacaagcaataaaatagtattttgtttttggagacagggtcctggtatgtcacccagtctggagtgccatggtgcaatcatagttcactgcagcctcaactcccgggctcaagtgatcctcctgcctcagcttcctggatagctgggactacaggtgcatacaaccacgcttggttaattgttaaattttttttttttttttttttttggtgtggagacagggtctcactatattgcccatgcttcacataaaatattgataattggatttcatcaaaattgaaaacttttgtactccaaaaggcaccatcaagaaagtgaaggctgggtgtggtggcttacacctgtaatcctagcactttgagaggccgaggcaggtggatcacttggggccaagagtttgagaccagcctggccaacatggtgaaaccctgtctctaaaaaatgcaaaaattagccgggcatggtggtgcatgcatgtagtcccagctacttgggaggctgaggcaggataatttcttaaacctgggagttggaagttgtggtgagccgaaatcatgccactgcactcccgcctgggtgatagagcaagactctgtctcaaaaaaaaaaaaaaaaaaaaaaaaaaaagaaagtggaaattgccttcattaaggaaaaaaacaaacataaaaataacagcaaccataagaaagtgaaaagataaacaaaagcaatagaatgagatcaagtatttgcaaatcatttatcagataagggacttgtatctaaaatataaaaagaacttttataactcaataataacaataaaaaatgggcaagagatttgaatagacatttcaccaaagaagatacataaatggcc

SEQ ID NO: 206943 - DNA, 1000 bp, Homo Sapiens
tggtttgaacctgggaggcagaggttgcagtgagccaagatcgcgtcactgcactccagcctgggcgaaagagcaactctgtctccagaaaaaaaaaaaaaaaaaaaagagcacacaaagcttgatctttgtgccacgtgttaatgcccactagagatgacctactatggaagagacagtggacaaccaagtagacaagaggacgagagtgggggatgccagttggcctctgccatgggccgtcccaatgctgacctgatggacatacgaatgaagcagcagtggtgacagaaatggatgctatgtgcaggatgggtcccatgtaccaaggctaccgctgccaccaaatgtccaacctcccgcaacagagaccagtgctaagtcttcagaatggaccatttctcaaaaagacgaaccggcaggttgactttgttggggtccctccacacataaggcccagtaatttgttctgacaggagtagacccatgatctgagtacggatttgcctttcctgccttcggtgcctaagccagtatccttatctgagggcttacagtgtgtttgattctccagtacagggtcccacatagtgtcacatgagaccaagggaactgctttacagcaggggaggggtgggactgaacccacagccacgggatcctctagttaattcataggcttctccatctagaagcagctgccctgagtttggaaggcacacctgaaccatcaattctttacaagggtaggagacgtactccaggatgcaggacagaccttgaatcaaagacctttttacagccttgtggtagaaaaatggccctaaagaagttcatgcccaagtccctgggacctgtgaatgtggtttttgtttgtttgtttgtgtttgtgtgtttgtttgtttgttttgagatggggtctcgctctgttgcccaggctggagtgcagtggcgcaatcttggctcaccgcagcctccgcctcctgggctcaaggaattc

SEQ ID NO: 206944 - DNA, 1000 bp, Homo Sapiens
aaggaaattacttgtatataaaccacacaacacaaagtctctgaaaatttccccagaagcatacaacaaataaacattcattcaggaaaatccactactaagtcttagaaagaacagtgagtctgtggcatttgagccacagcctcatcctatcccatccccactccccagcttcatgtgacaaactctactctggaccaatgcagccaaaaattaaggggtctctcttcctccagctaccagtctagggctttgccccaggtgcgacaggctgagaatcgtagagctccaattgcccctaccctagcctgcttagtgcggaggctccacattgggaggggcaatctgagaagaccagcggctatcaacccactcacagagaagggatgtcagtcctggagaagcaggctgctgtccagcccccagaggagatccaggctctgagactggtaacccagcagttatgcccaaggggactggtatttggtacggagaacgagaaatctttgcctaaggggattgtcaaaaacaataagacatcttaccagtgagccattaaggaaggggctggtaactccatgctattagtagcaaaaagcaaaatgacagaccagccagaagtttaacacagaaaaccagagaaagagatagccaagaagagccctcctggaatctggtttatccttgaggttcgggaagtatgtatggacagggctgtatccactcaggagcaatcagatgtgaaacaaacttgaaagcattctctaaggcatacacagatccatcagcaaagagcagaaatcttattagctcaaagtgcttaagcagaacctctgaccaaacactggctgaacacataaatgtgtttgttcaaagaactaaaggaaatcatatttaaaaaaggaaggtaaaggaacaattacagttgttcctccatatccatggattcctcatctgtggattcaaccaactgtggatcaaaagtatttaggaaaaaaaa

SEQ ID NO: 206945 - DNA, 1000 bp, Homo Sapiens
tggctgagaggtgtccttttggaggcctagagcaatgtaaccctttcttaatatgtgaagtctggagaaggaagataaagcccttggttcaggggctttctttagggctgtcatttagagcaaagtcagtttttttaataaggcaataacttttaagaaaaaaataaatagtatattgggacttgtgatataactgaaatcagtaattttatttggaaaatgtttgataataaattatagggtatcaagagcaagtttttgtatttttagtttgtttacataaaaatcgatttgtgtaaactgtactggacttgaacaatctgttgacttttccgttttgtttatccatatgctcattttggccatttaaaaatatctatctatgtaaatataaaagtgtcacataagtgttagttattatatgccatgctttgaccatcttcgtttttaacatgaccaatacaggctttttaatggccgactatgtttttgaaagcacagtcatctcaacatacaagtagaaaaggaagtagactgatgaagaggaatgttaagagtaatcttttatgtcttaagattgaagccacatttctttcttaccattttgttacagtcatcatccttgtggctcagaattgaacagagtagttgcacagctgcgctgccacagagtgtccctcatctcatgtgtgtcctcagagccatttgcacacaggactgatcacatgcatgctggttggtttcttggctgctgtgagcgcttaagagcagagcgggtctcactcccccacccctcagccctggacagggaccttgctgagctctgggccttcattagactcaccagtcacttcgggttctgcacagagcctcatcatccactccacagagagcccatcacagtggctggatagatgggaactgacaacccatagctgtgggacagggatttttccctgggtaaaagtaattgttaaaaattaaaaaaaaaaaaaaaaaa

SEQ ID NO: 206946 - DNA, 1000 bp, Homo Sapiens
catcccatctttttgggtgctgcctgctcacctcctctgtgtacacacagtgctttctgccttaactgcagtgtttatcctactccacctgaatttctgatttacttctttcttatccttgcagacctgaggcctcttgaaggcagaaactacttcttaatcagccttagatctctaagtctacaacaagctgggcggccctttctaatgggcacattctttagctgtgcaaatacccacactcaatgtgtatcccctacaaggtggttctatataactctgccaacactgccttcttatcttgtcattcctcttccagaagcagggtgtttcaggctcttttcgtgtccctcactattgctctcctttgtccaccacacttgccattattcgttcattcatcaaatatttgagtgccacctttatgccaggctttgggtcagagggctattctgtctatacaaaatgcttccagtaatgaggaaaaccttctaaaagctgcccttttgtgtctagaacatggatgtgttcattagggcctcctggcaccccccagaaggttaccaagagccttgaaatttgaccaaagggcctgggatagactagagggggagggtctactctacctagccgtgaaaaaatccagtgaatgatcccattctcccaaaacagtcagcaaacctccctcttatcagaaatactagtgtccaccagatatagtccataagtcattaggagttaggtcaatgaaagctcatgcacagctagtctcatcctaattggacactccagttgtcattcccatgactttggttaatataaatgcaaaaatgaatttttaaaaaatctttcagcccgggcgcagtggctcatgcctgtaatcccagcactttgggaaggcgaggtgggcagatcacttgaggtcaggagttcaagaccagcctggacaacatggtgaaaccctgtctctcctaaaaatacaaaaaaaaaaaaaaaaaaa

SEQ ID NO: 206947 - DNA, 1000 bp, Homo Sapiens
agcgcacccttactttcccaggccagaaacgcgaaatgctgtcggccttccagaggctgttccgagtcttatttgtgattgaaacagtctcagaatacggagtcctgatcttcatttatggatggccctttctccagacccttgcgatgctcctgatcgggacagtgtctttccacctttggatccgcagaaatcgagagagaaactcaaggagcggaaagactagatgccgatccaaaaggtcggagcagagcatggacatgggaacgagtgctctcagcaagaagccgtggtggaccctgcctcaaaactttcatgcaccaatggtgtttcacatggaagaggaccaggaggagctcatcttcgggcatggtgacacataccttcgctgcattgaggtgcacagccacacccttattcagctggagagttggttcacagctacaggccagactcgtgtgactgtagtcggaccacacagggcaaggcagtggctgctgcacatgttttgttgtgtggggagccaggactcctatcatcatgctcgaggcctggagatgctggaacgtgtccgaagccagcctctgaccaacgatgacctggtcacctccattagtgtgccaccatacactggagacctgtctttggctcccaggataagtggaaccgtgtgtcttagcgttcctcagccttccccttaccaagtgattggttgttcgggtttccatttgagttcactgtatccgtaattaaggactgatctcccctgggaagtggggatgaggggagaaatcttggcttcacttttggtgagaaagacatgatagacactgaggaaagtttgaacttgtggccgggacctgtccctctcaggtcttctagacatgtctgagggaagtctcttgaatgtaagaaagtgttattggcaaagcaatccaataaaataagctacctatgattcaaaaaaaaaaaaaaaaaaaaaaaaaaaaaaaaaaaaaaa

SEQ ID NO: 206948 - DNA, 1000 bp, Homo Sapiens
gcttttatgactttaaaacattagacttatgtaagtgtaaacattatttaaaaacataatgtagaaaattaaagtcccccataattaaaatccctttcccccagaaaaagtcaacagcatattcatcagttttttcctaaagtatgttttagcactttgaccatatgagacaacccttctgctgttagcatttttctctttgcaatagatcttcctatgtcagtacacatcaatctacctcattcttacctctgcataagagagtagtgtgtagttgtataatagtttaacttggcgattggttattgattttgtaactagccagttactgaattattctaaaggttttgctgttgttaatttctttcgcctttttcagttgggtaatagttctgggtaggttgataattttattcccatatttgtaatcttatttcactttctcaactcatcacattgactggtacttttagaacaatgttaaaaaacatttacataattgtgctgatattgtacattatttgatatatatatattttttttacttagaagagtgtttctccaaaactataaatttgactcttagtgtaaaataatcttaatatttgaattatacattcaggttatgccctctatttctagtttgatgaaaatattattagtaatggatgttggggttttattaaatggcttttttccacatctgtcaagatgatcaactggcttttctctattatgactttagatgaatcgttttaatagatttgctaatgttaagacatctctgcatttctacaagaatctgatgtagtcatagtatactattcttttaatatacatctcctttcaatgttaacagtggttatttatgattggttggtccatagtagatttttattttgtgtttcttatctgtactttctgatttttctacaaagattgtgtattacttgtataataaaaataagagctttaaattgtaaaaaaaaaaaaaaaaaaa

SEQ ID NO: 206949 - DNA, 1000 bp, Homo Sapiens
tcatggcaaactctgtctcctgggttcatgccattctcttgcctcagcatcctgagtagctgggagtacaggtgcccgccaccacgcccagctatttttttatatttttgtagagactgggtttcaccatgttagccaggatgggcttgatctcctgacctcatgatctgcctgccttggcctcccaaggtatctaataagttttacattccatgttttaactttgttttgcaattatagatttttgtgttatatattttagggtatgccaccacacattcattaattgtgttttgattttttagtatttattataattatgcatgctaatttttaacatcttataatttaaggcagtgtggaagaaagtcaaatatgaatgagctatacgtctttttccaatagaattatctctgtgtttgttttcctgtatacaaaaataaatgttatccttgtattttttttctaacttgtatatttgttgtgtaggtttgttgtgaatggttttctaattctgcgtagatgagtcatcataaaatactctttttttttgggatggactcttgctcttcttgcccaggctggagtgtagtggcgcgatctcggctcactgcaacttctgcctcctgggttgaaatgattctagtgcctcagcctcctatgtagctgggattgcaggcatgtgccaacatgcctggctaatatttttgtatttttagtggagacagggtttctccatgttggtcgggctggtcttgaactcccaacctcaggtgatctgcccgcctcagcttcccaatgtactgagattacaggtgtgagccaccatgctcagcccataaaatttttataatttcaacaacctatttatttgtaaatctatatgatttctgtgtgggagaaacacttttggatttgaatataatttaaaactatcataactctgtatctcttttagttattattgtttatttcttgtcaaaaaaaaaaaaaaaaaaaa

SEQ ID NO: 206950 - DNA, 1000 bp, Homo Sapiens
aaagtgctgggactacaggcgtgagccaccgcacccaaccaaatctatacatttcaatgaaggatttaatttatttatattcaaggtaaatattaatatgtaaggttttgttactatcataatgttaattattttcttgtcttatttttttatctgtctttgtagtttaataaaattctgtcatgttgtgatttgatttatttcactttgttttgttttgtaagacctgttagttttatacttttatatattttaataatggtgaatatcaatctcttgtttttatattagaattttttttaacatctttcataggcccagtctagtggtaattagtttccccagcatttatttgtcagggtaagactttatattcttcatttgtgaaggttattctagcttgatataaaatttttggctggcagttttcttttttttcaacactctaaaagtgccatcccattctcttctggtcagtaaagtttctgctgagaagtctgcttttaatctaatgtggttttctttataaattactagatgcttttcttttgcttattttagaattacttccttcactttgactttagatattctgattatcatgtgccattatgatgtctgttttgcaatatattttgtttatattttgttgtattttgtttgctgagcttcctgtgtatgtatgtctaattctattgctagagttggaaagttttcatcaattgttttcttaaataggttttctaaactttttgatgttttttcttcctcagaaacactgataattttaaagtttagttacttcatgtagttggaaacaaagtcttcattcttttttattcttttctccttatttttgtctgagtgtattattttaaaagacctgtttaaaggtttgaaaattatttttatgtttcttccagtctattattgaatctttgaatgtattttcttttgcctgcaataaatcttcagttccagaaaaaaaaaaaaaaaaaaa

SEQ ID NO: 206951 - DNA, 1000 bp, Homo Sapiens
atgtagaaattttccaggttcttcacaatcagagattatacaagccatacagaatttaacccgtctcttatacagccttcaggtaactatcctcctccaatctttgaccttgtgaatggttctcttaatgcaattctctttgatgattcccagactttaaaaatgagaacaagtgagaggtagggaatgatcttaaaagaatgacaaccttctaagtgtgatgtgttggactcacatggttttgtaatcagaggcaacaccatgactacattttataccattcttctctgaaatcataaaacagttcatatctttaaaaaatattgatgaatatgatctggcttgacatttacaatgaaactcttaggtgagtgtagcatgacttcacattttctgatgaaaacctaaattcacacctaaaattctttgacttctccatgtggccatcagcctttagagcagttaagtaatccatatgttgctttactcttttgtttgttcatccactcaacatttattaatttattaatgttgaggggatgaacacacagtgcctgtctctgtgctgactgtgctgagggctgagcacacaaaggcaaattagccacacagcctgctctcaaatagcttactgcctttcaaggaagagcagacataaaaaagaaatcatgcttgcatttaggattaaatggttggatgatcccttaggctggggtccccaaaccccagggtgcagagtgttacctgtctgggctgcacagcaggaggtgagctgggggcaagcgagcagtaccacctgaactccgcctcctgtgagatcagtggcagcattagattcttataggagcgtgaaccctattgtgaactgtgcatgcaatctagggatctaggttgccccctccttatgagaatctaatgcttgatgatctgaggtggtacgctttcatcctgaaaccattctcaccacatcccagcccatccaaaaaaaaaaaaaaaaaaa

SEQ ID NO: 206952 - DNA, 1000 bp, Homo Sapiens
aatgctctagtctgtagtatctcaagtctggtctgcccaacaggtccatctgcattgccttggaacttgtaaaaatggcaaggtcttgggccccactgcagatatattgaatcagaatgtctaaggacaagccttgacatgggtactttaaaagttcttcaggtgattctttcatttactaaagcatgaaggatagtgctttataggatgatacagttaaagtaatggagaactgaggcagggagggaaaggaagcaatataaagctgcacaataagatcagccagttgttttgtctgcaaaatacagctccaaacaaggtttacagaaaccctaatccattgaaagcataaaaacttctctcttacctttttctctcattgctcaaacttgaccccatggtttattgcttctgcggcacaccaggtcccttcatgtggctactgtgaaaagtataccccattccataagtgtgaaagtagtaggaggggcaaaatgtatgctctgcaatttttcagattacatccaagcatgtttccttatttgtacattttattttttcgttttatcttatttctgaaaaaagatgagaattttgtaaaatgaaataaaaaggcattcttttgtttttctggagacagagtctcattctatcccccaggctggaatggagtggcatgatctcggctcactgcaacctctgcctcccaggttcaagcgatcctcatgcctcagcctcctgagtagctaggattacaggcgtctgccaccatgtccagctaatttttgtatttttagacggggtttcgccatgttggccaggttggtctcgaacttctgacctcaggtgatctcgcttcccaaagtgctgggattacaggcgtgagccaccgtgcccggctgacattcttttgtaaatgatgatcttgcatctctcctagatagtgtcagtaattgacttctgttacttttcccttatgcaaacacatactccagtgatc

SEQ ID NO: 206953 - DNA, 1000 bp, Homo Sapiens
tggagggctgaggaaggagaatcgcttgaaccagggaggcggagattgcagtgagccaagactgtgtcatttcactccagcctgggcaacaagagtgaaactctgtctcaaaaacaaaacaaaacaaaacaaaacaaacaacattaaaaaccagacccaaactgtaacttacaatttcaaaacaaggtaaaagatgacaagaaaattacatcaagacacaaaagaacaaccaacatgaactgaggctagaaaactttggaaatgaggtgaaggaatataggaaagaatcagaagaaagaagtaaatcatttcagaaatgaaaaccaaattagaaggaacacaagcatgaacaaacacaacacataacctcaagaaaaatcgaaggtgaaaagaaagataattttagagatcatggtggatgggaagcaggactagattgcagctcccactcggatggacaaaacagcatgtggaggcttgcattgtgaacttttgctccagaacgactgcaggaataaatcaggaaaactgggagagcatacagatcctgtgaaggaagcagattgctcctgcaggacctgggagacaccccaaatactgtgctggtatctacggctgagagacccacagatggttcacatcacaggactctgtgcggacaaccctcagtagcagcctggagcctggtagacttgctgggtggctagatccagaagacagataacaatcactacagctcggctctcaggaagccacatccctaggaaaagggggagctactacatcaagggaacatcccgtgggacaaaagaatctgaacaacagccttcagccctagaccttccctctgacagagcctaccccaataagaagaaaccagaaagccaactctgataatatgaaaaaacaagattctttaacaccccccaaaaatcacatgagctcaccaacaatggatccaaatcaagaagaaatccctgatttacctgaaaaagaattc

SEQ ID NO: 206954 - DNA, 1000 bp, Homo Sapiens
tctcaatgtgtcctcaacaaccagcaagtctactcccaggaaaatataccttagattttcacaaataatacaatttagcaaacatttttcgagagctcagataccatccattcatctgtttgttcaacaaatactgattgggaagacaagaataacataaaaatgaatgaggtagagcatacttgtcctatataaatccagactttctataaagctcaagtaactaggataatgtgaaattgggatggtgacagacaaatagactacccagagcccagaaacagattttctgtgactgatttgtgggaaaagaggaactcccatttatggtactggaatgatgggttaaccatgaggaaaaaatgaaattgaatttctatcttacacccaaagatttgggtgtcccctgcagatagatgatcacctaggagtagatacacaaaaaacatttcaagatgatttaaagacttaagggtttcacaccatatacaaaaattaactcacaatggatcaaagacctaaatgtaagacctaaaagtgcctgtaaaactcttagaataaaacttagatgtatcttgtcatgaaaaaaaatactgattggggacaaactctactagatatttaagatgttagcagtatgtgcaatagagccagtcctctgtcctcttggaatctagggcaggagagagacaaggaaatatgcaggatggtgtgatgggatcagtgctgtagcagggataggcacaaagtacagagagcagatggggtgggttggggacaactctccatgtttgggaggatcagagggtgcttccaagaagaactgatgtttaaactgagacctgaagataaaagaagtgaatccaggcaaaagaaggggcttggtagaagattcctgatagagaatagtatgtgcaaaggctatgatgcaaagaagagtagaaatttcttttgtatttttttgtagagacagggtctcgccatgttgcccaggctgatc

SEQ ID NO: 206955 - DNA, 1000 bp, Homo Sapiens
atcactgtctatttgacattgtacagaagatctagcaaatgcagttaaacaagaaaaagcaacaaaatatgtaagaattataaaatattgcattacttacagatgatctaatgtgtacattgaaaatccagaagatttacagataaattatgaaattaataatttaacaattttgtaaaatcaatatatggaccagttgtaatcctatatataccactaacaagtacaaaatgaaatttgaaaaatacaatgataatggcaccaaaaatatgaaatatttaggaaaatgttgaactgaaggtccgaaagagctgaaatacattgttataaaatcttactgaagccaggtgtggtggctcacacctgcaatcccaacactttgggaggctgaggtgggcggatcacctgaggctgggagttcaagtccagcctgaccaacatggagaaaccccatctctactaaaaatacagaattagctgggcgtggtggcgcacacctgtaatctcagctacttgggaggctgaggcaggagaatcgcttgaacccgagaggcagaggttgtggtgagccgagatcgcgccattgcactccagcctggtgacagatcgagactctgttcaaaaaaaaaaaaaatcttactgagagaccttagaaaagacttaaacaaaagaagagatactacattgaaggattaggagacacaatattgtaaaaatgttaattcttctcagattgatttatggattcagtacaatcccaataaaaatcctaacagttgagtgaatgagtgagtgtgtgtgtttgtgtgtgtgtgtttatgtaggtgtgtaatttaaaaagctgattctaaaatgcaaagggcaaaaacagctatgaggctcttgaagaagaacaaggtggaaagacttgttctaccagatccaagactgattttgaaagctatattatttcagtgtggcactgaacagggatagacagaaaaacaatgaaatagagatc

SEQ ID NO: 206956 - DNA, 1000 bp, Homo Sapiens
ggctgagaaacagacataagattttaaggggagagggaatgtgggacatgacccatcatttcctccttccccaggcagagaaaaaccgactggcagccatggccaacaacctgcaaaagggcaatggtggaccaatgcgcctctatgtgggttccctgcacttcaatatcactgaagacatgctccggggcatctttgagccctttggtaaagtgagtagaagtgagagaaacctctgaagggaattggaagaagtggggagggtgagtgtttgagtgtacttctctgttgtgcctggccgtgattaacttgctgcatacgtcatagtgggcatatgagtctatgctgtgaaagtttggctccatctctgttcatgtgcttggtggacaaataagttagacacaaatcaaataataggccaggttaagaaagattaaaaaatacaaaaattagccaatgtggtggtgcacgcctatagtcccaactagtcgagaggctgaggtgggagggtcacttgagcctgggaggtcaaggctgtagtgagcctcggaaaaaaaaaaaaaagtccaccttttaccaaaatatttctactgactaatctttttttttccgagacaaggtctcactctgtcacccaggctggagtgggtgagactttttgagactctgtctcaaaaaaaaaaaaaaagcagtctgggtaggaaagattgaagatgtgggctagtcaaaagtttactgataatttctcactcttctacagattgataatattgtcctgatgaaggactcagatacaggccgctctaaaggttatggtttcatcacggtgagtctctagtcttttaatttttttattttactttgggtttgtccacttgtctgattttgcagcttagcttcatcctcctcctttaggaactgtctaaatgacccataaaccctggtgcctgaagcttggactagccttctaccccttgagatgagtgcattgcttgagatc

SEQ ID NO: 206957 - DNA, 1000 bp, Homo Sapiens
ccaggaatgccgcctagtttatgtccccggtggggcacacagcggggggcgccaggttttccttgtcccccagctgctctgcccctttccccttcttccctgactccaggcctgaacccctcccgtgctgtaataaatctttgtaaataactgctgagactcctctttcaggggaagcaggaggaaaagggaggtaatggggcgtcctgatagggaaggccggtggtcaaccaagggttagggttttgaccctactgtccaatcctctagtctaggagtctttctggcagacagcaggctcggggcactcagaggaagaactacagaagttctagctgctgcttgggatggctgaaggaggcaggtggggtggggaagtccttctcgaataactggattcctccaaagatttccccatccccacaggactcccctcgggaaattcccctttttccctcagtgccaggcctgtgtggcctaataacgacggccctggtcttcttcccactcccctacccttaggtaggcccttagactccggcctttgagtccgcttctgcgcagggccggggctggaggcggggcgaaggggcggggccgcaggcgaacgcaagtcccgcttcgctctcgggggcggactcagcggcggaagtggcgctgccggaagatcttcttccgctctgaggcgctactgaggccgcggagccggactgcggttggggcgggaagagccggggccgtggctgacatggagcaggtgggtcccggagcggtcgctgggagcgggtggcgtgcgagggccgtcttccgccggtcgaacccgcttcgccgcccgctgtccgtgctgggttccgtccgacccttcccacacccgctgcgtctcaggttccgcccccttcctctgtctggcctcgcgccgccccgcgcgggttggggtctccagcaatgactcttggcgaccccgcctatcctggggagcccggggaggacgttcgggatc

SEQ ID NO: 206958 - DNA, 1000 bp, Homo Sapiens
acgccgacatgttttctgcaactatagacatgcctcggcctccttcaggtggtgaagcgctgaaaggcaggaatggggtccaaatggcactgcatccttccacacagcatccaccccagggccaggtctgatcccatccccgaaaacaacagcaagcaagtcaaaatcagaaattacacagcagttgccagtcacaaccaaacagccatttcttacctgtacgtgctacaggaattagtcacattttcagggctccctcatttcaagaatgactcacaatctgtggtgacttagactcaccatcccattcctgctctagttcataaggagtgtggagtgaaagcttcagggatggacaggaaccccaagagttccctggggctcagtgagggattgggggctcaccaggaccatcctagaaggttgagcatgttcttccattgcaacactcgatttgcccaaaccagaatcttgctgccatgctcaacatctattcatcagcacatgggctgatctagcggttcctttacaagtggtactgcccccacccccccgcccttcttagctttgtgtcttcttcacataccacacatgctgcttcagaagggtcaccctgtccccaaccatgaaaatgagcaaaaaagaaaactctcttatcagatcacgttaggttaacattctgcagaatctcctgaaatgatcaatttctttctggaactttctctgaccagtaccttattcctccataactcagtcagatgaatgttttttaaacaataacctttatgcactgagcctttgactgtgggtgctgggaaaatgttcagaaccagttgctccagggccccccctggttctcaggtgccgagggccccgcctgtgtgaaggagtgagcccagtctggtggcttcccctcacatccttccagatttgggtatgggactttcatgaccccaaatcatttaccagcagagcagggggtggagcgaacaagaagctt

SEQ ID NO: 206959 - DNA, 1000 bp, Homo Sapiens
gtgtctgtcaaaatgtacttcacaagtctcctgttctgaatatttagattcgtttccagttttccgccatcataaacgatgctgtgacaaatgtgcttcttcctaaatgttggtgcacacaaatgaatctttcccacacagcccccagctcattaaggataaaagcagaaggctttatggtgcaaggccccaggtgatcttttcctagagaaaatttaaaagaaaaagaaaaatagggggcataaatcaaagtgtaacagtgtctccatcagggaagaagatccatgtatctattcaggtcctgaagaattgcttagatataacccatgcctataactggagatctccaatgggagtgagatttttagaccagttttttatctactggactgtgttcagtaattataccgctctgtgcttttatttcccctaagcctgcctagccacattgtaaatgagtaagtcatcgacgtggaactggcataggcagtgctgaaaagtaactcagggctgactcagcacctttgcatttacgcaaatgccaagtcataggcactccgctgacgtccctccattaagacctgtgtagaaagacctgatttcagcatcttttcctatagagttcccctgctgaagaacagagttcttggattctagggcactcagccccttccagggacttcagtctgatcactgatcatgacatcacagtgtgacttccttatcaagcaagagaagcattcgctactgttaaaacaatgcattcttttgaaaagacactgctgggccttgtcacaaagcatgagccctggaaggttgacgggtagctcagctttcaaacctaggtcgtttttcatgtggcttgagcctttagacttgaagtcacaggcctagggacagatgttgccacaaccttcagacacgccctattgcctgctgaagaaatggagcaagaatttattgggattgatgtcaaaattctttttttgctctgaagctt

SEQ ID NO: 206960 - DNA, 1000 bp, Homo Sapiens
ggcccaggtacctggtccagggtacctgagggccttggctctgaggccagtgggatggtattggagtcttgccccctccacttatgatggttgtgactttgggcccccaactccatttccgtgtctcaggttccccctctgttgaggcgcaagaacccccctgcttgcctccctgggtcgttgtaaagactcaacctgctgacccgtggaaggctcttagaacagtgactggcaggggtcggtttggctggtttgggtggctcagcacatggcaggtggacagtgagcgtgcgaggagctgaactgaggtaggtgttggtggtactcccccttcacaagtcaaggtacctcgaggatgctcgggggcctcgaacggggcccccaggagacctggagacagctcaccaagggccgtgaggtggagatggcacgggtgccaccagctgcagacccgcgaggggacgcgaggccctcccattctggactctgctgtcctcttcttccaagtgacagaactgctcctaaaaggctcacaaagagctgtccctcggccctggccccggcctgggatgctgcctctcagcagatgcggttcactctgcacagcaagagacccgggtaccacttgccttacggagactacaggtgtggcagcgccctcgccacgagatggaaagagaaggcacttaacttcattttttaaacaatattttattgatttaactgacgccgtctagtcagggggtccccacctgccttgcctgagcggatgggcagaaagggagggcatgggggaggcctggctgatgcaattaatcctttcaaagtgcggctgaggggccaccatgcggaggggcacctggcaggcggggggtgggggtggcggccccaggtcgggtctatatcgcctgatctgggtacaggtcccctagggggtcctccttggtgggcaatgccacaggccctgcactttctgaagggctgtgatgctccagtcaca

SEQ ID NO: 206961 - DNA, 1000 bp, Homo Sapiens
agaggtgaaggatggcccttccgagattagatgagaaaggacgtgacttcggtttggggtgctctcttccgttccctcttggattgaggggagctggctgccagcttgggaggggactctccggaacgggctgctggtgaggaaccgaggcaagacccagctgcacgagtggggctggaagcagatcccccttccctactctgtagactttctaggacacgtgtgatgctcttagagtcatgcctgacacgctgacgtgatcaacaaatattagtgactgatagtcttcccaggatggtttctcgtttatttattaaaggaaattatactactacttcagctattgtcaatattatttctttcaggggcacattattttgcagcttgcctttttttttttttttctccagtttaacaatgttttacatagagtgttccaggtcaagatatatatatatttaagtcattaaaaaaatcagttctcatctgatcaagatatttgtttctagttcttttctctttgttttggtacagacaaggcttaaaaaaatctcaagaatagatttcaacttagctgagtcctcagaatccagttttttaaaaagttaggtttatagaggaataatttacatatagtaaaatttggctctattcatgttcagtgctatgtgttctgacaaatgtatacagttgtgttaactaccactgtaatgaagctgtgtaacaaatccatcattccccaaattcaattttgcctaatatcttttgtttaaaaaagtagcaaccaaaaaataatatcagtgcaatattttaggctgtaaccatataaactacaccccccccaacgttaaaagaaaattccagccaaattggaatggctcttcaattactctgaagtttttaaacctttgccaaaagtgtttgagcttaattaagttaaaatatttcaaagggagcccagttgtaataatttgtttataatacaagcttctctttgatc

SEQ ID NO: 206962 - DNA, 1000 bp, Homo Sapiens
ctgctagcctacgccaaagccacagccacagccacgcaggatctaagccatgtctgcgacctacaccacagctcatggcaatgccgaatccttaaaccagtgagcgaggcaagagatcgaacctgcaacctcatgcttcctatgaattcctccacggattcgtttccgctgagccacaacgggaactccagagagccacactgagttattttgacaaggggggtgtgctgtgctcctggctcaattttcctgggttccttcaccagcaaataaaaaacaagtctccaaaaggacaggctaccaacttgcgatagcatttctttgttgcttttaagcaaaggaagaaggaaaaataaacatttttgagagtcagagtccagacactaaaaataacacaatggaattttcctctgaagctgccctttgctaacaatgagatttttttatatgtatatttattttttttttttttttaaggcttaagatagactgcttagtggtgattccaggatggcagggtatgagttccaggaaatttttactcttgagtctaagatggcattctgttggaatgccttacaaagttaaggaggtactatataatagggagttcctgtcgtggcgcagtggttaatgaatccgactaggaaccatgaggttgcgggttcaatccctggccttgctcagtgggttaaggatccagcgttgctgtgacctgtggtgtaggtcgcagacatggctcggatcccacattgctgtggctctggcataggccagtggctacagctccgattagactcctagcctgggaacctccatatgctgcaggaagtggccctagaaaaggcaaaaagccaaaataaataaataaataaataaaaatagaaaaaaataaaagcacctaataggcagagcctcaatgaaggtgtcaacgcctgttagatgagtagtgggcacatatgtatatgctacagtattatctgtatgtatctataagctt

SEQ ID NO: 206963 - DNA, 1000 bp, Homo Sapiens
tctcttttgcgtctggcttcctttgccgaacattatggctatgggattcttccatgtggttcaggagcggtagttcattcttctttgctgtgtaataccccactgtgttagatactaacatcatgttgttgatggacatttgggttgcttccagtttgggcctattatgagtaaaactgccatgaatatttttgtatatatttggtggagataaatgctcatttctggagttgtgggattgctgggtcacagagcgtatgtatgttttacttagtggacactgacaggttgccacagtgatacatcagtttactttcccaccagcaccgtgtgagcactctagttccgtcgtgcctcgtgtgcagtggacatcgtccgtcttttctgcttcagccattctggcaggtgtagatgggtgtctcattgtggttttaattaagcctttattttaaaaaaacacaaaaaaccaagaatagacacccacacaacttggggagtttttttttttttttaattaatgtgatcttgtgtatcagttttcagaaaggacacaagcatcttccttacccctcctgtgtcaggcactgttctggggcctttcgagatctcgtgtcatcctcaggacaacccctacaagatgcagacagccccgggggtggaataggccaggcaccacgcccatcctcagagacctgagcatgcaaatgagatgtcaggttctcactccctggggagctgatgcagcaattgcttctgtgactggcgtggtgcgaatgtgacagatgttcccggagagagacaactgcttttgatgggagccactgccggagtcagccgggtctcaggtacccgtgttgtatttcccgtcagactgcctttggagcgcacaggttgcagatacggggagcagaggctgctcccgtttccacaaggacctgtgtcctggtggatcgatgctgcctcagctctgtggactctgggtcttctggacttctggatc

SEQ ID NO: 206964 - DNA, 1000 bp, Homo Sapiens
gacgacacaatgaaaacccactttcaggcacacattatagatatctatgtacatatgtgtctatcctgctagaacacaatctctttgaaatggcagctcattacttgtatatccctcacagtgcccagcacatggtagaggactcaataacatgtggaacagcaagtcatccccagctccaagtgggagatgatgagtatcttctgtaagatactcagaagaggcaaggcactaccgatggccattcttggtggacaagagcagaaagggaaggctgttaacatgcagtgggccaacagaagacaagagtgccctgggaaacatctgtctgacttcctccaataggaattcaggaagcatttgctctgggtccctgttctcaatgaatcttcatttgcacatccaggaagtattcttcattctaagcctcagagtagccttcatcttggggtccctgcccatctttaataacctgagtctgttcagttatgcatttattgaaacttttcaaaaaggctctggtactcaggagtgagtgaagtttcataatagaatcagcacaaaaccaacccccccaaataaataaatatgtaaataaataaataaataaaaattaaatgaacttaaaggaaatttacacgtggctagatgttacttgttggttacacttaaattcatggtttttatcgttacttaacaattagtgaaatttgttcccagaaaacaccgtctgtaggatttctgctttcatgaagttaaagagacttatttaggactaaaaccttgccattttatttacttatttatttgatatggagtcttgctctgttgcccaggctggagtgcagtggtgcaatctcggctcactgcaaacttcatctccgggattcaagcgattctcctgcctcagcctcccaagtagctggaattacaggcgcccgccaccatgcccagctaatttttgtatttttagtagagacagggtttcatcatgttggcc

SEQ ID NO: 206965 - DNA, 1000 bp, Homo Sapiens
tggagcccggagaagaggcccctccaggaggcggcggccgaaggccagggagagtgcggggcggccgagggccccaagcgaggcgggactggccccgagaggcgcagccctgcccacccgcccgcgcccgcgctcgcgcccgctcacctccagcgcctggcccagctccaggtcgaaggtgaccacgcacacacactccagccaggcggagaagcgcgcccagggcgccgccggggtccgcgccgcgcgacctgaagacgtgggtccagccgcgcccaggcagccgcgagcccggcgaggccctgtgcccaacagcgcgtccatggcggcggccgcgggttgccggggaaacgcgggcgggggcggcgcgcgtccgggccgctcctcagaacagtcgagcggccgccgcggcccagtgcggctcccgcgcggccgcgcgccccctagcgcccgagaagcgccagcggccgggcgccgcccagggcaccagcgagccggacgcgcgcgggccagagcggccggagcccactgggggacttccggggaagcggccgaactggggccttccagggtccacgccgtctgaggcccgagagagtcggttcggccccggtgttcgcggatcccggctcgcgggagcctcggggccaggccagggaggcagagcaagctgcagccagccggcgccgggctcgtcgggcttcgcaggtccggccagcctacctcgccccaccgcgcaggggccagcggcgtcgcgggcgttttcgtggcggaatggcgtcctcactgagcgcccagccaccaccgcggactcgcgctcgcttcctctggggcccgcgcggcctggggtcgtgtctgaccgcgggtgtccacgcaacacctctgcagtttcactttccgggggaatcgcggggacctggagcgaactcttccctccctcgcgagggccccgggccccgctgtggtccacagagcaccttgaggcccggcgtggaagggc

SEQ ID NO: 206966 - DNA, 1000 bp, Homo Sapiens
tttggagactgttggaaataatagggcagaggaacatattttactggctacttgccagagttagttaactcatcaaactctttgataatagtttgacctctgttggtgaaaatgagccatgatctcttgaacatgatcagaataaatgccccagccacacaattgtagtccaaactttttaggtcactaacttgctagatggtgccaggtttttttgcacaaggagtgcaaatgttaagatctccactagtgaggaaaggctagtattacagaagccttgtcagaggcaattgaacctccaagccctggccctcaggcctgaggattttgatacagacaaactgaagaaccgtttgttagtggatattgcaaacaaacaggagtcaaagcttggtgctccacagtctagttcacgagacaggcgtggcagtggctggcagcatctcttctcacaggggccctcaggcacagcttaccttgggaggcatgtaggaagcccgctggatcatcacgggatacttgaaatgctcatgcaggtggtcaacatactcacacaccctaggaggagggaatcagatcggggcaatgatgcctgaagtcagattattcacgtggtgctaacttaaagcagaaggagcgagtaccactcaattgacagtgttggccaaggcttagctgtgttaccatgcgtttctaggcaagtccctaaacctctgtgcctcaggtccttttcttctaaaatatagcaatgtgaggtggggactttgatgacatgaacacacgaagtccctctgagaggttttgtggtgccctttaaaagggatcaattcagactctgtaaatatccagaattatttgggttcctctggtcaaaagtcagatgaatagattaaaatcaccacattttgtgatctatttttcaagaagcgtttgtattttttcatatggctgcagcagctgccaggggcttggggtttttttggcaggtagggttgggagg

SEQ ID NO: 206967 - DNA, 1000 bp, Homo Sapiens
ttatccgccagccagcaacgcatccctacgctctgcctgcacggccagtacgacgaagtggtgcagaacgccatgggccgcagcgcctacgagcatttgaaaggccgtggtgtcaccgtgacatggcaggaatacccaatgggccacgaagtgttaccccaagagatacacgatatcggcgcctggctggctgaacggctgcgctgaaccccgtgtttatgtagccgtatgacagacgcactacgccgcgcccgattcttgcattacactggccggcgtacattccttaatcaattaatgagatgaccgtgctcaaagcactcaagaagatgttcggcaaaagcgaggctgagccgctcgcgcctgttcccagtgcacctgcccccaagcccggcaaccgcaatgacggtcaacagcccggccggaacgcgcccgccgcctcaccgaacaacaccacggtgacgccgcctgaacaggtaaagcctgccgagcccgccccgacgcctgtggccaagccccgtcgcgaacgtgcgcccaagccgcccgtgaccccctggaaactcgaagacttcgtcgtcgaaccccaggaaggcaagacccgcttccacgatttcaaactggccccggaactgatgcacgccatccaggacctgggtttcccgtactgcacaccgatccaggcgcaagtgctgggcttcaccctcgcaggcaaagacgccatcggccgcgcacagaccggcaccggcaagaccgccgcgttcctgatctcgatcatcacccaactgctgcaaacgccgccgcccaaagaacgctacatgggcgaaccgcgtgcgctgatcatcgccccaacccgtgagctggtggtgcagatcgccaaggacgccgccgacctgaccaagtacaccggcctcaacgtcatgacgttcgtgggcggcatggacttcgacaagcagctcaagcaccttgaagcccgccattgcgacatcctcgtcgccacccc

SEQ ID NO: 206968 - DNA, 1000 bp, Homo Sapiens
taaagttcacacattcttcccatgtctgttcagaaaagaaacctattcagatataagttaagctaatttagtaatcctataattgtcctctgagagatttagatggatgggccacttcacagtagcagccaactcacgggagcacctgggcaacgctagtggacttttttgtagtgagtgtgttgatcatagaaaatgtagatataaggaaataaactttgaggatagagaattaacattattttgagatattatatataggttgtgaagagtggtggttgtcacactttatggtctctggaccccttaatgtctgattcatgtagcagaagccagctagattttcatctgtctctattcattttgttgtgatgtcatggatcatgtggcctctggaaaactctactgtatactcgagaatgagaatataacaggcaaaataacattatcatgaaaatagttttgacctcatgaaccccatgaaaggttccccagaccaaaattttagaatcactggtatagggtaacactttattgtgtaaattcagttctctgtaccccacttaaatatgtattattatctcttgacattattttcccaaaaaatgctgtttgatttcttacttgttctgtactttgtttttcaggtaaagaaggaaaattcagccagttgattttgtttttagcttactgctgcctttgtccgaagaaactgttcctccattatttgaattactgaagacagcaagatatttgtaaattatcttaaaataaacaacttaaaataaaatcattgtttttcttatatataagaacaatagatatagtttttgaaatgagatgatactaaaacatttaaaaatattaatatgctactattaaaattttttagtagaagacaatttaagaggctcttttgatttggtagtgctccactgaccttaaaatgtctagcctctatggggacaacgtagagggaaagggctgcagccacagcctc

SEQ ID NO: 206969 - DNA, 1000 bp, Homo Sapiens
atggcgtcagtgctaggctggaattagaaagtgggggtctatgacgtggacttcctgactctttgatctctttgttgttgaccaacacttgatcctactagttacttaatttttttaagtaaaaaattattattattttgtttctgcaaagattttctcaaagccatagaggagcatttctcagaatatgttctatgatatgtgtcacctaaaaaagtaagagattccaaggtcaggttgatatggaaactctaggttaaataaagttaagcatttctttatgaaagaacttctggaaacttccatgtgataatgtgcattgcggatctctaggaaggaaatgatagtgtatagtattttctaaatacttgtgattcctaaagttctcttacaaggagccctttgtaggaccagtgttcttagtagcgcgctttgggcagtgtggctgtgtagtgcatagctacctctgcaaggtgataactaagccggcaagctgcctttcaacactcatgcagtcacgttgtccacctgagattctcaacagggtataaaaggaaggtctcatcttgcctcacaggaagagtgggctcagtgtggcttttttccaactatggagaaactcagtgctcatctactttaagtttccacatatggcttgctcatagccttggtccttacctttcctgccataactttctagaagagcttaatgggatttttttctaaaaaatgtaaatatgcagttaggcattattttatgtaaatgcattgggtttttactgtagcatttggcactaaatggctttgggggtgatgaggtggggaaggatacagcaggtggtacagtagtcaggaagtacctgccaccaatgagatgtctgatgctttgcctcttaccatgcctctgaatgtctttggatccaacccagatgagactgaaaaaaaaaaaacagtgtaactaagtggcatctgtaaacagaataaatgaaaatgtcacctg

SEQ ID NO: 206970 - DNA, 1000 bp, Homo Sapiens
attcaacacacaaaacaaacatgaaaaggtagttagttgggttgtaacagcttactggggtggactcataaaacagtggctttctgttcatctaaagtttcctcagataccacagaccactgttaagtgtgctcattgtcactttaaatttcaacgataccctatttttgtcattctaaatatcagatgtactattggtataattgcacaccaaaaataagccaaacagtgcattacgctaactggatccctgcttttatgtgagctaaggaaagatggagccaactccaacgagggcctctttttctctcttgtctagcctgtttctaaaccgaatgatccaggattcaagcttctattgtcaagtgaaactttcctcagatggactccaggtagccaggtcacctaaacctagtggtcctgtgcgatgctctttctgccagtccctgaatctctgcagcttctcttacctgtcttacctgtagtaaagcacaattgcagtggcgtcgcattcagaagaagggaaggtcagcagaggctatgcatgttgtgtgatgatgagtgtttacagccaccttctcctaaaacgaaatttataccggggtggatagtattccattaggtagacttatcgactttgctaagtgctttttagacagcttaaaaaattttcaagattttaaaagatgtataaggttaagtttgcaaatataatggaaatgctgtatatcttttgaagtgatgaaatccacgttggaattttaaagaaaatatgttgtaataatgctgttgtaagtaatattttaatgtctctttgcctgttttctatttcagcacattcattgtggtgaatgttcatagcattataactgcttagccattgaatgataacatttgttagtggaaattggaaaatttatttgtgaaattctgcagaattcatttttctatttccaatatttgctgaggggttaaataaaaattttcaagccattgatgt

SEQ ID NO: 206971 - DNA, 1000 bp, Homo Sapiens
cggaattattgggcgtaaagagctcgtaggcggcttgtcacgtcggttgtgaaagcccggggcttaaccccgggtctgcagtcgatacgggcaggctagagttcggtaggggagatcggaattcctggtgtagcggtgaaatgcgcagatatcaggaggaacaccggtggcgaaggcggatctctgggccgatactgacgctgaggagcgaaagcgtggggagcgaacaggattagataccctggtagtccacgccgtaaacggtgggcactaggtgtgggcaacattccacgttgtccgtgccgcagctaacgcattaagtgccccgcctggggagtacggccgcaaggctaaaactcaaaggaattgacgggggcccgcacaagcggcggagcatgtggcttaattcgacgcaacgcgaagaaccttaccaaggcttgacatacaccggaaagcattagagatagtgccccccttgtggtcggtgtacaggtggtgcatggctgtcgtcagctcgtgtcgtgagatgttgggttaagtcccgcaacgagcgcaacccttgtcccgtgttgccagcaggcccttgtggtgctggggactcacgggagaccgccggggtcaactcggaggaaggtggggacgacgtcaagtcatcatgccccttatgtcttgggctgcacacgtgctacaatggccggtacaatgagctgcgataccgtgaggtggagcgaatctcaaaaagccggtctcagttcggattggggtctgcaactcgaccccatgaagtcggagttgctagtaatcgcagatcagcattgctgcggtgaatacgttcccgggccttgtacacaccgcccgtcacgtcacgaaagtcggtaacacccgaagccggtggcccaaccccttgtgggagggagctgtcgaaggtgggactggcgattgggacgaagtcgtaacaaggtagccgtaccggaaggtgcggctggatcacctcctttct

SEQ ID NO: 206972 - DNA, 1000 bp, Homo Sapiens
agccaccgcgcctggccaagattactttttgaagtttgaataaaagggcaatgaaacctgcgctgaagaacaggaaattgactggctgtgtgctgaggccatccttctcccctgtctgggagggggacttctgtcactctgctgtccccagaagtgggtggagcttaaaacgtcacagaagcccaagtcatttgcagggtacatggagaaacagctcttggcagcctgtcctatgacctgaactcaacatgtcttttttttttctttgagacggagtctcgctctgtcacccaggctggaatgcaatggcgcgacctcggctcactgcaacctcccctcccgggttcaagcaattctcctacctcagcctcctgagtagctgggactacaggtgtgcgccaccacgcccagttaattttttaaatttttagtagacatggggtttcaccatgttggccaggttggtcttaaactcctgacctcgtgatccgcccaccttggcttcccaaagtgctgggattacaggcgtgagccaccatgccagacatcaccatatctttatactcctttcttcacaaaagaaacaactgaagaacaaccagaaggtgccagcatattctgtgaacaccagcaaaaaacccacgtaaataaatggtggcaaaagtgaactctttacacaggagaagctacctccctgcctcgcctaaaatgtcaaaggatatcatagtgacaaacatgaagccgatatccataataaattttattttgcccagtgacataaaaggcaagtcagattactgttggaatgatgaattgtgttgatttcaattctttataatattttcttattttaagaagaaattcttgtagtggtaattttgggatatgactaaatgaatgtgcctttcatgtggaagaataaacaaacaagaatattgggccaggcataatggctcatgcctggaatcccagcactttcagaggccaaggtgaggggatc

SEQ ID NO: 206973 - DNA, 1000 bp, Homo Sapiens
ggaactatgcaaatgtgtaaaactcagccagcatgttcatttgcaagtgtgttccttcttggttattttctcaaagaacaatgactaaaaacaagtaaaatcgtgtatttgaatttggaatatatgacgggatacttttatggttggtaaacttctctttctagttatgaagctgggtgccctcaaatgggcaaagcggtagcagtacttgtaggtggaagtggttttcttttttctttatttttatttttatttttttttagacagagccttgctgtgttgcccaggctggagtgcagtggtgcaatctcagctcactgcaagctccgcctcccatgttcaagtgattctcctgcctcagtctcccgagtagctgggactataggcgcatgccaccatacccagctaatttttgtatttttagtagagacagggtttcaccgtgttagccaggatggtctcgatctcctgacctcatgatccgcccaccttggcctcccaaggtgctgggattataggcgtgagcctgaccggtttttttttcttttgataaaaatcagatgacgacttagcaattaacaactgcttgttaatttagtgcttattggatacctgctgtatcaacccgtaggtcaggtactaggaatataaagcacaataagagattggcgtcacgggacaggctggttcagcattcccagcagcacagaatagttgctcagtggtgctggattccctgccatcttgccatttccacagtctcatgggggttgtgtgatttctgaccgctgctgggacctgtgggatgagcacaggcaggagagccagccaggccacttctcagaatgaaactccaggctttgtagagcttctgctctgctcaggcaggacaaacttgcatcttgggcatttgtggtccacctgataggtcacatgtacagtgttctcttggcccattgttgagatagccgtgtgacccaggttcttagaaaccaccagt

SEQ ID NO: 206974 - DNA, 1000 bp, Homo Sapiens
gtggctcactttttctaagtaatggggaagaggaccgaaacatgccactgaaagactctactgagacaaaaggatgggctgtcaagaacgtagaggaggtaggatgggcagttggtcagatctagtatggatcgtacatggacgatagttggagtcggcggctctcctagggttccctcatctgggatccctggggaagaggatcaagttggcccttgcgaatagcttgatgcactatctcccttcaaccctttgagcgaaatgtggcaaaaggaaggaaaatccatggaccgaccccatcgtctccaccccgtaggaactacgagatcaccccaaggacgccttcggcatccaggggtcacggaccgaccatagaccctgttcaataatcaataagtggaacgcattagctgtccgctctccggttgggcagtaagggtcggagaagggcaatcactcgttcttaaaaccagcattcttaagaccaaagagtcgggcggaaaaagggggagagctctccgttcctggttctcctgtagctggattctccggaaccacaagaatccttagaatgggattccaactcagcaccttttgagattttgagaagagttgctctttggagagcacagtacgatgaaagttgtaagctgtgttcgggggggagttattgtctatcgttggcctctatggtagaattagtcggggaggcctgagaggcggtggtttaccctgtggcggatgtcagcggttcgagtccgcttatctccagcccgtgaacttagctgatactatgatagcacccaattcggcagttcgatttatgatttatcattcatggacgttgataagatccttctatttagcagcaccttaggatggcatagccttaacgttaatggtgaggttcaaacgaggaaaggcttacggtggatacctaggcacccagagacgaggaagggcgtagcaagcgacgaaatgcttcggggagttgaaaata

SEQ ID NO: 206975 - DNA, 1000 bp, Homo Sapiens
atatttttttcctagagaaaagtcagcaactgacagacctctttattgatttttaggagctgcttcttgcagtgaaaggctttacagccactgggctgtgaacttattagagatggtcagaatgaatgcaccccatgagtcagacattggctttgtgtgaaagccagctttgaggggattagcttttgaaacaatgaacagcttgccttgaacttgattattgatctattgactgtcattaacaacaacttaaacattgtcttctgtgaaaattttccttgaagagtcctgttctatgtctttgccctttgacctttaacttgcaaactggcacaaactgaaggaaatctggtgttgcttctccattggattagttgttctctaaaacctagtaagcatgagctgtttccttagagtggagagagtggtgatggcagatctgcagatggacactttgctctttacatgcacactctgaaaatgccctataggtagaagtgaattttaatttcattttaatataatttcaagtctaaattcatcattttagtacaaattacaaaaactataggaaaaaaaaaacctcaaatacttgaatggccagtgtggcttttatataaagcaggaattttatactagtaaaaatttcttactcatttgctaatacacatttccagatgatttttaatgagtgtaggtatacattcttatttggaaatggatagtttggctgccttgaatttatatttatactcaacatagcatgaaaattagaatgccttttggttaaactacatgtttatgatttggttggggaaaatattttataattgtgggtggcatgctgcaaagccttgcagattgttatttcttacaacctgagcgtatatagtatgagcctaagaaaaaagaagagtaagaaaagaagaatggctttacagtaaaatatcatacaatgcagacaatattttaagaggatattggagattatgtacgcaag

SEQ ID NO: 206976 - DNA, 1000 bp, Homo Sapiens
gatcacgaggtcagaagatcaaccatcctggctaacacagtgaaaccctgtctctgctaaaaatacaaaaagaaattagccaggcgtggtggcatgcccctgtagtcccagctgcttgggaggctgaggtaggagaatcgcttgaaccaaggaggcggaggttgcagtgagccaagatcgcgctactgcactccagcctggtgacagagtgagacttcttcctctcaaaaaaaaaaaaaaaatttaacagaatgtaaaattattaaataaagttacctcagtatacattataatcaatcaagggaatgaggttatggggggcgtgcggggggcagggataaaccaacctaggtatttatcagcaccctcagagaccaagatctaacttgttgatcctgacataccacctctttaaaagccctagctcaaaaacaaacagtaccaaactttttttttttttttttttttttttttgagacggagtctagctctgtcgcccagactggagtgcagtggtgcaattttggctcactgccacctctgcctcctgggttcaaacgattctcctgcctcagcctcctgggtagctgggattacaggcgctcgccaccatgcccagctaatttttgtatttttagtagagatggggtttcactgtgttggctaggctggtcttaaactcctcctgacctcatgatccacctgcctcggcctcccaaagtgctgggattacaagcctgagccaccgtgcccggcctagatggtattttaaatcctatgcaaagtttgggagtacagatatcctcaatcactttgattaaacaaaactactttcttctgaggagcaacccatctcatttgaaagaggcaaggacaatgactttgtaaaaactaccacctcttggtacttgtttggttgggtggatggggctaaatgaagttaagtccttatgacacatgtatctcactcatcttttaagacatggtacttgaagcctca

SEQ ID NO: 206977 - DNA, 1000 bp, Homo Sapiens
ctgaaatccaggaagatctgacttcgaagtctaccttgtgtctgttcctcagccccactgtagttccatctaccagtgcaacagcctcctcgccgcctccactccatcttctctgcatactgccagacttaatttttctaaaactacaccattcattcaacaacaaatatttgaatacctgctaggtttgctaggactgaggttcatcaataagcaaaacacaccctgtggagtccacagttgggaagacaatcaaatagtcacatatagacagtgacaaacttaagtgctacatgaggaacacaaaacatgggaatctttgtagatcagggagggcttctggaaagaagcagcgtttaagctgagatcagaagcagaatgaacaggttgtatggcaggagttagcagcattccaggaagagatgctgagactggagggagggcagctttgtctcagatctccaagaaagtgggtgaggatggacgaacagccaggcctgagaggtgaggctgtggctgtggcaaagacttagcttttatcaaacagagaataatgggaagccaatgacaagtttgatcaggagggtgagatgtcagataatttttgtttgtttgtttgtttttgagaagaagtcttactctgtcacccaggctggagtgcagtggtgccatctcagctcactgcaacctccagctcctgggttcaagcgattgtcttgcctcagcctcccaagtaactgggattacaacaggcatgcgccaccatgcctggctaatttttgtatttttagtggaaacggggtttcgccgtgttgcccagactggtctcaaactcctgacctcaggtgatccaccacctcggcctcccaaagtgctgggattacaggcgtgagccactgcacgcggcccagatatgtgtttttgaaatcaccctagctactggtagaggagtttcagagagtacagtgaggactggtccagatgagagacggtctccaga

SEQ ID NO: 206978 - DNA, 560 bp, Homo Sapiens
  misc_feature (3)..(3): n is a, c, g, or t
  misc_feature (60)..(60): n is a, c, g, or t
  misc_feature (454)..(454): n is a, c, g, or t
  misc_feature (466)..(466): n is a, c, g, or t
  misc_feature (504)..(504): n is a, c, g, or t
gtnatattctctctctctctctctctctctgtctgtctgtttctctctatctctcgctgnccatctctgtctttctatgtctgtctctttctctgtcagtctgtcagacacccccgtgccgggtagggccctgccccttccacgaaagtgagaagcgcgtgcttcggtgcttagagaggccgagaggaatctagacaggcgggccttgctgggcttccccactcggtgtatgatttcgggaggtcgaggccgggtccccgcttggatgcgaggggcattttcagacttttctctcggtcacgtgtggcgtccgtacttctcctatttccccgataagctcctcgacttcaacataaacggcgtcctaagggtcgatttagtgtcatgcctctttcaccgccaccaccgaagatgaaagcaaagatcggctaaataccgcgtgttctcatctaanaagtgggaactnacagatgacagttcttgcatgggcagaacgagggggancggggacgcggaaacctggttgaaggaggaggggtggaatgaaagacagcttcagg

SEQ ID NO: 206979 - DNA, 1000 bp, Homo Sapiens
ctgcctcttcctacacatcgggcgaggcctatattacggatcatttctctactcagaaacctgaaacatcggcattatcctcctgcttgcaactatagcaacagccttcataggctatgtcctcccgtgaggccaaatatcattctgaggggccacagtaattacaaacttactatccgccatcccatacattgggacagacctagttcaatgaatctgaggaggctactcagtagacagtcccaccctcacacgattctttacctttcacttcatcttacccttcattattgcagccctagcagcactccacctcctattcttgcacgaaacgggatcaaacaaccccctaggaatcacctcccattccgataaaatcaccttccacccttactacacaatcaaagacgccctcggcttacttctcttccttctctccttaatgacattaacactattctcaccagacctcctaggcgacccagacaattataccctagccaaccccttaaacacccctccccacatcaagcccgaatgatatttcctattcgcctacacaattctccgatccgtccctaacaaactaggaggcgtccttgccctattactatccatcctcatcctagcaataatccccatcctccatatatccaaacaacaaagcataatatttcgcccactaagccaatcactttattgactcctagccgcagacctcctcattctaacctgaatcggaggacaaccagtaagctacccctttaccatcattggacaagtagcatccgtactatacttcacaacaatcctaatcctaataccaactatctccctaattgaaaacaaaatactcaaatgggcctgtccttgtagtataaactaatacaccagtcttgtaaaccggagatgaaaacctttttccaaggacaaatcagagaaaaagtctttaactccaccattagcacccaaagctaagattctaatttaaactattctc

SEQ ID NO: 206980 - DNA, 1000 bp, Homo Sapiens
ctgcctcttcctacacatcggacgaggcctatattacggatcatttctctactcagaaacctgaaacatcggcattatcctcctgcttgcaactatagcaacagccttcataggctatgtcctcccatgaggccaaatatcattctgaggggccacagtaattacaaacttactatccgccatcccatacattgggacagacctagttcaatgaatctgaggaggctactcagtagacagtcccaccctcacacgattctttacctttcacttcatcttacccttcattattgcagccctagcagcactccacctcctattcttgcacgaaacgggatcaaacaaccccctaggaatcacctcccattccgataaaatcaccttccacccttactacacaatcaaagacgccctcggcttacttctcttccttctctccttaatgacattaacactattctcaccagacctcctaggcgacccagacaattataccctagccaaccccttaaacacccctccccacatcaagcccgaatgatatttcctattcgcctacacaattctccgatccgtccctaacaaactaggaggcgtccttgccctattactatccatcctcatcctagcaataatccccatcctccatatatccaaacaacaaagcataatatttcgcccactaagccaatcactttattgactcctagccgcagacctcctcattctaacctgaatcggaggacaaccagtaagctacccttttaccatcattggacaagtagcatccgtactatacttcacaacaatcctaatcctaataccaactatctccctaattgaaaacaaaatactcaaatgggcctgtccttgtagtataaactaatacaccagtcttgtaaaccggagatgaaaacctttttccaaggacaaatcagagaaaaagtctttaactccaccattagcacccaaagctaagattctaatttaaactattctc

SEQ ID NO: 206981 - DNA, 1000 bp, Homo Sapiens
ctgcctcttcctacacatcgggcgaggcctatattacggatcatttctctactcagaaacctgaaacatcggcattatcctcctgcttgcaactatagcaacagccttcataggctatgtcctcccgtgaggccaaatatcattctgaggggccacagtaattacaaacttactatccgccatcccatacattgggacagacctagttcaatgaatctgaggaggctactcagtagacagtcccaccctcacacgattctttacctttcacttcatcttgcccttcattattgcagccctagcagcactccacctcctattcttgcacgaaacgggatcaaacaaccccctaggaatcacctcccattccgataaaatcaccttccacccttactacacaatcaaagacgccctcggcttacttctcttccttctctccttaatgacattaacactattctcaccagacctcctaggcgacccagacaattataccctagccaaccccttaaatacccctccccacatcaagcccgaatgatatttcctattcgcctacacaattctccgatccgtccctaacaaactaggaggcgtccttgccctattactatccatcctcatcctagcaataatccccatcctccatatatccaaacaacaaagcataatatttcgcccactaagccaatcactttattgactcctagccgcagacctcctcattctaacctgaatcggaggacaaccagtaagctacccttttaccatcattggacaagtagcatccgtactatacttcacaacaatcctaatcctaataccaactatctccctaattgaaaacaaaatactcaaatgggcctgtccttgtagtataaactaatacaccagtcttgtaaaccggagatgaaaacctttttccaaggacaaatcagagaaaaagtctttaactccaccattagcacccaaagctaagattctaatttaaactattctc

SEQ ID NO: 206982 - DNA, 1000 bp, Homo Sapiens
ctgcctcttcctacacatcgggcgaggcctatattacggatcatttctctactcagaaacctgaaacatcggcattatcctcctgcttgcaactatagcaacagccttcataggctatgtcctcccgtgaggccaaatatcattctgaggggccacagtaattacaaacttactatccgccatcccatacattgggacagacctagttcaatgaatctgaggaggctactcagtagacagtcccaccctcacacgattctttacctttcacttcatcttgcccttcattattgcagccctagcagcactccacctcctattcttgcacgaaacgggatcaaacaaccccctaggaatcacctcccattccgataaaatcaccttccacccttactacacaatcaaagacgccctcggcttacttctcttccttctctccttaatgacattaacactattctcaccagacctcctaggcgacccagacaattataccctagccaaccccttaaacacccctccccacatcaagcccgaatgatatttcctattcgcctacacaattctccgatccgtccctaacaaactaggaggcgtccttgccctattactatccatcctcatcctagcaataatccccatcctccatatatccaaacaacaaagcataatatttcgcccactaagccaatcactttattgactcctagccgcagacctcctcattctaacctgagtcggaggacaaccagtaagctacccttttaccatcattggacaagtagcatccgtactatacttcacaacaatcctaatcctaataccaactatctccctaattgaaaacaaaatactcaaatgggcctgtccttgtagtataaactaacacaccagtcttgtaagccggagatgaaaacctttttccaaggacaaatcagagaaaaagtctttaactccaccattagcacccaaagctaagattctaatttaaactattctc

SEQ ID NO: 206983 - DNA, 1000 bp, Homo Sapiens
ctgcctcttcctacacatcgggcgaggcctatattacggatcatttctctactcagaaacctgaaacatcggcattatcctcctgcttgcaactatagcaacagccttcataggctatgtcctcccgtgaggccaaatatcattctgaggggccacagtaattacaaacttactatccgccatcccatacattgggacagacctagttcaatgaatctgaggaggctactcagtagacagtcccaccctcacacgattctttacctttcacttcatcttgcccttcattattgcagccctagcagcactccacctcctattcttgcacgaaacgggatcaaacaaccccctaggaatcacctcccattccgataaaatcaccttccacccttactacacaatcaaagacgccctcggcttacttctcttccttctctccttaatgacattaacactattctcaccagacctcctaggcgacccagacaattataccctagccaaccccttaaacacccctccccacatcaagcccgaatgatatttcctattcgcctacacaattctccgatccgtccctaacaaactaggaggcgtccttgccctattactatccatcctcatcctagcaataatccccatcctccatatatccaaacaacaaagcataatatttcgcccactaagccaatcactttattgactcctagccgcagacctcctcattctaacctgaatcggaggacaaccagtaagctacccttttaccatcattggacaagtagcatccgtactatacttcacaacaatcctaatcctaataccaactatctccctaattgaaaacaaaatactcaaatgggcctgtccttgtagtataaactaatacaccagtcttgtaaaccggagatgaaaacctttttccaaggacaaatcagagaaaaagtctttaactccaccattagcacccaaagctaagattctaatttaaactattctc

SEQ ID NO: 206984 - DNA, 1000 bp, Homo Sapiens
ttatcgtttcaatctggtctgacctccttgtgttttgttgatgatttatgtcaaatattaggaatgttttcacttaatagtattggttgcgtaacaaagtgcggtcctgctggcattctggagggaaatacaaccgacagatgtatgtaaggccaacgtgctcaaatcttcatacagaaagatttgaagtaatattttaaccgctagatgaagagcaagcgcatggagcgacaaaatgaataaagaacaatctgctgatgatccctccgtggatctgattcgtgtaaaaaatatgcttaatagcaccatttctatgagttaccctgatgttgtaattgcatgtatagaacataaggtgtctctggaagcattcagagcaattgaggcagcgttggtgaagcacgataataatatgaaggattattccctggtggttgactgatcaccataactgctaatcattcaaactatttagtctgtgacagagccaacacgcagtctgtcactgtcaggaaagtggtaaaactgcaactcaattactgcaatgccctcgtaattaagtgaatttacaatatcgtcctgttcggagggaagaacgcgggatgttcattcttcatcacttttaattgatgtatatgctctcttttctgacgttagtctccgacggcaggcttcaatgacccaggctgagaaattcccggaccctttttgctcaagagcgatgttaatttgttcaatcatttggttaggaaagcggatgttgcgggttgttgttctgcgggttctgttcttcgttgacatgaggttgccccgtattcagtgtcgctgatttgtattgtctgaagttgtttttacgttaagttgatgcagatcaattaatacgatacctgcgtcataattgattatttgacgtggtttgatggcctccacgcacgttgtgatatgtagatgataatcattatcactttacgggtcctttccggtgatccgacaggttacg

SEQ ID NO: 206985 - DNA, 974 bp, Homo Sapiens
actagttcataattttgttccagactagaaatcagtatttaataaatggaaaaaataagacactgaaaatcttttattgaataatgtaaattctcacagaggcctctgatcatacttttcaacttgtgcctatttattgaataaccaacatccttacagttaatattaaaatctttaagttgtgtggggttttttggaggggagggatgggcaattaccagcaaactccgcctcccccaaacctcacctaacccgaagctccccgcctcaggctcccggggagccaaggggtgggctgaggaacgcagcctacttttacccacctccctacctagtgctgggaagtgacggaaacggagacacccggctcctggggctggactcggaggacccatcctgctttccctctagcagcctttccggagctcaccacctttcctcccctcacaccgccaaagccctgcctagcccttcaccgccgcctgcacccgcgccctcctccagccgacagccaatcacagtcttccacagctccgagtttacagaagtaacgctccttgggccctctggtcccgccccctccagaactgcttcccgcccttcgggctccttgtccaatcatgagcgcccgagtgctctttgatgcccgtcccctctacccgccctgccgaagacccgccttcttctccttaagcctgacggaatcacctgactcggaggcgctccctcagaaggaaggcaagaaggggcgtgtgggtgaaggggaggggcgccagaaggaaggtggggatgccgggagcggggcgagcgggcgggggttgtcagtccgatctcgcgagagaggacggaagcctgtgggagcccgtggcctttaaagtgccgttcagccttttcctccaggggtgctttgtaaacacggctgtgctcagggctcgcgggtgaccgaaaggatcatgaactagtgacctggaaag

SEQ ID NO: 206986 - DNA, 1000 bp, Homo Sapiens
aattcagaatgtggtttgctgcagaatttacagcatggcaataaaggctctctgtgtttgcaggggtgagagaagagactagatgcattgtgtcagatgtctcctgacttcctgagaaatgccactttgcaaatactggggctgcttttcacactggccaagtcagtttatgacaaaaacatgaggcaattaggtgtgttttggacactaaccagagaaagtccttccttccctcccttccttcctcccttcttccctccctctctcccttcctgccttccttccttcccccttccctccctccctttctccctccctaagctccctccctgcctctcttttctctctcatgttactttctctttctgtcttcctttttaatgccatggagtactatattcttcaaagttccaacaaagatgcactacatttggacaatgtggaaatggccctcagccttctcttcctgatgtggtcagcaaaaatctggactttacttcactctgatgctgaacaccctgctccacgtcttccccagtatctcagatccccaagctgtctggtttgcttctaggaaagctcagcaattccctgaaaagagtgtggcccaagtgactgcttccctccaccagtgtggccgtggggaaggctgtggctgggtgacccaagggtgggtacatgaggccatatttacttagcccttggccttacaggactgtgtcaaggggtcagtagtccttgctttgagtctggttatggttttgcagcctcagcatcagcgtggcaggcccttttcaacagcagtgccctggctaatctttttctttttccccacagccaattccactgatcctgtgaaggctgcccaatttgagatgagtaatcccagccatctccttttcttcctgccttgtcccttctctcctgtttcctctctttttgcctttgttaatgcaaaattaaaatggagactaggcctgaaaactcctgagcaaacaaa

SEQ ID NO: 206987 - DNA, 1000 bp, Homo Sapiens
cctcccccctacccccaccccaccacagtccccagagtgtgatattccccttcctgtgtccatgtgatctcattgttcaattcccacctatgagtgagaatatgcggtgtttggttttttgttcttgcgatagtttactgagaatgatgatttccaatttcatccatgtccctacaaaggacatgaactcatcattttttatggctgcatagtattccatggtgtatatgtgccacattttctttctctctttttttaaattacatgttaagttctgggatacatgtgcagaacgtgcaggtttgttacataggtatacatgtgccatggtgttttgctacacccatcaacccgtcatctacattaggtatttctcctaatgctatccctcccctagcccctcaacccccgacaggccccagtgtgtgatgttcccctccctgtgtccatgtgttctcgttgttcaactcccacttatgagtgagaacatgtggtgtttggttttctgtccctgtgttagtttgctgagaatgatggcttccagcttcacccatgtccctgcaaaggacatgaactcatcctttttatggctgcatagtattccatggtgtatatgtgccatattttctttatccagtctatcactgatggcatttgggttggttccaagtctttgctattgtgaatagtgctgcagtaaacatatgtgtgcatgtgtctttatagtagaatgatttataatcctttgagcatatacccagtaatgggattgctggatcaaatggtatttctggttctagatcctcgaggaattgccacactgtcttccacaatcattgaactaatttacacacccaccagcagtgtaaaagcattcctatttctccaaatcctgtccagcatctgtttcctgactttttaatgatcgccattctaactggtgtgaaatggcatctcattgaggttttgatttgcatttctctaacgaccagtgatgatc

SEQ ID NO: 206988 - DNA, 1000 bp, Homo Sapiens
ctcgaccttttagattcccgccacactgaatctaaaagggacaatgtgacctctaagctggtggcctaggagcctgccgataacctacccattcatcagccctcgtgggtcaaggctgcctcgtcctccccgagagagtggagaggtcgagcagtggggatgcccctcaggccccggggcttactgactggggcgggtgtcagggggaactccctctctttctgagcttcactgagctatctgaaagtccccaccatactccccagtactgacagccagagggaggaacggctcaccagaatcattgggcatctctgatgggcatcaagtctgctttgattattgatgagtgggtaagagggtcctctcaacttggggtctccttgggaaagcactgtcaactcagaacaggtttcagccctgttctggagaccacaggccctggaaggctgggacatcatttgcagccccagcgtcatctattagacggagccagcaaggtctcatgctgtgcggtacatttcaacactttctcaaatttacccgtggcagcttttggtgtgtttggttatttttataacactactcactgtacaatttctgtcatgcacattttttgtatcaaaaagggtgctgtaactttaaaagactgggtatttccaacttggaatattcaaaccatcttttgcaagggatgttttaaatcaacatgaagggttgtgttgtttttaatcagggttaaggatctggaatcaaaggttatggtttactccatctatggcgtatcttaaaaactgagcaagatgtccttgccttttttgaatttgatgattgtgctgcagttccacagctcactgttaggtggcacataccccaaactgaaaacctgagcttggaggaaatgagtgaaaagataggtaggtacaggacagggcagtggtgacactacagcattcagggttcccagcctgtcaagaatgagcatgtcttagcagtgagg

SEQ ID NO: 206989 - DNA, 1000 bp, Homo Sapiens
caagtaaggacaccttacctatttcttttttctacttcagccaccaactcatcagtagagaactgtcctctcactgccatgattaagtgtttaatcacttcctcagaacaatccacatcaagcagccctccaatcacagctggggtccggctagggttgacctagggtagtcaaggtcaagtaacttcagtgttgcaaacacaagttattgttagaagcctcctacgacgtggacagtttgggcaaaaccctgaaagggctcctgtttagcactgcgctgtgtcccaccaaaattcacctgctgatgtcctaacccctagtgggattctacttggaaagagggtgtttaagaaggtaatcaatgtcaagggtggggccctaatgtaatgggactagtgtccttctaagaagaggaagagacaccaggagtgcacatgcacagaggaaaggccctgtgagggcacagccaggaggctgtctgcaagcgtgggagacagccttcaccagaaaccagccctgccgacaccctgatcatggacttccagcttccaaaactgtgagaaataaatgtgtgttgtttcagctgcctggactgtggtcttctactctggcagtctgagcacacgaacccaccacccttcaaaatgatagtctctgaaatgtcaggtgttacaggcagcctctgaggggaagactgccactgactggggcccagaggcagccgggtgtcactccagggagccagcagtaccttctgcacgtagatctcaatgtacctctgcaggttgttgcggtataaatataggacaaggtcatggacaaagccaaaacgatcacacacgatgatgaggggaagctggtctgtgagcttggcctcctgaggattagaatgcacagaacaagtcagggagtggagaaaccagacagccagacctcggactcattgcacacatgggacggctctgtctctgcagcagagtgacacacaggagactcagaa

SEQ ID NO: 206990 - DNA, 1000 bp, Homo Sapiens
ggtgatcagagcagagcccgcaagcagagggcagtggatccgcaaattggaaactaaagacttaggcacttccgggtcctgctgggtgtgtcctcggaataccagggggatcttgggcactgaaaatgggacctggaagtaggggaggggagtaggagtgttcctcactcccacctaggaggaaggcatctccgattccattccattgatgctgagtgccggagataaatacatttactgaaagaaaagctggataaatgagtggatgaatgcaggtctggtccatacagggcaatttacatacaacatcttaatttgtcctgggaggtgggtagctctactttacagatgttcaagtaacataatggaggtcacacagcaaggaagtagcagagccaggaataaaaccgagaactccccagctcttttttgtgtttctttgttttaaagggagtcttgctctgtcacccagctggagtgtagtggcatgatcttggctcactgcaacctccacttcccaggttcaagcaattcggactcagcctcccaagtagctgggattacaggcatgtgccaccaaacccagctaatttttgtatttttagtagagacggggtttcaccctgttggccaggctggtctcaaactgacctcaggtgatccaccagcctcggcctcccaaagtgctgggattacaggcgtgagccactgcgcccggcctaatttttgtatttttagtagagatgggatttcactgtgttggccaggctggtctcaaactcctgacctgaggtgatcaggcccccttggcctaccaaagtgctgggtttacaggtgtgagccaccgcacccggcctcgccagctcgtttttaccaaacaacaccagatcctttagggggggttattgcgggcggatttttgaaacggagggctggtgataggctttttataggtatgcatgtatatggttctagcgtagtggattttgggaattgcggt

SEQ ID NO: 206991 - DNA, 1000 bp, Homo Sapiens
gactgctttgaggcctactgtagtaaaggaaataacttcatctaaaatccaaacggaagcattcacagacaattcttagtgataattgcattgatctaacagagctgaacattcctttagatggcgtagtttccaaacacactttctctagaatctgcaagtggatatttggacttctctgaggatttcgttggaaacgggataaacttcccagaactacacggaagcattgtgagaaacttctttgtgatgtttgcattcaactcacagagttgaaccttgctttcatagttcagctttcaaacactctttttgtggaatctgcaagtggatatttggaccactttgtggccttccttcgaaacgggtatatcttcacatcaaacctagacagaagcattctcagaatgtttcctgtgacgactgcattcaactcacagaggtgaacaaccctgctgatggagcagttttgaaactctctttctttggattctgcaagtggatatgtggacctctgtgaagatttcgttggaaacggtttcatcttcacagaaaaactaaacaggagcattctcagaaactgctttgtgatgtttgtgttccacttcaagaattgaactttcctcttgacagagcagctctgaaaccctctttttctagaatctgcaagtggacatttggagggctttgaggcctgtggtggaaaaggaaaatcttcacataaaaactagatggaagcattctcagaaactactttgtgatgattgcattcgactcacagagttgaacattcctatagatagagcaggttgtaaacaatgtttttgtagaatctgcgattggagatttggactgctttgaggcctactgtagtaaaggaaataacttcatctaaaaaccaaacgcaagcattcacagacaattcttagtgatcattggattgaactaacagagctgaacattcctttagatggagaagtttccaaacacactttctgca

SEQ ID NO: 206992 - DNA, 1000 bp, Homo Sapiens
  misc_feature (371)..(380): n is a, c, g, or t
  misc_feature (562)..(567): n is a, c, g, or t
tactttcccagctagaagttgcactaatgttaatgtagtctttatccgcagacatgttgacaacactctcagagggcaaatagtcttgagttcttcctggggcactgaggatgggtttttactgggccataatcactgtggcttaatccctcttgcgacagacacaagttggttgggactgggttacgggtgtattgtgtggccaaacagagagattataattgttttctggggatgacccttgactcagattggcggcattggcattggggttcttttttttttttgagacggagtcttgctctatcgccaggctggagtgcagtggtgcgatattggctcactgcaacctctgcctcccagttcaagcnnnnnnnnnncgttggccgattcattaatgcagctgggcacgacaggtttcccgactggaaagcgggcagtgagcgcaacgcaattaatgtgagttagctcactcattaggcaccccaggctttacacgtttatagcttccggctcgtatgttgtgtggaattgtgagcggataacaatttcacacagaaannnnnnttagcaaggtcgatctgtgtctttctaaagcatgtcagtaacataaaaatgactgctttttttattatctacacattgtttcctttactcatgctgtcaaaattttagagagagtttggaaggaagtgttatcagaatgattaggggagagcaagagatcagatacacacagatgaaagcacaaacagcaaccatttgaattagggggtgaggcaggagtttcacttcattttactatttaaagtatttacatctaattcaaagtaccaaggaaatgggtaaatttgaagtgggagacccctgggaagaaggttggggactgaggagagagggtggtcccggagaggagtcggctggaccacggggggcacccccgtcctcctccaatggcctgatggttcctggtctggtgtgaggcactgcggcaggatcc

SEQ ID NO: 206993 - DNA, 1000 bp, Homo Sapiens
gaaggttctcatgcatcgccccgagctgccaggcgagcttcgggctccttaaattcacaggccaacagcccgcgtcctctccgcgcaggctcccggttgcccgcggtccccggcccagctccttggcctcctcctcgtcggtccgcccctggtggtcttggcgcccgctcgtccagctcggcgcgccggggaccgccggctgcccggggcagtccgcacgccctcggggatctcggctcccggatccgccgcgccggcaggagccggccgggcctggagggagcaagcggatgcgcccacgcccccggcacggggatggcgcgacagggcccgggctccggggtggggctcggcagagctcctgacagctccggggctcggcagcgcgggaggggggagctccgccgctcgccgctcattcccggctcggggctcccctccactcgctcgggcggcgcggggcccgttcgggccgcccgtcgccgcccccgccccccgcgcgcccgcccgccagcccgcctgcgccctcgctcgccccgcgcgcgttcctagggcgccacctctttgcgactagctcacttctccggcaggtttgcctcggagcgtgtgaacattcctccgctcggttttcaactcgcctccaacctgcgccgcccggccagcatgtctccccgcccgtgaagcgggctgccgcctccctgccgctccggctgccactaacgacccgccctcgccgccacctggccctcctgatcgacgacacacgcacttgaaacttgttctcagggtgtgtggaatcaactttccggaagcaaccagcccaccagaggaggtagacagacagctatgtatatatatgtgggtttcgctacaagtggctctggaacgaaagggcctggttcgcaaagaagctgacttcagagggggaaactttcttcttttaggaggcggttagccctgttccacgaacccaggagaactgctggccagattaattaga

SEQ ID NO: 206994 - DNA, 1000 bp, Homo Sapiens; identical to SEQ ID NO: 114778

SEQ ID NO: 206995 - DNA, 1000 bp, Homo Sapiens
cccctgaccccgagatacagagactgtggcccggtcaaggttagggacaggacccccgtccagtcacgaagcccctgccccctcccctcaaggccccactctaggggagctctcctggaacatcaagctccccgcagccgaggctgggaagatgcggttcttcccacggagagaaaccgaagccgacactccccaacacttcctcgccggaagtaaccaagtccaatcttgccctgtccaacggggttaaaccgttagatcccacccccccccgaaagcacttccgcgtcctctctaggaatcccggaggacctcacctcgcacggggggcggaccaatcggcggggagatgggacgcgggccccgagtcccagcccaccctcagtgactcggacgtctccagggcccccgaagccgctcgcacagcatcaccaaagcggggaggcaaacggagccactctctcccctgctccatcccaaagccattcaaacagcccaagctcctcccctttccgtggggcggggaagggggcggggcctccagagttgggctgaggttgctcgtgtctgattggccggggagcttgcgccttcccccacccccaacgctctgcgccccgatttgaagtaggtctgtaccttgctgacagcccgcaaacctcgcttatgttgaatttggggcccttaggttttcttcacccgcatcctcgctactctcaccacccactttccaaacaaacccacctcttgaccaccgcagtcggctcagaaggccgacatcttcaacgtcacacccgcgagtcgcaggggccagctgttcccggaactacatctcccaggaggtggcgcgcgggactcgccggttggccaatggggggcggctctctttgcagcctcggtctcgcgagcctatcagaaggtggcagggcccggagtcgtgtcctcgggagccaaggctggaaggctgggagtgggcggagggagcggggcatccctttga

SEQ ID NO: 206996 - DNA, 1000 bp, Homo Sapiens
acacctgtaacccttgttgagggaccgaggtgggaggattgcttgagcccaagggttcaagaccagcctggccaaaagggcaagactctgattcaagggaaaaaaaaaaaatccagaaagaaatgtgaaaactttcagaacttcgtaggaaataaatatctgctaagttcttcttggatttaatattattactattttttatatgtcggtgcactttgaaaaggaatgaagtttaaggttttcttcttttaaaagtaaggcaatggggccaggtgcggtggctcacgcctttaatcccagcactttggggaggctgaggcaggcagatcacttgaggtcaggagttcgagagcagcctggacaacatggtgaaacgcggtctttaccaaagatacaaaaactagccaggcatgatggcaggcacctgtaatcccagctactcaggaggctgagacaggagaattgcttgaacccagcaggcagaggttgcagtgagccaggactgtgccacagcactccagcctgggtgacagagtaagactccatctcaaaaaaataaaaaattaaattaaggcaatgatttgcattcctttgcagtcaaaattcacattcagggaaatctggaatcaggtagaaatacaagcagacctatttatttaaagaggtgggctatagccgggcatggtggcgggcacctgtagtcccagctacttaggaggctgaggcaggagaatggtgtgaacccgggaggcagagcttgcagtgagccgagatcacaccactgcactccagcctaagcgacagagtgagactctgcctcaaaaaaaaaatttttttttttaaataataaaaaaaataataaagaggcgggctgggcacggtggctcacgcctgtaatcccagcactttgggaggctgaggtgggcggatcacgaggtcaggagatcgagaccatcctggttaacatggtgaaaccccgtctctactaaaaatacaaaaa

SEQ ID NO: 206997 - DNA, 1000 bp, Homo Sapiens; identical to SEQ ID NO: 114752

SEQ ID NO: 206998 - DNA, 1000 bp, Homo Sapiens; identical to SEQ ID NO: 114841

SEQ ID NO: 206999 - DNA, 1000 bp, Homo Sapiens; identical to SEQ ID NO: 114785

SEQ ID NO: 207000 - DNA, 1000 bp, Homo Sapiens
ttaatcaagaaagagggaagggagttgtgtcccttcactttgtaggatcggatcctgtccacccagttcccgaatgctctcaacagttacccaaccgcctgtttcaaaggcttccctgttgctcagaatgccacctggacacttctggaaggagactatcagggagataggcttcccctcctcccaggctgtgtacaggtccccactcaatccagcccagggcagagtccaaacggggagggagacgcagacagggtcaaagggaccccaagagtccagcacatctgggaaagagaaaaggaaaaggtgctgtggcttcctgtagctggggcgcacgccagcgcgccccctttcctctgggaggacccccggcccccgttcgtccccgagctcccagcccgcctccgggagccccagtgagaggaaaaacgtgcggggaccccccagcagctccaaacgccgaggcgctccccgcgagcctcagacccgacccaacgccaggactcgcgccgccggcccgggaagaaacccccacagcccgcgccccgggctggctggagggtgggggcggctagccaggcagggcgccgaggcccgggctccgggagcggcccagcgggcaggggagactgggcccggaggccgggtttggggctgtccagccgggacagagggcccgggcgggggggtccccctgtgggaacaaggagtcagggggcggcccgggcctggcgccctgcgctgggaggccgactccggagcggcccgggcggcctgggtcgggaccggggccgggggaggagcccgcaggccgcacctggtcggcgaagtcctcggccgtgcccatcaggtcgttctggcccatggcgacggcgggaggctcggctcggctcgctcgctcgctcgctggctctcgcccgtcggcgcccgcacccgctgcggcctccacaggaagtgcccggcggccggcctcgctccgcgtcggctgcggctccagcgg

SEQ ID NO: 207001 - DNA, 1000 bp, Homo Sapiens; identical to SEQ ID NO: 114976

SEQ ID NO: 207002 - DNA, 1000 bp, Homo Sapiens; identical to SEQ ID NO: 114794

SEQ ID NO: 207003 - DNA, 1000 bp, Homo Sapiens
atcagtagagaattggacagataaatatccataacatacattttaacaacagttaaaatgaacgaaatagaacaagatgtggtaacatggaaatatccccaaggtatgttgttcagtgaaaaaagtaagttgccaagtaatatgtacaaagcaatatggtttatatcaaaacacattcaaaacatacacaaagcagttagcatacacgtgtgtgtatatatgtgtgtgtgtgtgtgtatatatatatatgtatatgcccacacacacacatatatatgtatgtgcccacacacacatatatatatgtatgtgcccacacacacacatatatatatgtatgtgcccacacacacatatatatatatgtatgtgcccacacacacatatatatatgtatgtgcccacacacacacatatatatatatgtatgtgcccacacacacatacacacagatacacattcattcatttaaccaagagtaatggggtgccaactatccatttccatgaagtttattttagtagagaatgcaaatacgtagagagaaaaaggaccggaaaatgcacacaagattgataataatggttatttctggaaaagacagcaagaaagagaagtgtcaagataatctttgatctgcagtgtttatatttttgaggtacatgtatttttagactatgtattgagaaccaccaattatgagtccaacttgcactccattttacttatttgagaaggtaaataagagaattcagaacattaggctcaaactccaattcctttgcttcagtctatagtaaatacctattgagaatagcaccaaaaagcagtcagaatgagaggaaagaaaaagaagcaatgatgtgaatggatgatcccagaaagagtgatactatgtggattgaatatgctggaaattttttttaaatgtcaagaaagacctgtcttgtgagacaaaggcatgcagtttttgtcccatgtggtgtaagatttaagatc

SEQ ID NO: 207004 - DNA, 1000 bp, Homo Sapiens; identical to SEQ ID NO: 114820

SEQ ID NO: 207005 - DNA, 1000 bp, Homo Sapiens
caaagtgctgggattacaagtgtgagccactgtgcccagctaaatacagatatttttcactggtgaacatactttcaatcggtgccttggtttagtaccagtcttttgctattataaaaaatgctgaaatgaatgatagtgttttatgtcatttgaacatatgcactggtaattttgatgggtactgccaaactgccctccatagaaatggccctaaccccttctcccacaatgtgtgtgagtgctgacagcctactgcttaatgttgggttttgctaatttgacaggtaaaaatagtactgcattgtggttttaatttgctttttttcttactgtgagtgaagataaacatctttttatgtttaaggtctattttatattattctgtgccatatttgttcatgtcctttggccattttttctactgagtaataacacaaataggcatgccattcatttatatgtgtgtctgtgtatttctgcagacaaagataaaacaatgttcattgttggtatgtgggtgaaaaaataagtgattgtgtgttttctgttttctccggtgaatccttttaaagtaaacatttttatatattagaattaaaacaatgtgttactgaacattgggaaggttttctggtttgcctacaatcagcttgtttctgtgaaacatgttcttttggaaaccaagtagagaatcctacttgtaaacaaagcaagaccaaccagacttaagaaagatcaaatttaatttagatctactccttgattctcatgaattgattgaatctctttagggcaaatacctggcctctatagagaaatctggaatgatttctgcactgggagaggaaactttcagatcactaagggctttgtggggctgatatcaccagccgaggtactgggcaatgtctcctgtggtttcacacttcttagcgatttccttccccaacgcaagctgggctgccccgaacttcagcaatgtagagagagaatgcag

SEQ ID NO: 207006 - DNA, 1000 bp, Homo Sapiens
caccccatcggtagcccacccccttccccgaggctaagggaggcatgccgtggtagtggcggctcctggtcttacatgagtggcctgtgagaccaggcctgccattgacagtcctgccaagtctccgtccccctccatcctccccttccctctgactcttctcttttcccagcctacctctcctctcccctggccctgcccagccagaggaggagcccccccgaggagccacctgacttctgctgtcccaagtgccagtatcaggcccctgatatggacaccctgcagatacatgtcatggagtgcattgagtagggccggccagtgcaaggccactgcctgccgaggacgtgcccgggaccgtgcagtctgcgctttcctctcccgcctgcctagcccaggatgaagggctgggtggccacaactgggatgccacctggagccccacccaggagctggccgcggcaccttacgcttcagctgttgatccgctggtcccctcttttggggtagatgcggccccgatcaggcctgactcgctgctctttttgttcccttctgtctgctcgaaccacttgcctcgggctaatccctccctcttcctccacccggcactggggaagtcaagaatggggcctggggctctcagggagaactgcttcccctggcagagctgggtggcagctcttcctcccaccggacaccgacccgcccgctgctgtgccctgggagtgctgccctcttaccatgcacacgggtgctctccttttgggctgcatgctattccattttgcagccagaccgatgtgtatttaaccagtcactattgatggacatttgggttgtttcccatctttttgttaccataaataatggcatagtaaaaatccttgtgcattagtcgtgcgtatctttggcatagattctgagaagtgacaccactgagcatgggcgatggcgtagatggtacctgagcccccttcctccttggagcttggtt

SEQ ID NO: 207007 - DNA, 1000 bp, Homo Sapiens
catgcacaacaatcaaaccagaatggaaaagactccaagtcaccaatgtcaagaaaaggtcaggaatccttcaaaaaataggaaaatactcctaaaacaccagaagaacctagttctgcagaagacattaaagcaaacatgcagccaagtatagcaaaaggtggttctcttttcagagtggaagccaagaaaatcaattatgtgaatggcttctggatgactgactagggggctattcaagatctctggcagggcaggaagtctctttaagaaaataaacagttaaaaatgttccatcttatttcgtatctctaacagttgatatctggcagtcctttttataatgcagaatgagaactttccctaccatgtttgatcaatgctgtccaggttccattgccaagaatatgttgttcccaaatgccagtttgttttagatagggtcttgctctgtcacccaggcgggagtgcagtggtgtgatcacagctcactgtagcctcaacttcctgggctcaagcgatcctcccaccccagcctcccaagcagttagaaccacaggcacatgccaccactcctggctaatctttttatttttttgtagaagacagagtcttgctgtgttgcccaggttggtcttgaactcctgggctcaatcaatctttcccctctggcctaccaaagtgctgggattacaggtgtgagccactgtgcccagcccaaaatgcctgtttagttattaaagatggaactccactctctgcttggttttaagtatgtatggttttaagtaagtatgataggacatagtagtagcggtgatcagacacggaaatggtggggagataaaaaaaatacatgcgaaataaaactcagtattttaataaagtaaaaaaaaaaaaaaaagaaaaaagacacatcactcccatccatgccctcccgagctaaggctggtctacccatgccaggtgtgagcaggcaccacggccacgctgctctcag

SEQ ID NO: 207008 - DNA, 1000 bp, Homo Sapiens; identical to SEQ ID NO: 114933

SEQ ID NO: 207009 - DNA, 1000 bp, Homo Sapiens
aagttcccaaggcctacagctgaaggttggagaaatgccagctgccctttcgtccccacactgtggaggaagggacctgtggcagctcacaggcatgaggggtggccgtgcacaggtgcccaggctccaaggacagctccggcagcaggtcctcgctgggcagatgctgctccctgagggcccaggtggtggaggtggggttggagcaggaagggaattttgatttttttttttcttgatagatactaataaaaataaggctgtgtaattttctctcagcccttaggtacctgtgttttgtttgggaactcggaggccctccccctcccccagctcagaccacagaggtggcaagagaagggctgaagctggaagactgttcatgagggacttgtgtgacctgctttgaaatgtgtgactctgctgagtgacgtaggctctgagatagctgtccacgcccacgtgtttgcttggaataaatacttgcctcagaaccttcacctgttccctggggccatttctgtttgtctgtctgctggagagtgagcccacctcctcccatgcaggggcatgtgtgaggcacccctcttggctgaggcacaaccctgcacgggccccgcagcttcttgtcagcatggaaaggggctgcaggcccaggcctgaagtcttgaggcgccaggtggtcatgtctgcaagagggcacgcaggatgacctgtagcaacagacactccttcactgaggttggctcggctgctaaaatcatgttaagagtaaatacaaaataattattctttgtttttaaggcggagtttcgctcttgttgcccaggctggagtgcagtggcacgatctcgactcactacaacctctgcctcctgggttcaagcgattctcgtacctcagctcctgagtagctgggacaacaggcgcccgccatcacgcccggctaattttttgtatttttagtagaggcagggttttaccatgttggccaggctgg

SEQ ID NO: 207010 - DNA, 1000 bp, Homo Sapiens
gcacctctttgtcacagggtgttggaagatgcatccatgtaatctattcccatcgctggaaaacagctgctgttagatgtcctcagaagtcagttgcaaattttagcgttaaagtcaggatttattgttcatacttggcggtgaggagggcagctggagatcttaagattccattttggaaaatgattaggcccgccaaacttctgaactttggaagctggggatgtttagtaatacagcctggtttttaagtactcactaaaagttctcaaatattgggttgggcacggcttataccaggttacctcacttttaattagtgatgcaggcagtgtaacccaagcatttgtggacaatgagtggaatactaaagttaaaaagtcaaactttcacctcagattttctggacttagtcatgaggagagggtgaggcccactctgttcctactggagataccagagactctgaaactatagaataaagcctctgtgctgcacaacaaaggggcaggctctgcttttatttcttgtaagaaccaacatagtatgaaaggttggtcaatgcggacattaatggaaaaggccatgtactggtggtgtgatgtgaatccagaaattttcaagtgtgtcatttattttatacttatcaattaaaactcaagatcatggattgggagaccaagttaatttaattaactggggcttctgtattcgtaaatgaaccatgagtcagggctaactcccataggtttcatgaggtgtggatgagtagcttagcttgtatcctttctcacatgggtgtgtgtacaaaactccatgaagtcactattaccagagtactctgggctaggcattgtaacagttcagggaaagtaaggccctgctttctaatatgcatttgtggcaatatggttgtgagtgtgtatacacacacacgtacattactgtgatcagtgatgcagacagtgtaacccaagcctttgtggacagtgagtggaat

SEQ ID NO: 207011 - DNA, 1000 bp, Homo Sapiens
ttatcaaaatgtgaccgctcccgccaatcttcggtgatattcttcaactttgatttttcggttatattttcactactgaaaaggaaattggtaggttttctgtaaggttacttttggtcctagaaagctgtttacacctactagggaggcatatgggttttcttcttaatgagacttcactgcttagggttctaaaacataaagttatgctgtttatttgtgttagtctgtattcttgatttcattgttttgaagttaaatctgaaattttattttacaggacattttctttaactttgcaaactggtcttcctgctggcacatactgtgatgtcatttctggagataaaattaatggcaactgcacaggcattaaaatctacgtttctgatgatggcaaagctcatttttctattagtaactctgctgaagatccatttattgcaattcatgctgaatctaaattgtaaaatttaaaattaaatgcaaatccgcaaagcaatagctaagtgtgtttcttttcttacatatacagtaatagttacatatcattaattttaaataaaagctctaattagtaaaaagaggtttaagacacttgatagtatgaaatacaattccaggttacacataagttatttattttggcaaaaggatgactcaaaaattttaaaactaggcaacaatctttactcattaagaggtaagacttagctttccaaacagtttgtctcctgtctactcttttctctccttggcattctaccaacaaggcaaaccaaatatttcattattcttctctattacatgaaaaatctgtacaagggaaggaaagccaaattttacccttacataggtttcaaaagaatcctttttccataggcaacatttacatttttatgcctttttataatcttttaccacaaacacatttaagtgttcctacacaccttgcatgtaaatttatttttagttgtcttatttacatatttttatggtc

SEQ ID NO: 207012 - DNA, 1000 bp, Homo Sapiens; identical to SEQ ID NO: 114964

SEQ ID NO: 207013 - DNA, 603 bp, Homo Sapiens
gtagaacatggcgcagggacaacgcaagttccaggcgcagaaacctaaaagcaaggctgccgcggcggagcggagccgcgggcctcggaaaggcggtcgagtcatcgctcccaagaaggcgcgcgttgttcagcagcagaagttgaagaagagtctggaagtggggatccggaagaagattgagcatgatgtggtaatgaaggccagctccagcctgcctaagaggcttgcactgctgaagggagcatcaaagaaatcagaagccaccatccctggcaagacaccatcctgaaggcactgggactttgctggtcaccccacaggctggctggacttggaagagggccctgctccagtcctggtggcccctggaacaatgggcaggtgatggtaaagccaggctagctcccaagggctgaagggtgctcagcctcctctgctggtgtgatgataaatgtggctctgttgtctctccagccattcagtgggcataatctcacccccagtcatctaatgtcagcctgtcacaccagcaatcccgagccacttggggatgctccagtgttacccaataaagctgtcccgggggcaaaaaaaaaaaaa

SEQ ID NO: 207014 - DNA, 1000 bp, Homo Sapiens
ggctttcagtggactatggcaagaagtccaagctggagtttgccatctacccagccccccaggtttctacagcggtcgtggagccttacaactccatcctgaccacgcacaccaccctggagcattccgactgtgctttcatggtggataacgaagccatctacgacatctgccggcgcaacctggatattgaacgtcccacatacaccaacctcaaccgtctgattgggcagattgtgtcatccatcacagcctccctaaggttcgatggcgccctgaatgtggacttaacagaattccagaccaacctggtgccataccctcgcatccacttcccactggcgacctatgccccagtcatctctgctgagaaggcataccatgagcagctgtcagtagcagagatcaccaatgcttgcttcgagccagccaatcagatggtcaagtgtgaccctcgccatggcaaatacatggcctgctgcatgttgtaccggggggatgtggttcccaaagatgtcaatgcggctattgccaccatcaagaccaagcgcaccatccagtttgtagattggtgcccgactggatttaaggtgggtattaactaccagcctcctactgtggtccctgggggagacctggccaaggtgcagcgggctgtgtgcatgctgagcaataccacggccatcgcagaggcctgggcccgcctggaccacaaatttgacctcatgtacgccaagcgggcctttgtgcattggtacgtgggagaaggcatggaggaaggggagttctccgaggcccgggaggacctggcagcgctggagaaggactatgaagaggtgggcgtggattccgtggaagcagaggcagaagaaggggaggagtactgagcgcatgggtctggctggcggccgtccatttacaccttccccaccattggaaataaaggatatgtttacttattaaagtttccaaaaaaaaaaaaaaaaaaaaaaaaaaaaaa

SEQ ID NO: 207015 - DNA, 977 bp, Homo Sapiens
gcgggcgagggcgtggggccggggctctcccggcatgctctgcggcgcgcctccgcccgcgcgatttgaatcctgcgtttgagtcgtcttggcggaggttgtggtgacgccatcatgggagctccggcgctgccccagatctggcagctgtacctcaagaactaccgcatcgccaccttcaagaactggcccttcctggaggactgcgcctgcaccccagagcgaatggcggaggctggcttcatccactgccctaccgagaacgagcctgatttggcccagtgttttttctgctttaaggaattggaaggctgggaacccgatgacaacccgatagaggagcatagaaagcactcccctggctgcgccttcctcactgtcaagaagcagatggaagaactaaccgtcagtgaattcttgaaactggacagacagagagccaagaacaaaattgcaaaggagaccaacaacaagcaaaaagagtttgaagagactgcaaagactacccgtcagtcaattgagcagctggctgcctaatgctgagcctttgctgagataacttggacctgagtgacatgccacatctaagccacgcatcccagcttttccagccagggcctcctagcaggatcttagagaaggagacagtggtattttgaaactggatatcaaatatttttggttttgctttaaagtggctacctctctttggttttgtggctttgctctattgtgacgtggacttaagcaataaggaagtgatgaagggacagtgttctctgacaggacctgtgggggtcggggtgcctgtgcaaggtcttggttctgattgtgatatttccatacagggctgctaatgcagcccatgggtaagtgtggttatatgtgtttgtgctgataattttgtcctgatgagttttcctaccacggggtaacggaataaaatcacttgaaaaagtggactgtaagctcaaaaa

SEQ ID NO: 207016 - DNA, 868 bp, Homo Sapiens
ggaggattttgtgagtgccttaaactggagctaggctgtggtgctcgagaggtttggaggcatcaggaggtcctttaccatgtgtgagaagatgaaggccactgtgcagaaatgtgtgcagacccctaggcacagcaaggaggccctgaataggctcaaccaggctatccagcagctgaagatggagccttgtgaactacagaaaagccaagacttggaggccatgccggatgcggcctcaggcagcgctaagggcagactggcctggctggaggctgccctgcagcgagccaagcaggacatggctcggcagctacgtgagtaccaggagctcatgatcgtcaaactgggcctggactttgagatcgctacctaccgcaggctgctggagggtgaggagcagaggcttggtctgggacttggggcagggagtgtggctcccggcggtgacgtcactggagacaggtcctccctaagggcacccggagtcagttcctgtggcctgaacatgagcgccccaagtggtggctgcgctctctgcagctctgcgggctgtgttggaggctttggctgccttggctcccgtgaatgttgaacccctccctccggagaagactagaaactggcgcttctgcccaaagacttggtcctcttgtctcagattcccttgcccacagagctggccctcttctcccttcccccttttgcccctcacttggaactagacgggactctggtgtgtcatcttgtagacatggcctgtggcttacctgaaccttgcattctgcccctctgactggctctattctctctctctttctctctctctttttcaggcttgccctttaataaaacattctgtggtggc

SEQ ID NO: 207017 - DNA, 1000 bp, Homo Sapiens
ccaaaaaattatgcccagcctgacgtcttgaatcacacatttgaccttctctcgaaccttcacaagttgctccccaatcacttggtggaagtgcttcattcctacagaagcgaagaggacaaaaacaaatgtgagaagcctgagttctctggtctagaaaagatcttagcaagacatcagttaccaaaagagatcagtctctccccaaagccaagccttatgccctcatggagaagaaggataatcaacaatatcagtgcgaactggaagaaatgtcacctgtggcagaaaagcacctatgagccgcccatgggcaccatcgttgccaggtggaccaaaaagaacttgcaacccacagaggacctcaaatcagttatccaaagacagtcagcacttggcccaattatctcagtcactcctagtggacgacaaagtgctgttgtggtgttcagagatatcacctctgcttgtaaggctgtgagtgcatttcagtccatgtcgggaggctcaatgttccagtgctcatggcagcatcgattcatggcaaaaaaacaaaacttggtcaagaaaatgtacttcaaaagtacacttagaaaaaagagaatcaacagtaggagaaccacaggagctccataactagctgggagtggacttaccctgtccgaagcaaagacagcatcaaatagtgccaggatggtgacagcgattcccacagctgggccatttactactgcaaccagaggcttcggaaagtctataaaacagtttacaaattccctacagaaatggaaagaggagagcattaaagatttcaaagtagccctacctaactatagaaaagattatataaattaaagttgatgccatgccaaaggaccaccttccgagactaaaccaagatccttgtacatggggcctaatgaaaggttttacatctatggagtcaagcaacagaaaacatttgaagacaaacaaacaaatacatctgtactgaatattc

SEQ ID NO: 207018 - DNA, 1000 bp, Homo Sapiens
tcgagacgtcccggggatctcggagaccaactgggtggttcatgtggttgactccccagccgtcaatgcctttgtgctcccaaatggacaagtgtttattttcaccgggcttctgaatagtgtgacggacgtgcaccagctgtccttcctcctgggccatgagatcgcacacgcagtcctggggcacgccgcagaaaaggctagcttggttcatttactggatttccttggtatgatttttctcacaatgatttgggccatttgtccccgagacagcttggcagttttgggccagtggatacagtcaaagttgcaggagtacatgtttgatcgaccatacagtagaacattggaggccgaagctgacaaagttggactacagctggctgcaaaggcatgtgccgatgtaagagctagttcagtgttttggcagcagatggagttctcagagagtcttcatggctatcccaagttgccagagtggctgtcgacacatccttctcatgggaaccgagctgagtacttggatagactcataccacaggctctcaaactccgggaggtctgcaattgcccgccactctctggcccagaccctcggctattgttcaggcttactgtgaagcgttttcttgaagactcggagaaagaggacctaaacatcactgtcaaaaagcagaaaacggatgctctccccatgcagaagcaggagcagataccactgacgtatgtcctagagaagagaactgcaggctgaacggaagtgggtgaatcgtgggctccatgagcagcacagtggaccttttccttattacgcaacttttaaaaatgatgttttcaaggaaaaaaaaaaaagaatgttcaaaggccaagtcacttatattatagatattatctggatttttctaggtttttatctttcatgaaatattaatgtgtttccacctattttaaaatactgccaatgaggaaaacatcacataataaattgatattatgc

SEQ ID NO: 207019 - DNA, 1000 bp, Homo Sapiens
cgaggatggacagatggtagtcataaagcaggaaaaagaccgggaagccaggctagcagagaatgcttgtaccttggctgacctgacagagggtcaagtgggcaaactgctcatccgtaagtcagggaaggtgcaactcctcctgggcaaggtgactctagatgtgaccatgggaacgacctgttctttcctgcaggaactggtgtctgtgggccttggagacagcagaacaggggagatgacagtcctgggacatgtgaagcacaaacttgtatgttctcctgattttgaatctctcttggatcacaaacaccggtgagatggacagatggaggagcacggtgactgtgcccacgaccgcacatgctctcaaatacacgcagcccagaagggcctctttagcccacccgttgtagcctttggctgtagtcccagtttcccccgactagggccatgctgcccctcgccccagctgtgaatgggacctcacacagcctgggtatggaaggcgcatcctcatctctgggaacgtgaccctgctatttattttttatttatgtcttaatcctcaactgactgcattctcccagagtagaatggggcaggcttctttttggggagccgtgggctacggggataggaagggaaggggctcaggcaggtaagaaagaacagggatgcgatggaactgaagacttaaaactcagtcccagctccctggtttctagctctgtgtccttaaactacataatctttctgagcctcatattcctcacccgacagacatgaggacaatacctacctcgcagggttggtgtgagcagcacagggaatgttgtagatgggaactccttgcacaagactggatatacattatataaggggtatgtgtgtgtttgtatacacataacatacatatgtatgtatatatacacatgtacataaccataggcgctcaataaatgttagttttcctttcaaaaaaaaaaaaaaaaaaaaa

SEQ ID NO: 207020 - DNA, 565 bp, Homo Sapiens
ggtcattgctgccagtgatggcttcagaaaaagatgacggtccggccttacccaaactcgacgacgacaaccagacagcagagaacacatgcaaacctgcagaagagcagcctcaacagctcaggtgggacgatattcacttgccccggttctcactaaagcaagggatgatcccgacccgttacgtcatgccttggaaagaaaacatgaaattcaggaacgtgaatctacagcaagcagaagcctgtgggatctatgctggccctttggaagattctctgttctggggttacagcgagaggctttgccatggggaagatcggaaagccgtcctgaagaaaggcctgccggagataaagattaccgacatgcctttgcattcgcctctctccagataccagagcacagtgatttcccacggtttccggaggcgactgatctgataggcggatctcggaagttgctgtcattcggtaatggtgcgcttgcctaacacgcgagacgctcagggtttgaaccccactactactaaaaccagtaagataaagtagttcagtctcttgcc

SEQ ID NO: 207021 - DNA, 522 bp, Homo Sapiens
gtctctttgctgccagacctccgccatcatgggtcgcatgcacgctcccgggaagggcctgtcccagtcggcgctgccctaccgccgtagcgtccccacgtggctgaagttgacgtctgacgacgtgaaggaacagatttacaaattggccaagaaaggcctgactccctcccagataggtgtaatcctgagggactcacacggggtggcccaggtccgttttgtgactggaaataaaatcttgagaatcctcaagtccaaaggccttgcccctgacctccccgaggatctctaccatttgattaagaaagctgttgctgtccgaaagcaccttgagaggaacagaaaggataaggatgctaaattccgcctgattctgatagagagcagaattcaccgattggctcgatactataagactaagcgggtgctcccacctaattggaaatatgagtcatccacagcctctgctctagtggcataaatgctgttgtgtgcacaagcaataaaatcactttgagt

SEQ ID NO: 207022 - DNA, 602 bp, Homo Sapiens
gggcggcggcgggcggagcgcatcggcgatggaccctccaactcgtccttctgtctccggcccaaggactcgagcccgcccgccgccgccggaggcgctgcccaccgtcggcttcgaagaggaggtgtacgactgcctggattactactacctgcgtgacttcccggcctctggggctggacgcagcaagggccggacgcggcgcgagcagcagtacgcaccaactacccggtgcccggcggccacgagcgcaaggtggcgcagatactgctcaacgggcagcgcaagcggcgccagcgccagctgcaaccgcggccgcgcacacgcctggcctgagcacacgccacgcttgagcgggaacctgagacaggaggatcttgagttggagtcctgcctgggcattattgaaacctgaaagacctgttaaaaactcttttccagctgtaaccaagatcctccgtgctggtcacctggactttttgacagggttttaagtttactgctctagtgtttttcctcactaattaattgttaagtaagtagtttcctggtgtgtatgccttttttagggtttttcaattaaaagagcacagcaagaatgt

SEQ ID NO: 207023 - DNA, 1000 bp, Homo Sapiens
agggtcccagaccctcacctccaaggatgtcccgaagctaagggcccagggtgttgaggtaacatcagttcctctcagaggaacctgggaggttctggagcagctacctgagaagaaaggagaggaggaggagccagtaggggaggtctccggggcctcagacagggagcattttggccaggccctggagacagaacaaggatgcttacagtgggttccgggaccactggcgctcacccctggggccttcatcaaggaggaagaggatgaacactgcccaattgagtttggagactccaagcgttcctcttgcaaggtggggtccaccccgtggaattatctccttggcttgtacaagcagctccagaagtcagccatggccaaggctcagagaccagttgcgcctcagttggctctcaaggatggcttgccccacgaggagaaaggggagagagaagaagcggtggatgagagctgtcccaagtggtgtgcccctcgcgcctctagcgacgagagctgtcccaagtggtgtgccccgcgtgcctccacctaccagtcgccgctgcaaaagaagtttaggtctacagatacagtgggttttgtggagtcggagctgaagaagattctgtcagtgcaacgagaggctcgcctctggaaggtgggcaaccccgagggccgggagctgctgacccagccagacatcacactggaggaggctggcatggtggacggccagcacctgctcctggaggagatggacgagatgggaaactggccccctccagattgaggcccgtgccggcaggagcccaccgtgcccacactcctgggaccccagtctggcgtgtgcctcttcttgggacacatgcaaggagtccctggggccctgggttttgggatgagtagcatcctgtgtgtgtgcggttggcctgcctggcactgtccctacccgtcagactcctgcagatgacgttattaataaaagcttagtttggcattc

SEQ ID NO: 207024 - DNA, 1000 bp, Homo Sapiens
ccaggcataagctttttaactacaataaactttaatgatgtcagtgcaaatgcaagcatagaatgatcctggttaattaggagcgtctgctgaaatatgtcaaaggtagtcttcaataaatctggcttaggtaaaccaagtgatagaacggttgctataaacaggttttacaataagttaataagttgatcttttgtatgatgttaaatgcagggccttgcacatcttaggtaagtattctaatgttgggctacagtcccggcactaatttaacatttatgttatcaaatctcaggcttcaggcaaattgtagcctggttatgtatgttctgtccacagtcagctattctgtaaagcttctataattagttcatcaggaatatcatccattgaaccaaggctcttatctgcagcgtcagcaaattcagcatcttctgtcgcttctaagaaaagggcgtcatcttcgtcatcccaggcagcggcagaaagcccgccggctgacaagttgcaggatggcggggtttgagaatccttggtcagtgaggtgctggtgtcatctgtttctccagaagtgaagtcttcctttattttggagggaagaggaataaagattagtcagaatatgtgacttcaaatacgttgagttaaggtatgaaataataaccaggttttcagcagtcagtgaccatgctggctgcctgctgtcaggaacagtcagcatggggaaggctaagttagctcagaagtgcttttgtagcgcagacatgcttctctgaggctgaaactgactgtagctcatggcagatacatttcaactcctcagaaggggtacagcaaagggaagtttctagattaacaaaaaatcaatgcctagaatctatgttaaaaagccagcatgcaatcccagtgctagggaggtggagacatggctccctggagcttggtagccatccagccaagcctcccaactgaacaccagcccagtgagaggctgcatctc

SEQ ID NO: 207025 - DNA, 718 bp, Homo Sapiens
gtcatagtgacgccaagacagctgaagttggtgtctgttagacactagctgttaacatgcagtacaccgggagccagtatttcggggaatacataaacgggaggatggagggcagtgccgagtacatcctccctactgacacgagatacatcggggagatgaaggacggcatgttccacggagaaggaaccctgttcttccccagtgggagccgattcgacgccatctggaagaagggattggtggtgaagggcaagtataccttcaatgatgggctgcagtatgaggacaaacactggcactactgtgacagctatgaccggaggttctacaccgagatctgctatggcctgaagccctcaggtatctctcagctcaccaacatggacccacccagaagaattcccctgggctactatgactgtggagatggcttctataaccccacgaccagggtcatcaaggattaccggaaccgctttctgagaaatgctgatgatgacgaacatgagtggattgtcaggacctgccgcaagggctggttgccaatgcccaaacagaagtcctagccatgagcacctcggcctcagcatctcaccagggacttccttctgcccactgctggcctgggaaactggctgtagtcctagcttcgacttaagtttcagaataaaggttttctgccctgaaaaaaaaaaaaaaaaaaaaaaaaaaaaaa

SEQ ID NO: 207026 - DNA, 1000 bp, Homo Sapiens
gagaaagctgctgatgtcccagatggggacctcaggtcacacgtcatcaccaaccttttcctctacccaatcaagtcctgtgcagcatttgaggtgatcaggtggcctctaggaagtcaagggctgctgtatgaccgaagctggatggttgtgaatcacaacggcatttgcctgagtcagaaacaggagccccggctctgcctgatccagcccttcattgacctgcagcggaggatcatggtcatcaaagcccaagggatggagcctatagaggtgcctcttgaggagaacagtgagcaggttcagatttgccaaagcaaagtctgtgcggacagggtaaacacatatgattgtggagaaaaaatttccaactggctgtcaaagttttttggccgtccctatcatttgatcaaacaaagttcagactttcaaagaaatgcaaagaagaaacatggcaaagatcagtctgctcacacgacagccaccctttctctggtgaatgaggcacagtatctgctgataaacagatccagtattttggaacttcagcagcaattaagcacaagctgtgagaatggcaaagaagaattattcccaatgaacaatctcatctcacggttccgtgccaatattattaccaatggaacaagggcttttgaagaagagaaatgggatgaaatttcaattggttccttgcgtttccaggttttgggaccttgtcacagatgtcagatgatttgcatcgatcagcaaactggacaacgaaaccaagatgttttccaaaagctttctgagaggcgagagagaaaggtgaagtttggagtgtacctgatgcatacgtctttggatttatcttctccatgttacctctccgtaggatctcaggtgctccctctgctgaaagaaaacatggaacaccacgatataccggctaccgagtaatgtcaggatgctagctcctgaatttttttcagtatctattaaaatttctgttttaccc

SEQ ID NO: 207027 - DNA, 1000 bp, Homo Sapiens
gaagccttcagggtcacatgataggaagacggtctttttttgtggaagtgcaaaaaacaaaatcccggatgcctgagcctccccagtggcatgcttctgtctaggtctggaggcctctgcactgtcctagagtcctgcagtgagcaaagctgtctccttcctgcagtgggcactgaccacctagatgtttgcagttggtttttccttttctaagcagatgggcagcaacctggagcccatgtttgtgagggtttttctgtctgttttcactggtttctgtttgttggacttagtaatgactgagttgggagttgtcagtactttgcagtggccacagctgagaacggcatgaactgtgtgtgcagatctgtgaccaaggtcctgggaaggctcctcatttctgtgctgattagagagaggactatctcccaagaaagcccagaggcagttgcaagagccacagccaggcatacaccagtgcctcctgtcccgccctctggatggacggacagttcccaaccttgggatgcagctggaactgccaggcagatggccatcaggccacctggccaccaggttcacatctgtgccacacttgtcacactgtcaccatcatcgctgaggacctgacccctcttgtattgaggagtccccagtatcccaataacttctggggatgggcttctaaccaagatagggggaggtgggggactgccagccagggcagtgatggacccatgtggtactagcttggcccacgtgaggccctgtgtgcagccccagaaccacaaaaagttactgaacagctaaaaaataaataaataaataaaaaataaaaataaaaagatttaacagaagcactcagcagtcagcatgttaagggcaatggtctcatctgttcctccaggtcattctgttccaggcagccagtaaagtcacacttgacaaatgtgcaggacaggcagttcttaagtaatcaataaatcagcatctaataacc

SEQ ID NO: 207028 - DNA, 1000 bp, Homo Sapiens
tgcagttcctggtgaacaacaatggccttgaactcaaagcaggactctggaccttatgctaccatgagctgtgctggagccacacacccaagccaccctattatctccagtactccagagccttgttcctcatctccatcctcttcatgcttatcagccttggcttgctcttgagctcttgccgccctgcagaaagaatgatgtccgctgagttggatctgaaggtgtccatgctcagcttctgctcagctgtcagcttgctcctctgcctcaacctgtttctggcgcaggttgaattatacacaaagaatgccatggagtatgagttcctgtggacctactatcttagttggtgcagtgaggtcttatatatctgtgttgggatcatctcttttctcaacttcataactttccaattccatcctcctgatgagggtgtcagcgcggatctatggcagaagtccaggctgggcattgggccagtgccaaaaacactgtctgctacagctgaaaggtcacgttctgagatgcagtttctaagtgggagacaggaaaaactacagaatgtgagaaagggaaaactggctaccacaagactgtgataggatgacagaaggctaaatttgctgtcttaaaaatagagagtgtgaggtcagagagaagtgattgtgaacttcgatgaaaccttctgatatcatgtctgtaatagcaggaaacctaacgaaatgtcttttgtgtgcaccacatccaaaatatgtaagacaattatcgagaaaggagtggagggctggagaaacggctcagcagtgctggcagtacagtcatggggttcagagttggaatcccagcacccacataacaagcctcctcaaagactaggtggagatgaggagatgggacgtcagcgttctcttctggagtgcgagcgtgcacacataaatacgtcttgaaaataaaagagaaggtagtgaaaaaaaaaaaaaaaaaaaaaaaaaaaaaa

SEQ ID NO: 207029 - DNA, 1000 bp, Homo Sapiens
tcttccgcgcctgcgtaaaacgtctccagtgcgcacgccggtagcgccgcccctcgcgctgtaccacgccctcaaaggctccgcctctgctgcttgaatcccacccctctatctgcaggaccctgagccgtaatgatcctgcaacagcccctggagcgaggtcccccaagtcgggacccacgggccaccactggggtaactcgcggcctaaacgccagtctttcccccagggaacctttgcacaagcagttcctgtctgaggagaacatggccacccatttctcccgactcagcctacataatgaccacccctactgcagcccccctgtgacttttcccgaagccctgccaccactcaggagcccttgcccagagctgcttctctggcgctatcccgggagcctgattcctgaagccctcaggctgctgaggctgggggatacccccagtccctactaccctgcgtccccagctggggatatcgtggagctctgagtattgatggcctgtgtccctccctatcttctttctgacaacaaagaccagcaactcccagaaagggatgaagtccttctgcaaacctggccaccaggaccttccctctgacaagaggacactagctcggtggaaccctcagtgaaaggcagcctgggaaagggaaaatgttaccccattagtgaataaagacctgtgagcagttgaagatttctcagcagcctttggggagggtggggtactggatgctggggtttcctcctcaaaatcttccctggaaaatcggtgagggcaagccaggtcctggcaggctgagctccaggcattgagaatgtgtgagtcacagcctcacccccgcccccgcagtggccgactggctccctccctccggttctggggagtcaagttagggatcaggccatatcttaaagttaaagattcttttattaataagtctccctcccctccaaacattatccccacaataaatatcaccccccttggg

SEQ ID NO: 207030 - DNA, 1000 bp, Homo Sapiens
ttttaaagtgtttgtagaggttgtgttctttttacttgtatcgagtgtagtataaatcccataagtcttaattcagtacaagtgttgtagggaccttaaaatatgtaaatagtaggactatgatagagtaaaatctttgtttattaaccaaatctttgtttattaaattccaaagttacatctgtggtaaatttatttcaggaagggaaaaatactatcccctagcagggtataaatcagtataaaattccaaatgttttactatggtttctttaaaagatcataaatagtagcaggagagcaaaatctgagtggcatacacttgtacactgtcaggtattttttcagagctatgcggtttccatgacaaaatacttccatggagccaaacattctgatttgataaaagcataaatgaaaacaaatgaaggtacagttttatggggtttttttttgggaaaaaaacatagatgtataaatgtgctttgcattcctgcaaagatatttgtcagatgtgatgtgtctacatataatttgtatatagtaataagattttaaatccatgatagaaactcaccatataaaggatctgtcagtggatctttttaaagtgaagatttctaatgattattccctaagtttcctattcagctgttagggtgttcctaaagagaggaaagcctgtttgagaaagtattgatgcttatttataagggagtttaaaattcctaaggaatctctagcttttggttgatcactggccatgagaaatactgggccagtaattgtcaaagctgctccaaccttgcaggatgatgtgcaaatcaaaactctcccactttttcatttttgatttcattgaaatggatgtgttgaaaaagcaaagtttcagagaagggctgaatgcgtattggcaaatgtgaaaccaaaagtaacaggaagatatgatgaagatcagaatagcagaggttttcaaggtacaaaagaactctgctattct

SEQ ID NO: 207031 - DNA, 1000 bp, Homo Sapiens
aggcacctgggtagggtgccagtgacaaagagcttatttacttctcctggagctggacatgggtcatgaaggataatcttagagggcctggacctgtgccttctccacctaggtagtgaatgtcacccatattaaggaaatgaccccacagagtttacacagcttgccttgggtgttataactgggcaatagcagagagaagggttattttattctgaagcataagagatttagatttaataaaaaccaggctgcagataaggaagatcatggagctctcactatatgtagagagtcagtgagccggtagtgatggctttatgattgcgcacacttagccttgctgttggctcagagatggagagaggtacacttggggtttggagccaaaagcaagcactctaatgccacctccttttcccttctggctgggttcctgcccactgcattcgagagagctctccttccagccgcccctccagggagttgtccagtgctttgggatgccctggaaaataggtatcctggaaaagcaacagggacctcctctctatcactgtcccaggtcaggatgtcccttaccagcatgtccttgacctgcctgtgaccttctttgtgttctacagatgcagctgtatccaagaaagccagcccagaggctgccagcactcccagggaccctattgacgttgacctggtgagatgggtttgaggtctgaaggggtggtggtggggcccagcaggtcaggcaggttgtgagtcctgctgtccctgtgtgtgcagggagagcgtctgagtgagggacagcaagtggctggactggaaatttcagtgagaggaagtaaaggaagacattaaagaagggttggctggctagctggctctgactctaggctcctaaatgccaaagttgctcttgatggccatgagccaggttcagtgggggttagatgtggggtagacagtcggccacagatcagggctgctgcagagggaattc

SEQ ID NO: 207032 - DNA, 1000 bp, Homo Sapiens
cccatgtccccttctcccccagatctgggtggccgagcttcctcctctttcagacccaggagtctgaacccccagatcccccctccctcagacccaccagtcagggcctccagcatcctcctctctcaaactcgagactgctagctcgctcctcaccctccatgcacccacacttacaacggttgccatgatgctcaccaactgccagagtcctagcggaaacggaaacgcgcgaggagcgagatgttctggctcctctaggctagctggttcttcaaagatctcgatggttcctcataaatatgtaaatattgtgggggcgtggcgggactttatgccccgccctcccaccgaggctgcgctggaagacgggcgtccggaactcctgggtccattcccaatgtctcctggctcctcctccttttgctcagccccaccaccgccccgctcaggccgattgcaaaattcttagctgttctttgagtaaccacacgtcctccacgctcctttcctctttatcccaccctcctcctcctccccactttgaggcctccagctccagattgacagagctgaaggccactcgtttccgtaaagcgcagcggcaagctccgccccctggaggtctcacggccgaggcggggccgggacacagcgactccaacccgttccaccaatgaggacacgcggaaatccccgcccccgggcgtgggccaatggcgctggctggggggggcggccaccgcctcctggcggctgcgaggtttcactgcaggggcgccagtgggctcagtgacgctgcggcctccttctgcctaggtcccaacgcttcggggcaggggtgcggtcttgcaataggaagccgagcgtcttgcaagcttcccgtcgggcaccagctactcggccccgcaccctacctggtgcattccctagacacctccggggtccctacctggagatccccggagccccccttcctgcgccagccatgcctttaaac

SEQ ID NO: 207033 - DNA, 1000 bp, Homo Sapiens
ttcgtcacattattttaataatccaactagttgcatcatacaactaataaacgtggtgaatccaattgtcgagatttattttttataaaattatcctaagtaaacagaaggatatgtagcattttttaacaactcaaccgttagtacagtcaggaaatagtttagccttttttaagctaagtaaagggctttttctgcgacttacgttaagaatttgtaaattcgcaccgcgtaataagttgacagtgatcacccggttcgcggttatttgatcaagaagagtggcaatatgcgtataacgattattctggtcgcacccgccagagcagaaaatattggggcagcggcgcgggcaatgaaaacgatggggtttagcgatctgcggattgtcgatagtcaggcacacctggagccagccacccgctgggtcgcacatggatctggtgatattattgataatattaaagttttcccgacattggctgaatcgttacacgatgtcgatttcactgtcgccaccactgcgcgcagtcgggcgaaatatcattactacgccacgccagttgaactggtgccgctgttagaggaaaaatcttcatggatgagccatgccgcgctggtgtttggtcgcgaagattccgggttgactaacgaagagttagcgttggctgacgttcttactggtgtgccgatggtggcggattatccttcgctcaatctggggcaggcggtgatggtctattgctatcaattagcaacattaatacaacaaccggcgaaaagtgatgcaacggcagaccaacatcaactgcaagctttacgcgaacgagccatgacattgctgacgactctggcagtggcagatgacataaaactggtcgactggttacaacaacgcctggggcttttagagcaacgagacacggcaatgttgcaccgtttgctgcatgatattgaaaaaaatatcaccaaataaaaaacgccttagtaagtatttttc

SEQ ID NO: 207034 - DNA, 1000 bp, Homo Sapiens
ggcggccattgcccttgccgccatgatgagcgctcgggctccaggcgctcggcggcagcgccaccttcctgccttgcctcccgcagccccgtgactggctgcagtttccgctgcgtttcagctgagctgccgcagcggccaccgccgccgcccggacgccgggaccgtttcaccctcagcgcccctggccctgcgccttcccccgcgcctgtagccacccgagggcagtcggggcaggtggcattccggacacctgggcttaccagggcatacgggaccccaggaaatgttatttttgcttaagtcaaatcatatgtggctgctaaggtgctttcgatgcagttgtttttccaacaatctttgccgccccgagtatctgaataaaggaagaaaaataaagattgatgggaaagtttttgccattcttttgtcctatagggaaaaaaattgcacaacacgagagcggaggaataaaattttgaatcattcgtactcatttatgtggaaacaactttcttgaaaacgatttaagtagtgatctgttggtggtatttttttaaatcgaggaataagggcaagacttttttattttcttattggaggacaacttagtgtggtgcatatttattgtgcatttgcctgtcatggtatttcgatttttcatttgtgaagttttaaggcggagtttcatcccctaacgtacttttttgattgcacactgtgcaactttcttgataaactcggagcctactgttagcgatgcaccgtgctagatgctaagaaacattaaaaaggttcttgtaatgcagacggtggctgcaagaagtctcatgtttagaggtaggtggggcaaggtgaaatgcagtaaagtgagaggtacaactaattactgggatttccgagggaagcaaggttgccattggaggatcagggagggacgggttcctgaagtattaataggtggcattttgagaaggttaccgagggatgggtaggactt

SEQ ID NO: 207035 - DNA, 1000 bp, Homo Sapiens
aaaacaatccctgccctcctagaacttacattctagtgggaggagacacatcataaataagctaagtaaataaaatacagatatgttagtgatatgtgctgaggagaagaataacatagagaaggggacagggaatggggtaggaggtgtaattttagttagggtggctagagaggcctgactgagagggcggcatttgattaaagacccgaaggaggaagatgagcagcaggccctgttgaaatatgtgaaagaatttcaggccgagggaaccaggatgcagaaacctgaggcagagcttgctagtttcaaggagcagcctagaggccactgcaccagagcaaagagcaaaaggagagatgcaggaggtaaaatggagggtgggaagagaatggctgaaggagagggtggccttattggcccatttcaaggattttgactttgattcatatgatgtgggaaggccttggagaattttccgaggggactatactatctgatgtatgtttcagtatgaaatagaatctctctggctgctatgatctgaaggaggacaagggagcagggattccacgggggcattgattgcacagagccaggtaagagtgatgatgcttggaccaaagtggtggcactgggtggagggtcagaaccgacaagatttgctctcggattagatgtgggatatgggggtgtgagaggggccaagtgtgactctcaggttttcgaactgaataactggaagaatagagttgccttttattgaaatgaaggtcgaggctgcagtggtaagctgtgattgcgccactgcactccagcctgggcaacagagcaagaccctgtctcaaaaaaaaaaaaatatttaccatcaggtaaaaccacttatggttctcaaaactttatttaaaataatagacacttgataaatcaacactgtaggccgggcgctgtgactcacgcctgtcatcccagcactttaggaggccaaggcgggcggatc

SEQ ID NO: 207036 - DNA, 1000 bp, Homo Sapiens
aacacagactgaagctaatagaaacaaagggatgtaaaccacgagaggctcagagatatagtgagaaggtccaacttatgtctaattggagttccagaagaagatactacagggaatggcaaagagagaatattgaaacagataatgagtgagaatcttcacaattgatgaacaacaggcctttgtctgtcatttgtggaagctagcacaacagtttaaacggaggcccataggccatgtctaaatatttaaaagttacaaatgtgacagactgtgaaataaaatatgtctatactcctaccttgacaaatatgtctctctgatactctagaagatgaggtttaaatgtagagttcttgaactccacagagctctatgctggcacatagcagcacagagtgagccagaccttcgcctgtggcccccacccttttgtctttcttcccgcagctttatccatgctgtgaggggcctcatgcacacatgtgtacatacttcagcctgcatatctaagctgtgttcacgctcctcacaagcatgcttgtaggtggcaactctggcctatgcccgtatgctggtgcattctactttctttcatttttattttatttatttatttatttatttatttatttatttatttagagacagggtttcattctgttggccaggctggagtgcagtggtctgatcatagctcattacagccttgaacttctggactcatgcagtcctcctgagtagctgggactacattaattaccacacctagtattttatttttatttttattttttgtagcaacagggtctcgctgtgctgcccaggctgggtttgaactcatggcctcaaacactctttctgcctcagcgtcccaaagtgctgggattacaagcatgagccactgtgtcgggccagcattccactttgataatagacctgtggaaaaggcccatgcaagtcctgaatgtgggcatggattcaattaagtagggaattc

SEQ ID NO: 207037 - DNA, 1000 bp, Homo Sapiens
gtgaggccaattggtcacactgggccagtgtggaggaagatgcctctcatctcccaaatggggatctttcatgggtgtcacctgagcttatagagcttagtttagtctagccattccaagacagtggtttcttaaccttttctaggtcacaaaacctcctgagaacctaatgaaaactggatcccagccccagaaaaatgcacctgtgtgcacacacccagcagtttccaggtcatttcgagtcctgccttcgaggtccattgttattatttacaaaacaccagcctaaggtattggacattttcttaaaaggccaggcaaggtggctcatgcctgtaatcccaacactttgggaggctgaggtgggtggattgcttgaggccgggagttcaagaccagcctgggcaacatagaccccatctcacaaaaaatacaaaaacaagctgggtatggtggcacctgtagtccagctactcaggaagctgaggtgggaggattgcttgagcccaggaggtggaggttgcagcaagctatgatcgtgccactggattccagctccagagtgagaccctgtctcaaaaaaaatttttttttcttttttctttttgagacagagtttcgctcttgtctcccaggctggagtgcaatggcacaatctccgctcactgcaacctctgcctcctgggttcaagcgattctcctgcctcagcctcccgagtagctgggactagaggtgcgcaccaccagacccggctaatttttgtatttttagtagggacggagtttcaccatgttggtcaggatggtctcgatctcttgacctcatgatccgcccaccttggactcccaaagtgcttggattacaggcatgagccagcgcgcccggcccaccactttttttttttttttttttttttaagacgagtctcacactgtcgcccagtctgtagtgcagtggtgccatctcggctcactgcaagctccgcctcccaggttcata

SEQ ID NO: 207038 - DNA, 1000 bp, Homo Sapiens
tttaggtgttgcttgttcagtatctcaagcccagaaagatgaattaatccttgaaggaaatgacattgagcttgtttcaaattcaggtttgtatgtttactatgtctaactatgcctacaagattttgtctaaatcttgtttaaaatacagtattttgctaatttttatttgattagctttttaaattgtgaaaataaaaaggtcacattctgaaattttaagtacagcacataatgaaatacttcctttttaagatgggttaggctgatgtattaattgctttatcttcactcctatagcggctttgattcagcaagccacaacagttaaaaacaaggatatcaggaaatttttggatggtatctatgtctctgaaaaaggaactgttcagcaggctgatgaataagatctaagaggtaagttcttacagtgtcttaagttttattactgctctagttgaatgaagctcttaatttactaaaagacttaaactgaatttgtagtaatagaaaatggagagttaagcattctggaacacagtaaatttgacagaataaaagatggaattggcatgcattttactacgtatagtttactatgaatcagtaagtcatagtcttgaggtatgttttagattatttagaatagtacagaaaaaagattagtactttcctgggcaagtgtattgatggggatttacagattttttttctttttttacagttacctggctacagaaagaagatgccagatgacacttaagacctacttgtgatatttaaatgatgcaataaaagactattgatttggaccttcttcttaaaccggttatcctttttagctagtttttttccctcgtggaacaaggagctttaatctggttcttgaaggaatagcaaggatatattttaggcaagaggaatattgtaccagtgacaggcaaacatgaggccattcatcattgcatatagaactttaggaataccctgaaagtgtcta

SEQ ID NO: 207039 - DNA, 1000 bp, Homo Sapiens; identical to SEQ ID NO: 114956

SEQ ID NO: 207040 - DNA, 1000 bp, Homo Sapiens; identical to SEQ ID NO: 115062

SEQ ID NO: 207041 - DNA, 983 bp, Homo Sapiens
gagctcctgacctcgtgatccgcccacctcggcctcccaaagcgctgggattacaggcgtgagcaccgcgcccggccagcgactgcatttatagaggactcttaagatcagggagaagcccatacttctctagaaataaggaaggtgttttaattctcaggaggtcaacaagtcctgaggacggacttcagttgatgcatttccctttgaactggactctgccctcgatttcataacacagggcacggggttagctgtggtaggaagagttgtctccagccactcctaacccaacccagggctcaaagaccagtgtgtgagcctcagggggcgtgtctctaagctcccggaaaccaagccaattttcgcatgcgtgttcttctttgctttttttctggtaagaggacccacagttgcatcaaactttcaaagggacctgggacccctcagaaaagatctagaagcactgttctagggagagaaacagaaaaacagagtctgaagggcagtggagggaggaggccttccaagaaggcctggacacccgacctggaggggaaacgcgtttgtaggggaggaagggctccctctgcctcctcacgggctcccacggctgtgatctgaattatctctccacactctccctgagggatcgagagcagtaaagggcaacgtcctgtcttctctctgatctgggagcccctgagaagccagcattcttctctcccagcttacctcttcctttggctgtattttccagggtaagaaaaagaagagaaagagagaaaagcagctgtcccagacacagtcacagcagcaagtccaggaggcagagggtgcgtctcggggcactggcctcttctcctgcttttccttttgtcacagccacacctgcccatgctgtctctagctccctgatgggtcagggcttctgcctcggtattcgcgggcgggtattattacccctttctcgagggggggcc

SEQ ID NO: 207042 - DNA, 1000 bp, Homo Sapiens
tggtttcaaaattttgatgaacaggtattgaagccagtattcttggacaacgtttctccatccttacaagattcggctacgcaatcacctgcagatttctcttcccaaaaccactagactttaaagtgtatggtttccttgtttctaatataaatatattaattaagtctttatacattctctcttactcaacgccgaaggaatacccttctacactttattcattttaaatcatgtactgttatatacacgctagtaggattgatcttatttaatcatatttcgcacgttacccgactgctttcagttttgccgctttgtgataatgaggaatttcagctagcttttaatgagccgatactaaatcaccatgattttgggagaggaaaagaagaaaaggtaaaacaacgaatatttttcaaataccttagttactgaatatccataactactcgtataattggtgagaaaatagtgcatatttagtttactttttgcctttgattgaaaatatatattcatggtgctttttactcggtgtgaaaaggcaagaaaggagaaactcgccgctggttataagcccttagttgattatttgattgattgtgatactcccacatttttagaaagaattgaggcaatccaagagtgggaccgatccagagatgatctttatgtttggattcccattctagacagaatggacgggctgttgttaaaagtggcagagaaatataaatacaagcaagaccccaagaaggagtgtgaagtcaaattggtggaaatggaagcgcatgatgttgattattgtttgaaaatgctaaagtttactcgtcgactacttctaaatacagaaaacaggtttgtttattcatctggagatgttttaatgtatctactgaattgtccgaattttacaataaaactagcggtcatgcgaattttagccattttaggggaaaggtttgtgattgcgagagaaaaaatagttgcacataac

SEQ ID NO: 207043 - DNA, 1000 bp, Homo Sapiens
gtccttccagtcacggtcggcctctgggaagcccagtctgtgtcctcctccttcaggggtagccagcatgtctgtgtcacccaaggtcatggagcacagggcccctcccgggaaggtgccgtctcctccggcccctcgggtccctgctctgtcactgactgctgtgacccactctgtctccgcagaggccacaggccaggtctgccatgccttgtgctcccccgagggctgctggggcccggagcccagggactgcgtctcttgccggaatgtcagccgaggcagggaatgcgtggacaagtgcaaccttctggaggggtaggaggttatttctttaatccccttgcgttgatcaaaaataaggctccaggttgttgttatagctttacaggcattctgtttgattttctcttccttttattctttgcccttggcttttggaggttttgggttttctgtggggagacgggaagttgtttgattgcgttatttgtggcaaatttaagcacaataggaaataagcaagtattattgcctaatataatccaataatttatagaatctcttttcctggaagtatcttaaatttttctaagctacaaaaagttcctaagacaaatgagacagtcatcaatggttcatctagccaacaccgtggccatttgggcttttctttgtagtgcccgattcctggtgtgtgaaaataaattaacacaaattatattgccaagttaatatctgttttatgtgcccccagcatgtgttgaacatcaaacagtaccagggactttaaatatacccacggacaaagaaataattcataatgatgtttgttgaatttagttgcaatcaataaaaagtgcagtttgtgaatgctctgaggttcttgatattgatgtaaggctttgaacgacaaatgaggaccaaacataaataggaaagtaaaactgaaggatagaggccaaggccatgttttagaagatttaaaaaaaaaaaaaaa

SEQ ID NO: 207044 - DNA, 1000 bp, Homo Sapiens
gtactccagaggaggctgggtgtaaacccagctgtaccattccctgcaccgcatgctccaaccagaccaacccagccctccgtgagtagaggttacaggcttattggaaggagggaggcatgacaaatcttaaggattgtctgtttttttccactgtcagataaacctccacgctttggcttctagagtgatgggtgggcttgctttccttttgtggacttgatggcatttgactgtataattattcttctcagctgaatatccctgcgtgtcctttgacatgatggtggtataggtagctttaccaggcataatttctataatccatagagtgtcaagaaggtacttattttcctatcaaatgctgctgacctgattaagccttctgcctggctttgtagctgaagataatgagtttgtccagtgcagtggctgttgggacctggggtctttctgaagatgattgtaacctgggtgtggagtggggccttttgtcagttgctttaagttagatatctgcttcggagctctgtgtctggctctgttccccaggtcatagtagccaacaaagggacctggtcccctgcagttggcccttgaattttttctattgtttgagaactagaaattatttctgccagagatttcacctgagaatacatccaggtgagttcttgaggttagggtaggatgagaagcagtagaagccctgggggaaaagaattctgagttgatgctggggtaggaatgccacaggactggccaggagaatagtttcacagctgctgttgtagttggcaagagaaagaggctgtgaaatgaaatattacacaggattgccttagacactcaatggaaaacttttttccctccttccaccagaggaaatgaatgcatgctgatggtaatgagaaaatgacgctctgaaagtgcctgcttttccttcattttcatctttcccttcttttctctgaatcctccctgcccttgtgtcaagctt

SEQ ID NO: 207045 - DNA, 1000 bp, Homo Sapiens
tccaggcctctcatttcccacgtctctgcctggcccagatacttcggtgggtcaaattcttgaactgatgttggaccacagtcctcgtaggaacttaaaaggttgcactgtatccagcatatccagggaattgtatgtgagtgggtgtgagcccacatgtgcggggcagacaaggggtggactgcaggggctactaacgggcctgttcactccagcacccatcttccagggcgtgacttccctttgctgacacactttgtgcccctgagtcagccacataaacactgtgatcgggccgtgtggtcccagctgattaattgattctgcagtgagcacttgatccaagctctgccagttagagtctttccaagggtgttggaaccggagctgagaaaaaagaattcaacattgctttgagtggctatggaggtggatgcagtgtgctcacactgtctgtggccacatcttgcactgtggatctcagaagcagaggaagcagatctacttagagaggagaggggcacccacacagaggcaagatgcaggatggagagagacgcagagatgtcccttggcctctagaagccctggtcccatttgtccctgaggtccaaccctggtcttctctgtgagtcctataaaacattctcatgttcttgcaatggattcatagttttgcttaagctgggttgagctgggtttctgttccatgcaaccaaaatagtcctaatcagtaaaatattaagacacatttctatccacttcaagaattaatcgtatccataaattaccacttgactaggacgagatatttggcactttttttttgcaatcatttggaattttggttccagaatatgattttttccttttacattacgtcaattactttaagaacatgatgtcttgtctatgtggggaatattttttaacagctgcattcttcctcattttctctgtaattattaataattggacttaactctaaattttaatgatc

SEQ ID NO: 207046 - DNA, 1000 bp, Homo Sapiens
cttttatttcctctcttcctattgaatgccttttatttctttctgttgcctgattgctttggcaaggacttccagtactctattgaataggagttttgagagtgggcatccttgtcttgttctggttttcaaggggagtgcttccagcttttgtccattcagtgtgctgttgattgtgggtttgtcataattggctcttattattttgaagtatgttccttcagcgttacagagtaatgtaaaaacatagctttagaaacagtatagagatactggtaaatatagataagttatgaaggaagcaattaaaatacttggccatcccactgttgagaagacttattgaagcctatctcctcactgtgcagcctcccctttgattaagatcctttcttcccacacagccacactgggagggctggagaaggatctctctactttctctgctcccaagagaccagtggctatctgcatggggagagtcctgggctctacttcagttccttgggggtggcaccatggtatcacctctgtgtggcaagcagtgtgaatctgggcccttccccatctcttgccccgcccagggctgggcctcgaaggtagcctgggtctcttctctaggttgctagggtcgcagtgtctaggtctgggctgggaggaagaaggactcatccagcttggagcctgagctgtggttccagcccgtcctttgagccagggtgcggggcacttgcccgctcagcgctcactcaggggttactgtcctgtgtatggccaccaggcagccgccgtaccactgtgcataagcagctgttttctgtatttcctctaagtcttgttttctatgcattgtatttacatagtcgagtgcatattatctataacattttgtttcatgtttttttcccacatttaaccttacaatgtaggcttttccttgtattaagaaatctttataaaaatcatttctaccttctgtacataatgctctattgagatc

SEQ ID NO: 207047 - DNA, 1000 bp, Homo Sapiens
agtcacccggcagcacagagaagagagagagggggtgagatgtgaaggccagggtggagctgagtgccagcacccactcctgccccggctcacctgtactcgccgaaggtctcatctttcatcggtcgggcctcagagtccacctgggtgtcctccttatccttcactggagacacagagagggacagcttcttctcccgccccagcctgacccggggctccaggcccctctacgccccgcacccccagcactctgtctcaacagcgcccagaggcaagaggccttgaaagaaaccgctcaccccctgcggtccagccaccacttgcctgttgccccaaccccggcctgggaggatgatccccctgcctgcccccaccatgcgcctgtcatcttgtggggagctcggggaatccaggaggccttgcagaagggtggaaggggcgaggtgctcctctctgccctcggctccacccccgtcacgtggggctcagaggctacctgagtatttgccgcccttgctgcgcttgatgaagcagaggatgagcaggacgaggagcaggaggatgatggcactcacaaagccgatgaaccagccctcagtggcgaagccagcaggagggagcctcacgcggcctgagggtgagacaccagccccccgtgctgccgcccaagccagaacccgacctgaggccctgaagtatgctcttaaagttggggccctctggggggctaaggagtgacagggacagggaaaagggcatctgcggaaagggtatgaaagggggctgattcggggacacccagattctgggaggagaagcagacaggagccgtggagggagcctgggcagtagtggccattcaggggacagaaggacatgaattgtgcagcccccatgcttccctggcaggtgatggcgggcccccggcgcctcacctgtgccattggtcttcacagccatttggtgccggaacatcctctccttaaacaagtggatc

SEQ ID NO: 207048 - DNA, 1000 bp, Homo Sapiens
tacatgtttcatagcccttctttctctgccaaaattctgatatagccccctggagaacaacaaaatctggatggagtttgggccagaattggggtggggtatagattggctcctatgtgcttggaaaataactcacaacccactttcccagtgttgattcaattctttgtgtcttagacattttttctcattttgttttgtttgagacagggtctcgctctgtcacccaggctggagtacagtggcacaatcttagctcactgtagtcttggcacccccgggctcaagccatcctcctgcctcagcctcccacatagctgggactacagatgcgcaccaccatgcccggctaagtcttttttttttttttttttttttttgagacggagtctcgctctgtcacccaggctggagtgcagtggcgtgatctcggctcactgcaagctccgcctcccaggttcacgccattctcctgcctcagcctccagagtagctgctgggactacaggtgcccactaccacacccgactaattttttgtatttttagtagagatggggtttcaccatgttggccaggatggtctcgatctcttgacctcgtgatccacccgcctcggcctcccaaagtgctgggattacaggcgtgagccaccacgcccggccaattttttgtatttttagtacagacagggtttcaccatgttagccaggttggtcttgatctcccgaccttgtgatccgcccgtcttggcctcccaaagtgctgggattacaggtgtgagccagcacgcccggccctggctaagtcttagacttttgtttccccaacgtctaacacagtttcatggcccatagaagatactgagtgcatgaatgaggaatgcacgaatgactcttggcagacacttcgtggtcagcataaaagagggagaaagctggctgggcaaagtggctcacacctgcaatcccagcactttgggaggccgaggccagtggatc

SEQ ID NO: 207049 - DNA, 1000 bp, Homo Sapiens
cccgccaccacacctggctaattttttgtattttttttttagtagagacggggtttcaccatgttagccaggatggtctcgatctcctgacctcgtgatccgcctgcctcggcctcccaaagtgctgggattacaggtgtgagccaccgcgcccggcctgatgttcctaagctttcaagctcacttgatgaatgcgttctgtgttttgttttgtgtagcagctctcttggtaagccacgtgctacacaattcacccgttcaagtgcgcaattcagtggctttcagtttattcacagagttgcacgtctatcaccagagtccatttatttacttatttagagatggagtctcactctgtcacccaggctggagtgcagtggcacaatctcggctcactgcaacctccacctcctgggttcaagcgattctcctgcctcaaccttgcaagtagctgggattacaggcgtgcaccaccacaccgggctaatttttgtagtttattagtagagatgggttttcactatgttggccaggctggtctcgaactcctgacctcaggagatctgcccacttcggcctcccaaagtgctgggattataggcatgagccacggcgcctggcccggaggccattttagaacctttcatctccagaagaaaccccaaaccctttagcctttgccctctgacccctccctgccaagccctaagcaactattcatctaccttctgtctctgtggatttacctactctggatatttcctgtaaattggatcagtaacatgggacctttgtgtctggcttctttcactcagcacggtgttttcaaggccacacccacgtcatagcacgtatgagcgctgtgttcctttagggctgagtcagtccagtgtacggaggggccacgttttccctgtccctattcattcgtatatcgatagacgcttgcgtggcttccgcctttcctatgtgaatagtgctgctgtgaacattggatatg

SEQ ID NO: 207050 - DNA, 1000 bp, Homo Sapiens; identical to SEQ ID NO: 114783

SEQ ID NO: 207051 - DNA, 1000 bp, Homo Sapiens
ccaacacggttttgcttgctcagcccgcatagcgcgctaacatcaaacctctggaagattcacacagcgcattcaagttgcggggtcaggcaaccgatacactgctcatgatcggccgatagtgtatcgtcatcgttgatggcaaaatgatgccatgcgcatggattaaggaaaccccattgaagctggaattgcggaacagcttgtcggtcaagttgctcagggtcgtgctgctgtcggcgctggcagtcggcgttgtgctcagctgtgcgcaaatcgctacgacacctacaagacccgccaggccgttaacaacgatgcccagcgcatcctcgacatgttccgtgacccttccacccaggcggtgtacagcctcgaccgcgaaatgggcatgcaggtgatggaaggctgttccaggacgaatcggtgcgtatggcctccatcgggcaccccaacgaaaccatgctggccgaaaagttgcgcccgctgcaggacatgtccatgcgctggctgaccgatcttatcctcgggcaggaacgcacctacaccacacaactggtcggccgtggcccttacagcgaatactacggcgacctcagcatcaccttcgacacgtcgtcctacggcgaagacttcctgatcaatgcggtaatcatcttcatttccggcgtgttgcgggccttgaccatgggcctggtgctgtacctggtgtaccactggctgctgaccaagccgctgtccaagatcatcgagcacctcacccaaatcaaccccgaccgccccagtcagcaccagataccgctgctcaagggccacgagaagaacgaactgggcctgtgggtcaacaccgccaaccagttgctggcttcgatcgagcgcaacacccacctgcgccacgaggccgaaaacagcctgcaacgcatggcccagtacgatttcctcaccggcctgcccaaccgccagcaactgcagcagcaactggacaagattctcgtcgacc

SEQ ID NO: 207052 - DNA, 1000 bp, Homo Sapiens
tgaggcatgagaatcgcttgggcccaggaggtggaggttgcagtgagccgagatcgagccactgcactcctgggcaacagagcaagacttcgtctcaaaataaataaataaagtggctcttggggaaaagcaatttaatgtaccacgatgaatagctaactgttcccaagtgtttgctatgtgcaacacaccgcgtgagcagtgttacctgcattattacattaggctgagaggtaaaataatttgcccgaagacatacagctagtgacgaatggactgatggtttgaacttaacgtctatttgacttaaggtcctgcaccctgccacttgtaattttcagaatcactgataatctgaaataatgcagcttaaaacatgttttcttaattaaaagtataattggatggtggtcaggttgtaaatgcacacaaagtaatttatcttcattgcaattttggttccttctttgttcctattatctatatacacccagtgtttcactagcagttatgagagcagtcagaatagcagcatcaaagttaaataaggaaatctagatgattgctagattttctctaaaaataagcttagtatttggtattattctagcctttggtgagcagaaggggaggtaaagtaagaattaactaaatttagtaagggattagggaatgcttagacattttgtaggttggggtatacaagggtaactcaggaagctcctcagttcagtgaaaattcaaagggttggcactgagctaggaagcgagaatgcagggttatgaaaaaggatccctgctttgggagctcatggacttgtagcagagaccggtagtaaattggcagtctcagtaacttctgtaaatgattgcatctctttgcaggcttctcttcccatactctcccccactcctccttggacagtgttccgggggttctttcctaagcaactgctttttcagtatacatacttcagatgattgtgtctactccaggatt

SEQ ID NO: 207053 - DNA, 1000 bp, Homo Sapiens
ctggctaattttgtatttttagtagagacggggtttctccatgttggtcaggctggtctcgaacacccgaccaaggcgatccacctgcctcagcctcccaaagtgctgggattacaggcgtgagtcaccgtgcccggcctggtagaagtttttatatgaatatatgttgtcatttctcttgagtagatacccagcagtagaactgctgagtcatatgataactcaatgtttaactcttaaaaaaaaaataaaaaaaaaactgaacaacttttccaaagcggctgcaccattttatattgccatgcctcctacattgctagtggcattttacgttgtcactagcagtgtagacgggttccgttttctccatatcctcaccaatgcttgttatcagtattttttgttatagccattgtagtgggtgtgaactggtgtctcattatgattgacttgtatttccataatgactcatgacattgaacatattttcatgtgcttattgaccatttgtatatcttctttgcctcttcacttttgatattcttttccatgggaatttcatggatttcactaaaatctttgtgcagatgatttccaatatttacttccaactttgacctttctcctgagattgtcgcagtttcccatctgtttcttagccattaatgccctaattgcagaatcagtgtgtcacaactgaaattcatcatctttcctcccaatcaatttattcttcctctgtgttccttatttctgttaatcatagattaactaatcttctaatgattagactattcttctaatcatccagactttcaatttggcatcatatttacatgtaagagaaatgagataggaaggaatcagtttgttgccaagttccacattactttcataatattttgcatatgttttctctttactttgtattctctccttcctgatctctatcctcttctgacttttttgatcccttactcttctggttctcctgtcttta

SEQ ID NO: 207054 - DNA, 1000 bp, Homo Sapiens
tatagattctggatattggtcctctgtcagatgtataaatggtgaagattttctcccactctgtggttgtctgtttactgactgtatcttttgctgtgcagaagctttttagtttaattaagtcccatctatttatcttggtttttgcttgtcgtatcttagtcatgaagtctttgcctaagccaatatgtagaagagttttccaatgttatctactagaaattgtatggtttcaggtcttagatttaagtctttgaaccatcttgagttgatttttgtgcaaagtgagagatgaggatccagtttcattcttctacatgtggcttgccagttatcccagcaccatttgtggaatagggtgtctgttccccactttgtgtttttgtttgctttgttgacgattggttggctgtaagtatttggctttatttctgggttctctattctgctccattcgtctccgtgcctatgtttataccagtaccatgctgttttggtgactatggtcttatagtatagtttgaagttgggtaatgagatgcctccagatttgttctttttgcttagtcttgctttggctttgtgggctcttttttggttccatatgaatttttggattgtttttttctagttctatgaagaatgatggtggtattttgatgaaaattgacttgaatttgaaagaaaaagatttctttaggcaatataggcattttcacaatattgattctatccatccctgaacatgggatatgtttccatttgtttgcgtcatctatgatttccttaagtagtgttttgtagttttccttgtagtggtctttcacctccttggttaggtatatttctaactattttatataagaacattttgccttgccttacatacagagattttctcccacatttattttttaaaattgttattattttacatttaattctatgatccactttgagttaatttttgtatgaagttatgagatttagatcgagtcga

SEQ ID NO: 207055 - DNA, 1000 bp, Homo Sapiens
actattcatttttaaaggttaaaaaggcaatctgtctttagaacagatatcctgattttaaagtaagtattttatcttcatctgttttcgttatataacgattaagcatggaacattgcatttcttgattacttgttcaaatacatgcattaatttttattgtcataatttaaatcatgaaaattaggggtaatgcagatactatgaatttgtattttattataagatttaaactgttttttctatttataataaatgatgagtttaaaagaagttggttagctgtgcttttttcctatttgaaatgtttttcttctgagctcactgtagttggtttttaagcttgtcaaactttagaatatgagtcttacacatatgatacactaagagatggctattggttttaaaaagttccgtttttcatattcatgcctattctttaatcactggaaccaatacataaagtctttcattcatttaacaaatgtttattacacaattattatgtgccaggcactgttctaggctctggggatacagcagtaaataatataatttttctcttttgtattttgtaagaaaaaatcccatttgtttttatacgttaaggagagtctgcactttagcctcatcacaaataggaagccattgaaaatttcaagcaagatttgccttttggatggatcatctcagctaaaggtaaagcatgaatgggagaatagcaagtctggtagcaaagaaattagttagaagactatttcacagctcggcgtggtggctcgtgcctgtaatcccagcactttgggaggctgaggtgggtggatcacatgaggtcaggagttcgagagtagcctagccaacatggtgaaaccctgtctctactaaaaatatgaaaattagctgggtgtggtagcaggcacctataatcccagctactcgggaggctgaggcaggagaatcgcttgaacctgggaggtggaggttgcagtgagccgagatc

SEQ ID NO: 207056 - DNA, 1000 bp, Homo Sapiens
ggtctcgaactcctgacctcaaaccttggcttcccaaagtgctgggattacaggtgtgagccaccgtgcccggccttctttttcaaataatggctttttttcctctgggtatatacccagtaatgggactgctggatgcaatggtaattctacttctagttctttaaggaatctccatgctgttttccatagtggttgtactagttgatattcccaccagcagtgcagaagtgtttcctttcaccacatccacgccaacatctattatttctttgactttttaattgtagtcatttttgcaggagtaaggtggtatctgattgtggttttaatttgcattttcctgacaactagtgatgttgagcattttttcatgtttgttggctgtttatcttttgagaattgtctgttgcccatgtcctttgcccactttttgatgggaatatttgttttttttttttttcttgctgatttatttgagttccttgtagattctggatattagccctttgtcagatgcatagtttgtaaatattttctcccactctatgggttatctgtttgatgattatttctttggctgtgcagaagctttttagtttaattaggtcctatttatttatttttgtttttgttgcatttgcttttgggttcttggtcatgaattctttgcctaagccaatgcctagaagagtttttctgatgttatcgttatcttctagaatttttatggtttcaggttttagatttaagtctttgatccaccttaagttggttttttgtataaggtgagagatgaggatccagtttctttcttctacgtgtggcttgccagtggagaaaccaacttctgagtcttctccgttgccttggcaaccttgccgtaagtgggattctgaaggctcagcgtgttagtttgggatttttggggaacagctttattgagatatgattcatatgctatataactcctttatcgaacatgtacaattcagtggct

SEQ ID NO: 207057 - DNA, 1000 bp, Homo Sapiens
ctttgcgcttattcaggtcctcaaacttactctggatgtagctggctgcctcatcatatttgttggcccctgggggagagaaaatgaagacttgtgctgcatgtgtggcaggcaggccgcatcctacgtgtgcagcaagggtctgtgcgtgtggacggccaggcatacaacctgtgcatgcatgtgcataatatgacaatgtttgtggctgcccatacatgccagatgtgcaaaggggtaccccactgtgtgaaggaggatgcccatgtacacatgttcaggggtacatgcttgagtgtgttaagggcttcatgtgtgcacacacaactatacaagcctaagtgaggcaccagcccctgccagtgttccaaggttacacttctgtccagtggggggcgcctgagggccacctggtcaccataggctacttgggacaagaagcaaccctctggaggccctatccccacagtccccacacctgtgtactcagggaagcagatggtcaggggactgtgtgtgatcttctcctcaaacaggtccttcttgttgaggaagaggatgatggacgtgtctgtgaaccacttgttgttgcagatgctatcgaatagcttcatgctctcatgcatgcggttctgggggtagaatagcaaggtcaacgctagccaccactccccaagcccgctgcccccacccgcagcattctctcatcctctcaccatctcctcgtcctcagctagcaccaagtcataggcgctcaaggctacgcagaagatgatggctgtgacgccctcaaagcagtggatccacttcttccgctcagaccgctgaccacccacatcaaacatcctgcagatatagatcaccttagttccaggaagggagcctgggggaggctttctaccccatttctcaggttggctgactgaggacagaggcctgcccagagtagggcagctaccttctggaatcatccacacttgcccacttcacccctggttct

SEQ ID NO: 207058 - DNA, 1000 bp, Homo Sapiens
aagcagccaggatcagcaagtgcctcagaggctcccatccactcccactgtgcccccataggccctcactgccttatgtttttccaggcccaggggccctgtctctgtttcatcaccccgcaccttcctccacctgtgttcactctgggaaacggtatcagaaacccccccgccaccgccattatctttccaatagcctgggagtcaacccccagccaaaaggactagactgtctctgtccccattgagtgctgtgccctgtcctctgtcctctagatgtgtaccctcccttgagtaggaatggaggtctccagggatgggaggtcaagttgtccctgattccacatggtcccctttctgttcctcagccccaggtccagtgtgccaggccatgggtaggggcccccatggaggtcagcactccaggagcaaggtcactgcctgtgggtcacactgggggctggaactcctcgaggattctggaatcaggcagcctgagcctgagtctcaacagaatggggcaaaccaggcaaggcagctggggtcccttttcctgcctgtactcctaccctggacctctctcttttgagggagcttccatgggcagagacctgcctgggtccttgctctggggctgcctgtcagtggcatggcctaccacggccttggcttttccttctggaaaaacctggattgttgtgccaaatctcagcacctgcctccccacccctggccaccagctgggcctgcccctttgcccctgcctggactccgggtggtgtggttggggtgggacacccatctgaggaaggttgtggcaaccctcccagtgcagcctggactggatgggatcttgggcgccccactcacacctgctttagtcatcagggcttgtggctccaacgtcacaactcttccttgttctggccacgtaggtaccaggtcatgctgcccagaggacttaggcacagtgggggcaggcgtgggcggccataggatc

SEQ ID NO: 207059 - DNA, 1000 bp, Homo Sapiens
atattgagttgttattttacctattcagtcatctggtgacctgtaaatcatttctgtgtgtttagagaattaaggtagttgtggtttttttttattattatttgcaaaccacactaagcataagtagggcttgattggggtagcccttagcccccgcttaataataatcaccagcttcaagtctatgggtatcttgctgccttgatgacaactatagattttcttctcccttgacccatgatttttgtttgtttgtttgttttgtttttttgtttctttgagacagagtatctttctgtcacccaggctggtctcaaactcctggtctcaagtgatctgcccacctcagcctcccaaaatgctgggattacaggcatgagccaccgtgcccggccccatgatatttttaaaccctgagtctcccatattctgatttttctactgttgccccagtctcattgcttagtatataaaccagaataaaattgatcctcaattccatctaagtcctactgtttcttggctgttgttttattaaaatcatgaagaaagcaaaaaaggcattccatcacaactattgaaaagtgttctagaagttacagtcattgctataagaccaaacaggaaggaaaagatgaggtatgaatgttggaggagataaatgattattattagcaaataatggaaaatccaagagaataaagactaagacatcctaaatggaaagttcagtttggtgattaattacaaagtaaatatacaaaaataaatgtagtattcctgtgtatctgaaagaaacagatcatgtaataggaagaaaagatctcattcagaaagtaatgtgacatataaaaaataaaaaactaacattttaaaagaagtacacagggcctatatagagaaactacaaatctgtactgagagatgtagaagatttcagtaaacagatgtcgtgttcctatgtcagaaatgtaaaattatggatttacccctagttatt

SEQ ID NO: 207060 - DNA, 1000 bp, Homo Sapiens
tttcagacaagttggtacaaggagacgtgcactcctacctattcacttcttcaagaagcatttcctgagcgcctgtaaactatgcttggcatggagaggtgaacagaggactaggcttggtctctgccctgctggactacattccagtctcatcctaattctgtctgctgggtcatgtgtggttggcagaatgatgcccctcaccctaatccctggaacccgtgaatgttttgttacatggcaaaggggaatgaaggttacagatgaaattaaggttgctcatcagcggactcaaaaagagattatcctggactgagtagcccaatataatcatgagggtccttgaatggggaagaggcagatgagccggaacccaggacagtatctgagaaagactctactagccactgctggctttgaagatggaaggaggccacaagccaagaaatgcaggcagcctctaggagctgagcaagtcaagaaaatagattttcccctagagcttccaggaaggaacacagccctgccaacagcttgattttagctcagtgagacccattttggacctctgacctccagaactgtaaaataataaatttgggttttgttttgtttttagagagggtctcgttctgtcgtccaggctggagtgcagtggtgtgatcatagctcattgcagccttgaactcctgggctgaaacaatcctcctgtctcagcctcccaagtggctgggactacaggcacaagcgatgtgtgttgtttttttttttttttttttgagacggagtttcgctctgtcgcccaggctggagtgcagtggcgcgatctcgactcactgcaagctccgcctcccgggttcacgccattctcctgcctcagcctcccgtgtagctgggactacaggcgtgcgccaccatgcccggctaatttttgtatttttagtagagacggggtttcaccgtgttagccaggatggtctcgatctcctgacctcgtgat

SEQ ID NO: 207061 - DNA, 1000 bp, Homo Sapiens
  misc_feature (913)..(913): n is a, c, g, or t
  misc_feature (922)..(922): n is a, c, g, or t
  misc_feature (930)..(930): n is a, c, g, or t
tcaaaatgttgctgtgcgcctaggacatatggtatgtgcaaattgtttttttccacaaattcggttttttgagagggcacttctgttgctagcacatgtatcgctaatatttttctttcttaaggcatgcatggtagaaaatgaatgtgaagaccccagccaggagactattacgttcctctataaattcattaagggagcttgtcctaaaagctatggctttaatgcagcaaggcttgctaatctcccagaggaagttattcaaaagggacatagaaaagcaagagaatttgagaagatgaatcagtcactacgattatttcggtaactaactaactataatggaattataactaactgaccttaagtttcaaagaaacagtaaaaggggaagggatgatgcactatgaaaaaacaaaaaaactttttttttttttttttaattttaagggaagtttgcctggctagtgaaaggtcaactgtagatgctgaagctgtccataaattgctgactttgattaaggaattatagactgactacattggaagctttgagttgacttctgacaaaggtggtaaattcagacaacattatgatctaataaactttattttttaaaaatgaccatttttccattttctttctaggaaattaaacccttttaattcttatctaccttctacataatggttattgaatactccacaatatattaagtctagatgttatggtacatgcatacactttcaggctgttttatacccactgtcaccaatacacataaatgggggaggaaaagctatgaaactgtatagggctgtatatatacttgtctcagcttaatgcaggaaattggtttaatttccagcagttttgtctaaactggttcaaaaaaaaactatgaacagagtncagataccnggactgtntgttttgaagagactttctaaagtgtacttaaaacatagtagttttttacctttcccaaaactgagttac

SEQ ID NO: 207062 - DNA, 1000 bp, Homo Sapiens
tgggatcctcctgctgaagaaggatgtgatttgcaagaaatacaacctgtagatcttggggaaatggagactgaattcacagaaagcagctctgagtctcagacaagttcacaggataactttgatgtgtatgctggcacacccaccaaagtcagacacgtggactgccaagtggaggatgagtttgatttggaagcttgtttaactgaacctttgaaagacttctctgccatgagttaactgccacctggtggttactcagagaaatacgtggctctgcctggccacctggaaggcctgagttgctctgcatttgtttttgttgtctctgttaagagtttattttctcatgataaattgtttttcttgccttatttttatgtatggtaaatgtgttaggcatgttttaagttgtaaatgaagctaaatgcagtggagacttagccctattatatttttgccccccaagttagacaacaggaaacttgagccttcagttgccacttttcagatgtgttggcagtggattttaaccatgtgtctatgggaccaatttagaatcagttgcctttcaggtaactgataaagaattctcagtcaggcagctgcaatgactctgtaaaaacttattttctggtcttttatcaatgtgaatgtagttttccctcatacagagctctggacaaaggatgctaagctattatattaatgggctgtatgtaagttatatagttttaatttggaacttgaaatagcattagtgtgaggtaagtatcttagcacatgctctatgagagttgaggcagaagagagggacttagaaagaactttgtttttttaatgatcagttaatttaccatgtaatattgctgtaaatgataatgtgtacagttactctgttcatgtatccagttgtaaacttgtcaatatttgcatttctattgcttttgtatggaatgataattgcaaaaataaagaccctttaactgaaaaaaaaaaa

SEQ ID NO: 207063 - DNA, 1000 bp, Homo Sapiens
agacaatctttaaatatccataacttgcacctggcaattatgctttttttgcttactttctttttcttcttttttaatagatgcagggtcttgctctgttgcccaggctggtctcaaactcctgggctcaagtgatcctctctcctcagcctcccaaagtgttgggaatattggcattagccactgtgcccagcccaattatatgtaagatatatttacacatgcatatatgtacaatgtaataatcatttgtgacaacaaaagaattgggggtggaactatttcaaccagtagaataatggtgacaaaatgatggaacacacaatggaattttatgcagctataaaaacaaaaaagggccaggcatggtggctcatgcctataatcccagcactttgggaggccaaggcgggcagatcacgaggtcaagagatcaaggccatcctggtcaacatggtgaaactccatctctactaacaatacaaaaattagctgggtgtggtggcgcacacctgtagtcccagctactcgggaggctgaggcaggtgaatcccttgaacccgggaggtggaggttgcagtgagcagagatcgcgccactgcactccagcctgggtaacagagcaagactccgtctcaaaaaaaaaaaaaaaaaaaaaagatatactgccattgaaagatctctaaggtttattgtccagggaaataaaagcaaggtatagaacagtgtgtttaatttactatatattgtttataaataaaggggaaaggaaataagaatctccattcataattgtttgtaatcacacaaaaaggctggaaggatacatgcaaaactaagaccagggttaacctgtggggctggagcagggatggcggggagagaatgggaaatgagcagatgagagacaagtatgggaggaaatatttttctctttttttttttttttttttttgagacggagtcttgctcagtcacccaggctggagcatagtggtgt

SEQ ID NO: 207064 - DNA, 1000 bp, Homo Sapiens
gcaatacacacacacgtgtgtgtgtattttcatgtacatatgaatgtgtatgtgggtgataggaagaagagaggatgcatagagaagatgatctcgatcaagtttgatgtaaatgtaatagcaaattagagtacattcttgtcttaatcttttctgtaataaagataaaatggggcattatgttcatatgattgaacaaaagtggatgatttcaacctttttcttctcagccattaaaagaagaatttgaaagaaacagtctttgcatacatatacagagagtttgtcagcctttcttcagacacagccagccacagtcagactaaacattcgaagacgttacatttagtccacagtggaagtatttgttgattcacatattttctttttacaagaaaatcttcagggttagtattcacccctgaattggacacaaagtaaaattccattgtgttataagacagcttaaaatatctttgatttaatccagaaaattctatcactcttactcctgaaaaaggtgctggtattttaggctttaccagtcagctacattaaaagctgtggatagttttgcaatttatgaaataattactcttcctcatttgtcttcttgatttgcccgacatcaatgctcttgtgttcaccagggactaatgattgtatttttcttcccagtgggtgggataggataccagtaggtgggatagagagtttatggtagattcagtttgtctttatttactcaagcactcttccagggcctggagctgtcaaaggtgaagtaggaaattactgtttacatctgtcgggaattcactgttctgtctttcatgagctttcatgccctttagagaccattttgcacaccttgattgtcagaaaagggtctgggatgtttttggagtggtacagagatgcatacagcaacttacactgtcatgactttttttttgagatgcagtctcgctctgttgcctaggctggagtgcagtggcgt

SEQ ID NO: 207065 - DNA, 1000 bp, Homo Sapiens
gcaaggattatcacatttaatacccacaacgcactctccctcctttcccatgtcctgcttgccttctttcttccactttcagttattcctttttcccttccattctttcttgctcttcaaaagccatattgtgacaaaattaatccattctaaatgaaaaagaaaatgtaccttagttataaagtatgacctttgtgagttttttcaggactgttcacctgttctttgccttttattccagcgtggtacccggcacatagtaggagtttggtgaacattaattacttgaatctcgttatccttaaaaatcaaacggggtttatctatcagggttcccttctcttcctttgtcctatcctggcctctccttgaccaacacattggtaaatttggcctctgctctttcttttccccaactgcaggggcccacatgtcaagacaaggtggcatcaccaaccattgagaaagcttttatttcactagcttctacctggaccacccatcaaaaatctttacaacgagtattccttgggacaaggccaggtgtcattgagagtccccaggaagagcataggagtcctggtctgggagggccggacctacactctcgggggtgcccagaggaagaacagggcctttaaagtcaccctatgttctctgacccgtgcagtggtggcatactccctcccccacccctgacctgagggtgctgtgtgtcagctctcctaactcttggtctcattagggaagctggttgtcaagtactgcccagttacagttggtttaaactctcaactaagggatcgtaagcaggtcagctgcctgagtctccagttactcttgcagctcaggtttccccttgacaggtcctgataggggctacttttgcaccattgatgtggccagggcttacagcaaggtttaaggtttccatgcgcagccttcttggcaggcagctcccagagaaaggagtgtggtttgggagaaagctgcaaggcat

SEQ ID NO: 207066 - DNA, 1000 bp, Homo Sapiens
gaagccagggaaaggagtaacagtaaaggaatttgtgtttctctcttttttttcctttaaccttgttttggaggggaggggtgtctggagcccattcctttggccttggctccttaaacagcgttatcttataactgtctttgaagttagcttgctaggcagaggaaaacccctttttttcttcttaacccttgccttgcctgttactttttttttttggagtgaatgaatgcatatttatttttaaatttctgcctcactatgttgaaatttaatccccagtgtgacagtattgagaggtgtggctttaagccttacacttttcaagtgtaagggaagcagatgaagttccccagtcattggtttttttttttttcacttgttttaaaactaacaaaaagtattcattctacttttgaattgtccccaaaatgccaagtcttccccttctcagccaggcaggatttgggagaatgccttctaaaaacacactgctcctttctggtattgggccactaaatcccttaccttacttactcccttactcattggcaaggccctcatgagtagattagtgcaatcattgattaatgggttaatggattaatgggttatcatgggagtgatactggtggctttataggaagaagaagagagacagagagaccggagcacacgcagccatctcaccatgtgatgtgttgtggcacctcaggactcttcagagagtccccaccatcaagaaggccctcaccagatgctgcccctttaccttggacttctcagcctccataactgtaagacctgtttttttctttataattacccagtttcaagtgttcgattataagcaatggaaaatggactgacacagaagcatttcacgatcacgtggacaaacaaaaatctttatttacaatttgtctcaggaccatgttaacgcttctgccctgtgttatacctatcctgtggcataatatagttcaaagagatgtggatc

SEQ ID NO: 207067 - DNA, 1000 bp, Homo Sapiens
gtaggtggctgagataaagtgaaaagagggtctttggaagtaagggaattaaggaactgaaaaattagggtgttggatgaattagccacatacgtggacgctgaagtcatccaaaatgatggtagagcttaaggtgcagcagaacactgtgagccaggtgccaagtactcaataaatgggagtattgtggccaggacattagaaaaagatctgtgggttagaaaagtaaggaaggagagactgtgttgtacctggattacataggactcaaataaatggacgtttctttattattctgttttgttttacaaaaagatggaggagtcaggttctgaagcaaaaaggacaccaatgccatttttagaccctgagatacatgagatgtgagaaaataaacaacctcagcttgcatttaagagagctatagggaaggagtattctcagaggaagcctgaaagacatattgacaagcactggagggagagatagcaaaagagaggtaggaaaaccatacaaattagcaatgagaatgcaaacagcgtaataaattatgagcattttgagcaggagcaagcgtcatacctctggagcctctgtatcacggtaaatgaatattacacactctgagtcatacactgcaggttctatttgcttctctaaatgtatagtaggaatcctcaccactacagagataaagaaataaaacctagagaggaaaatgaacttgtccaacattcttcagagagtcagtgtcagattcacagggcaagacattgcccctatggtgggacacctccctgtatcctttccagcggttcttgaagaatgctgtaagccttaatcaccactttcatttattttctggctaccaggaaatgagatgtgcacaggtatggtaaggatgggggcagatatgctttgtggttcctttagtctgctctctaagagcagacttcttgaagtgaatcagcttctggttcaactcaccagatttttgatc

SEQ ID NO: 207068 - DNA, 1000 bp, Homo Sapiens
cggtggcttatgcctgtaatcccaacactttgggaggccgaggcgggcggatcacgaggtcaggagattgagaccatcctggctaacacagtgaaattctgtctctactaaaaatacaaaaaaaaaattagctgggcgtggtggcgggtgcttgtattcccagctactagggaggctgaggcgggacaatggcatgaacctgggaaacggagcttgcagtgagctgagatggcgccactgcactccagcctgggcaacagagcaagactccgtcttaaaataaataaataaataaataaataaataaataaataaataaataaaataaaatagttactattataattaaatggtataaatattgataaaataacaggtttgcaagtagaaagtgtttcaaatatagtgatcagaaataaaagatcactttataaacataatttgttttataaacaaactaatgattttttaaaaagacctaaaattggctagggtggtggctcacgcctgtaatcccagaactttgagaggcaaaggtgggcaggtcatgtgaggtcaggagtttgaggctggcctggccaacatggtgaaacccaggccctactaaaaatacaaaaattagctgggcatggtggcatgtagctatagtcccaggcactcaggaggctaaggcaggagaatgcttgaacccagaggcagaggttgcagtgagctgacatggtgccaatgtactccagcctgggcagcagagcaagactctttctccaaaaaaaaaaaaaaaagacataaaatttgtcttcgtaggtaattttgcaatatatttttagttgtattcaccttaacatgatcttatattctttctaaactaggaaatttagagggaaagaatattataagaaatgtttgtctaaatgtcacaacagagagagaagttaaaacaacaaagacctaggaagaatcaaagcttaagttgcaaaggaggttgaggaaagctaagatc

SEQ ID NO: 207069 - DNA, 1000 bp, Homo Sapiens
ggccacagggtttcagatcataggcctaaggaactggaatcacccctctccagatctatccccccacccatacagtctctaaccatccctccaggctgcggcacagggcacacagggtggcaagaaggaaagggagaaggggcatcacactgagacatataaccccatgaggagccagggctgctgggtctgacctgaggtctcactgtgactcggaattggaacccacaggcagaagtggatgacttctctgctgaccttctgtgcgctctctctccctctttctctctctgccccacagggagattcagggggccctcttctgtgtgctggggtagcccagggaattgtgtcctatgggcagaatgatgcaaagccccctgctgtcttcacccgaatctcccactaccggccctggatcaataaggttctgaagcagaataaagcctgaatggagcctgggcaagcctgaggggaaatctggaaccagacctgagcaggctctctgccacttactctggagctgcctctagtctctactgaggccccactacatccctcagacccaagagggctcctccaggtcacagagtcctcagtaaacctcaataaagatccagcttccagacttgagtgtgtgtcctctctctgacattcctttctcctggcacaaagcaaccggcccccagcctaaagcagcctacaagtttggaaggagtgggagtgggggtgggtggggaatgtgagagacacagaaacagagagaaaacaatgaagaaaaattagggaaagagagagggaatccctgaggaggcaggatccatattttcaacttaaacaagacattacaccagatccttgctataatcatcaactttatactaattcggatttatctctagtaagagtcagaatcactaaggtcaatgtgaatcataagcaaagatattagatgtttagagcagccctgacctctccacactaggtaccgggccccccc

SEQ ID NO: 207070 - DNA, 1000 bp, Homo Sapiens
cagcaaaaaagtttatccactgttataacatacaataatgtatgcgaatttcaatagatgctaaccataactatgctaattgaaacaaatcagacaatagagtacatgttaatgttatattaatctatgtacacaacattctaggaaattatgaactgatacagagagagcagattcatagttttctgaggataggacacaaggcaacttttgagagttctgcatatgctcatgatcttgattgtggcaataagtttacaggtgcatgataataatgatactgtccaaaaacactaaattgtatacttcaaatatgcaaagttactatatgtaaattacacctcaataaagttgtaaaaaaaaatccaaaccccagttccaggcacagagatgctgattaagtggcagtaggtaaggtctaagaacatgctaaggtagggggtccctgaactgcactttggaaaatgctgggggaagaaattattaatatatatcttggccacaccagccccagcctggagtaccacatgctggccatggtcagccagtttgctccaatcagccaggcaggcaggccccacataactggaatccatattcacccttttgttcctccccttctctctacactgtctcacccacaggttcctttttccttcctgtcatttcttggctaggcttcttatctatcactccactggttttggctgtccctcctcaaaagtcttccccttgtggctttggacttctcatttctccaaacatcctcccaaattgcctttggcatccccattcttaagctggaaaaatccttcaactaagagaaaaagcattataaacgttttaaaactgatgcacagaaaagatgttcttttgtctggaaaggctacaaactaagctcattctaatggaaatgtgttaatggctcactaaaacacctttttttgtgtgtccacagatttttgtgggtgtctcttttgtgactgcatgcgtaaagctt

SEQ ID NO: 207071 - DNA, 1000 bp, Homo Sapiens
aactggacccagaccctcaggtgtgacagaaggagacttggagataggagaaaaccatctacagctttacttaaagcttaggggtggaggagtgggggcaggaggtacaattagcagtcctgagtgggcagtcctgaggagtggcaaatagaatttatgattaattgcattggggggagagggtcagaggtgattttccctgctatttggcacatgggtagactcctaagagcattaggataggagccagaaattcttcattttaattctagctctgaaactagctgtattatcttggacattgattcccttatccatatgatatagaggttgcattcagtgatttttttaggactcctctgacgctcttggtcaggaactctgccttcataaatttcttatcaccccaaccccattgtgtcttactctgggaatggcacccaccaggtgcttatatatataacaacaatacacttattttctgtattccaggattctggggatgattagctttgggtttgagaaagatctatatttggggccctggaagcagactctgttggctggaacccattcagccattttactgtgaagtccatggcagctgctgcagatggcgaggcaaaccctaatggcttgtataatgtggtacttctcagacttgaccaccatgattcagatgctctgtgggctcaggaatttgcattttaagaaacactttggggattctgatgcaagtagttagtggactactgttgagaatcaattctagaaacctgagcttagtgctgctaccaatactctatgtgacccttacctagtagtgtaaggttttgaacacgtttcttcacctgcacgatagggttcttcacccccaccccgtcttcctgcaggatttctgtgaggaacagataaaacagcagatggaaaagctctgagaggctccacaagaatcaaagatggcggcctttgtgtgtggagatgcagcatccccaagctt

SEQ ID NO: 207072 - DNA, 1000 bp, Homo Sapiens
ctgcaagaaaacaatagaaattagagcagttggggtcatgagtgaggatatcactcacttctgatgatcatttagttgttaggggttaaaaatgcctctactattgccctagagatgtcctccaaatcactgacacctactctacaagctttgagcctggtgctttagattttttgtcaatagatagtgtgaatatatcaagactgccactagacaaaggaagttctaaaatgctatcagttttgtccatggatttcaacaatccatgggcaaaaatgtgatacaatacatgacttagaatcaattaaatattggtattttaggacatcctcttaagtgcatgccagaatttcacacaaattgcactacaggggagaaacatgcctgttcatggatatttcaaagaaacaaataaaaaaaaaacctttgagacatttttatgatttagactgtgtattatctttgcagtcatatcaaactaaagttcttgaagctgaatttctcagagaacaggtggaagtcattgatgagaaaaacatattattaatattatttctccattctttgaccacagaataagttgaggaagatgatagaataaaggaagtagaagtgggcctatagacaagtcagttttgtaagaataaaaggaaaataagtttcaaatctaaagaatcgatggagaaactagtatacatatttattaaatcaatgcatataagagaagcaaagagattaaatgattgagcaatcatttgataatgtgagctttttaaaagactaaatgaaagaaataccacctttttctgttgagaataaatcataagtgtgttaaatgtgagattattaacataaataaaatgtataaaataagtgcagcagagaaagtttttagaaacttttctgacaatgttacccaataagaaatatagtattatcgtgcaactcaggacatactcagaaacacaaacacatataaataaaatagaatacttacaaa

SEQ ID NO: 207073 - DNA, 419 bp, Homo Sapiens
tttaaacttgtttctgtaactgctaatctacatactctcaagtcactaaccttcctctttgatctctttgtaggctgaccaactgactgaagagcagattgcaggtgagaaatactcagctagattgtacccattagattcttattataaattgaatagccaacgtcagaataagagacttgtatgaaataattgactttggtatatgtcatggatactaacatatgggtataatataatacagtaattcaacctgctttggcaagtgggattgtaaacttgccgatggaagatgtgcagggctaattgtagttaaagacatgtattttagtctgcgtggatatactttggagccttgtggtgtagtggtggtctttgttttgttttctgaagactaccttagtataaaacaggaattc

SEQ ID NO: 207074 - DNA, 1000 bp, Homo Sapiens
actttccatgttattgttcattataaatatattagatgggatagcaaagtacagatttttaaaaaatgtttaaatattttcatatttttccccgagtgtcctacagaaagaatagaccatagaactcattttgggaaatactgctaatgttaatggcataaaggaacttttcaagatctaacactatatcccagtggcatgggtctcaagtaggacaggcaggctgcaggggaagctatttttaaataagtggagctattggcacatatcagggaccaccacacaagtggttgccagtttccgtctgataatagagttccctgtgacatagtcacattgtcacacatctaggagtgacagcaatgatttcagggataatgaactacacaagagcaatgcagaaagtagacagaaattttaactgcacttttcagggtttatgaattacaaatagtagcaatcctttcatcctccactacacaatgattaccttaagtatggagatcaggttgttccttgatgttgccctaggctcgactatgtacagggtctggcacatgtgtgcactccataaatatttgcagaatgactcattgaagcagtgatcaccagatttggtcattcagctcagtttttatctttctatcttctctacaattccaatcaccttttcacatatgatcatgggaatctgtagatacggaaaccagagaggacatctagtctgctatttgtcatcagtctgaaagctacatctattagatgaatgacagctcccctatctttacaaaccccagtaaaagaggcttcaaatcttccttattaccttgtttgagttgaattacactcactactaggaaactcaatctcaatcgcaccttctatcttatgtaagcattcaaaaggcactggagggatggtggccatttccctggatgtatcaagtccaaccataaccctttgtcaaaagcaccaaagaacaatatttttcttgatgcat

SEQ ID NO: 207075 - DNA, 1000 bp, Homo Sapiens
ctccgggggctgcgggcggtggatggcggcggacgttccggggatcgggggggtcggggggcgccgcgcgggcgcagccatgcgtgaccgtgatgagggggcagggtcgcagggggtgtgtctggtgggggcgggagcggggggcggcgcgggagcctgcacgccgttggagggtagaatgacagggggcggggacagagaggcggtcgcgcccccggccgcgccagccaagcccccaaggggggcggggagcgggcaatggagcgtgacgaagggccccagggctgaccccggcaaacgtgacccggggctccggggtgacccagccaagcgtgaccaaggggcccgtgggtgacacaggcaaccctgacaaaggccccccaggaaagacccccggggggcatcggggggtggggcatggggggccgcgcattcctggaaaaagtggagggggcgtggccttcccccgcggccccccagcccccccgcacagagcggcgctacggcgggcgggcggcggggggtcggggtccgcgggctccgggggctgcgggcggtggatggcggcggacgttccggggatcgggggggtcggggggcgccgcgcgggcgcagccatgcgtgaccgtgatgagggggcagggtcgcagggggtgtgtctggtgggggcgggagcggggggcggcgcgggagcctgcacgccgttggagggtagaatgacagggggcggggacagagaggcggtcgcgcccccggccgcgccagccaagcccccaaggggggcggggagcgggcaatggagcgtgacgaagggccccagggctgaccccggcaaacgtgacccggggctccggggtgacccagccaagcgtgaccaaggggcccgtgggtgacacaggcaaccctgacaaaggccccccaggaaagacccccggggggcatcggggggggtgttggcgggggcatgggggggtcggatttcgcccttattgccctgttt

SEQ ID NO: 207076 - DNA, 1000 bp, Homo Sapiens
aggtgtcctaaggcgagctcaggcgagctacagaaacctcccgtggagcagaagggcaaaagctcgcttgatcttgattttcagtatgaatacagaccgtgaaacgcggggcctcacgatccttctgactttttgggttttaagcaggaggtgtcagaaaagttaccacagggataactggcttgtggccggccaagcgttcatagcgacgtcgctttttgatccttcgatgtcggctcttcctatcattgtgaagcagaattcaccaagcgttggattgttcacccactaatagggaacgtgagctgggtttagaccgtcgtgagacaggttagttttaccctactgatgatgtgttgtcgcaatagtaatcctgctcagtacgagaggaaccgcaggttcagacatttggtgtatgtgcttggctgaggagccaatggggcgaagctaccatctgtgggattatgactgaacgcctctaagtcagaatcccccctaaacgtgacgataccgcagcgccgcggagcctcggtcggcctcggattagccggcgccccccccggggggcgccggcgggcagagccgctcgcctcgggaccggagcgcggacgaaagggggccgcctctctcccggagcgcaccgcacgttcgtggggaacctggtgctaaatcattcgtagacgacctgattctgggtcagggtttcgtgcgtagcagagcagctacctcgctgcgatctattgaaagtcatcccttggccaagcttttgtcggaaggagcaggccggaagggcgcccccgccgccggccggcgcgacgtcccgtccgccctccccggcctcccgccgcgctcccctttccgcgggggggagagagcggcggcggggcgggggggaggcggccgggcgaccgccgccggcccggggaccgtcccgtcccccggcctctcccgcagggagggggccgaaggcccggcccccgcaccccccctccctcccgcc

SEQ ID NO: 207077 - DNA, 158 bp, Homo Sapiens
aatcaacccgagtgcaatcgaatggaatcgaatgaatggaatgcaatggaatggattcaacttgaatggaatggaaagaatggaatcaacacgagtggaatggcatggattggaatggaatggaatggaatcaacccgagtacaggaatggaatggaa

SEQ ID NO: 207078 - DNA, 1000 bp, Homo Sapiens
taaaggaaatagcttcatataaaagctagacagtagcattcacagaaaactcttggtgacgactgagtttaactcacagagctgaacattcctttggatggagcagtttcgaaacacactatttgtagaatgtgcaagtggatatttaggcctctctgaggatttcgttggaaacgggataaaccgcacagaactaaacagaagcattctcagaaccttcttcgtgatgtttgcattcaactcacagtgttgaacctttctttgatagttcaggtttgaaacggtctttctgtagaaactgcaagtagatatttggacctctctgaggatttcgttggaaacgggataacccgcacagaactaaaacaggaagcattctcagaaccctcttcgtgatgtttgcattcaactcacagtgctgaacctttctttgatagttcagctttgaaacactctttttgtagaaactggaattggatatttggtcctctctgaggaattcgttggaaacgggataaactgcacagaactaaacagaagcattctcagaaccttcttcgtgatgtctgcattcaactcacagtgtggaacctttctttgatagttcaggtttgaaacactctttttgtagaaactgcaaggggataattgcactctttgaggagtaccgtagtaaaggaaataacttcctataaaaagaagacagaagctttctcagaaaattctttgggatgattgagttgaactcagagagctgagcattccttgcgatgtagcagtttagaaacacactttctgcagaatctgcaagtgcatatttggacctctgtgaggaattcgttggaaacgggataatttcagctgactaaacagaagcagtctcagaatcttctttgtgatgtttgcattcaaatccccgagttgaactttcctttcaaagttcacgtttgaaacactctttttgcaggatctacaagtggatatttggaccactctgtgt

SEQ ID NO: 207079 - DNA, 1000 bp, Homo Sapiens
gaataggaccgcggttctattttgttggttttcggaactgaggccatgattaagagggacggccgggggcattcgtattgcgccgctagaggtgaaattcttggaccggcgcaagacggaccagagcgaaagcatttgccaagaatgttttcattaatcaagaacgaaagtcggaggttcgaagacgatcagataccgtcgtagttccgaccataaacgatgccgactggcgatgcggcggcgttattcccatgacccgccgggcagcttccgggaaaccaaagtctttgggttccggggggagtatggttgcaaagctgaaacttaaaggaattgacggaagggcaccaccaggagtggagcctgcggcttaatttgactcaacacgggaaacctcacccggcccggacacggacaggattgacagattgatagctctttctcgattctgtgggtggtggtgcatggccgttcttagttggtggagcgatttgtctggttaattccgataacgaacgagactctggcatgctaactagttacgcgacccccgagcggtcggcgtcccccaacttcttagagggacaagtggcgttcagccacccgagattgagcaataacaggtctgtgatgcccttagatgtcggggctgcacgcgcgctacactgactggctcagcgtgtgcctaccctacgccggcaggcgcgggtaacccgttgaaccccattcgtgatggggatcggggattgcaattattccccatgaacgaggaattcccagtaagtgcgggtcataagcttgcgttgattaagtccctgccctttgtacacaccgcccgtcgctactaccgattggatggtttagtgaggccctcggatcggcccgccggggtcggcccacggccctggcggagcgctgagaagacggtcgaacttgactatctagaggaagtaaaagtcgtaacaaggtttccgtaggtgaacctgcggaaggatcatta

SEQ ID NO: 207080 - DNA, 1000 bp, Homo Sapiens
ccctaatttacctttacctcattattggagacgtgatgctgctcaaaagaaaatctctgctacttatatgaaagaaattaaactgagaagagaacgtggtgatattgatccaaatcgtgatttaattgattccttattgattcattcaacttataaagatggtgtgaaaatgactgatcaagaaattgctaatcttttaattggtattcttatgggtggtcaacatacttctgcttctacttctgcttggttcttgttacatttaggtgaaaaacctcatttacaagatgttatttatcaagaagttgttgaattattgaaagaaaaaggtggtgatttgaatgatttgacttatgaagatttacaaaaattaccatcagtcaataacactattaaggaaactctcagaatgcatatgccattacattctatttttagaaaagttactaacccattaagaatccctgaaaccaattatattgttccaaaaggtcattatgttttagtttctccaggttatgctcatactagtgaaagatattttgataaccctgaagattttgatccaactagatgggatactgctgctgccaaagctaattctgtttcatttaactcttctgatgaagttgattatgggtttgggaaagtttctaaaggggtttcttcaccttatttaccatttggtggtggtagacatagatgtattggggaacaatttgcttatgttcaattaggaaccattttaactacttttgtttataatttaagatggactattgatggttataaagtgcctgaccctgattatagttcaatggtggttttacctactgaaccagcagaaatcatttgggaaaaaagagaaacttgtatgttttaataaaacggcaactttctttcgattcagtgttctgattgttttcattttgttacttagttggattaacatatatacacatatacatacaaatatatgatacatatagaatagaaatta

SEQ ID NO: 207081 - DNA, 1000 bp, Homo Sapiens
aggcacacactccgtccggcaatcaagatggtcgatgctgcaggcaaggatctgtacctgccaggtactgacgtacctgcccagtacttcctgccggccaacgcccttgtcggtgtggctgacggtgctcagatcggtgttggtgacgttatcgcgcgtatcccgcaagagacgtcgaagacccgtgacattaccggtggtctgccacgcgttgccgacctgttcgaagcgcgtcgtccgaaagaagcctcgattctggctgaagtcagcggcaccatcgcattcggtaaagagaccaagggcaagcgtcgcctggtgatcactccgaccgacggtagcgaaccgtacgaagagctgattccgaagtggcgccacctgaacgtcttcgaaggtgaacaggtaaaccgcggtgaagttatctccgacggcccgagcgatcccgatgacatcctgcgtctgctgggtgtgagtgcgctgggcaagtacatcgacaacgagatccaggacgtttaccgtctgcaaggcgtgaagatcaacgacaagcacatcgagaccattctgcgtcagatgctgcgcaaggttaggatctccgagtcgggcgattccagcttcatcaagggcgaccagatggaatacccaggtgctggtagagaacgagcgtctgctagcgaggacaagttcatctccaagttcacccgagtgctgctgggtatcaccaaggcctcgctgtccaccgagtcgttcatctccgcggcttccttccaggaaacaacccgcgtactgaccgaagcggcggtaaccggcaagcgcgactacctgcgcggcctgaaagagaacgtggtcgtgggtcgtctgatcccggccggtactggtctggcctaccacaccgagcgcatggctcgccgtgatgccgacaaaccgctgcgtgtaagcgccagtgaagtggaagctgcactgaccgaagcgctgaattccagcggtaattaagtacagggcaagg

SEQ ID NO: 207082 - DNA, 1000 bp, Homo Sapiens
ccccatcctttgccagcatcttcctcaccaagtccaccaagttgacctgcctggtcacagacctgaccacctatgacagcgtgaccatctcctggacccgccagaatggcgaagctgtgaaaacccacaccaacatctccgagagccaccccaatgccactttcagcgccgtgggtgaggccagcatctgcgaggatgactggaattccggggagaggttcacgtgcaccgtgacccacacagacctgccctcgccactgaagcagaccatctcccggcccaagggggtggccctgcacaggcccgatgtctacttgctgccaccagcccgggagcagctgaacctgcgggagtcggccaccatcacgtgcctggtgacgggcttctctcccgcggacgtcttcgtgcagtggatgcagagggggcagcccttgtccccggagaagtatgtgaccagcgccccaatgcctgagccccaggccccaggccggtacttcgcccacagcatcctgaccgtgtccgaagaggaatggaacacgggggagacctacacctgcgtggtggcccatgaggccctgcccaacagggtcaccgagaggaccgtggacaagtccaccgagggggaggtgagcgccgacgaggagggctttgagaacctgtgggccaccgcctccaccttcatcgtcctcttcctcctgagcctcttctacagtaccaccgtcaccttgttcaaggtgaaatgatcccaacagaagaacatcggagaccagagagaggaactcaaaggggcgctgcctccgggtctggggtcctggcctgcgtggcctgttggcacgtgtttctcttcccgcccggcctccagttgtgtgctctcacacaggcttccttctcgaccggcaggggctggctggcttgcaggccacgaggtgggctctaccccacactgctttgctgtgtatacgcttgttgccctgaaataaatatgcacattttatccatg

SEQ ID NO: 207083 - DNA, 1000 bp, Homo Sapiens
cataccaaatgccacacaggcttaactgactgcatccctgccccagaggaaagccaagaaacatgttttcatgaggaaaacccaagctccttctcaaacatagccccactactttggaaagtaacttaatcagagaaacaacttctttgtttataagtctcagctctccttctcagcttggagggattcttttgaaatgttaatggagcctggatggcccagagtgcagcccccaaccctgaggtcccagtcggaccccagcatccatttgggcccacaggagtgggccagggaaggggtagggccccgtaaccacttagggcagggaaggaaatgggtttccatctgagaacgtgctttggagaaagctaggtgtggaaaagctccaatgcccatttgctattatttgtttccagtttgttcctttaaatatgagccagaagtgtttgtgttggtgttttaaaaacaaaaacaaaaaccgtgttggggtcctgactgggggagggggagagtgaagtgtttgctgaggacattgctcctctgactcccatctcactttgtccatcgcagccttttgttgggagatgacactgtcagtcagcccatgatgtctgttcacacgagatgcttttttaatagaattgaccaatgttttgctgccactgattaaagtattatttatactaattgttgcttgtagttttgatgtaattcattgatctatatttaaaataataaaaggtgtagcaaaatctccctcctgtttggtgccttaacagaagcattcatcctttgttaagtcttctaaaagctaacatttaacataaacaagttattattttctgcaataaattaggcaccattttttggggggtgcctaaagtgtgaaggttaaaccatgtaaggcttagcaattctattattaccacctccttaatgtacacacactcccagttggccaccatattttgtgagcattgggaagcctggggttgaattc

SEQ ID NO: 207084 - DNA, 1000 bp, Homo Sapiens
actaccgaagagttgaataggggttaatccacccctatactctgcgcgcattttgtcggcacaaattatgccaagtcatagctgacttgttggtcgacttccgaggagcagttgtgatggaaatacgcacgccaaaccgcctgcctttccatcgctgggcggtttttccggtactgctggctcaatttgtcgtactgctgctggcaaccttggtgttgtggcagtggaaagggtcggtcagtggatattcaggcctttgcggaggtttgattgcctggctgcccaatgtgtatttcgcctggaaggcttttcgcttcagcggggctcgggcggcacaagctatcgtcaagtcgttttacgctggcgaggcaggcaagatgattttgacggcagtgctttttgcactgacctttgcaggagtgaagccactggcgccgctagcagtattcggcgtcttcgtgttgacccttttggtcagctggttcgcgcccctgctgatgaataaaagactttcgagaccttagggcgtttgaggcaaccatggcagcagaaaccgcttcgggctatatccagcaccacttgcagaacctgacctacggtcaactaccagacggcagctggggcttcgcccattcggctgcagaagccaaggcaatgggcttctgggcgttccacctggacaccctgggttggtccgtcgcgctgggtctgatcttcctgttgatcttccgcatggcggccaagaaggcgacttccggccaacctggcggtctgcagaacttcgttgaggtgatggtcgacttcgtcaacggcagcgtgaaggactccttccacggccgtagcccggtaatcgcaccactggcgctgaccattttcgtctgggtattcctgatgaacgccgtcgacctgataccggtcgactggattcctcagctggccatcctgatttccggtgacccgcacattccgttccgcgccgtgtcgaccaccgacccgaacg

SEQ ID NO: 207085 - DNA, 1000 bp, Homo Sapiens
agtgatgttccctttaaagattgaggcatatcaccaagttctgcttttaagaatttttaaatatgccaaaattcattggcttaagtacataatgtgacagctaactgaaaatcaatctttcctagaactagtcctatttatatcataaagcacatagaatttcttagacttgggcagttcatttgttgttaagtattgtgtaaaagaaaatttgtacttgagccttttgacttttctcttgatattttttctttgtttataacttaaatgaactgtatgttattcagggaagtttattttaaataagattatacttctttttccctccacccctattcttccttcattctatgctgaatacatatttatacatatgtatatatatacatatgtatatgtatatatataaatacatatttatacatattttatgtataaaacagtgctacagtgctacgtctaatgtcaattcaatattctcttaacaggtgggtgaattttctggagccaataaggaaaagcttgaagccaccattaatgaattagtctaatcatgttttctgaaaatataaccagccattggctatttaaaacttgtaatttttttaatttacaaaaatataaaatatgaagacataaacccagttgccatctgcgtgacaataaaacattaatgctaacactttttaaaaccgtctcatgtctgaatagctttcaaaataaatgtgaaatggtcatttaatgtattttcctatattctcaatcactttttagtaaccttgtaggccactgattattttaagattttaaaaattattattgctaccttaatgtattgctacaaaaatctcttgttgggggcaatgcaggtaataaagtagtatgttgttatttgttatcttttgacagagaaaatagcattctctgttttagcaggtgaatcctctatgctctccaaaagatcagcatgaccaaaattgatgtccactcatgaaggact

SEQ ID NO: 207086 - DNA, 1000 bp, Homo Sapiens
aagctacactcctgaagaaaccaaaggcttacaaaaatgcatctccttggcttctgacttctttgtgattcaagttgacctgtcatagccttgttaaaatggctgctagccaaaccactttttcttcaaagacaacaaacccagctcatcctccagcttgatgggaagacaaaagtcctggggaaggggggtttatgtcctaactgctttgtatgctgttttataaagggatagaaggatataaaaagatataggactctttttttactcctacaagtgatacactttgaaaatgatgttttgttccttttgactttctttaccttttgaagtagaaagtgggaaccaacaggttcacagcttcattcctcatgaggcaaataggccttgggagaagaagagcgggtgcccttttatctaaacatggaaggctctgctcaactgagcactagatttgctacaaaccagcatcatcttcttcctcctgtcctcacggcttgtcccaccctctatgttcacttcaggagccacactagagattctgcatggcgtggaggacaaagtttcagcacgttctgcctctcctaatactttacaaatgagattacatttgaatttgctaatactttatgagcaggcaatgaggtttccaaaatctcatctaaatactctccaatctattagcaaaaatcagagtaaaatacagaggaaaggcactgctttctgttaattgattagctccctctgagttccaggcactatgctgagagtacaaagaagacacaagtctgctttcaagcaactcactgtgaaagtgtttttgaagggaggaacagaaatgagacccctatctttccctataaaaacaacatttttactgtcttttgcctgccaatctgtatttgaaaccattggacactgattctctggcctgggactttggcattgatggttttctgcctttcttctcagcctctgcctctattgcatttattaaact

SEQ ID NO: 207087 - DNA, 1000 bp, Homo Sapiens
gggacgggagaaggcactgcaggggctgcctgctgtccgcctgtgcccaccacccctctgcctggcaccctgcccccaccccctgagctgttctgctcattcttgggttcctctccctgcaacactgcaccctaagcatgcataccctaaagctcccggcttcaatgtcaccaacacagcccccgaggtttctcccttcacagggctctgctgggaaggtgccccctccgtggcgctccctcctcctgccaggcagttcatcccctacgagggggatgagctggggaagggctatcttactctggagagagcaggcaggacaggactggtggtgacttctcgactcccctcaggagttctctcgtttccacgaagagatcctgcccatgttcgaccgactgcagaacaataggaaagagtggaaggcgctggctgatgagtatgaggccaaagtgaaggctctggaggagaaggaggaggaggagagggtggcagccaagaaaggtctggctctgtgtggcctgtggggcagggactcggtgactctcccaaggcaaaatgaaaagacagggcacagagcagagttaaaatggagaaaagcagagccactttcaagaagcctcgaggtggacaggtccacagtgcagggagagaggccacggcgggggagagtggcagctgactccacctcggtagcaaacccggactgaaaaatttcctctgttcctagccagtgaaccccatttttcaagaaagaagtaaccatatcttatgtcctttataaaggacttagttgcaacaagtcagcacacccccaagttcaaatcccaaaggcatcgtggtcttgccattggcccgcacttggctaccttagctctgaggtttggcttgctattcccgctgctcccagtatcccatgctattcccgctaccccatgctgctcccactaccccatgctgctcccactaccccatgctgctcccactaccccatgctatt

SEQ ID NO: 207088 - DNA, 1000 bp, Homo Sapiens
ccagaaagagtaaacactagtcaagatttggagaaagtcttaagctgagaggatcctgaaaggcttcttgtagctggtggcatttgaaataggtcttggaggttgaatagaaggtctacagggcaccagataggcaagtaagtgtgtggggatcttcaggagagcagggggtcatgcttggaaggcctcaaggggtcttgctggctggagcagtgagttcctgtgagaggctgactggggatgaagctcaaatggtagaaaggcatcagagagtaggggggccttgggtaccccacaaaaagcctggattctggactctatcctgaaggcaatgggagggctgctgcaggatttgagcccaaagatgacatgacttgagtggcatcttagaaagtatcaccaagtaacacagacaggatagctaagaggaggggttaggctgtggaagaagctaacagggtctcaggcaagacaatgtcagggaccatggaaaaataaggaatcaatctaagagacactgtgatggacctgacttggcaatggattggccatggcaggtaaagaggagagagctggggacaggaatcttgaacacctttcagaacctcaccctccaaacacacagttcttccttaatgagctgagatgatgtttctattaagtatcctccctctggccttgccaagaaatgatgaaaaatggattggatcctgaagctgcctgcaggctgctctccagacatgatcctgcaggcatccctggcagacaaggtcattagcctgacagcagggacatgaacatactgcttagcaagctgtggttcctggttgatggatgggtaaaatttcaagaagctgaaatgccaagagagaggggttctggctaattgaattttctcataaccgcgtgcaaaccagcaatctttaatttcaaccccggtgcaaaacttttctggaatgtgctcagcttgataaacaacacgcagaacagaccaaagctt

SEQ ID NO: 207089 - DNA, 1000 bp, Homo Sapiens
gtgatgatgaacatgatgaacatgatgaaaatggtgcaactggtaagttttttttaagtcctttggtagtttcatgagaaaatttctacttccataaataaatgatttgccagagagaatagggatttggcttttcaactcctgtataagtgccattcttggattattaacgatttacctcggttatgctgttgtatargtcagggacaggatatttggaagatgaatctagaggtcaggtctgtactaagagaaaagccttttctcattggtgcaaggaagttgttgcatctttttcaacagtatcattattaataattgtgctcagtattaaactagagcagtacttacgttgaatttaacaaaaattaattgttacgttataggacctgtgaaaagagcaagagaagaaacagacaaagaagaacctgcatccaaacaacagaaaacagaaaatggtgctggagaccagtagtttagtaaaccaattttttattcattttaaataggttttaaacgacttttgtttgcggggcttttaaaaggaaaaccgaattaggtccacttcaatgtccacctgtgagaaaggaaaaatttttttgttgtttaacttgtctttttgttatgcaaatgagatttctttgaatgtattgttctgtttgtgttatttcagatgattcaaatatcaaaaggaagattcttccattaaattgcctttgtaatatgagaatgtattagtacaaactaactaataaaatatatactatatgaaaagagcaaaaacagtttttgattttttttttctttttgtacccaaagcatttaggaaagaactagaatattagctattgacgatgggcctttcccacaggccatttatggtgtctcctaggctggctttgtatatttacacaggaaagttggtaacactagaaataattactgtcacaaagctttcccttttttttcttttcgagactgagtctcactcytatcgcgc

SEQ ID NO: 207090 - DNA, 787 bp, Homo Sapiens
ccgatcttggctccttttctggggtcagtgcaaaaaacctaaggtgtatcaaggcgtccgtgtgaagatgaccgtgaaagagcttctgcagcaaagaagggcacaccaggccacctcaggggcaaacctgtcaggaagcagcggtctccaccttccagacactaccatgccatcttccgcaggactgtattttgagcctgaaccaacgtcttccacacccagttattttcaaactcgagaattttccacctgtgtctcttgtgaagaaattcctagctgcctcgaccagatcttcgagtcctaccttcagacagacacactcccggagcctttgctcaactctgcacagattgctccccactatttcccagagagctgtcaagtggcccctttctgccacaaccagagcctgattccagggtcgccttcggattcttccagtctctctggctcctttgattgcagttactcaccaactcagctgccttcctacactccagaaaattacagctcgcctccttctctggattccctacactccagcctccccgaagaaggctacttctgccaacattggccttctcacccccagtacaaccactcgtccccagccaccccctcctcggtctgctactatgcatcctgtgaggcagagcatctggatgccctcagaaccacagagttcttctcctactcgggcatggactgtgcggactttgcccctcctgtggccaccactggcgatttctataagagggagacaagctgtgatgcctgctatagttag

SEQ ID NO: 207091 - DNA, 1000 bp, Homo Sapiens
cctgcgagcccggctgagggagacatgcggcggactcgcagtgccgtggccaccggcccgcgggagcagcggcgctcgggggccaccgggggcttgagcggcggcgaaagccgcgcgcagcgctcccggagcaggactagggccggggccgggggcgggggcggggcggtcggtccgcagccgtcggcaaagccgcggcccaagccaccgccgcgggcccaggaggcggccgccgaggagccaccgccggcggtcacccccgccgcctcggtgtcggcgctcgacctgggggagcagcgggagcgctgggagacgttccagaagcggcaacggctcagcttcgagggcgccgccaagctgctgctggacacctttgagtaccagggcctggtgaagcacacaggaggctgccactgtggagcagttcgttttgaagtttgggcttcagcagacttacacatctttgactgcaactgtagcatttgcaagaagaagcagaacagacacttcattgttccagcttctcggttcaaactcctgaagggtgctgagagcataaccacatacacctttaacacgcacaaagcccagcacaccttctgcaagagatgtggtgtccagagcttctatactccgcgctccaaccccgggggctttggaatcgccccccactgcctggacgaaggcactgtgcggagtgtggtcactgaggagttcaatggcagtgactgggaacgagccatgaaggagcacaagaccatcaagaacatgtcaaaggagtgagcagggcagtagccctgtaggttgcatgggtgtgtgtcgctgtgcaggcctgcctgggctaccatctccactccccatgtctctgaggttcactccagccaccatttctttaggcagctctgccttaacccaggtttcgtgtaagaaacttaaccttctcccttcctaccaatttttgtgtgatcttttagaaaataaatatttctgacattaatgc

SEQ ID NO: 207092 - DNA, 549 bp, Homo Sapiens
atgtccctattcctgatcatcagtggatctgaggcaagggaccatatagaagggcttttggctgtcatgaaggtctgcagcattgtggtagtgatcttggccgtattgttgattgccaaattggatgccaagatttatgaacgctgtgagctggcaaagaagctggaggaggctggcctcgatggcttcaaaggctatactgttggagactggctgtgtgtggcacactatgagagtggctttgacacctcttttgtggaccacaatccagatggcagcagtgaatatggcattttccagctgaactctgcctggtggtgtaacaatggcatcacacccactcagaacctctgcaacatcgattgtaatgacctgctcaaccgccatattctggatgatatcatatgtgccaagagggttgcatcctcacataagagtatgaaggcctgggattcctggacccagcactgtgccggtcatgatttatcagaatggctaaaggggtgttctgtgcgtctgaaaactgactcaagctataataactggtga

SEQ ID NO: 207093 - DNA, 1000 bp, Homo Sapiens
tcttgcttatggaattggacaagactcccctactggaaaaagcaatattttggtgtttaagcttggaggaacatccttatctctcagcgtcatggaagttaacagtggaatatatcgggttctttcaacaaacactgatgataacatcggtggtgcacatttcacagaaaccttagcacagtatctagcttctgagttccagaggtccttcaaacatgatgtgagaggaaatgcgcgagccatgatgaaattaacgaacagtgctgaagtagcgaaacattctttgtcaaccttgggaagtgccaactgttttcttgactcattatatgaaggtcaagattttgattgcaatgtgtccagagcaagatttgaacttctttgttctccactttttaataagtgtatagaagcaatcagaggactcttagatcaaagtggatttacagcagatgatatcaacaaggttgtcctttgtggagggtcttctcgaatcccaaagctacagcaactgattaaagatcttttcccagctgttgagcttctcagttctatccctcctgatgaagtgatccctattggtgcagctatagaagcaggaattcttattgggaaagaaaacctgttgttggaagactctcttatgatagagtgttcagccagagatattttagttaagggtgtggacgaatcaggagccagtagattcacagtgctgtttccatcagggactcctttgccagctcgaagacaacacacattgcaagcccctggaagcatatcttcagtgtgccttgaactctatgagtctgatgggaagaactctgccaaagaggaaaccaagtttgcacaggttgtactccaggatttagataaaaaagaaaatggattacgtgatatattagctgttcttactatgaaaagggatggatctttacatgtgacatgcacagatcaagaaactggaaaatgtgaagcaatctctattgagatagcatcttag

SEQ ID NO: 207094 - DNA, 1000 bp, Homo Sapiens
cccagccttcgccacggccctgaagaacctctacatgagtgaggtggagattaacttggaagacgcactgggagtgctggcttccgcccacatcctccagttcagtggcctgtttcaaaggtgcgtggatgtgatgatagccagactcaagccaagcaccatcaagaaattctacgaggccggctgcaagtacaaggaagagcagctcaccaccggctgcgaaaagtggctggaaatgaacttggttcctctagtggggacgcagatccacctccacaaaatcccacaggacctgctccacaaagtgctgaagtcccccagctttcctgagaactgttgctttctggaccgggacataggacagagcttgaggccgctcttcctctgcatgcgtctgcacggcatcaccaaaggcaaggatctggaggtgctgcggcacattaacttcttcccagagtcatggctggaccaggttacagccaaccattaccacgcactggagaatgggggcgacatgctctacctgaaagatcttaacacccaggctgtgagatttgggctgctctttaaccaggagaatacaacttattcgaaaacgattgctctatatggattcttctttaagataaagggactcaaacatgatactacctcttatagtttttacatgcagagaataaagcacacagacctggaatccccctccgcggtctacgagcacaaccccatcagcctgcgagcggcacgcctggtgaagtatgagatcagagcagaggccctggttgacggtgaggaggctccgtggagtgtatttgtcatcactacctccactgatgcctgtgagtggcacattaatttccctgaaatccacagcccagacccacctgcctcactcaggcccactggggaagggctgggcccatctacctcaaccttgaaaatccaaactgtgggcatgccaatctatgtaagttttgcgttcatcttcccagcatcttga

SEQ ID NO: 207095 - DNA, 1000 bp, Homo Sapiens
tgttgtgtgcgcttttccctagcgccagccaagtgctggcagaacctatgacttacaagctgatgaagccactggtggtggaggaactgcaacaggtaggtctggatcccagccctgacattttggggtccttggaacagttgagccaggccctgagccgggcctcaggcattctgctcctgggccctgcaggcagcggtaagaccacttgttggcacagcttatttaagatccagaatcggctggcagccatggaggacacctcaacccaaggctgttagcctgtggaaattacccacctgtaccccagtggcctcagcccccaggagttcctgggatggctagagggctcctgctggcatcatggcatctttcccaaggtacttcgtgcagccggtcagtgtaacaacatgggccaaaagaggcagacagaggaatcaatcgggatccagcactggataatatgtgatggagcctccaatgctgcttggctggactccatcacttgcctcctgagtgagcttccccagcttagtctccccagtggacagcagatagcacgacccccaggcacctttctcttgatggaggtggctgacacaacaggcatatcccccacagtggtaggctgttgtgccctagtctggtgtggtggagagcagacttggcagtgtatacttagtgccctgatggcatcccttccttatgagtaccacctgcagcaccggacagtcgctgagctcaaccacatggctgaggttctggtgcctgcaacattgcgattcctcacctgccaaggtgtcagctctctgctgcaggtacacgggcagcaggctgtttgtgcaggtgtggcagaagttaccagcatggcacgcatcttgcatagtctgcttgacctccaccttcgcctaaaggaggagaaggcccctggcccaggttctggcccatctttgataccttcataagggattctattagtcgcctctccaactaccctgag

SEQ ID NO: 207096 - DNA, 1000 bp, Homo Sapiens
atgtggcgaagaatgctaggcattttgggagatgtaaattcaatcatggatcctgaaatacatgctcaagtttttgattacctctgtgaactttggcagaatctagctaagattagagataacctcggcatttcaactgataacctgacctccccttctccaccagttttaattcctccactgagaattcttacaccttggctttttaaggcaaccatgttgactgataaatataaacaaggtaaattacatgcatataaacttatttgtaatacaatgaaaagaagacaagatgtttctccaaatagagattttctaacacatttctacaatataatgcattgtggattacttcatattgaccaggatattgtcaatacaatcatcaaacactgctcacctcaatttttttcacttggtttgcctggtgccacaatgcttattatggattttattgtagcagctggtagagtggcttcttcagcttttctcaatgcaccaagagtagaagcacaagttcttctgggatctttggtttgctttcccaacttatactgtgaactgccttctcttcatcccaacattcctgatgttgctgtgtctcagtttacagatgttaaggaacttataatcaaaactgtattaagctcggcaagagatgagccctctggtcctgcacgatgtgtagcactttgtagtttaggtatttggatttgtgaagaactagtccatgagtctcatcatcctcaaattaaggaagctctgaatgtgatttgtgtttccttaaagtttactaataaaacagtagcccacgtagcttgtaacatgcttcacatgctggttcattatgtacctagacttcagatttaccagcctgattctcccttgaaaattattcaaatcctaatagctaccatcacccatcttttaccaagtacagaggcttcatcttatgaaatggacaagagggtaatttaaattttgtttgatgattagtatg

SEQ ID NO: 207097 - DNA, 1000 bp, Homo Sapiens
gacgacagattgtccagttcctcctaaaagaatgagacgagaagctacaagacaaaatagatggtgcctaaggcagagttgggcaaagaaagaagagaaccagcgttcgtttcctcctggactctctaagtccatggaggtggtgggggaatggccctgtcttgcccgagaaggaaattcgagtcgagcccccactcctctccccgcgggactgataaacatgtccctcattcaccctgggaggctggcacccaggcacgacgcgaggacagccagactcgccgacggcggccgcgtcccgaggggccgggagcgagcctgttggaagctcttccaccccaagccccctgccgagaagcgaagggactggagacagggagacttggtggagggagagtcacgtttcggagagggaagtgaaataaagagggcggcacccggggggacctgtgcgtcattgagggaccgaggagaagcgcagggcgcacggggctgcaaaaggagaagtaggaacgagaagccggagggggcggccgcggagcactggttggagcgccgcgaagcgcccgagcctcttgccttcgcgggcggcgccctggccgccggcagccttgtggccggtgccccgatccgccgcgctccggacccgggcaggcagggcgcgcccgctgcgcgcaggatgtggcagcccagacggccctggccccgcgtgccctggcgctgggcgctggcgctgctggccctgggcggcgcggggctgtgccacgccggcccgcagcccgggtatcccgcgcggcccagcgccaggaacaaagctgccctgccaaagacgacgagcggcagccgggggtctcccttggacttccccgggcggctccttctgcgggggaccgcgcgctccgcagccggcgcctcaggcagagctgactccgggggcgtgggcgcagagagtgtcccgcagacccgggtgatccgaaaacgactcccaggaattccatga

SEQ ID NO: 207098 - DNA, 837 bp, Homo Sapiens
ctgggggttcggggagcgcttggaccccggcttctgagacgcgtcaggtcgccgtgaaggtgattgcatgagatcgtgcgtgttaacgtttgttgacagctgttacttgagtccgacagccctgggggccgtgcacctgcgtatcatggctacctctgaactccttgggggacacgtatacctttgagaatccgatgaaagccagagattccgcccttgttttcttagaattaaaaatattatccagcaatgcaaatgaacaaactataactacacacagctgcatggataaatgtcagaaacatgacgttgagtgtgagaagccagatgcaaacgaggactcactgtgcaattctgtgcatgtacagtggccaggagaagggagcactggctttgctttcatcaggccaaagatgcctttctttgggaatacgttcagtccgaagaagacacctcctcggaagtcggcctctctctccaacctgcattctttggatcgatcaacccgggaggtggagctgggcttggaatacggatccccgactatgaacctggcagggcaaagcctgaagtttgaaaatggccagtggatagcagagacaggggttagtggcggtgtggaccggagggaggttcagcgccttcgcaggcggaaccagcagttggaggaagagaacaatctcttgcggctgaaagtggacatcctgttagacatggtgaggcaggtgatggggaagagaggcctaccttctccttttggggaggctccacctcgagtcacttaatccaacagatatctcctcaatgccagtttggccaggtatgttgctttgcatc

SEQ ID NO: 207099 - DNA, 886 bp, Homo Sapiens
actcagatgacgatttaattcaagatttcttgtggatggactgctgctgtaaaattgcagacaagtatcttttggctatgacctttgtttatttcaagagggctaaatttactataagtgagcataccaggataaatttctttattgctctgtatctggctaatacagttgaagaagatgaagaagaaaccaagtatgaaatttttccatgggctttagggaaaaactggagaaaattgttccctaatttcttaaagttaagggaccagctctgggatagaattgactatagggctattgtaagcaggcgatgttgtgaggaggttatggccattgcaccaacccattatatctggcaaagagaacgttctgttcatcacagtggagctgtcagaaactacaacagagatgaagttcagctgccccggggacctagtgccacaccagtagattgttcactctgtggtaaaaaaagaagatatgttagactgggattgtcttcatcatcatctttatccagtcatacagcaggggtgacagaaaaacattctcaggactcatacaactcactgtcaatggacataataggtgatccttctcaagcttataccggttctgaagccaactttagggtgaatactatacctccactcagcagataaggaaactgaagcttagagaagttaaataatttgcccaaggagctggagtgacatgtgaacccaggtctctgactccaaactagagcctgaattcctaaatattatggtctactgcccttttgatgcaatcctgctgttggcagtgaaaataagctgccacggaagccttctagcagactactaaggaggtggcgaaagcattaagatctaagtccctgatgaaa

SEQ ID NO: 207100 - DNA, 1000 bp, Homo Sapiens
acgacgactccatcgtgctctatgactgccaggagggcaaaccaaagagaaccctgtacagtaagaaatatggtgtggacctcatcagatacactcatgcagcaaacacagttgtttacagctctaacaaaatagacgatactattcgttacttgtccttgcatgacaacaaatacatcaggtactttcctggacatagcaaaagggtggtggccttgtccatgtcacctgtggatgacactttcatttctgggtctcttgataagaccattcgactctgggatctccggtctcctaactgccagggcctcatgcatctgcaggggaagccagtttgttcttttgatccagaagggttaattttcgctgcaggtgtcaactctgaaatggtcaagctttatgaccttcgttcttttgataaggggccatttgctacctttaagatgcagtatgatcgaacttgtgagtggacaggacttaaattcagcaatgatggcaagctcatcctcatttccaccaacggcagcttcattcgtctgattgatgcattcaaaggagtggtgatgcacacgtttgggggttatgccaacagcaaagctgtcacactggggctgcacagacgtgctcagcagggctacaggtgctcaagccctattggggatgggtggggagtggggcagcggcctttgccaccttaagaatcggggccaaagccactgatgtttatttgacagtgacactgcactgggtacttaaagaaattatttcccgttgtaattataattactgcttattaaggaaaatatgggaattttagaaagaatcaagtttgccacccaaatgctaccactgttaatcttttggtgttaaatgttccccctagacatttctgtgcatagatttttggtgtgtttacatagtcgttattctgtatatacaattttatgtcccttttgtacttaacgtataaacattttttccatgttatagtcttaaacag

SEQ ID NO: 207101 - DNA, 1000 bp, Homo Sapiens
gaccaagatatgatggagtctctattttacactgtcatagttcctttattaaatcgcatgatctacagcctgagaaacaagcaaaggacatgcagtgaggagatggaagaggaaaatgcaacattgctgacagagtttgttctcacaggatttttccaccaatctgactgtaaaataccgctgttcctggcattcttggtaatatatctcatcaccatcatggggaatcttggtctaattgttctcatctggaaagaccctcaccttcatatcccaatgtacttattccttgggagtttagcctttgtggatgctttgttatcatccacagtgactccgaagatgttgatcaacttcttagctaagagttctgttcaagtttttaccattggaactattcttatatcttatacaattatcctctttacaatcttagaaaagaagtctatcaaagggatacgaaaagctgtctccacctgtggggctcatctcttacctgtatctttatactatggccccctcgccttcaaatatctgggctccttatccccgcaagcagatgaccaagatatgatggagtctctattttacactgtcatagttcctttattaaatcccatgatctacagcctgagaaacaagcaattcactcagggtacatccaatgaggacatggatgacgaaaatgcaacattgctgacagagtttgttctcacaggacttacatatcaatcagagtggaaaatacccctgttcctggcattcttggtctgtacagacctttcatttcttcatgactcactcttggggatcatctgggccagagtgaatgtgaatggaagagcagtgccttcttgcggtcaccatggtttgggcagcagttgtgactacttccccaaggggaaaacaagtatctgggaaaaggtttgggggttataaggcccatgactcctttcacatggagatttgctctctactgcgaaattaaaagtgttatttt

SEQ ID NO: 207102 - DNA, 1000 bp, Homo Sapiens
gcatatgcctaaaagaaaaagaaagcagcattatctctcttcagaagatgaaccagatgataatccagatgtcctggattccagaatagaaacagcacaaaggcagtgtcctgaaacggagccacatgacacaaaggaagagaactccagagatttggaagaattacctaaaaccagttctgagacaaatagcactacctcaagggtcatggaagaaaaagatgaatatagcagcagtgaaactactggtgaaaagccagagcagaacgatgatgacaccataaaatctcaggaggaagatcagccaataattattaaaaggaaaagaggaagacctcgcaaataccctgtagaaacaacgttaaaaatgaaagacgactccaaaacagatactggcattgtcactgtagaacaatctccatctagcagcaaactgaaagtaatgcaaacagatgaatccaataaagaaacagctaacctacaagaaagaagtataagcaatgatgatggtgaagaaaaaatagtaacaagtgtgcgtcggagaggaagaaaacccaaacgttctctcactgtatcagatgatgctgaatcctcagagccagaaagaaaacgccagaaatcagtttctgatccagtggaggacaagaaagagcaggagtctgatgaggaagaggaagaagaggaagaggacgagccttcaggagccaccacaagatccaccaccagatcagaggctcagagaaagcaacatagcaagccatctgcacgtgcaacatccaaacttggcagcccagacacagtttctcctagaaatcgccaaaaattagcaaaagagaagttacctaccagcgaaaaagttagtaactctcccccattaggaaggtcaaagacacagctctccccttctatcaagcgcaagagagaagtcagccctcctggggcccgaacaagaggccagcaaagggtggaggaagcccctgtgaaaaaagcgaagcgataa

SEQ ID NO: 207103 - DNA, 1000 bp, Homo Sapiens
cttcaatatcagtgaacgtctcaacattaatgagcatactggaagcataagcagtgaattggaaagtctgaaggtaaatcttaatatctttctgttgggtgcagcaggaagaaaaaaccttcaggattttgctgcttgtggaatagacagaatgaattatgacagctacttggctcagactggtaaatcccctgcaggagtgaatcttttatcatttgcgtatgatctagaagcaaaagcaaacagtttggagagagtaactaggattctagcttctctggattttgctcagaacttcatcacaaacaatacttcctctgttattattgaggaaactaagaagtatgggagaacaataataggatattttgaacattatctgcagtggatcgagttctctatcagtgagaaagtggcatcgtgcaaacctgtggccaccgctctagatactgctgttgatgtctttctgtgtagctacattatcgaccccttgaatttgttttggtttggcataggaaaagctactgtatttttacttccggctctaatttttgcggtaaaactggctaaatactaccgtcgaatggattcggaggacgtgtacgatgatatggaaaatggtaataatggttatcataaagatcatgtatatggtattcacaatcctgttatgacaagaattaaggagcttctgtggttctggatatatcatatgtcaggtgactctgagctttgcttgccaaagtcactgctcccagggctggagcagcgctgccgtagagcagtagttctgacagctggaggctctctgctgaccatgctgcccccagctggaggcaagtcattcctaaaagggaatctagaaggcacaactcctcggctccctgagaagcagatgcactgcatcaggaactcaaagtggaaaggatcacagatttttgatagtttctgggtctacaaggactttccaaatccaggagcaacgccagtggcaacgtag

SEQ ID NO: 207104 - DNA, 1000 bp, Homo Sapiens
ccctgggagatctgtttgctggtggctttcctgtattgcgaccagcaggccagcgggatgtagcaggcaatacctccgaggcgcatgggaacctcccggtggttgcaccccccgtccccttgaagcctcagctagctcccttgcacctcccgcccatcccgcccccgctccctctgctcccaccttgtgggtatccggggctcaaagcggagcccgccagccctgcgcaagatgtgcaggagcctcccgccccgccgcccccgctccccccttatgcttcgtgctccccgagggcttctttgcccgcaccccctttgccgggagttaatagcagcagtgaaactccacccccgctaccccctaaatcccccagcttccaggccccaccgcagaaggccagtgcgcaggccttgcccgccccgcctgcccctccgggctcccagccgttcctgcagaagaagaggcatggccgaccaggggccggtgggggaaagctaaatccacctccagcaccccctgcgagatcacctaccacagagctttcaagcaagagccagcaggccacagcctggaccccgacgcagcagcctggaggtcaactgcgaaatggaagcctgcacatcattgatgactttgagtctaaattcacgttccattctgtggaagactttccccctccggatgaatataaaccatgccagaagatttaccccagcaagatccccagaagccgtacacctggtccctggctccaagcggaggcagtcgggcagagctctgatgacatcaaaggcagaaattctcagttatctctaaagactcttcggtgagaagacagatgaagcgaaggtcccggggttccaggttgcagaacaacatgtcagatgccagccaccccatgctcaagctgtaattcagttggcatacagtcttggaattgagaatttatttattgtaaatatgtgatttgcacgggctttaaagcagtattttaattgac

SEQ ID NO: 207105 - DNA, 1000 bp, Homo Sapiens
gactaacaagactatcaacctggaaaagttaactgaggttacttggattgatggtggtcctgtacttcctactccaactaagacaagtaccatcccaatgagttctcatccttctccatctactaccaatgccaccagttctgagacaatcaccagttctgccagtgcaaatactaccactggcactactgctactgttcctatcacaaccacatctttcccaagtactactagtgttacaactaatactactgttcctgatacaacttctcctttccctacaagtactactaatgctagcactaatgctactgttcctatcacaaccacacctttcccaacaagtactattggtgttacaactaatgctactgttcccgatacaactgctcctttcccaacaaatagtactactgctagcactaatgctactgttcctatcacaaccacatgttttgcaacaagtactattggtgttacaactaatgctactgttcccgatacaactgcccctttcccaacaaatactactactgctagccctaatcctactattcctatcacaaccacaccttttgcaacaagtactattggtgttacaactagtactactgttcctgatacaactgcttatttccctacaagtatttctcccccccccactaatgctgcccctgttcctatcacaaccacactttttgcaacaagtactattggtgttacaactggtactactgttcctgatacaactgctcctttccctacaagtactactggtgctagcactagtgctactgttcctattacaaccacaccttcccctacaaatactgctgatgccaacactaatgatacagtggagcatggagcatgggcaaggttttcagaaacctcatcatgcatctcccagagtgtggaagccaatgatatcacaaagaatggcgctagagtcttgcccagagaattccaaaagtggcagagattggagaccctgcagtag

SEQ ID NO: 207106 - DNA, 1000 bp, Homo Sapiens
aacctgattgaagtaaatgggagaagctgccaggttcacgtagccgtttacaagtatccctctgtacacaggcaggaggaggcagacattttctcctgccttcccgccaaagcggccagccttgcccactgcacggggcgacccggcagctgctgtgctgatagctcggctgccctggagacaggggacctcacctcggcagagctgcccccttgggagatgccccacgtgtacactgtgtggaaattcagtttgtcccaggatgacaaccttgtgcttgaagaggtcaagaaactttgtgcaacgcagttcaacaacattcttcttcttggattgacggatgacggctcaccgagagcttatctaaaaaccactctgcaaacatgtggtcacatgcaagttagtggtcatatgacggactgcattcaggacaagggtgctctgccaggaacagagaccaaatattcattccattttatgtcaatgatgcccataggaaattacggctggtccagaaagcacttggtcctgatgcgttctggcagctgcggaagacaggaagagagagagcagctggggaaggagaggagggacctcgaactgtgcgtcttgattacggcaccgcaggaatgccctgtctctgctgggatgctgagctctgcgggagaaaatgacacaacccacagatttgcaccagaggggagaagaaacctagggtgacgaggggtcacagaggccgaatctctgtgaagagtatttcaagaagctgacgcttttcctgactgtggagagatcggttcaagtgacggcaggattcctggcggtggcaacacggagtcactgctgatgaaaaggggccttcagtggcctggggagggcagtgccacgtggagcaaaagctaagggacacacaggagaggtcctggagaaggtgagcacgtacacagtcccccaagatgcctagcagcaaaggtgagcaagtacacagccccccaagata

SEQ ID NO: 207107 - DNA, 1000 bp, Homo Sapiens
gacccagcgcttcccatgccaggccgcggcgaggccgggcccagaccccgctcccgaggcggagccggagcgcaggggcgggcccgaggggcgggcagggctgcggcgctggcgcttggcctcctacttgagcggttgccacggcgaggatgggggcgacgacggcctgccggcgcccatggaagcggaggcttacgaagacgacgtgctggctcccgggggccgggcacctgccggcgacctgctcccctcggccttccgcgccccagcggccttccccaccaaggtcccggtgccagactcgggcagcggcggcaacggcccagagcgcgagggcccggaggagcctggcctggccaagcaggactcattccgctcgcgcctgaaccccctggtccagcgcagctccaggctgcgctcctcgctcatcttcagcacgtcacaggccgagggcgcggccggggctgcggcggccactgagaaggtgcagctgctgcacaaggagcagacggtcagcgagacgctggggcccggcggagaggccgtgcgctccgcggcttctaccaaggtggcggagctgctggagaagtacaagggccctgcccgtgatcccggcggcggcgcgggcgccatcaccgttgccagccacagcaagaccgtcgtgtcccaggcgtggcgggaagaggtggcagccccaggtgccgtggggggcgagcgccgcagcctcgagagctgcctgctggacctgcgcgactcctttgcacagcagctgcaccaggaggcggagcggcagccgggagccgcgtcgctcaccgcggcacagctgctcgacacactgggccggagcggctccgaccgcctgccttcccgcttcctctctgcccaggcctctctgtcctgcttgttcagcaccctgggcctgcgccttgggctttcgaagctcaacaagcagctccctcggcagccccctcaggaaacagcccctgggctgggtctctga

SEQ ID NO: 207108 - DNA, 1000 bp, Homo Sapiens
tgatgtttggttggacagcagaaaagaacttcaaaaatctgattacatggagtatgctgggagacagtactatttgggagacaagtgtcaggtttgcttggaatcagaaggaagatattataatgctcatatccaggaagttggaaatgagaacaattcagtaacagtcttcattgaagaattggcggaaaagcatgttgttccactggctaacttaaaaccagttacccaagtgatgcctgttcctgccaggaatgctatgcccagtctgaaaggaagaggttaccagaaaatgcctgggggatatgtcccggaaatagttatatcagagatggacataaagcaacagaagaagatgttcaagaaaattcgagggaaagaagtttacatgactatggcttacggcaagggagaccccctcctcccacccaggctgcagcacagtatgcattatgggcacgatcctccaatgcactactcacagacagctggcaatgttatgtctaatgaacattttcatcctcagcatccatctccgagacaaggcacaacatgccgggccctaaagttgatttttacccaggcccaggtaaaaggtgctgccagagctatgataacttctcttatagatctcgggcgatatcatgaagaatatctttatcgtgcagagccagactgtgaaacttcaggtgtttatagcacagctgcatctacagcaaacttgtgctattaccacagctactggcactccatggtctatgtgccacagatgcagcagcagcttcatgtagagaattatccagtctatactgagccacctctggtagatcaaaccgttcctcaatgctacagtgaggtgaggagagaagatggcatacaggcggaagcatcagcaaatgatacttttccgaatgctgattcttcatctgtcccttcagggagcagtctaatatccagtaatgtcagatccttatgggcagccactttggccaggttttga

SEQ ID NO: 207109 - DNA, 1000 bp, Homo Sapiens
ctctgaagtcgagattcccagtgtgggaaggattctggttagatctgatgcagatggatatgatgaggaggtgatgctgagccctgccatgcaaggggtcatcctggccatagctaaagcccgtcagacctttgaccgagatgggtctgaagcagggctgattaaggcattccatgaagaatactccaggctctatcagcttgccaaagagacccccacctctcacagtgatcctcgacttcagcatgtccttgtctactttttccaaaatgaagcacccaaaagggtagtagaacgaacccttctggaacagtttgcagataaaaatcttagctatgatgaaagatcaatcagcattatgaaggtggctcaagcgaaactgaaggaaattggtccagatgacatgaatatggaagagtacaagaagtggcatgaagattatagtttgttccgaaaagtgtctgtgtatctcctaacaggcctagaactctatcaaaaaggaaagtaccaagaggcactttcctacctggtatatgcctaccagagcaatgccgccctgctgatgaaggggccccgccggggggtcaaagaatccgtgattgctttataccgaagaaaatgccttctggagctgaatgccaaagcagcttctctttttgaaacaaatgatgatcactccgtaactgagggcattaatgtgatgaatgaactgatcatcccctgcattcaccttatcattaataatgacatttccaaggatgatctggatgccattgaggtcatgagaaaccattggtgctcttaccttgggcaagatattgcagaaaatctgcagctgtgcctaggggagtttctacccagacttctagatccttctgcagaaatcatcgtcttgaaagagcctccaactattcgacccaattctccctatgacctatgtagccgatttgcagctgtcatggagtcaattcagggagtttcaactgtgacagtgaaataa

SEQ ID NO: 207110 - DNA, 1000 bp, Homo Sapiens
cacgctgaccaaactgaagagccacatgaagacatgttcccagcctctgcatgaagatacctttgggggacatctcaaagtggggctggcccagattgcagccatggacatctcacggggcaaccacagagataacaaagctgtgatccgctatctgccttggctttatcatcccccctctgcaatgcagcaaggacctaaagaattcattgagtgtgtctcccatatccgactgttgtcctggctgctgctgggttccctcactcacaatgcagtgtgcccaaatgcctcctctccctgcctgcccattcctctggatgcaggctcccacgttgcagaccatcttattgttatcctgattggatttccagagcaatcaaagacctccgtgctgcacatgtgctccctcttccacgcgttcatctttgctcagctgtggacagtttattgcgagcaaagtgccgtcgctacaaatctccaaaatcagaatgaattcagcttcacggcgatactgacagcactagaattttggagtagggtgacacccagcatccttcagctaatggcccataacaaagtggcctcaaagcctgaaaagagcctcatgttttcaagctgccttatagggacctatgctccccaatcttcaaatccagtactgttgaatgtagacggctgccaagaaaggggctgttccagggctcattggaaaatgtctgcgatggtagaaatggtgtgtctccatgtgattagtttaatggaggcattgcaggaatgcaattcgaccatttttgtcaagcacttatctgcgggactccagcttcgcctccaggctattcagaaccacgtgaaccaccacagcctaaggacgctgccgggctcgggccagagcagtgctggcctggcagccctccgaaagtggttgcagtgcactcagttcaaaatggcccaggtggagatccagtcctcggaagcagcctctcaattttatcctctatga

SEQ ID NO: 207111 - DNA, 1000 bp, Homo Sapiens
catctccagaatgtgtctagaattgactggtactttttcctactctaataatacacgaaattattgcctgctgttaaaagcctccatcaggaaatatggccgagattttcaggcaatctcagacgtgattgggaacaaatcagtggtacaagtgaaaaacttttttgtaaattatcgacgccgcttcaacatagatgaagttttacaagaatgggaggcagaacatggtaaagaagagaccaatgggcccagtaaccagaagcctgtgaagtccccagataattccattaagatgcccgaagaggaagacgagggcctggctctggaaacagcccagaaggcccctcctgacctgagcatggaagtacctcgtgagcctctctggccctggaagcctctcctccccagcacagccaggactgcagctgtcacacgcccctgcaaggtctggagaagggaccctgaaacttcgtgcagcacccgccctctcctgcagcagagattggcactgcgttcccagccccttcagctgcttctccccagagccgggtgcttgggtccagccgtgcggtgtggaccaggccatgcttggggacgacaatcgaggcaagtcctacctgcaggaatcggtgtgctgagaagcagggctttgcacacaagctatatgtgttgccacacagccaccactgccatcctaggggagcagcgggccactgccaggcatcccacacctccctgcgtgacagcagcctggccagctttgagcagccctgagcctgtgcggggagagctcttggtgttcctgttttgcattaccttttcactgtttgttgagacagcccaggcagcatcttgggggctaatcccgggggctgagtcgctggagaggggtcaaggggagtggcctgtggctgccatcagcgcctgtccttgtggcctcggtccccgcggcctcggtccctgcagcctcggtggcgcctgcgtggagggggccccctaa

SEQ ID NO: 207112 - DNA, 1000 bp, Homo Sapiens
gccttatgacagaaacatttctaattactttacattcatcaaggatcaaactgtgacaaatccaaaaactcagcgcagtataaatggttcttttgctcctgggctagagatcacttctaagctatttgtagtatcacatgatgcaaagttgctcttcagcgctggatactgggataatagcattcaagtgatgtcacttacaaaaggcaaaattatctcacacatcatccggcatatggatattgtgacttgcttagctacagattactgtggaatacatttgatttctggttccagagatactacatgtatgatatggcaaataacacaacagggaggtgttcctgtgggcttagcatctaaaccttttcagattctttatggacacaccaatgaggtactgactgtcggcatcagcactgagctagacgtggcagtgtcaggatcaagggatggaacggtgattatacataccattcagaaaggtcagtacatgaggactttacgaccaccttgtgagagttctctgttcctgaccattcctaatttggctatatcttgggaaggacatattgttgtctactccagcactgaagaaaagaccaccctcaaggataagaatgcattacatctgttttctataaatggcaagtatctagggtctcaaatcctgaaggaacaagtatcagatatatgtataatcggagaacacattgtcacaggcagcatacaaggattcctgtctgtaagagatctccacagcttgaatctcagcatcaacccattagccatgcgactgcctatccattgtgtttgtgtcaccaaagaatacagccatattcttgtaggtttagaagatggcaaattgattgtagtgggtgttggcaagcctgctgagatgcgttcaggtcagctttctcgaaaattttggggatcgagcaagcggctcagccagatttcagctggagaaactgaatataatactcaagattccaagtga

SEQ ID NO: 207113 - DNA, 1000 bp, Homo Sapiens
tcacatccgttccatcgcacccggggccttcgaccggctcccaaacctcagttctttgacgctttcgagaaaccaccttgcgtttctcccctctgcgctctttcttcattcgcacaatttgactctgttgactctgttcgagaacccgctggcagagctcccgggggtgctcttcggggagatggggggcctgcaggagctgtggctgaaccgcacccagctgcgcaccctgcccgccgccgccttccgcaacctgagccgcctgcggtccttaggggtgactctgagcccgcggctgagcgcgcttccgcagggcgccttccagggccttggcgagctccaggtgctcgccctgcactccaacggcctgaccgccctccccgacggcttgctgcgcggcctcggcaagctgcgccaggtgtccctgcgccgcaacaggctgcgcgccctgccccgtgccctcttccgcaatctcagcagcctggagagcgtccagctcgaccacaaccagctggagaccctgcctggcgacgtgtttggggctctgccccggctgacggaggtcctgttggggcacaactcctggcgctgcgactgtggcctggggcccttcctggggtggctgcggcagcacctaggcctcgtgggcggggaagagcccccacggtgcgcaggccctggggcgcacgccggcctgccgctctgggccctgccggggggtgacgcggagtgcccgggcccccgggacccgcctccccgccccgctgcggacagctcctcggaagcccctgtccacccagccttggctcccaacagctcagaaccctgggtgtgggcccagccggtgaccacgggcaaaggtgaagatcatagcccgttctgggggttttattttctgcttttagctgttcaggccatgatcaccgtgatcatcgtgtttgctatgattaaaattggccaactctttcgaaaattaatcagagagagagcccttggttaa

SEQ ID NO: 207114 - DNA, 1000 bp, Homo Sapiens
caccaacatctctgtcctgtgggccagggagttaatgaggcagctggtgggacccgggaaggtggccgacatcagaattcacagaggccccctctccagtctcccctcagctgccctcaggcacgttgctgccctggggccccagaggcgaagccaagttccccaggctggggctctgcaggagggactcagagactccttcaaacctggctttgagcccgcaggagaagtgtctccagtccccaccccggtgtggagaatggagcccagtgctacgttcgccatgcagctcacggccacacctgagcgactgctccgactcatctttgctggggtctgtggcctcatcctgctggtggggctgtcagctaatgggctcatgctgctggtggcaggccggggcccgggctccccccacccgctccacgccctgacccacagcctcatgatgaacatcacgctatctgacctgctcttcgtggcctgcatggtgcctgtgctgctgctgagcttcctgcagcacaactggtggctgggccctgccatctgcaccattagccaggccaccaacacagccaccacgttctgcatcttctatagcatggtggccacagctctcctgcgccatgtggctgtggcccggcctgacctggccttcgcagccggctggggcactcgcttgctgctctgtggggccatagcccaatttgaggtctccatttttcccaccctcagtgccctccctctggcctgctcagggcaggcttcaggcttccgtgttggcctggaaacccgggagattgtctctactgaaattcccaagacagcacgttctgcttgctgtgaccccaccctgttcccactcaaagcgtatcagaatcaccccatgggtccccggggctcccagtgcatccagtgtccctgggagggtgcacatgttcaggccttcctgcaaacccatcagcttcatggggttcactggaaatcgggcacaggatag

SEQ ID NO: 207115 - DNA, 1000 bp, Homo Sapiens
accccgttgcgctccgacccgcgtgagccccaggccagtattgccctggtacccttgccccaggacgggggccgcggggcgccttctccaggagggggctccgggtctcctcagaagccggtggctcagaagccccctcgcggacgctcttcggacgctggccccggccgccgggcctcaccttcggcggcgccgctggccacgagcagacaggcgggcctgctagggagccgttcggacgccatggctcgggctcggcgctgggtctgcgcgtgcgcggcgtctgggcgcgcccgggagttcgcgggtcacgtgccctggcggccgggggcggagcggggtgggactgggcgcctgcgcgttcgtacccgttccgggtcggctgggctgcccgcctctccgcgcgcccgggcggttgcaggtcgcgcctgctttggccccggcgggttcggcatccgagcctggcaggggccaatagacagggcctctggagtgcagtggcgtgatctcggctcactacagcgtctgcctaacgtgttcaagcgatcctcccacctcagcctgttgagcagccgggaccccagaaagtttcctacactactgaggtttaggggcactgtgaagcaaaagccacgcctcagaatcccaggcggagactccgacctcctcccgggagggaagccagtagctgagcacctgcgggagattaaagagaggaataaggagaaacactggaaggcaagtggctgctcgctggaggagataattggatgctgcaagcggcaaagggctcgggatgcaaaacaccgcaagaaatgcgacaagggaggagcattcccgcaaagaaaaaacgcacaggccgagagcagtggctcacgcctgtaattccagcactttgggaggccgaggcaggtgcatcgcttgaggacaggcgttcgagactagcctggccaacatggtgaaaccccatctctactaaaaatccaaaaaaaaaaaaaaa

SEQ ID NO: 207116 - DNA, 982 bp, Homo Sapiens
tctttggtcttgttgatttcctctgggcatatcccttccccagatctgctcctcccctttcacaggtgggatcggcactcagggggtctggaaagaaggtcataagggagcatgataggatttggggcagagggacaggctcctctggggaaaccccccagagctctttaccaaggatgaaagaggagccaggccttgggctcctgatcaggagaaaggggccccaccggggtctaacggtgacagtccattctctgagtcaatggttatttgaaaatttgattttgattttattttttctctgtaaacttccaacctggcttttcccatttcaattcctgtgatttatgccaataaagtttgcccatgattttcacctgtgctagtgctatttcttggtggtctgaacctcatggtcccagcagagaccaaacccaccccaggctgggtcaccagatggagggtaaattgtggatgtttcctttcttgaggtcaaaatccctggggctggggtccgtggtccttgcctgtggtcataggtcctccccgtgggctttgctcctgcctgggcagttggtgaggacaggctggggagcagcgggatggggccctgtggggcagggcctgcccagggtgtgatcacctgggtttaccaagggcatcctcactcacgggcctgtgggtggctttccactcatttagaagtagggaaagaggctccaagacaagaacagttgaggatgggtctctactgcctcctcgttgtcatgtccggatttgcgtgcttcctctttgctccggtcagatccagagctccagtcctaggccctctgattgtaaaggtgtccaggtcttgtgcttatgatgtgctcacatcagtgccggaaacgatgaagacaaagagacttttagcttgctgagctcgccaggtggcacagggaaccgggactccgaattcgcagctccagctccagcccagcag

SEQ ID NO: 207117 - DNA, 794 bp, Homo Sapiens
atggggttatatggaagacgacaccctggattctgcaattggcaagtatttaaagtgtatgggagaaatgatgacagaaacttaatctgcattggcttcggcaaagcagaaatttattggcttacaaggccccatcttgtccatgcacctgtctgcttccttggcttcagagcattgcctccaagtcctctacagcacaactttcccttcagcatccaaccttatgatgtactgggatattgtgttgcccctctcccctcactacctgtgctgggctttgaggctgacgcacctataaaccccaggagtggagggaagggagagtggattgttattgagacatatgttctgcttacgtggagagtaacttgagcaacgttacccacctctatgtggaaacacaggtttatttagtatgttgaaattccagacataactatctgttcagtagcagtggttcctataagacaacaacttcactgttcattttgtgctagtagaatggaacttcacggaccttggagaagcatactccaaacactacaaatgatggttatactttggagagatgctaagacagcagatgctaaaatccagataccttttgtgaatatgaggcatatctactgggaacacatcataataatctgttgaggtaaacattgaagatggtggcaataaacagttggagaaaaagaaaaatatcaacatgcaaggcaccattgttttcttgcttcttaattgtaactttttattttttgtgtatatggctatcacagagatttaaaaattaa

SEQ ID NO: 207118 - DNA, 363 bp, Homo Sapiens
gagcaacatgtggtctggtactgctagattcatgagtccccatctgctcagaattcaagatgggatctctgctcttagcattaagaccttttttgatgaatgcaaatggtggctgacagaatgtgactcagaggaaagattgacagtctacatcagtctcctgatttacagcacatttaactctcctgagtcaacacaaagaaaaagaaacaggatattagtaacgagaagaaagccatgtgatccacaggggaaaggcagctgtctgcataccaggaggagagctcccacccgaacccaaccatagtgccaccctgatcttgtacttccagcctctcagctgtgagaaaataaatgtctgtt

SEQ ID NO: 207119 - DNA, 1000 bp, Homo Sapiens
  misc_feature (533)..(928): n is a, c, g, or t
gcctgtgttaattaaagtcattaagcatttatcaaaaaatgctttatttttataccatgtctaattcagatatagaaaatattaagtatcaaaaagacaactttttttagagtcattgatgcatagtaggcttattttcttcacctccaagtatgtactattgaattggcaaattcatgtaacataaacctattatatacttttctctgcaaggccttagattttagtgatgatgaaaaagagaaggaagccaaacagaggaaaaaatctcagattcaaggccggaaaaaactcaaatctgaatttaatgagcctggtgaagattttactgaagtacatcagaattggaatgctcatagctctgcttcagagcatgcaaaaggatatcgtaacagagaattcacacgaggattttccagggccagataccctcgatcttgccatgccaggcctccacctcagcatttctataactcagaacatatggtatctcaggagacttcaggatttccttctcagagacaagataatcnnnnnnnnnnnnnnnnnnnnnnnnnnnnnnnnnnnnnnnnnnnnnnnnnnnnnnnnnnnnnnnnnnnnnnnnnnnnnnnnnnnnnnnnnnnnnnnnnnnnnnnnnnnnnnnnnnnnnnnnnnnnnnnnnnnnnnnnnnnnnnnnnnnnnnnnnnnnnnnnnnnnnnnnnnnnnnnnnnnnnnnnnnnnnnnnnnnnnnnnnnnnnnnnnnnnnnnnnnnnnnnnnnnnnnnnnnnnnnnnnnnnnnnnnnnnnnnnnnnnnnnnnnnnnnnnnnnnnnnnnnnnnnnnnnnnnnnnnnnnnnnnnnnnnnnnnnnnnnnnnnnnnnnnnnnnnnnnnnnnnnnnnnnnnnnnnnnnnnnnnnnnnnnnnnnnnnnnnnnnnnnnnnnnnnnnnnnntgtaaaaccatgcttcggctgctctgcaaaaaccccgtgcgggaccctttcctggagtgtaatttcacataa

SEQ ID NO: 207120 - DNA, 1000 bp, Homo Sapiens
gaaaacccaatcaggcccccactggggaacgggacctgggcttggcctgatttgatccatgctcctgaggcctccacggacttgtggaggagaccatcatttgatgcagctggccacattgaagctcagacacgccaatgtggtaatgaggcagaacgtggattccactccatccttttaagattaaagacatgctcagcaacagcaagatgggaaaggaaggcagctgcagccccagctggagagcagggccctgaggctgggctcttcctggtcacaagcctctgcccagagtttcctggcgggggccctcagctcctcttctccaaggcctggaaacgagctccatggggctgagaatcatctctgtgtgtgggagacacatggtcaatctgagtaagcggaagaaatggtatcaatataaaagtaagatataaacacaactcctcaacaaaattaaaacccacagaaagggaacctcacatttcactcccacctgtctgttctcccctctccttgagaagtaaaaacaaccactgtcttgcagcgtgttgctgcagaacttttcttacaaagttacctaaatacggtggcttcgaaaaacgtgcttagatttatgttttttacttaaatggaaacgtactttgcacacggttgtacaactttttttgcatagttaatattcagaaatatgtcttggcgttgagtttcgagatggcttgtggcgagccacgccatttgccctagggctgcttggttaccatttgttgcggggctctgtggttaccaggagcctgtgtgaccactgacttcacatctgcccttcgctgaacgtgtatttctagaaaaatccagtgtcaagcttgtcccacactccagtgccagaggtgctgagggttctcttgggcaggatggttcagcaaagtccacagagcaagatgggagcttggccttaaaaggggtgagcaagcaggaggcgggtctcctctcttgagcaggc

SEQ ID NO: 207121 - DNA, 763 bp, Homo Sapiens
gatatagaaagtgaaccagtggtagaaagcacagaaactgaggggacataatcatcactcagtagatgatgaaatggcaggtaattcacacttttggacagagcgcaccgcccccgtggaatcaccctacagaagaggccagctataaaggatgtctcacacctttaagatcagtgtttctcaatgtgtggaccatggatacctgtattagaatacccaaaggatttgtttaaaattcaggctgagcccttcccaagacctaatagagctaaaagctttgggagtaggtggaggaaacctgcatctttacccagcaatccaggacagaatgacttggaagataacggagcttcgaagcttctagcagaatatgaagtctttcgtcttcagctacctgggttaagtttaagcagatggcagcatggggacactgaggatgattggagatgttggacactcaggagcagaatgactctgaaacagtcaagaggcagcaagcctggagcttcttccaaatcttcttgaattctcctttgaaactcaccagcaaatgctgacctgggaatttgaaaacagcacactaaaatggagatatcaactcacttcctggactttaaactttatggctctgtggctggagtgcagccatccagttcttcaaggtgcttccacgggaccatattgttactgggattgaataacctttgagaccccttaacagaaacacactctcgtttgtgaaatgaatggttgcagattgcaa

SEQ ID NO: 207122 - DNA, 796 bp, Homo Sapiens
gtacagtaaaaagtccgagggcagccgccgggcgcaggatgggatccggctcctccagctaccggcccaaggccatctacctggacatcgatggacgcattcagaaggtaatcttcagcaagtactgcaactccagcgacatcatggacctgttctgcatcgccaccggcctgcctcggaacacgaccatctccctgctgaccaccgacgacgccatggtctccatcgaccccaccatgccggcgaattcagaacgcactccctacaaagtgagacctgtggccatcaagcaactctctgatattcatttctccagcaccatttgttgaaaagatgatcttttctcccactgaattaccatgacacctttgtggaaaatcgatgggccatgtatgtgtgagtctttttctggactccagatcctgtcgtgtgaatttacatgtcttaaaacaacagcacaccatcttgactaccgtagataaatagtaggtcttgaaatcaggtactctaagttatctctggtttcttttttctttttcaaaaatgttattgcttttattttcaaataaattttagaatcagtctatgaattgcttccaaaaaaacagtctgctaggattttgactgaagttgcattaaatatacagaccaatgtgggaagaattaatatcttaagaatgttgagtcttctggttcataaatatggtctatctccccattcatttgggtttcctttaatgtttctcaataatgtgttaccattgttaatatgaagtacttaataaatactgataaa

SEQ ID NO: 207123 - DNA, 1000 bp, Homo Sapiens
aaaaatgtggaggtggccaaagttctaaatcactttcaatgaagcattttgaaactcgtggagctcctggaccatctacatgtatgaaggaaaatcaactggagtcccagaagatggatatgtcaaacatggttctgtccctgattcagaaactcctgagtgagagccctttcagttgcgatgaactaactgaaagtgacaataagcgttgttgtgatcctagatcaagcaaagcagctcccatggccaagagacctgaagagcaatgccaagacaatgcagaactagacttcatcagtgggatgaagcaaatgaaccgccagtttatagatcagctggtagaatccgtgatgaaactctgcctgatcatggctaagtacagcaacaatggagcagccctggctgagctggaagaacaagcagccctggtaggcagtggctccagatgtggccgtgatgctatgatgtcacaaaattattctgaaactcctggccctgaagttattgtcaacaatcagtgctctacaactaacttgcagaagcagctgcaggctgtcctgcaatggattgcagcctctcaattcaatgtgcccatgctctacttcatgggagacgatgatggacaactagagaagctccctgaagtttcagctaaggctgcagagaaggggtacagtgtaggagatcttcttcaggaggtcatgaagtttgccaaagaacgacaactggatgaagccgtgggcaacatggctagaaagcagctgctagactggcttctcgctaacctgtaagctgagaattcctttgactcccctccatccatcctcccccccagcagcaattccaccccagctggagccaccctcaccatcaggctggtgaactgcacaattgggatcacatttaccaatacatctgagcagttgcactgtgaaaatactgggtgccctcctgggcaacatgaataaaaaaattcaaaaacaaaaaaaaaaaaaaaaaa

SEQ ID NO: 207124 - DNA, 1000 bp, Homo Sapiens
gaagcagtgggcttcatttcatctgacaaatgcttgtaaagtgggttctgcccttacaagtaaagaacagaggagccaaaggttggcttggagtactcagagacagcactgcttgacagaagataccctgcaatcctaatgtcctcaaaagtacaacgcccaagagtatgaacttcctggagctgctttgcactggatgcaatcctggtctaagtagagaggccttgcaagtggagctggaggtcttgggtagaggagaacatggactcggtggtgccagcattcctcagataattaccgtgtatccgaagctgctttatttcataataaggaaggtgggcctggataaccacagaagagcaatgtacagtaaactttgcaacttggaaatgcatttttccatgagtgaatctatgaaagttgtttcagaatttaaagttcagtgacacagtggttactccacgtacctttggcaacatgttatggaaaacttgaaggactggcaagatggctcagcaggtaaagctgtttgacaccaaaatctgacctcctgtattccatcaccaaatttaactgtgacacagaaggactaacttcagagagttgacctctgaacttcccactcatgctgtgggttttgtgtgccaacactcacacacatagttgcctacttcagtcaatgccagtgtgcttttagagctaacatcttgctacatttgagaaggtttcttttgtttgctgccttgaagtcttcaagctgtcttatggaagactgaagaatattttcatacagaaattcaagaataagcttcagttattaaacaatgagtatctgaaaatcagaacatgatttgaattagttactttctcttatgccttttacagttgtgtgtttgttggcctctgccacaatcattgtcatcaggtctgaccataagcacattcaccattattttacttagagtgtttatgtcactaattaaacaccatgaccaaaagc

SEQ ID NO: 207125 - DNA, 1000 bp, Homo Sapiens; identical to SEQ ID NO: 114772

SEQ ID NO: 207126 - DNA, 1000 bp, Homo Sapiens
cacagtgctcgaccttgatagcatggggcccctggcccagagttgctgtgccgtgtccaagggccgtgcccttgcccttggagctgccgtgcctgtgtcctgatggcccaaatgtcagggttctgctcggcttcttggaccttggcgcttagtccccatcccgggtttggctgagcctggctggagagctgctatgctaaacctcctgcctcccaataccagcaggaggttctgggcctctgaaccccctttccccacacctccccctgctgctgctgccccagcgtcttgacgggagcattggcccctgagcccagagaagctggaagcctgccgaaaacaggagcaaatggcgttttataaattatttttttgaaataaagctctgtgtgcctgggtcttccctgagcaacatggagtggggtgaggtggagggatccctccagcagagttctgcctacaggacacggactgagggcactggaccaggccatgggctccgccacctccactgccccaggagccagtgtgtgcctatctgggtccgcctgtcccaccagccccatcttgtgtctgcgacagtgtgaatgagtattaatgggctgagtccgcattgcactatacacggtgggactcctgtaccctctgcacatgtgtgtgtgtgcatgtgtgccctgcagctgtccccaagggagctggcagcccccctcccccatctgctcagcattaaccaagctgaccgttaacacagcatgaaaatctgagagccagccttaggccgcggcccgctcccacgctctgccggctcaggctgggggcttgtggaggccatgcccgccccgccctggccagtctcccgggcagcagctggttgccgcccgcctgggctgcagctgtccctgcctgcctggtcttccactgaggagccgtcacagccctgtactcagagctcctcagagtgagcagcttctcaaggctctgagcctggaacctccttccc

SEQ ID NO: 207127 - DNA, 370 bp, Homo Sapiens
gaagtgcagctggtggagtctgggggaggcttggtacagcctggcaggtccctgagactctcctgtgcagcctctggattcacctttgatgattatgccatgcactgggtccggcaagctccagggaagggcctggagtgggtctcaggtattagttggaatagtggtactttaggctatgcggactctgtgaagggccgattcgccatctccagagacaacgccaagaactccctgtatctgcaaatgaacagtctgagagctgaggacacggccttgtattactgtgcaaaagacacgccgtatagcagtggctggtcgaatgcttttgatatctggggccaagggacaatggtcaccgtctcttcag

SEQ ID NO: 207128 - DNA, 412 bp, Homo Sapiens
  misc_feature (13)..(13): n is a, c, g, or t
  misc_feature (150)..(150): n is a, c, g, or t
  misc_feature (392)..(392): n is a, c, g, or t
  misc_feature (395)..(395): n is a, c, g, or t
  misc_feature (398)..(398): n is a, c, g, or t
agctgtaaaaatnaatacatatttaaacttgccgatcctatgccaggcttcactgaaaagcctccaggaacagaccttaggttcccacctttttgcatatagtatctgaaaggaatgctgaacctattagcctcaggccgttagtttgtnctctcttacacacacacacacacacacacacacacacacaaaccctccccacccgcaccccctgttcacttgctatcttccaccctgtataccccaaacaatgtggtgttgtaagtaagatttcataatcacataaactagcaaagatccctaagaggaaagaagcaaagatttatggtcatttttgtaaaaataaggtttaataaaacatcagcaatctgcatgaggaaggtaaattacantgnggngactttaaaaagct

SEQ ID NO: 207129 - DNA, 1000 bp, Homo Sapiens
tatgaatggtggaagaacccagatcaacttgactgaaacaagtctgccaacatagacagctaagaaaattgatgacaagcaaacgggaaaagtcactggatcacacattgtaagtagaagcagtttttcaatgggaagaccgcactgcatagtttactaactatttaaactttccaaacattagagaactaaagataccgtttgaaacggagcgacaagcgaccatagcaaccaaagtcctatctccggacccgattttgaagccacaagattttcaagtagactacagttccgagaaaaatgtcatgctagtccagttcagaagcattgatgatagggtgcttcgagtgggagttagcagtatcatagacagtatcaaaaccattgtggaagccatggacgttctatcataaataattagaacaccgtattagtgtacatatagtataagtatctagacggcattcatgcacatcataacttaaatatttaaaatagcattaagataaaaaaataaagagaggtatagttgctaaatgtcctggggttgcgtgtaaataaacaattgtttgctttgagtaaagcaagcatgtggatggtagatgaggccttatttactcccattagctgggtaacgcagaaagttttaatatgaaagggtgacggcgcttggcgtttttcttggattgtagaagtcatgctaggcccttggagtaagataagagagaacaaataaaagctttggcaaatatcaactcagacgtcttttttaaagaggatatagagctttggtgttggcctatttcccatcgctgttaaatttccgcttttttgttttttttttccctaaatttgaggaacagctgtttatattgatttccttctttcctggtgcatattggttgaatcatcaacgcttaacgactaacaaattagatccagagttacagacgggtgagattcatatatagaccgaaggagtttcacaatccactatatt

SEQ ID NO: 207130 - DNA, 1000 bp, Homo Sapiens
tggggtcagtccggctgcggagatcccctgcccctgtcctgtggccggtccgggccagggcggcactgggcgctgagggctggggtccctggcggccggcggggccagcgggtattgattgttggttcttatttatagagcaccgggggtggacgcggcgctttgcaaaaccaaaaagacacagtgctgccgcgacgcgctattgagagggaggagggccagctgcagctgtgttcccgtcatagggagagctgagactccccgcccgccctcctctgccccctcccccgcagacagacagacagacggacgggacagcggcccggcccacgcagagccccggagcaccacggggtcgggggaggagcacccccagcctcccccaggctgcgcctgcccgcccgccggttggccggctggccggtccaccccgtcccggccccgcgcgtgcccccagcgtggggctaacgggcgccttgtctgtgtatttctattttgcagcagtaccatcccactgatatcacgggcccgctcaacctctcagatccctcggtcagcaccgtggtgtgaggcccccggaggcgcccacctgcccagttagcccggccaaggacactgatgggtcctgctgctcgggaaggcctgagggaagcccacccgccccagagactgcccaccctgggcctcccgtccgtccgcccgcccaccccgctgcctggcgggcagcccctgctggaccaaggtgcggaccggagcggctgaggacggggcagagctgagtcggctgggcagggccgcagggcgctccggcagaggcagggccctggggtctctgagcagtggggagcgggggctaactggccccaggcggaggggcttggagcagagacggcagccccatccttcccgcagcaccagcctgagccacagtggggcccatggccccagctggctgggtcgcccctcctcgggcgcctgcgctcctctgcagcctgagctc

SEQ ID NO: 207131 - DNA, 1000 bp, Homo Sapiens
agttcggtccctatctgccgtgggtgttggaatgttgagaggatttgcccctagtacgagaggaccggggtgaacgtacctctggtggagctgttgtcgcgccagcggcagtgcagcatagctatgtacggacgggataaccgctgaaagcatctaagcgggaaacccacctcaaaacgagcattcccttgagaaccgtggaagaccaccacgttgataggccggatgtggaagtgcagtaatgcatgcagcttaccggtactaatcgttcgattggcttgattgctctcattttcagtgtccatagggccgcaaggcccgcgaccagaatgaaatgagaggcgctagtcgcccaacaaagatcgcttgcttcgtattccttgtccttcgccggcctggtggttttagcgaagagcctcaacccgatcccatcccgaactcggccgttaaactcttcagcgccaatggtactatggcttaagccctgggagagtaggtcgctgccaggcctgccaaggacaaggaattctcctctttcgatgttcgaatataaaacgccgcttccctcgggaggcggcgtttttgtttgtgccgtggtcttcaagaattgtcggctttcgccggcttcgcgtggcccgggccattgtcgccgcgcgttgggatcgacgacggacatgccaatgccttcggtcgcccgcaccgggaccgtggcgggatcgaaatcctcgagacagaacacgttgatgccgaaatgatccggcgccgcgcgcttgcggtggaacgtgtagatgccgcagcgcgagcagaaaaaatgcttcgcgcggtgcgtattccattcgtaggccgacaagagatcctcgccgctctcaacggtgagcgcactctcgtgcaccttcgccatcagcgcgtgcttccgccggcacagcgagcagtcgcaggtcgtgagctccgtgatttctgacacgaggctgaacgtcaccgcgccgcaatggcaggatcc

SEQ ID NO: 207132 - DNA, 1000 bp, Homo Sapiens
acttacctgagtctctctcccttacctcccccagcccctgggaaacccagaatcctagaagttcatggaatgatattagggaactagatcatctttgtagcatcacatcaagttgaaaaattccaggatgggatgtataatggatcttatttatttacttatttatttttagtttttgagacagagtttcactcttgttgcccaggctggagtgtaatggcacgatctcagctcaccgcaacctctacctcctgggttcaggcgattctcctgcctaagcctcctgagtagctgagattacaggcatgcgtcaccatgcccggctaattttgtatttttagtagagacggggtttctccatgttggtcaggctggtctcgaactcctgacctcagatcatctacccgcctcagcctcccaaagtgctggaattacaagtgtgagccaccacgcctggcctataatggaccttataatgcatatctttaggaaatggctaagaaatagactaaatcattatttcacttaacatttgtattatgaaaaatgttaaaaacattaaaacaagagagtccctatgtacctatgacccaatatcagtaattatcaagtcatgataattacagccttgtttcctctctaacctactcattcccatgactccctttctccccgccccgtgattactttgaagcaaatccgcgatatactatcatcttggtcctgagggtttcaaaatctttatttttaaatctcaatttcattaccacactaagaaaagaacattaattccttaacttcatctaaaatccacaagccaccagtgccatcaaattttcccctttacaatttccttggtgaagaacagagctgtttttctacagagttttccgctgtctgaattttcatgacagcgtctctgtttgtcatttaacctgcatctctgccctctgtatacttcctgtgacttcatagctagatctagggtcttgaacagatc

SEQ ID NO: 207133 - DNA, 249 bp, Homo Sapiens
  misc_feature (52)..(52): n is a, c, g, or t
  misc_feature (114)..(114): n is a, c, g, or t
  misc_feature (117)..(117): n is a, c, g, or t
  misc_feature (124)..(124): n is a, c, g, or t
  misc_feature (196)..(196): n is a, c, g, or t
  misc_feature (247)..(247): n is a, c, g, or t
taagtttcataagggctatcgtagttttctggggtagaaaatgtagcccatntcttgccacctcatgggctacaccttgacctaacgtctttacgtgggtacttgcgcttactntgntagcctncatcagggtttgctgaagatggcggtatataggctgagcaagaggtggtgaggttgatcggggtttatcgantacagaacaggctcctctagagggatatgaagcaccgccaggtcctttgantt

SEQ ID NO: 207134 - DNA, 1000 bp, Homo Sapiens
tagagatgagatcacgatggcgggcccaagatcacgctgctggaagtgatacgacaggaccctgacctcgggtctgcccacgtctgaagtacgtgctctttccactacagtctgtggcctaaaaccatgacagcagagatgtctactcaattcctttaccattgtgctcactcaggaccctacaaattcatttcggaggacttcaagcataagcgaaagaattactgttgacaaaataaaaccaactaggtttgctctctcaagcccactggaggaagtgctagcacttggaaaaagcaaatgcacgattagaatctggattaaagggcaccgaggctgtccccgcatgagggcaagcagggctccttctgacaggcattcagagtaggggtgagctgactgctcactgcctctgggccttgactgagagtacaacacctccagagcaagtctgtgggaaactgccatgctttattcgtgcagccaatcatttgtttgggaacccaagtaaatctgttaaaaagtaatctatacaatcataattatactgagtctttcttatcttcttttttaatgtatttatttatattaaatatttaaatagagatggggtcttgccatgttgcctaggctgatctggaacttctgggctcaagcgatctgcctaccttggcctcccgaagtgctaggattacaggcgtgagccaccgcgcccagcaccaggtctttcacaatagctaaaatttgctaacatgtccctattatatcctattaagactgacatgttttaaaaacttacatgtggctataattagactttcattcctttgtaaacacatgacccatgttccagaaatttttcctctgttctttcacaaaatctgagtcattacatttgcagatcattaaaggcagattagcaagagtccaagtaagaaaatgactttcctgttctaggacatattcaaacagagggtggatttcttacagaaatatctat

SEQ ID NO: 207135 - DNA, 1000 bp, Homo Sapiens
attataaccaatgttcttatataaaggggaaatttggggacagacacacacacgcacacacacacacacacacacacgaagaatgccttgtgaagacttggagtcatgctgccacaagccaaagaactatcagaagttaggagaaaggccaggtacggtggttcacacctgtaatcccaaactttgggaggtcgaggcaggtggattgcatgaggtcaggagttcgagaccagcctggccaacatgatgaaaccctgtctctaccaaaagtacaaaaattagccaggtgtgatggcaggctcctgtaatctcagctattcgggaggctgaggcaggagaattgcttgaacccgggaggcggaggttgcagtgagccgagatcgtgccactgcactccagcctgggcaacaagagcgaaactctgtctcaaaaaacaaacaaacaaacaaaagaaaaaaagaagttaggagagaggcctggcacagatccttccctggcatctccagaaggagtatggtttagccaataccttgattttggacttctagcttccacaagcgggacacaatcaatttcttttgtttcagtcatccagtttgtggtactttattacggcagctgtggggacttcaaatggaggggatcacattccagtctaaagtggctcatggccctgatttgttccactcaaaacaatgtgcttcaggtcatacatccagttttaaacacagagttcccttggagtctgtgaacactgatgaagggccctaagtaatggcagtaagtggagaagtaagcgagatggtccgttccagggaaaacacattcagaaacaatgcagaggtacaggtgtgtgtatgacaaaatcagtccatgatctacgcctgaacttttctaactccagaatggggctcggggcgggtgcagaagaggcttttgatgcacaaatttgtattgatcaggctttatttttacaataactactgacagagagcagatc

SEQ ID NO: 207136 - DNA, 1000 bp, Homo Sapiens
taattcatatgccttataattcacccatgtaaagtgcacaattcaatggtttttagaatatttatggaggtgggcaaccatcaccactatccaattttacattttcatcacccctaaagaaaaccttcctattaccatttttcattcctgcccttctgcaagccccatgcaaccacgaatctactttctctatagatttgttgatatgtccatttattataaattggataataaactatgtggtcttttgtgactgcctactttcacttagcataatgttttcaaggttcatccatgctatgccatgtatcagtacttcttcctttttattgccaaatacattgtataatataccatatttgtttattcaccagttcatggattttttttctatattttggctattatgaacaatactgctatgaacatttgtgtatacattttgcatgactgtatgttttcatttctcttgtgtatatacctaggaatggaattgctgggtcatatgacacattatgtttaacattttaaagaattgccaatttgttatcccaagcaaatgcattcccatcagcaatgtatgaggacttgtttctccccatcctcaccaaaacttattttctatctctttcgttttagccatcctactgtgtgtgaagtggtatcactttgtggttctggtttacattccctagtgactaatacagttgagcttcttttcatatgcctattggacatttgtatatcttcttgggagaaatatctattcaaatcatttgcccattttaaaattgggttctctttttttttaatggttgagttgtaagagttttttatatattctggaaattagctccttatcaaatgtattatttgcagttattttctcccatctggtggatcatcttttcattttctcgatgttatcatttgaagcacaaaacgtttccattttcatgaagtagaatgtatcttttgtcatatatgattttgttattgt

SEQ ID NO: 207137 - DNA, 1000 bp, Homo Sapiens
gagaagggaagtttagagaaaaaagaataaaaagaaatgagcaaagcctccaagaaatatgggactatgtgaaaagaccaaatctacgtctgattggtgtacctgaaagtgacggggagaatggaaccaagttggaaaacactctgcaggatattatccaggagaacttccccaatctagcaaggcaggccaacattcagattcaggaaatacagagaacgccacaaagatactcctcgaggagagcaactccaagacacataattgtcagattcaccaaagttgaaatgaaggaaaaaatgttaagggcagccagagagaaaggtcgggttaccctcaaaggaaagcccatcagactaacagcggatctctcggcagaaaccctacaagccagaagagagagggggccaatattcaacattcttaaagaaaagaattttcaacccagaatttcatatccagccaaactaagcttcataagcgaaggagaaataaaatcctttacagacaagtaaatgctgagagattttatcaccaccaggcctgccctaaaagagctcctgaaggaagcgctaaacatggaaagaaatgaccggtaccagccactgcaaaatcatgccaaaatgtaaagaccatccagactaggaagaaactgcctcaactaacgagcgaaataaccagctaacatcataatgacaggatcaaattcacacacaacaatattaactttaaatgtaaatgggctaaatgctccaattaaaagacacagactggcaagttggataaagagtcaagacccatcagtgtgctgtattcaggaaacccatctcacgtgcagagacacacataggctcaaaataaaaggatggaggaagtactaccaagcaaatggaaaacaaaaaaaggcaggggttgcaatcctagtctctgataaaacagactttaaaccaacaaagatcaaaagagacaaagaaggccattacatgatggtaaagggatc

SEQ ID NO: 207138 - DNA, 1000 bp, Homo Sapiens
ttcacttgtatgaaataactagaataggcagtagattagtagaaactagatgagtggttgcctagtgctgggcaggggagaggttctggagaagtggggagtgactactaatggatacagggtttctttttggagtgatgaaactattctaaaattgactgcagtggtggttgtacaactctgaatatgctaaaagccactgaattgtatagtttaaatgggtgacttgtcgggggtggggaggacggggtttgaggcagtctcactctgtcacccaggctggagtgcagtggtgggatctctgctcactgcaacctctgcctcccaggctcaagcaatcctcccacctcagcctcccgagcagctgggactacaggcatacaccaccatgcctggctaatttttggagagacggggtttcaccatgttgcccaggctggtctcgaactcctgggctgaagccatctgcccactttggcctcccaaagcgctaggattacaggcacgcaccaccgcacccagcctaaatgggtgatattgtatggtttatgaattacatctgttataaaaacatttttattgcagtttaaaaatctatattctttcaatctccattgctactaacttagtccaagttaccatcctctgttattagagtaccacaaagccccccaaccagcctctttgcttctactctcaccttcttccaacccattctccagataataatcagagtaaccttttaaaagtttaaattaggccagacgtggtggctcacgcctgtaatcccagcactttgggaggccaaggcaggtggatcacgaggtcaggagatcaagaccatcctcgctaacacggtgaaaccctgtctctactaaaaatacaaaaaattagccgggcatggtggcacgtgcctgtagtcccagttacttgggaggctgagggaggacaatctcttgaacccgagaggcggatgttgcagtgagcctagattgtgcca

SEQ ID NO: 207139 - DNA, 1000 bp, Homo Sapiens
agcctgccaaattataggagtcactacattcagggatgtccagatacaactttctatttgatttacagttctccaagtccagatgcaatttactattcaggtgtcacttttattatgattatctaaggtcagtggttctcagtcaggatattttaccaacaggggaaatctggcaatgtttagaaacagttttgactgttacagctagagattgtacctggcctctaggaagtcaaagccagggatgttgttaaatatcctacacaggatagtcccctatagcaaagaattacccagtccaaatcgtcaataattccaaggtttaaaaactctgctataggcaatatataaatgagactacatactttggagtcatagatacatgagtttctatcccagatgtactagttactatatgtataaagctgagcaaattatattaacccaagtttgcattctcaactgtaaaatggatataaaaatatctgatcaaattatagggattaaaagagctatcatctcatttcttgacacacagtaagctctcagtagatcatatgcacacatgtatgttacaatgttagatcttacatattggccaaaagtttgtgtgaccttgtccatggcaatgcctgcctgcacagatcattcaacattcaaataagtatcagcgcacagagtaggggaaggatacacagaactatgaaaagacagtttaatggcagatgagtggtaagagccaggtttctcaatgtttgactagaaatttacagaaaaccaagggaaggagactagaatgatccatgtgataatggattagagttggagacctaagtgtgaacttgtatttggctgaattagatgaagatggttacataaatatttacagatatgtatatatacataaattagtataaacacacatttccttgctgtgttggctaagtaggtctagaagcaagaacagcccagcagcaaaagaataattagctcccagatc

SEQ ID NO: 207140 - DNA, 1000 bp, Homo Sapiens
ggtgagagttttgcattcccaccagcaataaatcagagttcctcttgttccacatcctcaccagcatttgcaatcgtggaagattgtttttatttgatccattcttataggtctgtgctgataactaattgtagttttaatatgaatttccctaatgactaacaatattaaacatgttttcatttctgtttatttgcaatctgtatgtcttttttggttaaagtgactgttcagatattttgacaattttttaattggtttgttttatgttggttaagttttatgagttttttacatatccaggacacaagtcgtttataaaatatgtaatctgcaaacacttttgccagtgtggcttatcttttcactctcttaacagtgtcatttttttttcttttttttcttttttcattttatatattttttcaaattcattttttattttttatttttttattttattattattatactttaagttttaaggtacatgtgcacaatgtgcaggttagttacatatgtatacatgtgccatgctggtgtgctgcacccattaactcgtcatttaacattaggtatatctcctaaagctatccctcccccccccccaccccacaacagtccccagagtgtgatgttccccttcctgtgtccatgtgatctcattgttcaattcccacctatgagtgagaatatgcggtgtttggttttttgttcttgcgatagtttactgagaatgatgattttcaatttcatccatgtccctacaaaggacatgaactcatcattttttatggctgcatagtattccatggtgtatatgtgccacattttcttaatccagtctctcattgttggacatttgggttggttccaattaacagtgtcatttataaaacaaaagcttttaattttcctaaagtccaatttgtctttgtttttcttttatggataatgcttttggtgttatacctgaacaatcattgtcaaagccaagatc

SEQ ID NO: 207141 - DNA, 1000 bp, Homo Sapiens
gaaggttgcagtgagccaagattgcaccattgtaccccagactgggcaacaagagcgaaactccatctcgaaataaacaaacaaacaaacaaaaatcaatagctttcatacacaaataaataaccagttagggcagcactatccaatagaaatacaatctgaggctgggcacagtggctcacgcctgtaatcccagcactttgggaggctaaggcaggaggatcacttgaagtcaggagttcgagactagcctggccaacatagtaaaacctggtctctactaaaaatacaaaaattagttgagtgtgctggtgcggcacctgtaattccagctactcgggagggtggggcatgagaactgcttgaacccaggaggtggaattgaacctgggaaataaagtccgcagtgaggcagaggttgcagtgagccgagattgcgccactgcactccagcctgggtgatggagtgagactctgcctcaaaaaaaaaaaaaaaaaataagaaatataatctgaaatctgagtctgagccacacacaaaagattcttctaacagccacattaaaaaaaattttttttaaagaaacgggtgaaattaattgcagtaatatatttaatatatccaaaatattatgatttaaacatgtaaccaatattaaaaattatactgagatattttgcattcttttatttacactaggttttcaaaatccagtatatattttacacttataacacttctcaatttggactggccacatttcaagtgctcgataatgacatataactaatggctactgtattggatagttcagaattataaaatataatggtggagaagatcccatttaaattaaaaacaatggtgattaaatgctgagaaatacactcagtaagaaatgtgaaaaatatttaagagaaaatttaaaatattcctgaatgacctgaaagtaaacttgaacaaatggaaaaacatcccttgttcttggaaggaatgatc

SEQ ID NO: 207142 - DNA, 1000 bp, Homo Sapiens
atgtatgccatttccaatcagatgcattgtttaagaactgaggctgatcaactggtaaagggttcagtgggaagcaaatctggggcaaggcacggtggctcctgcctgtgatcacagaattttgggaggccgaggagggaggattccttgagcccaggagttcaagatgagcctgaacaacatagtgaggttccatctctaccaaaaaaaaaattaaaaattaggcagaagtggtggcacacggctgtagtcccagctactcaggatgtcaggtgtctcacacctgtaatcccatctactcgggaggctgaggcaggagaatcaactgaacccgggaggcagaagctgctgtgatccgagatcacgccactgcactccagcctgcgtaacacagcaagactctgtgtcaaaaaaaaaaaaattaatcctatcatggttgaaattaacattgggctatgttctttgggatttattttgtgtatacgtgtatgcacatgcacactgtacatgcattacatatacaactcatataataattaaaataccatatgtatagtttagtaccctgtattttttgttattttagttttccttttaccttaagtactaacatgtggatgaggcattctggttaaattacaaggtaaaagatatgatacaactttgctttttttttttttttaaggttcttgctctatcacccaggctgtagtacagtggtgtgatcacagcttactgcagacttgacttcctgggctcaagcagtcctcccacctcagcatcctcagtagctgggactacagccatgtgccatcactcctgcctaatttttaaaaattttttgtagagatgggatctcactatgttgttcaggctcatcttgaactcccaggctcaaggaatcctcccacctcggcctcccaaagttctgtgatcacagggaggagccaccgtgccttgccccaaatttgcttcccaattaaccctttaccagttgatc

SEQ ID NO: 207143 - DNA, 1000 bp, Homo Sapiens
aaatgctttttctgtgtctattgaaatgatcatgtgttatttctcctttactttttaaatctggcatattacgttgattgattttcagatgttaacctgactttacattcctggggtaaatccttcttggtcgtgatgtataattatttttatgtgtgcaagtattgtgttgagaatgtttttgtctgtatttataagttatattggttagagtggttttcctttcctgtgacgcctttatctgattttggtatctgggtaatactggccttacaggatgagttttgaagtgttctctttaagtttttggaagaatttgtgaaatattcatattaatttttctttaaacatttggtagcatttaccagtgaagccgtttggtcctggaattttctttatgaggtttttttttaaaaaaattattactaattaaatgtctttttttttttttttgagatggagtttcgcttttgttgcccaggctgattggagtgcaatgatgaagtcttggctcaccacagtctccacctcccgggttgaagcgatcctccttcctcagcctcccgagtagctgggattacagatgcctgccaccatgcctggctaattttcatatttttagtagagacagggtttcaccatattggccaggctagtctcaaactcctgacctcaggtgatctgcccacctcagcctctcaaagtgcttggattacaggcatgagccactgtgcccagcctaaatctctttactaaattggtcaatttttattttgtatttcttctttagtcagttttggtaattttcagttttaggtatttgtccaatttcatatatgatatctaatttgttggcatacgatttttcatagtattccttataacacttcattttgtaaggctggtagtaatttccctgtttcattctttatcctagtaatttgggatctctctctttttcttggtcaatctagcctaaggtctgtcaattttgttgatc

SEQ ID NO: 207144 - DNA, 1000 bp, Homo Sapiens
cgttcactcccctggaaagggggctgaagccagggagccaagtggtctcactcagctggtcccactcccacagagcccagcaagctaagaaacactggcttgaaattctccccaccagcacagcagtctgaagtctagctgggatgattgagcttggtggagaaaggggcgtccaccatactgaggcctgagtatgcggttttcccctcacagtgttaattgactgtgcagaactcatgacggcatggcaaagcacctggggccagactgtctctctagattcctcctcactgggcaggacacctctgaaagaaaggcagcagctccagtcaggggcttatagataaaactcccatctccgtgagacagagcacctggggcaaaaggtggctgtgggcacagcttcagcggacttaaacattcctgcctgctggctctgaagagagcagcccatctcccagcacagcactcaagctctgctaagggatagactccgcctcctcaagtgggtccctgactcctgtgcctcctgattgggagacacctcaaacaggagagctccggctggcaacgggcgggtgcccctctgggacaaagcttccagaggaaggagcaggcagcaatctttgttgttctgaagcctccgctggtgatacccaggcaaacagggtatggagtggacctccaccaaactccagcagacctgcagaagaggggcctgttagaaggaaaactaacaaacataaagcaataacatcaacatcaacaaataggatgcccacaaaaaaggccatcagcatccaagatcaaaggtagataaatctacgaagatgaagaaaaaccactgcaaaaatgctgaaaataacaaaaaccagaatgcctcttctcccccaaatgatcgcaactcctctccagcaagggcacaaaactggatggagaatgagtttgaccaattgacagaagtaggcttcagaagctgggtaataacaaactcctctga

SEQ ID NO: 207145 - DNA, 1000 bp, Homo Sapiens
tttctacacttgcctaaatcaacattcttcataatcctagataaaaacacgtatctctatgtaactttctgggatatgctgaatcacactaagtagaaacctgaaagagtagaaaacaggataagcactcaacaaataaagataattaatagttatctgatgcatgtattaagctaatctctattgaagtggtcctatttctgtgcgagtttctatctatagcactggaaatatagatgaattagatgaagtcccttgcctcaaagaccttacattctaattggagacagacacatgcagagatacttagaaatgcaggttaaggaagcacataagattaaccctgaagtaattgaatgagggggagttagccaggggaagtgttatagggatattccagacaaagtggcagcatgaacgagggcacagacacaaaaaacagggtaatagtttctggcaaccatatgtagtttgcaggtactgacccacatagatcatgccaggaagtagcaggggataagcctggagaaggcaggcagaaacaagatggtggagagctatgaagcttagattttatatttagaagatgaaggaataatgaagggttttaaagaaggggaatgacatggaaatacttacactttaagtcaaacactctagtggttaaattgggggtgggtttggggaaacaaaactggaggcagaaagagtagttaggaggttgtggcaatcacttctcaaaacttattcagtacaaatcacctacagatcttgttaaaatgcagattctgattccgtaggtctgcagtggggcctgagagtccttgttctaacaagttcccaggtgatgccaatggtgttgatccacaacccacacactgagtagcaaacctctaggaaagatcttgaggacctgaactaatgtgggaagcgcagggctggagataaggggagagtagtattcaggaggtagaagagtcacagcttggtgcttcattaa

SEQ ID NO: 207146 - DNA, 1000 bp, Homo Sapiens
cacattcaagagcatggcaataaaaaactccagctctagaggcagataaggctggttcaaccctcggcttctctggctgtgtaccatggagacgttccttaccctcactaagcctgaggcctcatctgtaaactgggggacataattacactcacttagtagaattagatgaccaaagtcaaaaatgagataaaagacaacacataatctgttggggacaatgacaaataataactgctttaatcatataaatgccaaattaagaactgtaatataaatttaccttgataacaaatcaattgaaggaaggaaaaacaaaagaaattggcaggataatcttcactgctcaggtaaaactgactgtggcatggtcctatgttgctactcaacttgttctcactcaggcctgtggcctcccttggcccaactggcctcaggtacttgcgtgaaagaacagcaaccacacgcaggtctctgacccattcaaaccccactctgctccatgtaccctaaattccaatctacgccatctcaggttatggaaagatggcaggtgattacctcgtgtgtaatgaacataggacacattcctcacccgcttcagattgtcctctgaaattcaaaggcagtcccctctcatatcctttggaggcatgctgccagaaggacttgttggcaagaggtggaaagaaatcaggaaggagaagagactatttaagaagcaggactatctgaactccatgctcaattgatggaggcttcacttccaccatctttgggctcctacctttgcatgagaagcttgggctagaaagaatcagaattagggtcgttccttcaaaatcttcactttacacaatcaaaaatggatgtccagagaaaattaagtagttgtatgagatcacccagttaagttactggctaggtcaggcctacaacccagagttacctgcctatcaccacaggcgtttctcatgtcttaacatcactcatgaatctc

SEQ ID NO: 207147 - DNA, 1000 bp, Homo Sapiens
tggcaccaacagcacatgtatttgtgaggctttccatgggggggaggaattaataaaagggcaggtaaaaccttgggaagaatacgaataattactggaacttatttaaatgctgagttaggcagtttttaaatgataactcacttcatcctaatgctctgattaaccattatcatcctcgttttgcccatgcagaaactaaggctcatcggctaaataatccacatgcgccagaaagtgacagccctcgctttcaaacccaggtttgcagggcacaagggtgtgtgttccacaggcgataccatgcttcctataccagtgactctatcactttttaagttgctgaaaatataattacattgctactgagccactttatttcaagctgatatcttagctgaccctctgcggagggggcagctccaactcctgcctctgagacttcatcccaggagtagaattggggtacacaccagtacttcagatggctaactacacgtgaagtcccgagccccaagttcacaccaatccccctaagcctcagtctgtttatctacaaaaataggaatgtttatctcatatcagtatcataaggcagccttacgtaactactgatattgatagagcaatatgaagcttgttaatgtgctttataaactctgaaaggctattaaaacaaagttataattataatgaaatctagtgagtgacacccattcagaggtctcactgcaggcataagcagctcagctaccctccgggagatgaaccacccaacctacaacttcctgttcaccttccgctggagcccaagtttctcataaaagatcataaaagatgtggccgggcgtggtgactcacacctgtaatcctaacactttgggaggccgaggcaggtggatcacttaaggccaggagttcgagaccagcctggccaacatggcaaaaccccatctctaccaaaaaatacaaaaattagccaggcgtggtggcgttccta

SEQ ID NO: 207148 - DNA, 1000 bp, Homo Sapiens
aggccaatcacctggtagggcttgttatcaatgtggtttataaggacactttaaaaaagattgtccaatgagaaacaagccaccctctcatccatgtctgctatgctgaggcaatcactggaaggtgcactgccccagagtgcaatggttctctgggctggaagcccccaaccagatgatccaacaacaggaccgagggtgcccgggcaagcgccagctcatgtcatcaccctcactgaggcctgggtatgtttaaccattgagggccaggaaattgacttcctcctggacactggcacagccttctcagtgttaatctcctgtcccagatgactgtcctcaaggtctgttaccatctgaataatgctgggacagcctgtaaccaggtatttctcccacctcctcagttgtaattgggagactttgctcttttcacatgccttttttgttatgcctgaaagtcccacacccttattagggagggatatattagccaaagctggagctattatctacgtgaatatggggaacaagttacccatttgttgtcccctacttgaggagggaatcaaacctgaagtctgggcattggaaggacaatttggaagggcaaaaaatgcctgcccagtccaaatcaggctaaaagaccccaccacttttccttatcaaaagaaatatcccttaaggcctgaagctgataaaggattacaggatattgttaaacatttaaaagccttaggcttagtaaggaaatgcagcagtccctgcaacaccccaattctaggagtacaaaaactaaatggtcagtggagactagtgcaagatcttagactcatcagtgaggcagtaattcctgtatatccagttgtacccaacccctatactctgctctctcaaataccagaggaagcagaatggttcactgttctggacctcaaggatgccttcttctgtattcccctgcactctgactcccagtttctctttgcctttgaggatc

SEQ ID NO: 207149 - DNA, 1000 bp, Homo Sapiens
agtatctcattgtggtttcaaattgcacttccccaatgactaaagatgttgactttctttcatgtgtttatctgccattcatatgccttttttggttaaatatctcttcatatcttttcccgtttttagatggaatgtttgtcttctcattattcagttttaagagtttttatatattctgcatagagaccctttattagacatgtgttttgctaatattttctcccagcctgttgcatgcctgttctttttctttttcttttttttttttttttttgagacggagtctcgcactgtcgcccaggctgcagtgcagtggcccgatctcagctcactgcaagccccgcctcctgggttcatgccattctcctgcctcagcttcctgagtagctgggactacaggtgcccaccaccacgcccggctaattttttgtatttttagtagagacagggtttcactgtgttagccaggatggtctggaactcctaacctcgtgatctgcccgccttggcctcccagagtgctgggattacagcgtaagccaccacgcctggcgcctattctttttcttaacagtatttgtattagtctgtttttacactgcgataaagatactacctgagactgggtaatttatgaacaaaagcggtgcagctgcagaattcccacactggctctctgaatagtagggtgagggctattacggtgggaaaggccaaatggaagtcattagagctgcctctacctagaaaaatagtaaatcaaaaacaatatcacatccctggagggattgcggagattagtgccaccatcaaggacttgaatgacacaggggtggtgatttccaccacactcccgttcaactctcctatttggcctgtgcagaagacagatggatcttcgagaaagacagtggattttctaagcttaaccaagtggtgactccaattgcagctgctgtaccagatgtggtttcattgcttgagcaaattaacacat

SEQ ID NO: 207150 - DNA, 1000 bp, Homo Sapiens
tcgtcactttcaattgagttctgaaaagccattagtaagattgtaaggcactaggacttcctttcttggctcctgaaagggcctcctccacacaggggcccctcacagtggagcccctccctctggggtgtcctatttcaatgttctaagaaagaggctgcctggagggtctatatttggagtatgactcctcagcggggacaggtggatgcgtggggactaacttctgcatatttggtccctgagttttgggattattctgaggggcttgtatgggaggtgcagtgaagttgtaacacaaggcaggacatgaaaaaacttctttttcttggcaattgcttgggatcctgtacattgcccttccacttgtgagggaaaaaaataatgacacggacatcaggtgtgttgcagtgattcacagtcatccacagaccctcaccaccatctccactggaaaatattgaacactcgccactgctagggtagtatgtagtacatgaatggcagacaccggcgagatctcaagtgttacgacggatgaaaattccacctgttaagtctcctttccatccaagctctagcagttggttgttccatgggtgtggtgaggctgatctgattacatgcttatgtaaaatccaaataaagccccttgaatggaaaacaggttaatttgggaagtcactagtaaagcaggttaatttggtaagtcactagtaaagcactaggctcatcaggagttgggtcttaaatatatcctctagaagtcttctctgaagaaggtcttagacacctgaaaaaagatgctgagttcagccagaacttcaaaagttacaaatcacctgtgtaaaattgtcaatattagaaaacgaaatgtctttccaaagattaacttatagatcatattgaatacgtgctggttttgtttaggacaattttgtatttaaaatgtcaagaattactagtcaattttgaaagctgtaaaatagtttgcagtaac

SEQ ID NO: 207151 - DNA, 1000 bp, Homo Sapiens
ttctttgcttaaacattataaatagtgcctagcacacaaaaagtatccaataaaaatttgttgaataaatgaatgagttttcttttaaagatttatataatttgcattttgacatgtgaagttttctggaggaaaatgtatctgaattaagggagaggaaaagtaatagttatgaaataattattactgcaaatcctatgttgagatttttaaataaaacttttgttattatagaaattaaatagatccactagagaaaaaaaggatatgcaaaaacataaaggtccaaaaattgaatcccactacaaatacttttgcaaccagtatcaaattgttcctatgtacgtatatttctttaaatcatattccatttacgtgtcattaaagattagtgggcagtagtattgttaaagcttatgcttattcttttaaaactgtaattgaatagattactactgctgccttctctttattctcagataaataagaggacctagtcatcacgcgacactcttcacctgacagcaatagaggacacacacataggacagaaggaggacctagtcatcacgtgacactcttcacctcctagtcaaggaggacctagtcatcacgcgacactcttcacctgacagcaatagaggacacacacataggacagaaatgaaccacccatggagcactgacattatgatcctcacataacataatggaacaatcaatggcttgcaggtgggcagagtcatcagcgaggtacacacacgggtgccattttgtgtccaaaggcaaggataaaaataaaagcaccagtgtgatgaaagctctcatctatgcacagtcatttatgaagatcactgtgggcagaggccccaacctagctgccatggggagtttccatgggagccaaagcacacttattttcaagagggtaacacttttaatagaaccctttaaaacagggaacatggccaccttctcaggattccaaaaaatattgatc

SEQ ID NO: 207152 - DNA, 1000 bp, Homo Sapiens
tggctgcagcccggcctgcaggagcccctcctccctgccccctgccatctggagctgcagaacaggctctgggtcctgcctgaggcatctgctgagccccccacctgcccatcaggctgcaactcagccagagcgaataccacccctgcccctccatgcctgcagccacctggcagcccctccttgctgccagcttcacgccagttgaccaccctgccactcctgctgcctggatgtaccaggaagaatctgcttgcttctttctagtctcactgtctgtggggtccccttgcaatgagggccccagggcaggcatgccttaggctggggtaacagagacatgggcgtcttcctgacgcatccccattgcctcggggaaaggaactccctttacccccaacagccctctctggccctgggattctttcaaaatcagaccaaacagggctgccatttccatcctaaggccccttccctgtcgcagtgctggcgttggtgctgggggagtgaaggtgagcggccggtatgctggggtataggtggggctgagagtgctgaaaggtgcaggtgacattcgccaacagctgcaaaggctgggggtggcgcttgcactctgggaaggtcaggaggggcccctgggagaggtcacacatgagcaagatggcaaagcactatttggagcacacaggagaaggcaccggagactcatggcttccaggcaccctgagttcaaatcctgacagcctctgtgtggaggagctggctcccatgggctccagtgtggcctgcttccctgtttgtttagtgaacgccttaacaaaaaaggttttagggggtgcctcaccctttaaaattgacaggaccacaaatcaccccacacacaattgtgtgtgtgtgcggcccgccaggtggggagggcagggccttcctgtggtcaggttcccagagaagcgcttccagtaggggccaccaggcatggcccctctgccccaccttgatc

SEQ ID NO: 207153 - DNA, 1000 bp, Homo Sapiens
cctcccaaagtgttgggattacaggcatgagccatcgcatccagcccaggatttattattaaacatgaaaagcagtgagcagaatggtgttgatagtgaatactcctgtgtgtgtgagaaaatgagggcgaggatctgaacaattttattatttatttatgcaaatattttttatttgcataaggaagcactgaaaggacacataggaactaacaaaagtcatttctggggatgggggtagcaaagcgttggatgagaatggggcgggaacgaggcttttcaacatacatctttgatttatttatttatttatttatttatttatttattgagatggagtctcactttgttgcccaggctggagtgcaatggcgccatctcagctcactgcaacctcagcctctcaggttcaagcgattctcctgcctcagcctcctgagtagctgggactacaggcgtgcaccagcacgcccagctaatttttgtatttttagtagagatggggtttcaccatgttggccaggctggtctcaaacccctgacctcaggtgggatccacccaccttggcctcccaaagtgttgggattacaggcatgagccaccacacctggcctgataccttttagatctttgaactatgtgaatatattacctattcaaaaaaatagttgttagcatgatccctggactggatgtcgtgggtctaatcccagctcttctagttattaactggaaactttggcaagttatttaatcttttctttgcttactcgtctgtacaatggggataagaaatagttattaactcctaagcttgtgagaacttaaaaaaaacccaagtaagtaaagtgcttggcacatagtaagtggacaatagctgttagctgtgaactgtgatgatcaacatttggccttgaaagaaggtagagctttccaaagatcagttacttgggacctctctttaggacaaaccaagagatgggcctgagaggaaacagg

SEQ ID NO: 207154 - DNA, 1000 bp, Homo Sapiens
acccagcaagcccagcgatggcctgaatgccaggccggttgtggggaggggccaagcatccttttcagaggtgggtgcaccttttcccaacccaaacatggcttcatccggacaaagcccaggcacgggcagggatatggtggcatctgtcggctctatttaagggtcccaggtcttgccacctggctgttggctgtggccctcgccagtgaggttgtggcttcagatgggagcattttaggagcttgctgagcagagcgctgtgtccagggataggttggggtctctgtggaaaggacggggagtgagactggcccagacaaagcctttccctccattttgggaccaaaggtgctggccaagtccccacctggcactccagggctgtatctaaaagggcagtgcctgtgggacggcggagaccagccctgccccaggctcagacaggcctgtgttggaccagctgtgggactgcagttttctcatctgtaatgtgctgtcaagagcacctgccgcaagggtgctgtggggttccatgggaggctggagagcagaatggttatcagctgtgacttcagatccagcaagaccaggctctgaggccagcgcagttctcagtagccatttccagcacgacctagtagggacctctggtctctgagccatgacctcaccctctgtaagatgggggtgggaacaagatggatctcattggcttgctgtgaggattacaggaaaaacacatgggcgctacttggtccagaacaaaccctcaataaatgacagctgctgatcctgctgtcacaggatgcctgggacacggtctgtggcacatagcagatggtaaacttgtcttcgttggatacacatggtacgtgtggcgttgcacttaggacagtgtctggcacatgggaagcatgaagcagtgaaataaaataatatggggccaggtgttcacatctgtaattccagtactttgggaggccaaggttggcggatc

SEQ ID NO: 207155 - DNA, 1000 bp, Homo Sapiens
gtgcagaatagcactgcccaaaataactttctgtgcaatggaatgacctatctgcactgtccaatatggtagacactagccacatgcaattgttgtgtacttgaaatgaggccactgtgactgagaactgaatgtttcattttatctattgtcaattaatttgaattgtaataaccacatgtgttggcttattgtgttggacactacaaatgtagaacataacttaagaaccatctcactaggtcaagaaacctaaagaaatatttatccatcaaactccgtcatctgttgagggtggttcctgggaattcataacgcctgagacttcacttgtgcttccatggcccgagaataacctcagcagagagttgcaggtgcttaaggttggaagtctttagtgtatatggaaactgcccatcaaaggtggaggtgatcacccaggtgagcctaggggatatgagcaaggcattgagagcatttgctaaaagaatcctggttttgattcttattctcagttccaggagcagatcctgaatagcataagctaatcaatatattccatgccactgaccactatcattggttcaaagctgagtagataacctaggctggtccagtcagggtgaatctcacaactcttatgtgtatgctggatcactaaaagtgtgtttttaccttctggaccaatttgatgtacagatacaaagcttagtatttctgcagtcattttgccactacagaagataaagctgacactgaggataacagagcacagagagacagaaaactcaatccatatcagttagtgatactttgagctgcaaataacagaaatacccagctaaccttaaataataatgatctcacgtaatgataaatctcgaggtaagtaagtccaggtttggtgcaaccgctcaacaatttcgtcaaggactcaagatcttctagtcttgatattctgcctcctcagcatattggcattccatgtttcctcatgatc

SEQ ID NO: 207156 - DNA, 1000 bp, Homo Sapiens
tattatactttaagtcctagggtacatgtgcacaacgtgcaggtttgttacatatgtatacacgtgccatgttggtgtgctgtacccattaactcgtcatttacatgaggtatttctcctaatgctaaccctcccccatgcccccaccccacaccaggccccggtgtgtgatgttccccaccctgtgtccaagtgttctcattgttcaattcccacctattagtgagaacatgtggtgttcggttttctgtctttgcgatagtttgctcagaatgatggtttccagcttcatccatgtccctacaaaggacatgaactcatcctttttaatggctgcatagtattccatggtgtatgtgtgccacgttttcttaatccagtttatcattgacagacatttgggttggttccaagtctttgctattgtgaatagtgccacaataaacatacgtgtgcatgtgtccttatagtagcacgatttattatcctttgggtatatacccagtaatggaatcgctgggtcaaatggtatttctagttctagatccttgaggaatcgccacactatcttctacaatggttgaactagtttacagtcccaccaacagcgtaaaagtgttcctatttctccacatcctctccagcacttgttgtttcctgactttttaatgatcgccattctaactggtgtgagatggtatctcattgtggttttgatttgcatttctctgatggccagtgatgatgagcattttttcatgtgtctgttggctgcataaatgtcttcttttgagaagtgtctgttcacatacttcgcccactttttgatggagttatttgatttttttctcgtaaatttgtttatggtctttgtagattctggatattagtccatgtcagatgggtagattgcaaaaattttctcccattctgtaggctgcctgttcactctgatggtagtttcttttgctgtgcagaagctctttagtttaattagatc

SEQ ID NO: 207157 - DNA, 1000 bp, Homo Sapiens
tctcatgataaaacttgactgaccaaggagttgcttcctgtgtgaaccaagaaagtgatttcttgagatggaatctactcctggtgaagatgatgtgaactctgttgaaacaacagcaaaggatttagaggccaggcacggtggctcacgcctgtaatcccagcactttgggaggccgaggagggcggatcacgaggtcaggagattgagaccatcctggctaacacggtgaaactccgtctctactaaaaatacaaaacattaccaggcatggtggccagcacctgtagtcccagctactcgggaggctgaggcaggagaatatagcgtgaacccgggaggcggaacttgcagtgagccgagatcccgccactgcactccagcctgggtgacagagtgagactccgtcgcaaaaaaaaaaaaaaaaaaggatttagaatgtgacataaacttagttgataaagcagcagcagggtttgagaggattgactccaattttggaagaagttctactgtgtgtaaaatggaatcaaacagcatcgcatgctacagagaaatcttttgtgaaaggaagagtcaatcaatacagcaatcttcattgatgtcttattttaagaaattgctacagccatcccagccttcaggaaccatcaccctgatcaggcagcagccatcaacatcaaggcgagacctcccaccagcaaaaagattacaactcactgaaggctcacaggatcatttgcattttttaacaataaagtttttctttttttgagacaaggtttcgctctgtcaccaccctggagggcggtggcacaattgtagctcactgtagactctatctcctgggctcgagccatactcccacctcagcctccgagttgctgggactataggcacacaccaccatgtccagctatatatttttaaaagtattttattagagacaggcctcactatgttgcccaggctggtctctaactcctgagcttaagtgatc

SEQ ID NO: 207158 - DNA, 1000 bp, Homo Sapiens
gatgcaatctcggctcactgcaacctccacctcctgggttcaagtgattctcctgcctcagcctcccaagtagctgggactacaggcggccccatgcccagctaatttttgtattttagtagagatggggtttcaccatgctggccaggatggtctcaatctcttgacctcgtgatctgcccacctcagcctcccaaagtgctgggattacagtggtgagcctccacacccggccagccataaacttttaaaccttatctccccactagactagccatcagtggaagcgggaaataggacttctatttcttgttgtcaccctcaccagcacccaacccaatgttccagacaccaacctagttcatgcctatgttggtttgattgttgggggcactgggtagacagtgtaggggccatactccagcatgaatgggaataaagacaacctgtgtccagcctggcccatctgtaaagctggcttctagccaccacaacaaggtggaaggaatggctagacatgctgccagttaccagtttgaaaagtgtcttctgttgttggaaaagcacaacctcctcccaccccacttcccttgttccctgtggcccctgggccagcgaatgcctcgggagaaccctgattgccaaacaggagagtacaaaatagcacacatttgaattacagaggagaaactggagcaaatacggacagattaatgcacaaaccaaataggtggatctggggttggccagcaattctactttggaaggactttgagaatctatttggagggcagaatgtaacttaattttagttcagtttagtgaagttttgtttttgtaaggaaaacactgatgtggcctcttcactgggccatctctgcctcagacttttggaaccatgactgtgatcttgtttggctggtcttagtaggcaattcttgggttacacatgggtgataaggtgggatgggtacatgtgatagagtaggcactcctgatc

SEQ ID NO: 207159 - DNA, 1000 bp, Homo Sapiens
gtactaaaagatatgactccaatagtggtggtgagagagaaattcagagaaccatgctggaattgctgaaccagctggacgggttcgacgacagaggggatgtgaaggtgattatggccactaacaaaatcgagactcttgacccagcattaatcaggcctgggagaattgatcgtaaaatcttatttgaaaaccctgatctaagtactaagaaaaaaattttagggattcacacttccaagatgaatttaagtgaggacgttaatcttgaaactttagtaacaacaaaggatgatttgtcaggcgccgatatccaggcaatgtgtacagaagcaggtttgttagcccttagagagagaagaatgcaagttacagcggaggattttaaacaagccaaggagagagtcatgaaaaataaagttgaggaaaatttagaaggtttatacttgtgatgtgcccatttacatttttctataatagatttacgtatataagtaatgcttcaacaaagcttaatatgtgtacattttgtatcacgtgcaatatttgtttcaaaaacttaatataggtagggcgtcggggccttcgcgaattctaactgcaaaggaaaactggtgaacacatctgagagggtttgttgtcctaattttataggaaactaaaactcaaaagacaaagtatacctttgcaaattgaaagcttagttaaacattattattcgtgtgtttgaggtcactttttttcgtcttaaacagctctcaaagttgtctcaaaatttttatccggattcctttacattaacagaccccaaacacaacaagttttgatagtttaagtaagtgaacgcttatttttgttgtcgttgaaaagaaaataaataggcagtattatcaattaggaggtgagttaaattccattctataccgagtatacgagattttgcacattcttacttcatatatcatttaggcactgcatttatcttttaaaaatcattata

SEQ ID NO: 207160 - DNA, 1000 bp, Homo Sapiens
ggacacatatctccaccacatagtagagttccctcctagaggctgttatcacggcttcgtatggtcatttttttaatccaactgccagactgcaagcttactgaaggcaagagctattacaatgctttacttccaatattcctaacacaatgctctgaatgcagcagatcttaaataaatgcttattaaattactaaaataaaaaaaaagcaatgagacagaaccttagaagcatgtattttctgccccagaaggaactttagaagtcattttacagatgctaaaatagagttccagaacaaagtaatgattttaccaaagtctcgtatactggccatactggagtcagttcccctgtatcatggaaaacacaccaacacacctcactcactccctgggctgtcaaaccgtgcactttggaaccaacctcacactgaatacaccttttgtacattttaaactagtgcccaatcactatttccatttggagacctcaactaaggcaaatacttgaaaatccctaccactcagattttctttttgagacagggtctcattctgtcacccaggctggagtgcagtggcacaatctcagctcactgcaacctccacctcctgagctcaagtgatcctcccacctcagcctcctgagtagctcagaccacaagtgcaccccatcatgtccggctaatttttgtattttatgtagagacagggtttcgatttacccacactggtctcaaactcctgggctcaagcgatcctctaacttcagcctcttgagtagctgggactctgagactgcaggagcaccaccacacctgctaacttttagaataaaagaaatttaaattgaatttttaggtcaaaaaatgagtaacagcttagatacaaagaggaatttgcgaattaaaacacagctttgaaaaaattgccctggccgggtgtggtggctcacgtctgtaatcttagcactttgggaggctgagacaggcagatc

SEQ ID NO: 207161 - DNA, 1000 bp, Homo Sapiens
ataaaattatgtctgtaattaaagtataaacttttacttatataaatttaattattttactaggctatttaaaaaggattcatacaaaagttccaataaattccttgttatctaagaattttttaaataacttaagtatgatacagtgaataaattcaataatgctttcttaatatattattaaatattttcagtagaaaagggtaaagatcaatcttttgtaagacaaacaacagccactaaagaaacacaatgctgaaaaatatgaatgaactatgcccccaaagagtccaggaaattaaaacaatatcttaacttatgacgtgtctttgaataccctaaactacattcacctattgtacagaacaaaacttacggcaatacattttactaaagctaatgcaatagtgttcctaaacaaatagagcagctgtttctataattgcaaaacagataacccttactactttcggacatgacttcatggatatgaaacagctgcaattttgtcagctgcatcctaatgttccacacacacttctgctcaagaagatagaagtagagactgtctccttttttttatatgaagtgtcctctcctttcaaagaagaaatatcctgaatgtcattaacaatgtttaccaggaacattttcattcagggaaaggtggatgatagatgctagatatctagaagtcagcactaggattttaacacagaaaatcatgagttagaagaattaaaggggcggcagaagggacttcctacctggtacaagttctgcttcctttcacagcctgaaaacctagttgttggcttttagacttcattgctgaaataactttttttttctaacaagaaatgggaaaacattaaaaaaggaatcctattggttgttgccttcttagaaaagaattatttagggccgattgaggtggttcacgtctgtaatcccagcacttttggaggccgaggagggcggatcaaaaggtcaggagatc

SEQ ID NO: 207162 - DNA, 1000 bp, Homo Sapiens
atcttctcacaacttagaaacatatcaaattaccctattttaagcaaagcttttctgtaatctgttcttcctttaaatcatatgctcatctcctctttttaaacctccaaacctcaagaaagaataatctatctttgtctctcttactctcttatcctgtcttctctgttcatattttgtcatttgcctttgttgttttccagaaatgtcctgttgaagtcctcaagtccagtgatactgggcttcattatatttgacacaactcattgcttctttattcttaaaactgtcttatttggtttctgtctcttgattgttgctttacttatctgattacattttctggctcttcctctttttttttttttttaaatgtatgtcttctgtgaggatctgtctaggatcaacttcttcacttacacagtcttctttggccatgtcatcatctatgtaagtgactattacatcagcaacgttaaggtttttcaagactcgggtcctacttcaagtgctaaacagaaattttatacttttatgttctgtgaatataatactgagagttataatatttcccagatctattctttcttgacatgtagagcctatgtaagtgttaaatatagtagttcacagatctattctttcttgacatgaagagcctatataagtgttaaataaatctgaatggcatttcttatacctaaaagcatggtttatatttgactcttggcttgtccttgcaccttgttgcaaagtacagataattctgtcctttgatatccattatataatttttattcttactttcttgaccattcttattgctgtaatcatcattagctctcaccaagactgttgggaatcttttttattgttggtaaatttccctaattacagttatgatcatgtcattcctctgttaaaatatttagggggttgatgcttgtaaaaacaactgcacgtattttacaacctggtgtttgagcccctctaatatttt

SEQ ID NO: 207163 - DNA, 1000 bp, Homo Sapiens
aaaagcaggggttctttttctaatttcagacaaaacagactttaaagcaacaatgatcataaaagacaaagaagggcattacacaatggtaaagggttcaacaagaaaacccaattagcctaaatatatatgcaccaacataggagtacccagattaataaagcaagttcttagagacctatgaagagatttagataaccacacaataaaagttggagacttcaacatctcattgatagtattagaccatcgaggcagaaaactaacagatattcagcacctgaactcaacagctgaccagatggacctaacagacatctacagaactctccacccaaaaacaagtatatacattcttctcatatgcacatggcacgtactccaaaattaacaacataatcggctgtaaaagaatccttatcagctgggcgtggtggctcatgcctgtaatcccagcactttgagatgccaaggcaggtggattccctaaggagttcaagaccagcctgaccaacatggtgaaaccccgtctctactaaaaatacaaaaattagctgggcatgatggcagacgcctgtaatcccagctactcacgaggctgaggcaggagaatcacttcagcccgggaggtggaggttgcagtgagctgagacagcaccattacactccagcctaggtgacagagtgagactccatctcaaaaaaaacaaaacaaaacaaaacaaaacaaaaacaaaaacaaaaaaaacagaaaaaaacaaaaaacaaaaacaaaaagccttatcaaattcaaacaaaccaaaatcataccaaacacactctcagacctctcagactacattacagtagaataaaaatagaaaacagtattcagaaaattgctcaaaactataaaattacatggaaattatacaaagtggtttttttgttggtggtggttttctttttttttttttagacggagtctctgtcgcccaggctggagtgcagtggtgtgatc

SEQ ID NO: 207164 - DNA, 1000 bp, Homo Sapiens
tgattgaacactcccttaggcctcatcaaaagctgagcagataccaggaccatgcttcctataaagcctgcagaatcataagccaattaaaccttttttctttataaattgcccagtctcatatatttctttatagcaatgcatgaatggcctaatacagcaggaaagacaaataactttaatataagtatagcaggacaggattcttcattcctttaactcttttcatttcttctccttatttctggggcaggggggtgggggggatcaagaattttgtttgtttgttttttgtttgtttttttgaggcagggtcttctttgttttccaggctggagggcagtggcatgatgatggttcactgcagcctcgatctcctgggctcaagcgatcttcccaccccagcctcccatgtagctgggaccagcgtcatgtgccaccacatccagcaaatttttaaaatttttttgtagagatggggtctcactttgttgcccaggctgggagcaaatttttcacataatgatatcaaagttttactattaatgatgtgtaatataagcaagaagaaaggtcatatggtttctctatgctaaaagagactgtaagaagccattggatggaaagatccatcatcatcacctcccgtctgccagaatgaagaatctctggcctttatcacaatcaatattccagcccatttggaaaacctacaggaaggggctggaacatggtagaagggagaggagggagaccaggggctgtcatcagacatgagttttgattggactgaaaggaaagccaataggtaaagtgaataacccttttgtgctaccctctgaaatctgagtgtgtttatgatggactactagttagaaatgggctattcttgcatatcatttcaaggtgttttgcaaaataatcgtggtgttacctaaatcaaaatgtaccgtgttataagagtgacgaagtgacatgggggttccacattagtatgatc

SEQ ID NO: 207165 - DNA, 1000 bp, Homo Sapiens
gcttatagactaaaacaataaatcttccaggatgaggtttagtttgtgaaagcacccgctatgctgagattctcatctgtataccttgaagatcaagctattctcttccaactcccaccctgccacactcacaactcatgtgaaaatgactacctactatatatataggccagcataaagacccttcccttgcctccctttgccttcccttcccttatctccttttcctttctcaaggaagagaatgtatgacatcttgattcccttgagtgactctttgatccatcctgcttgtctaatagcatcatctctctcaagccatctgggagccttgtattacaaaagcctacaaaagcccctgtcagttctctcacctgcatcaccgtgatgcaagctgtggcatcacttgaagtctgcaataggagggactgtggcctgtgcctcaggcttcagtgcattgttcacaaacaatgatagattgttaattttcaaggaatatgaagagagattcaaaataacacctgcactgccacaatatattgcttcataagcaataaatactacgcaaaagataaagccttgagccccaggcttaatgcagaccccaaatgtgatttgttctactgtttcctttcccttagacagagaacagaaaacacaatgttattccttggtaggacacccaaccctgcccctgtgtcatcttttcacaacaaatacttctcgaatgcctactatatgcgaggtcctatgtgatatgccagaaatgaagttttcttccacgttttgttcaagcattttctaaacttcctttctctttcctttgtcatggtgtgcctactgctatttccaggactattctcaaacagcaacccatgagcattccatggtacctggacttcccacaacaaggatcatttctttgatgtgaagcatagaagtaaccatgctgaaagcgttaatagattcttgagatggggtcagagaggagggtttgatc

SEQ ID NO: 207166 - DNA, 1000 bp, Homo Sapiens
tctaggcaccggccggggaccggccttgcaagcaggactctccggggatagcattcccaggcctgcgtgtttgactccttcgcacacatcgatactcaggacttgattttctggcacgtaggaggctttcagagttgaacagatgaaagaactagtatctgatgtggttctgccttccgctggactgatgcgttaatggctttaatgtattaatggctgacagtggagtgcagctgtgacaggaggcttcctagctctgtccttgcgtggtcagagcccagcttctgtgttcagggctggtggccaggggcccccgagaggatgtggaagggagtcttaagagttgaaggaaatggaagtctctcaggccattgcttgcagaaaagacttcccgaggtgtttcagaggcaggtcaaggcctgggcgtggaaggcacatttggtttcaatgtggggaagacactatgttacggtgaaattagcctggaaagaagaggctggactttgtggggaggtggatccctggtccaggtggaagagcactttgtcagagaggcaggagggagtctaacttctccgtgagctggcaggtttgactctgggtacttccaggtgagctgataggaatttatatttcgactcttctctaaaatgctccctaagaaaattttattctacttttcttccaaaaagtgcagaaagtgttatttgttatcgggaagagtgtgatgttgtaatggcaacaggtgtaaggcaagctgagcgtatttttaaaaatttatattcacagacttcaccttctgtgaaacatttcacaacagatcgttgtcttcagcccttcctctcttccctctgatgcatatgttttataaattatatccttttttaaagataccagatctcaattggaaaggacatgcatacttactttttatgaagggaataatgttaatattattactaatgacatttttataagtgtagaggattcttgcttagtt

SEQ ID NO: 207167 - DNA, 1000 bp, Homo Sapiens
ctctttctttaactcttgcaggtaataatcacacctccctcccagggctgttctctgttccccacccactgtctcccttttgttgctgctactctgtgtgattttagtcagcattatcataagagcattgtagaactttctagagagatggtaaacacttgtatggtgaattctgtcccccttcacctcatggacccaagggccttctatacatttctgtgactgaaggtaagctgaatgagagtcactaggtttaaggtggtcagagaattttggagccatgggggctcctgagcaattcgagttatcccatttctgagcagctctaatagtcacagctggcctatgttgaccacagacttaaggctggccttgttctaagtgattttagggattaattagtttaatttcacatttacatttgatattcacaataaccatgtatcatccccatttgatagatggggaaactagggcccaaatgagattaagtgaaacaccgaaggtcacctagctagtgagtagcagagatggatttgaactccttctcacccttcctaaagagcaaatacttattgagttccttgccgtaataacttgcgttgattgagcattagatgtgaggcatctgctaagcacttcacatcctctctcctgtatgaaaccatgaccctgggaagtggaaactctcattcatttgaagaaaggaaagagccacagagaggccaaggtcatgcaacaagtcagccagatccagaaccagcctcagatctcttgactctggggaccaatgtttgtttctttgttttcccccattatccagcatagtctctccattttcattaattagcttttcttgagtgcctaccatcagccaggcatggtgttggttgctggatccactgaagggtggggatgacagagccccaggctttacctctgggtgagatatcacggcaatgtgggaatacgggcccagggttgcacacttttctagagg

SEQ ID NO: 207168 - DNA, 1000 bp, Homo Sapiens
aggaaggggtttttttttttttttttttttgggagacagagtctcgctgtgtcgcccaggctggagtgcagtggtgtgatctcggctcactgcatcctccgcctcccaggttcaagtgattctcctgcctcagcctcccgagtagctgggattacgggtgcccgctgccacgcccggctaattttttttttttttttattttagtagagacggggtttcactatgttgcccagactggtctcgaactcctgagctcaggcaatcctcccgcctcggcccctcaaaatgctgggattacaggcatgagccactgagcttggctggggtttttttatttttaagttaggactctcatctccctctcagggccctttccttgatgaggaaagaagtgaaagtgtccaaatttcattattttggcaggaaataaaaccaccatcgtgagccgggtacagtggctcacacccacaatcccagccactcgggaggctgagcaggaggatcgcctgaggccaggagtgtaagatcaccctggacaacatagtgagaccctgtctctaacaaaataaaaaaagtagccatgtttggtggtgcacgccagtagtcccagctacttgggtggctgaggtgggaggatggcttgagcctaggagtttgaggctacagtgagctatgatcacgtcactgtactccagcctgggcaccagagacagactccatctctttaaaaaaaatcaccatcgtgttcgatgccaacagcacctgaacacaacccacgcttgctagtgtttcataacatgcacctacaggggctaatgtggtttagccttgctggtttctctgacctcatctcctaccacttgccccctccctctctcttttacttcctagaactcaccaagctcagtgttgcctcagggactttgcccttggtactccctctgcctgcaaagctctcgctgcagccagtcccatagctaggcagcgccttctcatgatc

SEQ ID NO: 207169 - DNA, 1000 bp, Homo Sapiens
agcctggcctttggcatgccaaggcagaattcatctctgaagttagaatgactcatgcgaggaagaatttgtcctaggtttcttcaattcaccagggaggtttccttagaatcctttatctgtactgttagaaggaaatagaatatcataaaaacaagacttttattagcccaacacttttcagaagtctttatagaggtcatttatagcattatcttataacttatgtgttgcctctttgtgactaatgacagcaaggcacatattaatgagggtatcacagtctacgatggcatgttgtcataaagcattaaaaattaactactctggaaaatcaaccaagggcagtttaaaggcagtgtcagctttgtaatcttttcctatcttatttacacttattagctaatccaccaaatcaaacgtgtgtgcatttaacagaatttcactgcaatcagtgaatggggccccttgaatttaagtaactttatgtgactgtgtagaggcatgagaggagagggaccagcattataaatattcattacaatttcaaatggcccagtgtgcagagtcaggaagaagtggccatttcacttttggcaagacttatgcacagcagaggcgccttcctcctcttgggctactgcagagggcaaggcagaatggaagcggtccagaacccgggagaagaatgctttcctcactgcagacctttcccacttccaaccactgagaatcacaagtccctggagccaggacttcctgcataaacacgaggacactgagaattagagaggggaaatgttttgcccaaaggtttgcaggcctagagtggcggcactggggctaaaatgctggttcttctgactgctaactccagggagagaggagtttctttctaactcaccatctctcctcccacctcctggctctgcctcccctccttcaccagggaagatggtgacattgggtcccctgggtgagagaatcttcaggggagatc

SEQ ID NO: 207170 - DNA, 1000 bp, Homo Sapiens
gaaggctgcggtggcagaagcacggggaccatgggatcagtgagcagggccattgggcttagtctgaggggtcagagaaggctttctgggataaagctcattttgtggcttattttcctgaacctgtgtcttcatttttaaaatgggataggaatgcctgtgcgccatgatttgaaaaggttaaaaggatttgcacagaacttggcccacagtctgtactcagtacctcacggttttctttttctgctctcctaatttgcgctccttcctggaatggttgtctcagtgttgccttgccttgcccagcagcatcttgtatttagcacttgaaatttacagaacttggtcatacatgcccatctgttacagcagtgttctggatctccatgccaggcccatccacggagttgctgtgtttggtccccctagacacccttgagggggtagaaagtgtgatttcaggttttgtggatgagcaggctatcacttggtaaaagtatgtggcagtgccgtggagagaaacagggagaagcctgctctcctggctctgagctcacttctcttccctctgcccttggtctttgtgtcacctctctccctggatggacgtgagtatgtttcaatctatactgtaagatttttgctttcaaaataaatgtagaaaaagggtgagaattgcaatcgtgtatgcaagtgtgccccctcccctccccggagagctaagacaggtgagaatggctggcatggaacagctccatgccccccgctcccttacctgtaagacactgctggtggtaggatccacttcatgagaccattgtgaggagtaaaccaaatggaatagtgaatgtaacgcgcttagcacagttgtggcacgcagtgccgtgtcacaggccagagctgtggcgtgtagttgctatcagtgtgattcttaccatcgaggtttagggaacctaccaccccatatacaatccttttgttgcacccttttttgctgatc

SEQ ID NO: 207171 - DNA, 1000 bp, Homo Sapiens
aactccttccctaatgcccactgctataaacaggccagaaatcagagatgagttctgacagcaatatttcaggaaggaaatggaatccaagcaagtcttttgtgtacctgggtcggagtctctctttcacaaggtctgtctgaactataggaattcctgccctgtgcagctctatattactctccactactgcacagcagacaaggaaaacacagataaccagtgctctgatccaaattcacattcacacagtaatgagtcaggaaggacaaggcacctagaatagagcagctccaggtagagtagttgataaagggttaaatttaacattgaggtgctttctttttagctaattccttagcttttgggtgagagggtacaaggaaaggaattaattcccaaacattactgtgccttgatcagtgtgttgggagcatggagttgtatttttatttgtaggccatgtcctgcccagacatttgtctccccaccctaggccaaggaaacctgggcctgggttacctaagaggataccaattcccgtagcattttcccaatgagtttggtttcacctaccttagaagtggagacgcaatgggcctggtggtgagaaacaagcaagatcccaccatggaccaaaatcttaaagggccctgttgttattagcgcccacggtcacttgctcccaggccaggggtaggaagcttcttggtcatgtcgtcactgtgagtttctgcggtttgcaatagtctgcatctgagccaaagcacccccaacaccctaatcccctcctggcttcaagggctccaggctggaaaagcaaatagtccagagtgattgcaggggccagtggaccctatgcagttcatatcagactgttctgaggagtggtaagtcacagggtctatattgcagctatttttagtgaaactgaattccttccccaagttctcttgcttccaacttgttctaagtgtaggagaccagctgtggtcagatc

SEQ ID NO: 207172 - DNA, 1000 bp, Homo Sapiens
acttgagaggctgaggcaggagaatcgcttgaacctgggaggcggaggttgtagtgagctaagattgcaccactgcactcaagcctgggtgagcgagactccaactcaaaaaaaaaaaaaaaaaaaaaaaaaagaaagaaagaaaaaaaatttaccatgagccaaaatttcaaaatttcacttcaagacaggagttgaaacgagcacttacacaatgcctcgctcgcctcactctaatcttggctttgtcagatcctgtcttgttttaaaatgttgtgctccgggtgtgtgcctggcttgcctcaccgcagcccgggccctgctgacccagctccatgttcactgtcctttcttcttccttctgtggccttggttttgggtcctcactctcttttgacccaaccattgagaaactcctctggggttccttctcctcaccccggactatcccaccatgagccacgtcactctctgctgcccccttaggcttcttgacacagagtagtcaagccactcccttgctcataaccttctatgacttctgaccccaggcgaggctcacactcaccaacaaggcatgcagaaccctctgtggtcagcccagggaggcttcttcctcccaagcctccccgcctgtcacctgccctcctcctccatatccaggccgtgcctttctccacatctgtacttcactgactatcttcaaagtcaacctcaaattcactagaaaaccgcccctggaggaatgtaaaatggtatagccactgtggaaaacagcagggtggttccccagaaacattcacacagaattacgatatgacccagcaatcccacttctgggtagataccccaaagaacttaaaacagggtctcgaagaaatatttgcacacccaggttcacagtggaatgattcacaatagccaaaaggtggaagcatggccgggcacggtggttcacgcctgtgctcccagcactttgggaggttgaggcaggcggatc

SEQ ID NO: 207173 - DNA, 1000 bp, Homo Sapiens
agtggatggcgaggtcttaggcaagcaaaggcggttctgaagagtgctttcccatccagctccctctgatcggcaagcccatccaaaaatctgttaaggtatattcaggtttacattttgcacctgagtttttaatcatcaggacatagaatactccattaccttgtgctaggatctaaataaataatatttagtttggtacaaaaagtacttgcggttttcgccattaaaaattgcaaaaactgcaattacttttgcaccaacctaaatagctaccatgtattcaatacccattatatgctagacattaggctggtgttttttgtttgtttgtttgtttgttgttttagagacagggtctatgctgtatcacccaggctggagtacagtggtgcaatctgggctcactgcagcctcaatctcccagactcaagtgatccttcccctgagtggctgggactacaggcacacaccaccatgtccagctaattttgtttattttttgtagagcttaggtctcactatgttgtccaggctggtctcaaactcctaaactgaagtgagcctcctgcctcagcctcccaaacggctaggattacagcactttgagcatctgcatccggccaggccagggttttttatgtatgtatgtatccatatatatatatgatattaaatacataatacctattatttacttctctacattgaatgtgatcatgggattatagaggaaacaaaatagctctcacgtttcctcagtagccccctactgtccttactctctcctgcaggggttgaatagcttagtagatgtaatggactgtctcccactctccctcaaaattcatgaatgtgattgtgggatcacattcaatcaaaacaacctggtatggtgatttctattattatcttcattttacagaggatgagtctgagcctcagactagcccagggtcactaagtgagtacatgctcaagcttaaaacaaaatcagatc

SEQ ID NO: 207174 - DNA, 1000 bp, Homo Sapiens
ccgcattccctccacctgctgctcagcaggtcaacgcagtggccatgagatggaaccaaactgaacgaaagcagcgggaggcgggaggaggcaggtcacgctccgggccagagttagaaatccaggtgtgcagacgcccttgggacactcccatggcccggggcagccaattcaccacgtggcctgggacagagttggggtgacaaggtcagaagacttcattaaggcatcccctatccatcctatctctgggaaacagcatggaaacctcatcaggtgttttgtgggaacgattcttcatatactgagtatttactagaaattctttactatgcctgacaataatggagaatgctgttaattacagcccaaagtaagtgaatttgtaagcacccaagtaaatgaatttgtaagctccagataaaaaaatctcaaacacgatacaacatccagagatgagaaacatctggaagataaggtggacacatgcagctgtcaatcaaatatgcttcaccacgctgacctccatcttcctgcacggggcgtcctgtgcaccaagatgagtaaagtgcagccacctccccccggaggacccagctccacacacacccactgaccaccaggcgggcagtgagccagtcccagtccatccgcgtggctttctggcatggacacacgctcgtcacaaacccatctcacaagggctggcttaagatcacgaaaccccagcctgcctgggactctcagctgcatccacccctgcaggacggaggaccatgtgtgaggctgagagctagggaagcccaggttctggcccacctctgcccacaccgactgtgggatttaggggagggcccttcctctcttgaagcctcaagtccccacctgtacactgccaggtgctcccaccctgaatggtactgtgggctggggtgctggggacacctgggtttctgcgccatgacccaggcaaagctgccttgggctgtgctgacagatc

SEQ ID NO: 207175 - DNA, 1000 bp, Homo Sapiens
gctgaggccagcggatcacctgagtcaggagttcgagaccatactggccaagtggcaaaaccccgtctctactaaaaatacaaaaattagttggatgtggtagtgcacgcctgtagtcccagctacttgggagtctcaggtgggagaattgcttgaacctgggaggcggaggttgcagggagctgagatctggcccctgtactccagcctgggcaacagagaaagactgtctcaaaaaaaaaaaaggacaaaattagaaggacttaacctctatcctgtgacctttctccaacatcccctagaatgggaaggatttcaactctctgcagaccgttctttctaaaagaaacaccgaaggtgcagaagtttgggctgtaaagaggagctgtgtgcttagctcacagtttttgtagtatttgtcaggatgttaaactgcatttttgcctgtccaggaccaatttgcagccagcaaacatgaataaatgagcatgcaaatcaatatgcatgctgcctttctggcgggttttctccttgggaagtattttctcttgtttgaaagaacttggagatgatattgtttgtttctgtactttccgccaggtccaaggttggcatcggaaagccacctcctgtggcttcttgttagtcccagttttggaggggccttttgcactgcccagttacctgtatggcgacccccttcgtgcccagctcttcatcccactcaacatcagctgcttgctcaaggagggcagcgagcacctgtttgatagtaagaaatattcccttctggaggttgtctcaaccagtaagaccccgtccctaacaaggacaccactctgggtatccagtcaacacggactagggaaaagggacagcctttcaacaaggggccaaaaggatcaaggttctaaaggatcctgattcttgacttagtggctggataactctggacaaatcatttcatgtctctgagtctcgaattccttattcctaaaat

SEQ ID NO: 207176 - DNA, 1000 bp, Homo Sapiens
agctgtccagtcaaatttcaggctggagaagccaaactagtcactgggaactgcggtgggggtgggaggagtctgcctgggcagccagtttgaagcaggactgctgtgtgctggctattagcaggcaggctcctggagatggcagcattagctaatgattgctccttcaggcaggacagctgcctttctgcttttttccatagcaatttgtggccagggaaggctaagcaacgggcccaaataaagcaaggacccttgccagtgccatatgtttctaactgaaatggggagccctagaaatgcttttagaaataaccatttgctcttagctaattgcaattcccctaccccagccctttgtcagaccgcagccttcaggaataccaggctgcctgggggacaattgtacattacattgtcagtctggggtgtaaatttcccactccagtcatcctgttgaactcacagttctgtccctcctcctaatcctccttccccaacatgccatccatatttctggctccaggtgatgtccactatatactccatctggaacaccctccttctttctcttgatctaattccagtcctttacctacttccaagctgaattatacctctgttatctgtgaagccttccttgggcaccacaagctgcagtaaggcttcttttcctgaagtgtaatggtgcatagtgacaagggacctatactggagccacatcgaaggagttgagcaaaaggtacacagaggcaggggatgggtgcgatgagaaacaaccctgtctgtgcacctagtatgccatttactggcttggtacctaatcccatgctgcctgaggaacatacctagcatcctggtttgactcttggtcacattacatatcatgtgcattgatcactactgcctcagggttttccctgccaacctcacccctttcccacctccccaccctttgagcatcacctatagtgtatgtcgctgaattccaagtggcatg

SEQ ID NO: 207177 - DNA, 1000 bp, Homo Sapiens
ggggggaacagcatgaacaagactaggaaggacaacagtgtcaggaacagcaagtagttgggtgtgaccacatgttaaagaacaaaagcactagggcagtagcaagagtagaattaggagataggattgaaaacttaggctgggaataaaacacactttgttctctaggcaatggagaatcaatggataattttatgcagaaaaaacctgcaatcagattaatggttcagagttaactggtacagcatagaagggtcaaagtataggagagacaaagaccgttttataaggtgatatggtttagctgtgcccccacccaaatctcattttgaattgtaactcccacaattcccatgtgtcatgggagggacctggtgggaggtaactgaatcataggggcgggtctttctcatgctgttctcgtgacagtgaataagtgtcatgagatctgatggttttacaaagaggagtttccctgcacaagctctcttctctttgactgtggccatccatttaagacatgatttgctcctccttgccttccaccatgattgtgaggcctccccagccatgtggaagtgtaagtccattaaacccctttttcttcccagtttgaggaatttcttttttttcttttttttttttttttttttttttgagatggagtttcattcttgttgcccaggctggagtacaatggcgcgatctcggcttactgcaacctccacctcccaggttcgagtgattctcctgcctcagcttcctgagtagctgcaattacaggcatgtaccaccacgtcgggcatttctttatcagcagcatgaagatgaactaatacatgaggctatggctgtaacctcataatatgaatatgaatatgaagggtctggattgggacaatgttcattcatccattgatcattcagcaaatacttgttgtagagagtatggtaagcaataaaaatttacagtctaccaaagaagaaacagaccttgatc

SEQ ID NO: 207178 - DNA, 1000 bp, Homo Sapiens
ctacagctaaggatcttcaactgatggcgtaaatcatcgtgtctaaaatctgatccattcatgaaataattacaagaaaggatgttgaagtggcggagctcttagtgatcaccaggatgcttctaatcatggagtgtacgtaaggagggggaggggaagtggataacaactccaacaacttgaacagtggcaaaaacaacagcccctgccctcaaaatgccccaccaagtcttcatacaagtggactttaaaaagtttgtggaaaaataaaattaaaagataaaaataaaaaatataaattttatttctcaacataagctccatcaagttcaagacacttgtgtaagcaatgaaaccagccatttagtccatccctggagaactgagggtcctgggaatttaacttgtcaatgccatcttttctcattattaactaaactgaatgccctttaaagattttttaagattaggaaacaaaaagaagtcagaaggagccaaatcaggacagcaaggtggttgtctaatgatttctcattgaaacccttgcaaaattgcccttgtttaatgagaggaatgggcaagagcactgttgtgttggagaatgactctctcgtggagctttcctgggtgtttttctgctagagttttggctttttcaaaacactcccataataagcagatatgatcacactgtcgtcctccaaaattcaacaagcaaagtgccttgagcatcccaaaaaactgttgccaagatatttgctcttgaatgatctgcttttgctttgactggaccatttctacctcttggtagccattagtttgattgtgctttgtcttcaggattgtactggtgaagccatgtttcatctccttacagtttaaaaaaatgcctcaggatcttgatgctatttcaaacgtcttttgaaagctctgctcttggccgggcatggtggcccatgcctgtaatcccagcactttgggaggctgaggtgcacagatc

SEQ ID NO: 207179 - DNA, 1000 bp, Homo Sapiens
cccacagtttgacaggacaatctttccattagcttctactctatttccccccaaaaaaggttctctgtcttacctggacagaaaaccaggtaaagagagtattcctaacctagattgtggtctacatataccatttcaaattggaaagaacagggatccttggagaaatggctcatgccaggtcccaggcaagggatgtacaagaacaacctggaacgtttgtcataccacaaagcaaggaagctgtcaaagactatctggtcacatcaacaggatgttggagccaacgtgaaaatgctcccactggccaagatggaacaaattgagtatcaatataacagctgtaatgaattgagacacaaatatgcttaaagtaatgagttcttaatcattattaagaaaaaatcattaagaaaataacactgattgctcacttttggaggatgccagggaaccagctcattattttgcaaagtaggaaatgcagggaaagaatcaaggctatcctgcctttcttatattaactgtgtcttgttgtcaccaaatagttggagaggggaagttgttattacagaagtcctccaaccagtaagagaagaagaaatgatagacacagaatgtcatcattttataatctctaatgaatggatggatctgagtatgatcaacaatggttgataagatcacgaaaagagagacagtctatatatgtttgccaccacctatgaagtatttttgtcccccccactccccacaaaatgaacatgggtctgtacatctacatctaactatcaatttagggtagggagtcaggggagggagatagggaaacatgtaaaatgacactgtgggttacaagcagtcaaatgcagattgtaagaaagcccccataacaaacaatccagattacttctaaaattaagaaatggagaggagggctacagttctaaaaagaattgtgaaaaatcaaccagttgaaactacagacttaatttggatc

SEQ ID NO: 207180 - DNA, 1000 bp, Homo Sapiens
ctttttacttttgggacacttgaaactctgaaaagttatgatactcatgcaaggtcacacagcaagttacgccacagccaacatttgaccccctaccactgtctgacactttctgccttaccaccctgtgttatcacaatgataccttcaaaatcggcaaccaaaaagatcttactggcttaccttcccattaaaatcatttccagttgaagaaagaaggggatgactcaaccccaacaggaaggttgatttattttggaagacttttcacaagactctttacggagctctctgacagtgctaattttaaccaagtcattgtgaagcaaccttggattcctctatgcaaggcaaagtacaaacacaagcgtatgactcagcacaaagcagctgtggctctccctccactccattacccacaccccaaaagggatgagtaacaggttcactaataaattcaaaactttttcagaaagcccatccacatcccccactgctccaagtttttaatactgaggcttcagcatcacttccccaaaagtctaccctggtgaatattcttcccataattccctcttgctctggtgttgaaggcagaatgagcttcgttgtgggacatgtcctacaattggtaaatgttagtatgcatctgctttctgacaccactgatcaaagggaaaagagggcatggaagagctcagatgtagtaagaacagcaacagcaatggtcatggaaatctggtctcgatttttggatgagggcctttgcataaagagctctgagatgcttccctaccttactgttattgtgagagagctgcccaggaccctctaaactcaaagtctccccatgattttctcctatctctcttgttgatctcactctccactgccaagaaatggaggtgagtggttcctcagactttgatctggagtccacagccaacagctcagcaggtgaggggagttctcccttgctcttctgaaaaatctgaagatc

SEQ ID NO: 207181 - DNA, 1000 bp, Homo Sapiens
atctggatatatttgaaactgacatagcacatatcaggagtccaggcagagtttggggagctgccaggatccttttgtcttagctagagcatgaggagagattgtactgggccttactcttctccttcctccatggtcttggtttgcccagctcctcagtgcaagcctgagttgctgagcaggatgcggctctgatatcagagagggtgtcctctctgagaccacgggcagggatggaaggagaggtagctctgggccaggggaagaaagggacacagaaatcactttggcctactcgacagagccagctcttctgagtttttatgacacaggtgtgcagactctggagctgaactctggatatttgcatctttaccacttattaactttctgacttgggcaagtcacttatacactctgtggctcagtaccctcacctgttaacagggacaataaaagtacctactcctagggttattatgaagattaaatgagtttgtattgtcaagtgctggaacattgcttggcacataagcaagtgctttcatttatttattttttgagatggggtctggctctgtcacccaggctggagtgcagtggggagatctcagctcatagcaacctccacttcccagactcaagtgatcctcccacctcagcctcccgagtagctgggattacaggcgcatgccaccactctcagctaattttagtatttttagtagagatagggtttcgccatgttgcccaggctgatctcaaactcctgggctcaagcaatcctcctacctcagcctcccaaagtgttggaattataggcgtgaaccaccatgccgtgccagcaaatgctttttgagtacagtattagctgttatatttgttagaactggactcttttagattcttcattttggcattctccagctctggtgttggattctgagaacctagaccctggggattggagggcctggggggggagggggtcaccgggatc

SEQ ID NO: 207182 - DNA, 1000 bp, Homo Sapiens
agggaaagagcagggaactctggtctgtgccaagcagttcattcacgttatcgctcttaattcccgcagtggcacttgggaggtaggcacctttattatcctcattttgtagtgaggaaactgaggctcaaggaggttaagggacttgtgcgaggttattgggtggtcctgagtgatgcagttgggacgtgaaaaaggcctgtctgcctctggagccatggctcgttccatatgtctctcaggctctgaatggggggcttctgtttgtatttgggaggcactgggggaagggggcagttgggcagaaaatgctgcctccacaagcagcgctgggaaaaggtgggcgtctcaggctcctgctccccctccccttccccctgttcctcccccagacactcagatggatggccccagcccacacaaaggtaaccagcgctcgagattcagcagcacactcacatgcttctgtctggctattctgcctggcagtgggtccgctgcagtgttctcctggagaggtttttgtccctccctctgaccttcctttccccctcccaccttcctttctctcccagtcaccaccacctgctctggttgcccccatggcatggggctttgtagcaggaagcaaggggtgggggagggcggggaacgctcctgcaacactgaaagcggggcactggccaagggcttcttcccacaggggctcagagccagggggaaggagagagggggaggggtccccccacttgttcttgctcctccccctcccaggcaacttgcctcgctgctgctctctggcagctttggcccccagaaaggagagtcaccctttggttcctggcttggcttagtgaaaccctggtactttacccagcatcctccagtcctgccattgtacattctatcctcctggcgataaagcagcattgtaccctcatagctagtgccttcctgctagggcttgtacctctctgccctttcaggatggggactgatc

SEQ ID NO: 207183 - DNA, 1000 bp, Homo Sapiens
tcaagctgcagggggtgctctgtaaggctggcccgctccctctcccctgcctgctggctcctcacctggagcccctgccctgcctcgtttcttccccgttcctctcccttgattcctgaaatttcccaggctggtcactaggtgtcaccgcaatcaagtttttctgcccccacggacctgaggtcttgcaccagagaagtcaagagtcaagagactcactcacctcctgagctttactccctcaaggcccgggaggctggaggtgtccttctttcctccctcaggttgccaggtttagcaaataaaaatacaggacgcctcattcaatctgaatttcaggtggacaatcaatacttcctgagtataagtatgttcaaaagttgcatgggtcatacttataataaaaaaaattacttgtttatctgaaatcccagtttaaatgggcactctgtattttatctggcaaccctgccctgccctccacagggaccctaaaggaagccatggcggacggacaggctgtctagtgccacccttagctcctactgccagagagctcaggcaggtgcccaggccatggcctgccacgaacagggaaaaggtctgtttttcctttccagcaggtgacgagatggagggcgcccaggcatgggggccaaggtggtagcatcccaaaagtgttcccacagcagccctgggaacccggaaggagacagtggtaagagcactgtggacacacgaacaggaggatctgtaaggctgtgagcagcgtccccgagccccagccagtgactctccaccactgtccacccacatgccgcagaaaggagcaggggctgcagagccacagcctggggctggagtcccggctgcgtcacaagcagtggcgctcacttcctctccctcagctgtgcatgaggggcggcagcgggtacttctcatggcccttcgaggacaaaaggggctcatgggctcggggcacagtaggtacgtttggatc

SEQ ID NO: 207184 - DNA, 1000 bp, Homo Sapiens
ttagcatcaaaaccctctgtggcatttattttcctcattccacagataaggaaaactgaggcacaaagaaagattgtatgactcactcaaggtcaaagggcctgcaggtgggagaaccaagattagggcagatggtctgagtccagagtgcctgcctatttacctaagcaccagacacacgcccatcatgctggtgaggctcagaagccaaagaaataaagccatctacccaggacatcagggtctgtgccacccacattctagtatgaatatcctcacctgtttctcaagcatgtatcaagtgctcaccatgggcaaggcaccatgcaagggtcctggcgacaaggcctctaaaaggggaagcaagaccagcacataagccagcacagagaattgctaagacatgaagcagtccgctgggaacagtggcataagcgaagcatttggcaacgcacgctcgaaccgcagccatccaacactcgggccagtacctgggagtttaggttatagtcctgcaccagctttctacaacagttcctccttaccggtgtcaaaagtgcttatgacttaacagaggggaggagccacctccaagaacaattggctcacaggcactgggcagaaggcagggcagcctgggagctgggagcagccagggcagcccccacccagttctcaagtgttttgatcagaagtagaagcccggagcagagagcaaagtgggacaaaaggaaaaagcgctggtgaaccaggggtgggcagtggggggtgggaagaagggcaggaggggcattgatacttatcgggagtccatcatgaactagacactgctgagagcatttcatactttagctacccagagaacactaacagatagttctatgaaccagaatttacagatacagaaactggagctcaaagcaattaaacaaccggtagagcaccgtcctggagggctcctcccccagatctgaaggcatccacagaatgtccctggatc

SEQ ID NO: 207185 - DNA, 1000 bp, Homo Sapiens
ttttagtgcacaagaggttaagagaataaaagcatgtactcaaaagctagaaatggaaaataaagtgctacagaaaacatttgattaaatcgaaaatgcctactacatgacctaaaattatgattcaggaagcaaagcagagtagcatcaattttggtttctcaaaggcaacatattttactactggtaatatttattttaaaatctcattaattccctgaatgtcttccaaaaaccaaaaggcaaaaaacaaaacaaaacaaaacaaaaacaaagacaaagtaaaagtttaactgaattcatgatgatcaaccattgattgtaaaatcaatttttcttgctgccatggtcacaaactctggtattaggctaattgctacacatcaactcatctgaaacgtggtttattaaggatagactttattgaaacataaagtgaattaagggtttttgagtaatatgtactgcttgctcatgcctgtcatggtacattatacataccatcacattatactcatttcgttagcataaaggtaatttcagatcaaatctaggtcctactttacatgatgccacaatgccattccatcaataaacagggagaaaggaaaataaaatagaagagtttcctcatcatattctttgtgacagctatctaaaagctgtcttgccaagttctcttttagtggatttgtgaatgccctttgatatccaactcagtttgaaaatttatagtcaaatattctttcttcttgtttcactaaggaattaatacttctttttttccctttaccacatagcttaactttcacttttctcattttctaacagcacttacttttcttccttttcaataataaataacttcagacttcacagagccctccattctaatcttttatcccagtttctgcagctgcactttctagccctaagttgtttataaactcctgtgtggcgagctacattttaggaaggagatagtccatttttaaggatc

SEQ ID NO: 207186 - DNA, 1000 bp, Homo Sapiens
atccaaaaggggtaaatgatacctacaccaaactcaagaaagtcaaataagggattcttaaaataagcttctcattattgaaaaaaagcaaagcctacagagtaacacttatttcacaccactcctagagaaagaaacgcagagtaagcataaaagaaaattgcgcatgcacacacagatacaggttatctattaatcatagcatttttatacagctgacaaaaatcactagaagtccctgataagcgcctctctgaagggctactacatgcacttaacacactttaatgcttacgtatgaaggtaggaaatgccaaagttaaccaactgatctccaacactgtaaaacacagccagctcagagctaaaatgctgctgcaaaaagatctattcagtatcatgacaagcagctaaagacttttaacaaagcagagggacagaagatgtctataatgagtaatgaacagcacctgggaatggagaggcgctagctaacagaaaaattagtttctaaacccaaatacagaccttttgagtatgaccagcattacctcaaagtcttggatgatatcaaaatttgccaatttattatcagcttaataagagtcatgtatgaaactatgacttctagttcaaatataacacaaaacatagtaaaatcttatgtaagtatgtaactaatgcagacatatatgaaacggactgcttaagcaatagctgaatagcagtactctgcattcttttaaacaaggtgtgcatagcataagaccagggtcagactttcaggacaagtactaccaactccctgtaagctttgccaaaggggaaacttcctgaagttccaacaaagtcttcaaacccactgtgccagccactaacagtaaccatgttcctggaagcttgtatatgagaagcaaaccaatgagttaagctttgtggatgttgggagccaccacaaaacatctttcaattttgccagttttcactttgaaatcacaca

SEQ ID NO: 207187 - DNA, 1000 bp, Homo Sapiens
gtgttgggattacatgcgtgagccaccacacctggctgaggactgcatttcacaggtgtagaacctgcaggtacagaggggcgactgtactttaatactgttcatcccaacaaccttggggattaagtgttaatgctgacctgctgttctaacagtgctgtttgaaataggcatccttttgtctactgccacaccaccctcgacgcgcccgatcacatctcagataggcgtccttttgaaggaaaagattatttttaaaatgtgtagagcaagcatatggtggttagtgttcttgtataaactttgacttgatctttattcatcggctttactgataactggttactaaattctactccttgaacacatactttttgagcggtcacaaaaatagggcacagtaggtcgggcgcagtggctcacgcttgtaatcccagcactttgggagtccgaggcgggcagatcatgaggtcaggagttcaagaccagcctggccaacatgacgaaaccccatctctactaaaatacaaaaattagccgggtgtggtggcgggtgcccgtaatcccacctactcgggaggttgaggcaggagaatcgcttgaacctgggaggcagaggttgcagtgagccaagatcgtgccacggcactccagcctgggtgacagagcaagactgtcttggtgtggggggagatacagtaaaagcagaaagtatgaaggcagagtggcaaaaaaatctagatgatttaatcaaattaggctaaataaatggttcaattattaactttctataggttctcttgctgcaaatggccctaccaccttggttgataaagtttcaaatcccaaaactaatggggacagtcagcagccctcctcctctggccttgcttccagtaaagcttgtgtcggaaatgcctatcacaagcagttggccgccttgaactgctccgtgcgggattggatagtgaagcacgtgaatacaaaccccctctgtgat

SEQ ID NO: 207188 - DNA, 1000 bp, Homo Sapiens
aatcacttgaacccaggaggcggaggttgcagggagccgagattgtcccactgcactccagcctgggcaacagagtgagactcggtttcaaaaaaaagaaagaaaaggaggttagccacataaataatagatgaggctctttgaaaggacctaagagggtgctgtaaattacatgtgatgtaagcctggaagtcttcactgctgcatattttttccccaattctacttaaaacgttttaaaacttgtcaagataactttctcaaatcgttaagaaggggtcatctcaatgttacagcatgagaaattaaagtccagagaaatgaaatagctttctaggtcatggcaaaattggtgcatctggagtagcattcagatcccgaatccttgtccctggttctcttaactgccatgctctttgggttgagactagaaagaaaatggatacaacacatttcacccttaggagactttcagtgtttttaatgttttcacttagaatggaagaaattatacttgaaaagggatgtttaaatttattgatgttggctgggcgcggtggctcacgcctgtaatcctagcagtttgggaggccgaggtgggcggatcacctgaggtcaggagttcgagaccagcctgaccaacatggagaaaccccatctctagtaaaaatgcaaaattagccgggcatggaggcgcatgcctgtaattccagctactcagcaggctgaggcaggagaatcgcttgaacctgcgaggcagaggttgcggtgagccgagatcgcgctattgcactccaacctgggcaacaagagcaaaaactccgtccccgccccccccccccccccagaaaaaattattgttgctattgcttcagatttccagtagctcctcaaaccctgctcaaaagtccatttctttgagttgggggaaggggtaggattcttgataatgaagctattgttgggtaaattcttggccgtccttaaatccttcgggatc

SEQ ID NO: 207189 - DNA, 1000 bp, Homo Sapiens
caagcactatgtttcacaggaaccagagcagaaagagaggtggcctgtggcacatcctactttagtagctctggctcacattcagggcccttcctcatctcttaaacttgctgggaataccctttaactctgagctactagagactttaatacttaataatatttaaaggtcaactcagctctaagaaactccccaaattaagttttcaaatgatttggcaggaggagcgggttgtttttaacattttcaatggaactttccaaacccacatgaaattatagaaaatgaatgatgaatccccatgtactcatcattcagcttcaagaattatcaatatgttgcataatttgtctcatcccccacattttgatgaagtattttaaagcaattactagacatcacatcaaatggtatgattcatatatatatatatatatatatatatatatatatatatatatatatatatatgaacatatatatttggtagagatggcaatcgcactctgttgcccaggctggtctcaaattcctggcctcaagtgatcctcccgccttagtctcccaaagtgctgggattacaggtgtgaaccatcatccctggcctgattcttctgtattctacccatagttctatcccccctttttgttccaaaattttcattgtggtaaaagttacaaaaaattcaccattttgaccattttaaagtgtacaattcagtggcatttagtacgcattccaaatattttttatttgtatatgtctttattctgagtccatttttccagaggtttattagttttttgtacatatttagatgtctgatttcttttttttgttttttttttttgttttttttttgagacagagtctcgctctgttgcccaggctagagtgcagtggtgtgatttcttctcagcaggtgcagacacttctctgaagaccaacagcagaactgagtctcaggatgggtaaaggcttctgtaaacctccagatc

SEQ ID NO: 207190 - DNA, 1000 bp, Homo Sapiens
tcattggcagtggctggggtgggggggaaggtgatttataaaagaaacaaggaaaagcagtgtgtgcaagggaaactgcctgcctgaaatgaaattaattcaagggaagggcagaaagagaaaggtcagaggggacactgcccgaactcaaacccctaagacagaaaagagattctgaagaaatgacattcagtcagtttcctgctaggacaacaaactggagcccctcaaaccaacgcctgcctgttgacagagatcagccaaggagtatatgtgttaaggaagcaggcaagggtaagagaaggagagcaatggcaattcagccaataaggccacactcataactatttctggtttcacatgtgaatcagaaccatgcaaataaacaataatctaatagttattaaagatccagagtcacatggttacactatttacactatcatttattgaaaattcttctattttatccacctaatgtttctatcaaacaagatcaaagttaactgagatgttaaaaactgattttaaacccggggaagaaaaaagataaagtacccaagtatttttagaaaggagtctttttgtacattcttatacttctgacagtcaactaacttaaacaagaatacattactgtctatcaacctcaaaaatcttttgagtgatcatgcaattttataagcaggataaacaagaaaataatttggggggtggcaggctaggaatgttaactcttaaaacaggtcttacccatatgacagggtgaaaaatggctttttcatttgttaaaaaaacattttcggtcgggcacggtggctcacgcctgtaatcccagctctttgggaggctaaggtgtgcgaatcgcctgaggtcaggagttcgatatcagcctggccaacatggtgaaaccccgtctctactaaaaatacaaaattcgccgggcgtggtggcgggcgcctgtaatcctagctactcgggaggctgaggcaggagaatc

SEQ ID NO: 207191 - DNA, 1000 bp, Homo Sapiens
gactgaattactggctctgaaagatggctttatactgctgtcagaagccgtcagaccacttttgaaacgtttatttgtctatggctcttctgtgaatgatttgttataagggcacttaacactaccacatggtacacacagtgtcttcattttcaaaagtgtcccagataagtttttgattacctctaggttttatggaacctgtttgcattttcataaagaatctctaaaaataaagtacactttgttttttacatttatgtatcatccaagcgtaatataaaagactttcagttagagtgtaacagagtctcatatttactgtaaccataaatattcatatccaatctaaaagagcatagtgaactataatacaagattcctcttgctttatatcttgtttccctaatcatttttgatttggactgtcacaattgtttcctaattagactccgtgctcatagttacctccccatctatttcttacttcatggaaccaacagcctaaagtcacgggttctagtctcccctattatattgtaagctctattacttacatgatatagtatttaaatgcttggatagttacatgaaaagatatggattgtaatactgattatgtcgctctctgtgtcttattcttctcatccgtatgctgaagaggtatccaaagtccatttatgccaatgaactcttttcttctgaaattcaatgattcttactcttcatgtctacttattgtgttttagttatttcatatctttttttttttttttcagatggggtctctgtctgtcacctaggccagagtgcagtggcacgatctggactcactgcaacctctgcctccaaggttcaagcaattctcctgtctcagcctccagaatagctgggactacaggcatgtgccacaatgcctggctgatttttgtatttttagtggagacagggtttcaccatgttgaccaggctggtcttgaactcctggcctcaagtgatc

SEQ ID NO: 207192 - DNA, 1000 bp, Homo Sapiens
gcaattatagattcccatgaatacttgtttgtctttgtctattagttgacctgacgattctttttcaaggttatactttctctaggaacttaaaattttcacagaaatgttgacaacataaaaaaatgataccaaccggagggtcaattttttcatatgttcaggtaagtcagccacagcatctattaccggtcttggtaagtttgtttctatgcataatgttgggtcatgttttcaaaagtatagtgttgctttgaacaccctcccaacccccgcccatcccaactgtttttctgcagatacaggctgatttaaactgaccccagcaactgaccacaattacagaagttactgcaattagggagaaacatccatatttcaaaataacatttttctgttttcaaaagaatatcaaattcatttaactctccgtgctcccagctcgcaaaatttatttcataaaaatccaaacttaaaggaacttatctgttgtgtgagacacaaagtggtgtgggaggctaaagataaggcagcatagggctccccactgatgactacacacagccttctagaggagaactgacctggagacaacctagctgaaacccttcatttggaaaattctcttcaatatgggggggaaaaacagatgaaaaaggggagaaccatattattttggtcaaaatattgtggtccacaagcatatgctccagttagtttctttcttgaataaaggctttttattgtcatgtaaacacaagctgtgtgcacatgatcaaaatattttaaaactaaaaataatttatgaaaaaatattcttccttgatttcaacctgcctgtacttatttttaatacaaatatatctaggataaaagatactattatacaaatgcatgatcaaggaagatgtcagaaaggttaacggggtcaagaaaagctgtaacactcatagagtaatatccatacagaactattccttagtatccatgggacccagcc

SEQ ID NO: 207193 - DNA, 1000 bp, Homo Sapiens
acaaaaaaaaaattaagctagaaatcagtaacagaaagatagctgaaaagttcccagatatttggaaattaaacaatacagttctaaataactcacaggtcaaagaataagtctagaaattaaaacatattttgaactaaatgaaaattaaaatacatcttatcaaaatttgtggaatgcagtgaaagcagtgctgagggggaaaattatggcattatatgcatatattagaaatgaaagatataaaatgataccaactgcctataacctttcccagaaagtggaaaagaatgaaacaattcccaacttattttatgaggccagcattaccgtaataccaagtccagacaaaacattacaagaaaatgacaaatacctctcatgaacataggtgcaaaaattcttaacaaagtattagcaaatttaatccaacaatataaaaaataataatatatcaagaacaagtgggattcatcccaagaatgaaagtctgttctatcatttataaatcaattaatgtaattcatcatattaacagactaaatagcaaccatatgatcctattaatacatacagaaaaaagctgacaaaatctaacatccatgcatgataaaaatgtttgacaaactaggaatggaggggaatttcctcaatttgataaagaacatctattttttttttttagatggagtctcgctctgtcacccaggctggagtgcagtggcgtgatctcgtctcactgcaagctccgcctccagggttcacgccattctcctgcctcagcctcccgagtacctggactacaggtgcccgccaccatgcccggctatttttttacatttttagtagagatggggtttcactgtgttagccaggatggtctcgatctcctgacctcatgatccacccacctcggcctcccagagtgctgggattacagtcgtgagccaccgcacctggccaagaacatctatttaaaaaaaaaaacaaaaaacctaca

SEQ ID NO: 207194 - DNA, 1000 bp, Homo Sapiens
tttgatgaaatatgagtgtgtttgagatctgatccaaggttttaaaaaattcatttcaaatcctggagataaattctgaggagcttacttatgaaaaactagcaagtgatagctggtatttacagatatggtactttacacaatttatgtaattaatattttctcacagacaaggttccttgtggatatcactgaataatttttgtgtagtttctatgcccatgaagtgcctggtaggtagtaggaactcacacgttctgctatgctggttgcagcacaggacacaaaagttagaattatttcaaaggacttatactctactaggaaagagagaaacatagaaatatagtgttgtatgtggtatcttccctaagataagtacaaccaaagagctatggatgttcagagatagaatgtagtactgggatgatgtcaaggaggcagtggtacttaagctgctcaaggtagggaagcagtttacttgctagtttttcataagtaagctcttcagaatttatctccagtatttgaaatgaatttttttaaacctcagatctgaatatattcaaacacccatatttcatcaaatctaaggcatatcatatacctttaatttaaaaaaaaatgctgagcagagttgcttatgtctgggaggctgaagtgggaggattgcttgaggccaaaagtttgagaccagcctgagcaacatagcaagatcctgcctctaaaaacaaacaaacaaaaaatgctgccagttgatcattacatttatcccgacatcagatatgtcaaattgtgaaaagcaccttaattttgatgaaatatgataggtaaaaaatagcgcaaagctaagtataagtgacttttaaattatctgctcttttggattatcactactgctactagccgttagaatattggtttggataatggaaagttgactagagctacaaaatctgtttcaaaataaaagatctgctcaaacaagaatgtgatgatc

SEQ ID NO: 207195 - DNA, 1000 bp, Homo Sapiens
ttgatccacttatgaatagtttgtttcttttattacattttacgaatgcaccacagtttaaccatttacttactggagggcatttgggttgtttccagtctttggttattagaaatatagctgatatgaatattcctctacatcatggatgaatctcagaaacattatattgaggaaaataaaccaaaaataagccagatacaagaatatatatactatattatttcatttacatgaagttcagtcataggaaaaactatatggtgacagaaatcagaataggagtagctacctccgcttagaggggactgactgaaaagagacacaatgatactttcagggacatagaaatgttttatatcttgattagggtgtgggctatgtgggtacatacatttgtcaaaactcaaactgtactcttaaaatctctgcattttactatacgtaaattatgcctcaataaaagagaaataaggaagtcaccactactactcatcaaaatggctaaaattcgaaacatcaacaatacaagtgttgttggcaaagtgcctctttatgctgctggtgagaatgtaaattaggataaaatcttcggaaagctgttttacaatagctactgaagcttacttaacatgtgcacaccctatgacccagctactttactcctaattatatatacaacagaaatgtacacaaatgttcctgaagacatgtatgagaatgctcagataagcactatatgtaacagccccaagctagaaacaacccagaaatgttcatcactagtagagtagatttggctgggcatggtggctcatgcctataatcccagctctttgggaggccaaggcaggcagatcacttaagcccaggagtttgagaccagcctgggcaacatggcgaaaccccatctctaccaaaaaaaaaatacaaaaattagccgggcatggtggcatgtacctgtagtcccaactactctggaagttgaggtgggaggatc

SEQ ID NO: 207196 - DNA, 1000 bp, Homo Sapiens
agtaaacattttattttgatgaatcattgtacacgatattaaggaattttccatggggaaaatagcacagagcaactttacaaggatgcattttcaaagtgtccttagcacccccaatgaaatatattgccaaagaacaaaatactactatggtttctaatatttttggcggtttgtccttttttattaagatgggaaccaaaacagaaactaacactctgggccttctcagaacgctatccatatcacagtctcacctctgaactttgcacaatatttaaattatggcctagagagatgtttattttgtcttctactctcctggagacagacagaagacaccgctttattttcaattcttcttagggtacagagagggaagagtgagctgaaattccaaccccttgcaaagccagagatggttcctttagacccaacagtagattagaagacattcacactccttgggtaagcttctatctcaaatacagactttgttcctatatattggctattgcccttttataagatactactctaagtattggctcacatttccatatacataaagtagtaggctgattccaacgcaggccacagcagttcctctcatccctggatgctcagcaatttgcactgtgactttgccactccttccttcaataagtggagtctttttctccacccccatgaatctgggctggccggtgacttgcttcgaccttatggaattggtagcagagacattttgggagttctgagcctattcaaaaggctttgaagtattcactctcattctctacccatacagagaaggctgaaagcctaaatttcctggaagcttgaaacatatagaggcctgtgaaccataccacaaccagaactactgagcactagatgaggctaggcaggtcctcccaccgccccgccccactcccacccacctgcaaagctcacctggtaaatactgagttaccatctggatctgacacacaggatc

SEQ ID NO: 207197 - DNA, 1000 bp, Homo Sapiens
ttatccagaacatatggagatttgaagttgtctcaaacacacttttagggccactgtcatttgcagtctcaagcagttgatcctcttctagcacagacaaaggtgattcgcgtggcttatccacaaatgggtcacagatccattccttcccagtttggggttctttggtggttgggaagtaacgctcaagctcttttgaaagctgaggtaggggccgggcgcggtggctcacgcctgtaatcccagcactttgggaggtggaggcagcagatcacctgaggtcaggagttcagtaccagcctgaccaacatggagaaaccccgtctctactaaaaatacaaaattagttgggtgtagtggcgcatgcctgtaatcccagatacttgggaggctgaggcaggagaactgcttgaacctgggaggcggaggttgcggtgagccaagatcgtgccattgcacttcagcctgggtaacaagagcgaaactccatctcaaaaaaaagaaaaaaaaaaaaaaagaaaaaagagagctgaggtaggtgatcatgcaccagctggaagagggaaggccctggctctatctctttcaaaatctctgctaatgtttgaaacatgtcaaaaatcccagtgttccctcgtcacccccataattccaatttggctttgaatgcagccactttatctgccgacttgaacacagttgtcattcttccctgaagtgacagattgagtttgttgagcaggttgaatacgtcgcacaagtcagcaagttttgcgactcatcctatgtcactgaaatatgctgctagtggggactatttttctaaaagaaatctctggagcagctctcataactcagaaactctggccagtgatctacctttggaaagcatctcacttctgtgtatcagagaagacgtgtgtgtaccgcgtccatctcctcacagagccgcgagaacagacctcgtgagttaaaggcatgcactttgctgtggctgatc

SEQ ID NO: 207198 - DNA, 1000 bp, Homo Sapiens
ttattttttcaaaccttgaaaaactcactttatacttcttagaaccagccttctcatatgtgacacaaggaaaattcccatattacacctaacttaaaacattgagaggatcaaataaaatgcaagagcagtctatttactacataatgcacaatcaattacaaagcaaagcttctgagtgaaaagtaaacagttaacatcctttggaaaacccatagcaaaataacattttgagaaaacacgcactttggctacccactgaagttaaggagaaaacagtcacaggtcagcatcaagaattccccagcgttgtttttttgtttgttttaataatcacacattattccccctgctttctttcatgtatgttaccgcatgttctccctttttgcttttctgtgtaacctatcttgggaatcactccatagcagtaaaatgacatcttacccttgtttacagctccatagttctcctttaggtggaagtaccagttaattttactagtcccttactagacatttcagttatttccaatattgagctattgaaaataatgcaacaaggactttgtgcataggttgtttcatatttatggagtataccctcgagataaaatgcctcaaagtaggatttctggcttaaatgcatttgcaattgtgacaaattccccttcgtggagtcgagccattttgcatttccaccagcaatatatgcatgcaactttccttacagccaaaccaaagaatgtattgccacgtttttggaattccactcagtaggagagacactgcagtatagttgtcatttgcctttctcttatgtgtgaagatgtgtttaaggatcgtttgcatttctttttctgtgacttctctatttatcactttattacctacttttaggatcacttgactctagagattctcaagtcagcctatttcaggtcatgatcgtctgtctgttcactgttgactctcacctgcacttcgccaccagcctccta

SEQ ID NO: 207199 - DNA, 1000 bp, Homo Sapiens
tatttgggaggctgaggcaggagaatatagcaagaaaagtttgtcctgagactacagcaagaaaagaaaagaactgacttctaaagaaaatagtttagtccatttcagagtttaaatgtcggtcatcaagtgtaatgagctaggatcaggtttctgacttaggaatcatacacgtattccataagttttagtgtagttttaagcttaaaacttaacttaaaagcagtaacttaaaagcagttactgttgccattttcaaacatatgtacttaaacaacaacagggaaactaaaaatgtgttatcaaatcacaaaactgaagtgtaatgaaatttaaccaattaaacttcaaaaaagaatatttattttaaaccaagaatcattgttttaatggatacatatcatatttctttgattctgagatacattttttcacattttaacagctctgaaattgggagacattttaccatcaatggtgcatcatagtttaattgggagcactttttctttcttagtggtacataaaataatggcttgcgttacatcaatagcatcttaagatacaatatgtcatttcttttataaaagagaacaagataaagattaatttctttttttttttttgagatggagtctcgctctgtcgcccaggctggagtgcagtggcgatatcttggctcactgcaagctccacctcccggattcatgccattcccctgcctcagcctcccgagtagctgggactacaggcgcccgccaccacacccagctaattttttgtatttttagtagagatggagtttcaccgtgttagccagcatggtctcgatctcctgacctcgtgatccacccgcctcagcctccctaatttctaaactcctttatatactatcagaaaatctggcttttttttttcttttcctgataagtctgacaagtaggaaggctgtttatgtgtccacttgtaagtccaatatggctgagatggggttaagctt

SEQ ID NO: 207200 - DNA, 1000 bp, Homo Sapiens
ctggtggtatgctttaatttcttaatttttttttgtatctgttgtttatttttttgatttgaggttaccatgaggcttgcaaatactatcttataacccattattttcagagtgataaagtcttaacactctttatctaaacaaacaagaataaagtaaactaaaaaacactctacaccttaaattaatctcgtctttttaatctttcaatttctatttatatctcactgtagtgtctttgacttgaaaagttgtagttctttttgattggttcatctttaagtctttctatttaagatggggaagtttacaagccacatttattgtgttataatattttgaattttcctttgtgcttattattatcagtgagtattgtaaggtcagatgatttctttttttttttgagatggagtctcgctctgtcacccaggcgggagtgcagtggcacaatctccactcactgcaagcttcaccccccaggttcatgccattctcctgcctcagtctcccgagtagctgggactactggcaccagccaccatgcccggttaatttttttgaatttttagtagagatggggtttcaccgtgtttgccaggatggtcttgatctcctgacctcgtgatctgcccacctcagcctcccaaagtgctgggattacaggctgagctgctgtgactgacctccagatgatttcttattgctcactaacgtactttctttctgattgaagtacttcctttagcatttgatgtagggtaagtgtggtgttggtaaaattcctcagcttttgtttgtctgggaaaatctttatttcttcattatgtttgaagaatttttttttggttaaccatttctttttttcccccaaagctctttacgtatgtcatgtcactcttttgttgcttgcaaggtgtccactgaaaagtctgctgccaggtgtattgtggcgctactgtatattatttgtttcttttgtcttgttgcttttaggatc

SEQ ID NO: 207201 - DNA, 1000 bp, Homo Sapiens
tatagtcccagctacttgagagactgaggcagtagaattgcttgaactcaggaggcagaggttgcagtgagccaagatgacaagatggcgccactacactccagcttgggcgacagagcaagactccatctccccgccacaaagaaggaatgtatttgaaacacacaagaatttccacttcccttataacctatcctgcccatcctcgagagacaaaaactaaccaggactcctgatattgtttctgttcatatctgtatgtcctaaaacaaggacatatctgatgaccaaatcagaagggggacctgggatggggaaagccctcctaccagtatttcatgatcagttgagacatcaggcataaatcctggggctggagttcgcagagttgctggccttgactacatctccaatggctgatatgagatcaggtaaggcgtgggcatcagagtaatcaatttgagtatttttcaactccagccataactatgacaaattcaacctcaaccttagcattcatgcctctctgggtcttaagtgatgggacgaaagtgcaaatgaaagaagagggtggctcccaaaggcatatacgtgggaaagaaaagtgccagtggaaggagaaagttatggcttttgtttgatctcatcagtgatatgtcttacttataaggcttaaggaaaaagtaaacaaatatgagcacaaggattgggtttactttcaaatcagctgactactctccttctatgaagctgggtcatttattgctgaaatccaaacccatctctggtggcctatattccagcagtggggatccacaacattattgaaggccaaacagagcaagtactctaccatgttttaagaattttttttcccgtaaacatggggagctgtatgggaagtaactattcatatacacatatcggtgagtacagtaacttctgaaatgcgacaagagaaaagagaaatctaagcatgcatttgaaaatagcaacctgt

SEQ ID NO: 207202 - DNA, 1000 bp, Homo Sapiens
aaacccctctctactaaaaatacaaaaattagccaggcgtggtggcaagtagtgcctgtaatcccagctacttgggaggctgaggcacgagaatcacttgaaccaggaggcggaggttgcagtgagccgagatcgtgccactgcactccagcctgggcgacagagtgagacgcagtctcaaaaaaaaaaaaaaaaaaagacacgcttattgtttataaactaaaacagtatagaagtgtataaactaggctgggcgcggtggctcacgcttgtaatctcagcactttgggaggccgaggcaggcggatcacgaggtcaggagatcgagaccacggtgaaaccctgtctctactaaaaatacaaaaaattagccgggcgtggtggtgggcgcctgtagtcccagctactcggagaggttgaggcaggagaacggcgtgaacccgggaggcggagcttgcagtgagccgagattgcgccactgcactccagcctgggcgacagagtaagactctgtctcaaaaaaaaaaacaaaaaaaaaaccaaacaaacaaacaaaaagaagtgtataaagtaaaaaataacagtgcactgtgacccaaatccatttctcagagaaaatcattactatgaacatggagtgtccacacatgtacacgcactcacgggccacttcaccagcttggagaacaaccctagccacagtgcttgcggttgcttttttaaccaatctctcctgcatcctcattcatttattgttaagaagcccagcatctccctcttgaggtctcttccagaatagtctgggaatcccaaggactcactctgtccaaagaaggccagtcctactctgcaaggcctagtggtgcactgcgtgggccccgaggcagtcctctcagttcactccaggagctcagctccctgaaaggaaaatgatgccaagccaggcgcagtggctcacacctttaatcttagcaatttgggaggctgaggcaggtggatc

SEQ ID NO: 207203 - DNA, 1000 bp, Homo Sapiens
ggttccccacttcattcctgggacacaccagtccagattcgccttgatgggggagttgtgagcactggcgtgtcgtttggggagggggagcagttatgaaagatccagacatggagcccagcagaaggatggaggggagagcccccacccccaggagctgcagctctgagggggttttcagtctaaggagtgctaaggggagccgctctgggtcctaggaaggtttgaaagaggggtcccagcccaggaggaagagagaggttactggaagagatgacgacaggaagctgccagagatctctgggtagagaaaggtgggaagggcgttgtgggccaagggaatggcatgagcaaaggctcagaggtgtgagtgtctggcgtgtgttgagaggtggcagtgggaacagtcaggcactgtgggtgccccctggaagaagtgagatgaaaacggggcagaggctgggcagggaggccaggtggaggtgaggtgggagggcacagcagggagctggcacttggtcctgaggacggcagggagccaagacctggctggggggatgccgctggctcagacccattctaagggtctgcctggtgcccttggtgtggtcagggctacttgaggcacactggtgattcctttttcttttcttttcttttctttttttttttttttttttgagatggagcctcactctgtcgcccaggctggagtgcagtggtgccatcctggctcactgcaacctctacctcctgggttcaagcaattgtcccacctcggcctcccgagtagctgggaccacaggtgcccgacaccacacccggctaatttttgtatttttagtagagatggggtttcaccaggttggccaggctggtctcgaactcctgacctcaagtgatccacccaccttggcctcctaaagtgctgggattacaggcgtgagccacctcgcccaaccctgatgatttctttttctgtagtaactggaccacctca

SEQ ID NO: 207204 - DNA, 1000 bp, Homo Sapiens
gttgcccaggctagaatgtggaagcttgtcacatcatgataatcaactaattaatttctgtgtaaagaaactgatatcactctgtcaaaaatatgttgcatgatacaaagtatgtaaaattgatttttgttacctgtacagtttataatgccttcgtaagtttaattaaaagctattcatatacgatgttgaattccagtagcatgagcgcatatctgtatttgtcttgtactgtgggaattatgtgaatgccctagttcaaagagatgccttgactctggatatattagggttctctagagagacagaaccaacagaatatatatttgtatggatacatgagagaggatttagtaggagaattggctcctgtgattatgaaggccgagaagtcccacaatagcccgtctgcaagtcggagaaccagagaagctcaggcgtgtctcagcccaagttgagaggcttaagaaccaaggaagccagtggtgtaactttcagtccaaggctgaaggcctgagagccccaagaggctgctggtgcaaatcccagagtccaaaggctgaagatcgtggagttctgatgttcaagagcaggaggaggagggaatcccatcctggaagagacagagaatgcacccttcttctacagggtttttccattcaggcccctagccaatgggatagtgcctgcccacattgagggcaatagtctcactccccgacttacctgtcagtctcctctggaaacaccctcccaggcacacccagaagcaatgcttcaccagccatctagggatctctcaacacagtcaagttgatacctaaaattaaccatcacagtggatatgttatgtcattaaccaaagaatgtccatagaaccaagtagattggaatatacactctatcatatgccaccttaatcactgggtcaaattcttttttgggggaaagaggttaaaattgtttttccatagtctttgttttccagcaccctaagatc

SEQ ID NO: 207205 - DNA, 1000 bp, Homo Sapiens
attagtttagggatatccttgtgctcagatttcttctctgaatctcccttgaggaccaaaggtgaataaaggttttgattttgcccccttgtctgacattcagaaattgctagagatgtgtcccagccagcaatttcctaccttgactttgctccttgaaaactgctgattgttggacaccagtctttcttgtgttgcatgacctctgggatataaccctagcctgtgtggacacctaatactaatatgctcattagtttccttaggatatttggttcattcattcttctttttgcttactataggttgaagtatagggaggcaattagagatgaagaacaatagcaatgggaacattgggcccattggaataaaatcactagagtagttataatagaaacttctatgattgccctgaggtttgcaagaaggatggaggctgctataaggactgtagtcagaatgaaccagcaacaaagtagtcatcaagccctggtaaaacaaaatactcattggattaacagataacataatgttggaagttggctagttctacaataagaagttgtggggactgtgcaaactggagagcaccaatgcaattgaagagcattcacatacataattcagaataatatcatgcaggccaaacaaaacatgtctggacttcaggtccacattttgtgacttctgaattctgtgtgactaataactgtgaaattgattagaggccaagatccagagtagggaaaatgtggtaagatgactgtatggtactgtggatagctgaaaggtgagaaaggattcttaatgctcagatgaagaaaaactcaggaaaaaattctcagagaagatgcctggcatgttgtcagggtactctgatgctaccttagggccagtctctagcaccttgtttactgctaggtttctgggaacagtttacaaaagaacaatacatcctttcctcactgaaacttacacaggagagatttaggggatc

SEQ ID NO: 207206 - DNA, 1000 bp, Homo Sapiens
tctgtggtcctaactactggggaggttgaggcaggaggatggttgagttcgggaagttgaggctgcagtgagccatgattgtgccactgtactccagcctgggtgacagagtgagaccatgtctcaagaaaaaccacacaaacccccataaattctctgtggctgggccccacccacactaattatgtcagaatcctttggggagagagctcacacacaacttcaagctaatacatctttcagggagaacatattctggggatggttacccttagcaggaatttggagggtgagatttctgaggtccagtttcaaagtgataccctaaatccctgcttctgaaacttcaatgtgcattgaaattttccagagtcttattgaaagtgcagactctgattctgtacgcttgtttggttagacctggcatttctaacaagcggccaggtaatttgcctgcacccattgagtggcaaagccctaggtgatacgtggaattaagtactgtgacatttgagaagtgtttccttagagcgtgaccccaaccctggctgcacattaatatcacctgggtaacttaaaaaaaataccagtgccaggtctctccccctggagtcctcctgattcagttggtttggggtggttccccagcggcagtaatttaaagaaagttctctaggtgattctaatgtgcagctacggttaagaatgtctgctctagaggcttgctgtttttttttgtttgtttttagcttgagatcaatgctgctcagtagaaatataatgcatgtgaattacttacctgtgactctgtgataaattacccagggcttaattattcacaccgtttctgaggatcaggaatccaggagcagcttatctaggtggttccaactcaagatcctgcccgaggtttttgtcaggatgtaggctgggctgtgattaccagagactggactggggccagtgaatctgcttccaagaagtttccctaacatggctg

SEQ ID NO: 207207 - DNA, 1000 bp, Homo Sapiens
gcttagttgttttttgttttttttttttttttttttgagacagagtctcactctgtcacccaggctgaagtgcagtggtgtgatctcggttccctgcaacatccgcctcccgggttcaagtaatcctcccgcctcagcctcccaagtagctgggactacaggcacacgccaccatgcccagctaatttttgtatttttaatagagatggggtttcaccatgttggccaggctagtcttgagctcctgacctcaggtgatctgcctgccttggccccccaaagtgctgggattacaggtgtgagccaccgtgtccacccatacctggcttagttctaacaacagacccctgctgtgggtcctgttggctgcattttacagataagtacctgaggcttgagggtcacccatctggcaagtgacaaaaaggctggattctattccaggtcaccatgaccttacccagcccctaactctgagtggccgacctttgggctatgttttgttgtatttgggatttcattcagtttcattgtaggagtcctggaaacgagatgggggagcctgagctttgatctcttcctgtggtaggtggctgcagaaactgctgccgctctttctcaggagtgtcccaggatgatcaagctggaaccacctcagtgatgaatatggccatccccttgtccacataggggaaactgaggcccagagaagggaagcaacttgcctgaggttacaaggttggtcagtggagctggggctctcctggtgccctcctccattggctttctatctcaccctcccttgctggcctctgtgcagtctccacacattggaagaccccaatctgtgtctcctggacctcttttcttcattgcattcccccagtgacccaatcctgagatcctaattaccatctacatgcccacaagtctcaagatctctagcccatcccacctctgaattccaacctatcagtccagttgccttcttggcctctca

SEQ ID NO: 207208 - DNA, 1000 bp, Homo Sapiens
gcactagttagagctttcagaacaatgttgagtgacatttaatagagggtatttgctatcttgttgctaatgttaatgaaaataacttgggcattttttatttgaatgtgaaaggtgtttattcattaatctattcaataaacatttattgaatacctaccccttgccagacattggctttgcaaccctgcttggcacttactagctatgattttttttttctaacagctttattgtatcattcatctaccataaaattcacccatttaaagcttacagttcagcagttcttagcatattcactgaattgtgcaaccatcatcacaatctaattttagagtattttatcatcccaaaaggaaacatcgtacccattagcaatcattcctcattcccaaccctcacccctagccacaggcaaccactaatttacttcctgtctctatagattggtctattctagacattttatataaatggaatcataaaacgtggtcttttatgattgccttatttatttattttagacagagtctcactctgtcgcccaggctggagtgcagtggccggatctcagttcactgcagctgccgcctcctgggttcaagcaattctccctgcctcagcctcccaagtagctgcgattacaggcgcctgccaccacgcccggctagcttttgtatttttagtagagacattggccaggctggtcttgaactcctgacctcaggtgatccgcccacctcagcctcccaaagtactgggactacaggcatgatccactgtgtccggccatgattgttttctttaacttagcctaatgttttcaaagctcatccgtgttatagtatgtattaggaccttattccttttattattttgtttgttgtggtacgaacacttaacatgaaagccaccctcttaaatttggtttgtttgttttgttttgttgtgacagagtctcgctctgtcacccaggctggagtgcagtggcatgatc

SEQ ID NO: 207209 - DNA, 1000 bp, Homo Sapiens
tggatataggttttctcttggatggacacctagaaggggaattgctaggtcatattgtaagtttacatttaactttttttttttttttttgagaacagtgtcttactctgtcacccaggctagagtgcagtggtgcgatctcagcttactgcaacctccacctccagggttcaagcgattctcctgcctcagcctcccgagtagcggggattacagcgcctgccactgcgcctggctagtttttgtatttttagtagagatggagtttcactatcttggtcagactggtctctaactcctgaccttgtgatccacccgcctcggcctcccagagtgctgggattacaggcatgagccaccgtgcccagccaacatttaaccttttaagatactgtgaaacgtttttcaaaaatggctgcagcattttacattcccataaaatatgagggttccagtttcttcacaacctcagcaatatttcttactgcctctttttttttttttttttttttaaagaggccgggccttactcttgtcacctaggctggagtgcagtaacttgatgatagccttgaactcctgggctcaagccatcctcctgcctcagcctcctgagaagctaggactacaggcatgcaccaccatgtccagccaattacgtttttttttttttttttttttttttttttttttttttttttttttgtggagatgggggggtctcactgtattgcccaggctggtctagaattcctgccctcaagtgaccctcctgccttggcctcccaaagtgctgggattacaggtgtgagccactatgcctggcctgtcttttttttttttttttttttaaagacggagtcttgctctggtgccaggctggagtgcagtggcatgatcttggctcactacaacctccgcctcccgggttcaagtgattctcctgcctcagcctccgaggtagctgggattacaggtgcgtaccaccacgcccagctaa

SEQ ID NO: 207210 - DNA, 1000 bp, Homo Sapiens
tcaaaaggcacacacacacacaaacgcaacccaaacgtcagttcaagaaaaattcagcacatgatatccaagtctaaaatggtaaacaacatgcactgatacacttcaatctagagtatggtttggcttctactcaaaagtcaaactcagcatgactgaaaggtcagaaaacgacccaatgcaagataagagaaaaatgcatctttcagttatgtcattttgctacaattgcacccacctttcagatttgttttgacgaatacatccttcaatgatttctttgacttcaggatcagtgactttattgaagctggctggttttatgccctaggagaaaaaaatggtttctagtaacaatgatgcaattgaaagcccaagtcaacatgacatttattaaacattatttttatcactaaaccatagtcaagttttaaatgaaatatttaaatatacatgtgtatatatagagaacataagtttaataaccttttgacaaggatgttgtctacaaataacagtaaaaaaaccttaaataatctaaacttctgacaacagaggcaaagttacacatattatgttatatatatagtatgattttcaaatctagatctgcaggtatatatgacaatatacagaaattaaaaatgttctcagaataattaatgacatgggaaattctcataatgtactattaagtagggaaaaataggatccccaaatctacatacagtataatcccaattaacaatatataataaacaagtttatttatttatttattttgagatggagtctcgctctgtcgcccaggctggagtgcagtggcgtgattttggctcactgcaacctcccacctccctggttcaagcaattcccctgcctcagcctcctgagtagctgggattacaggcgcacgccaccaagcccggctaatttttctgtatttttagtagagacggggtttcaccatgttggcctgactggtctcaaactcctgatc

SEQ ID NO: 207211 - DNA, 1000 bp, Homo Sapiens
cctcccaaagtactgggattacaggtgtgagtcactgcacccggcctatcccataaaaataagcacataataatatgtgcttattttatatgtgcatattattatgtgcttatttttctatctgaagttgactgtcaatttgtctagatccagaaaaagagcttgttggtatttttattgaaattgcaagggtggggggggggggatgagggataacagattacttaatgggtacaacgtacactgggtacctgggtgatggttacactgaaatccgagacttcactacataatatatccgagtaacagaaaaaaaaaagaaactgcatttatgaatgtgaaggacaacttgctttccctgtcttatcaaagaataagtgatatctctttatttgttcaagtttattttgtgtctttcaggaatctttgaatgttttataattttctccacataggtttttgtatatttcttataaatttattcccagatattttatcacttgttttttttttgcaaatggaaacagcatgttctcttctaatatgtcttctagtggctgctatctggcatatgaaggctgctgatttctgtatgttaacttctttcccaatttgtatacctataattattttatttaactgaactggttagaacctttaatgcagtgttaaatagagataaatgatactgggcatccggcctgtttctgacctcaatgggaatgcctccagtattgccccattaagtaatatttatcctgcttttccagtgacttccaacataaacactttttgatattcatggagcccctcctcccttactgagtccatgacttctttctttctctcctttcctcatcatccaccttcagtttcatgctccatctgtttaaaaaaatattcttaaaaaaaaaaaaaaaaaaaaaaaagaagctttagaccaggcgcagtagctcacgtctattataccagcactttgggaggccaaggtaggcggatc

SEQ ID NO: 207212 - DNA, 1000 bp, Homo Sapiens
gctatttatagtaatcccctctttgcatgttagtaggttaattacccaaatgtgcacctctagacaatattgtatagtttggcttactaaaaattttttatataccttttaactctcttttaatattagaaactgttaccaaatatatgcttagatttctcttcccagacaaagcacattgttagctgttcctaccactacatgctcttttattaccatgctttttcttgttgctctccctggacacaccatgatttgtcaagtgctgcaaattagtgagtataaaagtaagcacgatactccacttatgcaacactactgaagagaatagtgaatgtctatgatctgcataattttctaaaatatacgttggttatttttagcaggtataagacattactggctctctttaaactttggatcacgtaaagccctaggcattcttattagaaatgctgccaagtcaggcatgacaatttatgtagtttaatgttgtgaactcaaatacaggacttttcatttaatactttttaacattttcatattgatttaagctttggatctcaaaccagatattttaatttcaatttaaaagtgaatgtgttatttgaaatgagacttacaacactccagctgaagaaatagatggcaaaaaagaggcatgctacattttaatcgaaactcagtttttcatttttcatagtatggacttcagagcccaataatcgcgcataacttaacattttgctttctccagtgaaatctgagacaaatgaaccaaacatatttcaacataatttatgatattgagagaaaattagaagcacaaaatttcaaaactgtctaaaattttataaaaagtaaaaatatatggatcttttattataaagcatgaggtatattgctgtagtcatacaaaattcaagatgaaaggacgaaataaaaataggtaagaccctagactggttcagaccgcctgtgatttttgttacaattgatc

SEQ ID NO: 207213 - DNA, 1000 bp, Homo Sapiens
ggctctctcagccttggcatcgcagagatggggaacaccaggcttttcgtctgcatgaacaaagctgtgggcatcccaccaggaggttgcgtctggcttgcttgcctctgtccagggaacctggccagccctggtacctagtaacctgtgtcaaatcacattttattctctttctgtaagaattattgtctgcagttttccccatcactaccaccaccaatccattatcccttcggtggagttgtagtcaggagagggctgacatttgtctggctttgtgtggcggtcacgcgccttgcaagtaggaggtggccaatacttgatttaaaacgagagagcacttctgcttctggccaaaatggagtaacaggcttctttaccacacctgcagcaactgaaataatcagacagaatacatgaaacagtggcttccaagaccccgacatcaggcaaaattaaatgcggtgatcccagagagaaaggaaacaagcaaggtgagcccctctaattgccccacatttctgccttgagagagggagatttctcccccggccatggtgcaggcagggggaagccagacagatcccagaagactcccaagttccacaggtggggctgggagtccaggaagatcaaggcagctggagttcactggacagagtttcagagaaaagagagttatgcagggagggaagtgagagacgtgcaggggtgcctttccagtgtcccccagaatacagatcactgcaaatatgggaggaaaataattgaggcttgtggagagaatcatcctaaaggattaaaaagaacaggccgggcacagtggctcacgccagttatcccaacattttgggaggctgaggcaggcagatcacgaggtcaggagattgagaccatcctggccaacatggtgaaaccccatctctactaaaagtacaggccgggcgtggtggctcatgcctgtaatcccagcactttgggaggccgaggcgggaggatc

SEQ ID NO: 207214 - DNA, 1000 bp, Homo Sapiens
acggcagtgaggtgctgcccccaacagaagccaggccctgaggctggagaccctcaccccgactgtgatgggggaggctggagaccctcaccccgactgtgatgggggaggctggagaccctcaccccgactgtgatgggggaggctggagaccctcaccccgactgtgatgggggcaaatctggcatcccagctgcccccatgcagggtgagtggtgccacggcagacacccatgctgggctccccacagacctccgtgcagcgcagggggctgacatgggccatgttgatgcagagcaacaggtccagcgactgtggcaggatcccgccccagtgctcccagccccacgtcacgtccaggtgtagcggggccttcacgttggtcaggccctgggcttgcgtggtggccgcgatgctgcaggaggcgaacgcttgggtgggggccgagtcctgtgcacccgcctttccgacgcccccacagaatttcttaggggaggctggggggcacgttgaggagcggagaccaaagcggctgggaagggggaccccgaggtccacccacttccgcagccgcgggggccgcacagctagggcctgccccgggggcacccccaggctcccaccccgcaccctcagagcccgagccgcatccttttcctccggggctgcgggccgtgggctcttgaggccccggaccgccgcaccgatagaagtggccgccccgggggccgcacctgtccaggcagcgctggtccacgtccgacggctgccactcggccagggggaaggcccgcgcgaagtgcgctgcgtgctggccggagcccgaggccacctcgaggacgcggacgccacgctgggccggatccaggtactgccgcagcacgtgcaagatgggatccttgttccgctccgcggccgccgccaccagcatcgcggcagcaacaactccccgccgcggacgcggcgcgggtcgcgtcgggggcggtggccgggcttccg

SEQ ID NO: 207215 - DNA, 1000 bp, Homo Sapiens
tgggaccccttaactttctaactttgtctaccagtggcctagaaagactagggaagtgttgggagtttctgtgacttcattttgtaaactctgactagcatcacccctagacacagcaagaggggcccctgcccttaacctggcttgtcacaaataaatgccaaaatgcgtttataaaataacacacagatacctttgttacttggaatccagcatacaggctggcattgtatgacttacaaacttaaacatccactcctggaaataacacctattagaccccagggaaacacttcacatcacttgctctatgtctacaaaacaaaaggcaaccgaatacaaatgccataaagctttatggtttctgcagctgttgaagtaggagaaagaccttgctttggaatgtggggaggattccaaacagcagaaacagataaaagacaaaataattagcttgtcaaataagttcttcctctcagtgtgaatgcaatagcttttggcttaatagagtatcttttcctagtgtcaagcattttcttgcttttcttaggacaccagagatgcccacaaattaggatgaaatttcagatgggtagctgaggaacattttgcaaaactgagcaattttatattattcttaaatgtttgtatagatgtaacaaagtatgatactgattcttcacatttgtagcaaaagggacatggaatgttaaaattgcagatagttttttttgtttgtttattttcttgagtctcactctgtcacccagtctgaagcacagtggcgtgatcttggctcactgcaacctccacctcccaggttcaagcaattctcctgcctcagcctcccgagtagctcggattataggcgtgtgccaccatgcctggctaatttttggattttttagcagacacagggtttcaccatgttggccagtctggtcttgaactcctgacctcaggtgatctatccacctcagcctcccaaagtgctgggatc

SEQ ID NO: 207216 - DNA, 1000 bp, Homo Sapiens
gcaaagaggagctactctctccagggcctcctctctgctgagaactgaacactcaatggataacctgcctacagagaggagctacccactgcggatctcctctgagctgttgtaacactcaataaagctcatctttgtcttgtttacccttcacttgtctgcatacctcattcttcctggatgcattcttactgggtgcaggaaaagaacttgggcaaaagatgccatggccacagaggtttccggccagaaaattgacaccccaaagatcccataacaccaagacaatttatagggaaacaatagtcttttcaacaaatggtactccaggcacagtgagatgtacctatagtcccagctacttaggaggttgaggtgggacgatctctggagcccaggagtttgaggccagtctgggcagcataacaagaccccgtctcaaagaaataaacaaacaacaacaaaatccaaatggtgttgggacaacaacccatatgcaaaaaaatgaagatagactcttaactaaaatgtatgtaaaaattaacttcaaatggatcaaagatctaaatttaacaattaaaactaaaaagcctttagaagaaaacataagtgtgacacccaaagcaaaagcactagcaacaaaaagaaaagtagataaattgaacttcatcaaaattcaaaacttttgtacttcaaagtacactatcaataaagtaaaaggacaacctacagaatgggatacgatatttgcaaatcatatatctgataaggaacttacatctagaatatacaaatgactcctaggccaaggcaggagcccaggaatccaggaccagcctgggcaacatagtgagggcctgtctctacaaaaaataaaataaaataaaaattaaaaaattagccaggtgtggtgacatgtgcctgtggtctcagctactcaggaggctgaggtgggaggatcaattgaacccaggagttcaaggctgtgtgagctatgatc

SEQ ID NO: 207217 - DNA, 1000 bp, Homo Sapiens
attagtgatgctgagcattttttcagatgttcattggccatttgtatatcttcttttgagaattgtctattcatgtccttagcccactttttgatgggcttgtttgtttttttcttgttaatttgtttgagcttgttgtacattctggatattagtcctttgtcagatgtatagattgtgaaggttttctcccgctctgtgggttgtctttttacactgctgactgttccttttgccgtgcaaaactctttagtttaattaagtctgaactatttatatttgtttttattgcatttgcttttgggttcttgatcatgcagtccttgcctgagccaatgtctagaggggtttttccactattatcttctagaatttttacagtttcaggtcttagatttaagtctttaatccatcttgagttgatttttgtgtaaggtgagagatgaggatccagtttcattctcctacatgtggctagccaattatcccagcaccatttgttgaaaagggtgtcctttccccatttttgtttgttttgtcaaagatcagttggctgtaagtatttgggtttatttataggttctcaattcggttccattggcctgtatgcctattttaataccagtaccatgctgttttggtgactatggccttacagtatagtttgaaatcaggtggtatgatgcctccagatttgttctttttgcttagtcttgcttcggctatgcaggctctttcttggttccatatgaattttagaaatatttggcattggtgtttcttttctttcttttactttttttttttttttttttttttttggagacaaggtctcactttgtcacccaggctagagtccggtggcacaattatagctcactgcaatctcaaactcctgggctcaagcaatcctccagcctcagcctctcaagtagctggggactacaggcatgtgccaccacacttagctaacgtttgtattttttgtagagacaggatc

SEQ ID NO: 207218 - DNA, 1000 bp, Homo Sapiens
gacgatctcataaggccgagtcctgggtgtcatatagtgtgacttctgctgcattttattaatcaaaaacaaaacaaaacaaaacgtcattgggccagcccagattcaaggggaaggaaaataaacttcacctctcaatatgaagagtggcaaagagaaactgtgtcaaagtttctttcttttcttttcttttctttttttttttcttggagacagaatcgtgctgtgtcgctcaggctggagtccagtggctggatcatagctcactgcagcctcaacctccttggctcaagtcatggtcccacctcagcctctcgagtagctaggacaacaggcacccagcactactacacctggctaaaactttctatttcactaaaatataaaataatttttcaaactgtatccaactgtactgaatttatctatgatcttttttttaaatctgaacatttacaggagaagaacattaaggactcctaatacgagatcagacaaacagtgttggcctcttaactaaattgtttccgagcatggtaacatcgggcaaggcatttaatattctaagccttaactatctttttttttcttttttctttttgagacagagtcttgctctgtcacccaggctggagtgcagtggcgccatcttggctcactgcaagctccgcctcccaggttcacgccattctcctgcctcagcctcctgagtagctgggattacaggcgcctgccaccacgccccgctaattttcggtatttttagtagagatgggtgtcaccgtgttagccaggatggactcgatctcctgacctcgtgatccgcccacctcagcctcccaaagtgctgggattataggcgtgagccactgtgcctggcctctaagccttaactttctaaggcttatctgtaaaatggatttaataataatacctcaggctgggcacggtggctcatgcctgtaatcctgacactttgggaggctgaagtgggtggatc

SEQ ID NO: 207219 - DNA, 1000 bp, Homo Sapiens
ttacccaacagattaaattcaaaatgtgggagcacgtagattgttgtgaagatttacaacacaagcagggaaaaaaattttaaaacctgtgtaaaatgttggcacatgatggatgggatacaattaatatagtataagctgctctatagataggagtagggaaaggaacaacaggggatgaagctgggcctgtaaaacagagaccagatactggagatctttgtaagcctgtgtttttcacactggagtactgggtggtataccaaggtgtacatctctttggtgtctctatttataatttgaggtttggggaaggtcattttatgttaaataatatatattgggtaattaaatgtgatatttgcctgcgaattttgggtaacaaaaagttcaaagaatttttttgttgttgctgtggtgggctttttgatgactaggggtaaattttgaagactgttgttagtacccaacccatggatggcagatgaactcttctttgccaactgggaataggaacgcatttttgcaagtgtttgggaaatataataggctctaaaggatgcagagccattgaaaagttttttttttttttcaattactgtatttatttttgaactctggacctctggttatccacctacctcggcctcccaaagtgctgggattataggcgtgagccaccgtaccggccttatttttaaattttttgtataacagctatattgagatataactcacaaaccacacagttcaccatttacagtatacaatttagcagtttttagtataatcatagaggattaccaccactttaaaaaatgttttatttgaaatgtatgtacaaagaagtgcacattatcaataagtagacatcttgatgaaaacgtagggcacccagatcaaggaacaagatgttgattactaacacccaagaatcacaatctcagcatgaccacttttttccctattgaaagattttaatcaaagatatcatatgatc

SEQ ID NO: 207220 - DNA, 1000 bp, Homo Sapiens
tccatctctaccaaaaatagtaataattatatttattatgatagataataataacatttattatattactatgttgaaataaaaatttttggataattaaaataaatgatatattattaaaactaatgtcacctatttctttttattatttaatatggctataagaaaatataaaattctataggtggttctcataattctaatatattcaatgccaagaggctcccctccttccacggtgagaaaaacaagggatggggaacaagcctcatcctgaagccatcatcagttcctatacccagcatcactgagcataccagattaagctgtcttcagcagggtggggaacaaagactttgggccaagggacttttgatggttgggttaggagagaaagaagaggaaggtgtagacaggtaggagaataccccaaggcctggaatattttcaggatagctagttgggtgctaatttaagagggagggccttaggcatgaatatcttgggttcctgggaggaatgcatatattataaatgagaaagaggcaactgagcagaagatggaaaaaatcctaaaaagaagctttaggatagagtgtaggcaagaattcttatggaggcatcagtttaaaatacatgacattgtgatactccttctaatgtcagatatcttcttccagattctattcctggtcttctgtggagcaggtttgaaggttcttccatcgatgcctcagctgtgtgccaatgaccctatttcctttatgcctattgcaatgtcctttttaagagacagttgactaagtggagaacaaacaatttccctgcagtgttctaaagtccaaaaatgtagaatttcagtggtcatttatatcgtttaaactgtacccattggtacagttttagacatttattgcatcctgattttaaaggggtggggaaagagagagagagagagagacagagagagagagagagattatgtgccttgcccaggatc

SEQ ID NO: 207221 - DNA, 1000 bp, Homo Sapiens
tcacatttagccagcaggcagccagtgcccctaccctggagcaacctagccagtgctatgccagaaccagcttgcaccgactcttccaggatcagcattcagcagcatcactgtggttgcttggaacagcccatggtgggagtgtttacaccaaggaaatcagcaaatgccatcaatcaagaccgttttattttttcatggagtggctgttaaacattcaccagcacacccctgggcccaagagaagaaagatgaatgggaatcatgtaaaggacaacaagggatgggatgggagaggagtgcgacttagatgatgtggccctttgaatgtcattcacgccttcttcaagcctatcggatgccatgcagtgcaggggaagggcgtgggctgcagaggtggagctggatttgaattctctcatctcaaggatgggagatctgaggcccacactggggctggacctgctcaagatgagagagttgcagacggcagaggcagggctcaaactcagccgctctcactccttggtggcctcttacttcatcaaggggccagtctcatcagctcaccctgaccctgaagtcaaagtctaaacagtgcaattcactggctgcagtggtgtgtctgggaggcagtcttacagggtgtgttcccttagttgcacctctgttcttgagctttgtgtctttctgcaaaactaaaccaaacaataaacacttgaagcccccaatgagctcatgtcgttaaaccctattggaaaacagttttttttttttaaaaaaaaaaaaacaaagaagaagaaggttgggtacagtggctcatgcctataatcccagcactttgggaggccaaggctggtagatcacctgaggtcaggagttcgagagcagcctggccaacatggtgaaaccccgtctctactaaaaatacaacaattagccgggcgtggtgggccatgcctgtaatcccagcactttgggaggctgaggcgggcggatc

SEQ ID NO: 207222 - DNA, 1000 bp, Homo Sapiens
aacacattctaactgtaattgtaacaagaagaaaatgaaggaaaagtggtttccattgctttcagcaggtgataaaatagaaacattacagtctaactaattggtaaaatctttgctattattgaaaaaaattaattaaaaaatttataattgactcaataataacatatttatggggtacagtgtgatgtttcaatgcatgtgtagttgtatacatcaaatcagggtaattaccatatgcacactttaaacactatcatttctttgtagtgatagcattcaaaatctcttctagctgtcttgaaagaatcctggctctttgattaactgaagcagcattgactaatggattgattgaaaaatagagggagagcttaaaacattctttgccctaccttattcaacatttaaacttttaatttcaaagacaaaatataaaatatgcataaaagtggaaagaatagtataataaggcctaatattacattttaatattaattatattatattagttgttacatgaatataataatcataaatgtaatcaatgatatcaattgttacattatgcataaagtaatattcatgctctatgcatattaatagtataataagtttccatctatccaatacccagtttctagacttagcatgattgtgctacacttgcttcatttgtccatcatgtgttctctgctgaggtattttagagcaaatctcagaaagcacgttatatcatcaccgtataattcagcagaaattcatgaaaacagaacattttaaaaaataacacaacgattgcatcaaaagtaacaataattcctggtaccttctgacatcttgattgcctcaaaatggctttttagtgtcggttatttaaactgggatctaaataagatcctcttattatatttggtaattggatctactgtctcttttacccaagagcagtttccctgtttccctgtttctcctgctgcatatgttttttttaattcca

SEQ ID NO: 207223 - DNA, 1000 bp, Homo Sapiens
agcatctaggctcctttttattcctgtcccctcatctgtcaatactgacctatctaatatgccattcatcaatatttctgagctttacttttcaacatctcatcttctgttagatgcagctatgttaatgctttcttggtatgtcttaatagtcgagctctgggggaaaaatggccttactcaatacaaagaataattaatgatgggattttcagatcaagtagaaaaggagggtagtaggtattaggcttatcagcagtttactgcatttcagagagacaggcttgctgtcagcatgaactcagaagtcatgagggtacagggagaagagcttttcttatttgcctctccccatccttcctccctctatcagatcccttgcagtctaaatgaccccatgacttccactcctgctgcacttctgtgtatgagctgtggaatggttagataacacaaaggatagggcaggcagctgctatcttcaaccagcctaagatttgacttcccaatcaaatgggggttaactgccatttccttccttaaactgctgggaagtgttgcctgttcagctgttcacaactgttgtcctccagcctgaactggctgcttttcttttctttttttttttgagatggagtttcgctctgttgcccaggctggagtgcagtggcgcgatctcggctcactgcaacctccgcctcccaggttcacgccattctcctgccttagcctccccagcagttgggactacaggcgcccgccagggcacccggctaattttttttgtatttttagtagagacagggtttcatcgtggtctcgatctcctgacctcgtgatctgcccgcctcggcctcccaaagtgctgggattacaggcgtgagccaccgcgcccggcgaactggctgcttttcaaaggtctgaaaatgattccatttcggccgggtgtggtggctcacgcctgtaatcccagcactttgggagccgagatgggcggatc

SEQ ID NO: 207224 - DNA, 1000 bp, Homo Sapiens
acaaaaattagccgggcatgatgttgggtgcctgtaatcccagctactcgggaggctgagatgagagaatcgcttgagccagggagacggtggttgcagtgagccaagatcgcaccactgcactccagcttgggcagctgagcaacactccgtctcaaaaaaaaaaagaaaaaagtttttaattagctggccatggtggtgcacacctctaattccagctactcaggaggctgaggtgggactgctgaggtggtctgaggttcatttgaacctggaaggtcgaggctgctgtaagctgtgttcatgccactggactccagcctgggcaacagagtgagacccggtctcaaataaataaataaaaaaaataaattatgagcattttaaacttcatattataaaaattaagagcattttttaggtctaatgaaagcaacaaagttcattttgttttaagggaaaggaaaaatacagaaggaagaaaagtttggtgagctcctaagaggatcaagaaaaggaatacaattcaggggggaaaaaaaaccttccattttaaaccatgttattattttaatcctagatcattcaggaagctatgctggctgaaactggaatttattaagaagattacactttcacctgcagttcacatcaagtaatttccatccatgttccatgattacatctttaaatagtttttaatgatcccctttctcaattcaatctcaaacgccagaaactgccacataaagaagtagatacaggctggtcacggtggctcacgcctgtaatcccagcactttgggaggccgaggccggcggatcacctgaggtcaggagatcgagaccagcctggccaacatagtgaaaccctgtctctactaaaaatacaaaaattagctgggcgtggtggcgggcgcctgtaatcccagctactaaggaggctgaggcaggagaatcgcttgaacccaggaggtggaggttgcagtgagctgagatc

SEQ ID NO: 207225 - DNA, 1000 bp, Homo Sapiens
aaaacaatagcttatatatcctatttttttgaaactacttccatttatcctgtcatcccttaaaccagacatgatgggcaccaaaagttaacactgttcctttctgaaagatgggatatttagggattagttaatgatggttagaaatctttaggagctatgcttatgaatgatttttccccttttctctgctttcttatatattctgtattttgaaatgcatccatatacattaaaaaaaaaaaaacccaaaaacctgaatgcttctgaccatagatgataaatcatgagacgattaagaatgacaaaaaagaacaagactgagaaaagactctgctatagagaaaaccaaacttgtttaaaggcaaacgagcagaaattagcagagaagaagcagactgagaagcaagggcccttgaaatgagtaagggttccaccagttcactaataaaccccatctaaatgccagtaactcccaaattaatacctccataccaggtctttccctgaaccccatattcctatccaactacttactcatgagcatagtcggccctccctacatgtgggttctacattcatgggttcaactaaccgcgactgaaaacatcttggggggaagcatctgtactgaacatgtatagaactatttttcttgtcattactccccaaacaatacagtacaacaactatttacatagtgtttacatcttgcccctacatctattctctaaacagcagctagagtgatccttttatttatttatttatttgagagggagtctcaatctgttacccaggctggactgcagtggtgcgatcttggctcactgcaacctccatctcctgggttcaagcaattcttctgcctcagcctcccgactaagaacctgagattacaggtgcccaccaacccgcccggctaatttttgtattttagtagacagagcgtttcaccatgttggtcaggctggtcttgaactcctgacctcaaatgatc

SEQ ID NO: 207226 - DNA, 1000 bp, Homo Sapiens
ggtaacttcaccatggtcattaaaaagccagtaaaccaggcatacataactactagagaagctaaggcaggaggatcacttgagcccagagtttgaggccagtctgggcaacacagcaaaacccccatttcttaaaaaaaccaaccccccaaacagtaataaataaataaataaatttatatatatatataaaactacaaattgtaatgagctgtatgaaagaaactaagagaattagcagagtggaagtgtatggctattcttctgggaagagttttgattattactaaagcagcaggtcccaaggtctatgggacattttcaggggatctgaaaggtcaaaactattttcattataataaaacattatttgtctttttcactatgttgacatactgaaggtacaaaagtaatgatgagtaaaatgttgggattttagtacaagtcaatgcagtggcaccaagctccatcagtagtcattgtagtctttgctgctatgcacttgtagtttttgtcactgttgatgttttgttttacttttttttttttgagacaaggtctcactgtgttgtccaagctgggctgcagtggcatgatcacagctcactggggacttggaactcctgagtagaaataatcctcccacctcagcctcctgggtagctaggactacataagcacatggtcatttttaaatttttttgtattttttgtatttatttaaaaataggtctcactatgttgctcaggctagtcttgaactcctagtctaaagtgatgctctcaccttggcctctgtattagtcttcactgctataaagaaatacctgggactgggtaatttataaatattattattataaacaaaagaggtttaaatgcctcacggttccacaagctgtacagaaagcatggctggggaggcctcagcaaactttttttttttgagacattgtctcactctgtcacccaggccaggctggagtgtagtggcatgatc

SEQ ID NO: 207227 - DNA, 1000 bp, Homo Sapiens
ttaatacttataattctagttacaaggtcatacataattttaaaagtaactctggttctttattttttaaaagtatatttcttacatgtcaatgctttaaaatttttttacagctggaatgaaataataggataaagatagaatatgtcgaaaaggaaatagggtataaaaaaaagttctaaggagctaccttctatagaacctgtaacaacttaatgagattaaaattcaatttcgttatttatatattaacacttaacttgaagggttatttgatgcttataaataatgtatataaactgcctagcatgtagtgggttctcagtaaaaagtaattattattttttaatcgctgtatggaaaagatgggattaaaataaatgggtttctattgtagaaggagattagtgaagagaaagtttcgatagaatctttgctttccacccagactagagtattttactatcatttaaggatgacaatatctaaaaacataagccagaaacagctcagcttcaaggaaagaagaataaataaaaatagcagtctcaaaagagatgtcacaggagaaaaaaaaaatgagtggaagtgtattttccttctcactgttgactggagtagtttcatataatggaataataatcaacaggaattagtatctgcaagtattaacagactgccacattaaaaaaaaaaaagcccacaatactctgaagaataaaaatattcctaaagtatccagagctccaacagaaaaaaattcatgcaaatgccaggcaggtccaatcctgatccctacgttgtaaaaaaaatcacctatcacaccaaatatgacaagcacaattccattttctattttagttctttagtaacttttaataaatttatcccatctctttttgaatctataaatttttggcctatattatatctgtcaactgaagtaataaatcagatggaacctcctactaactgtgaaaaagttactgttttcaagatc

SEQ ID NO: 207228 - DNA, 1000 bp, Homo Sapiens
tgcaaatgcaagttcaggaggtctgatgctgggaaataaatgaccccaataatagtgtggcaagagcatcctggcctctgcaggggacagctcctgccaggagctcccttccccacaggcaaacaaaggatgtctttcccctacctctcagccaacgaggtcttgaagttgtgaccaaaatgtgacctctaattatggccactagttctccccttccctttttgaacaccaaaaggcaaagtgggaccaaaagacatttttctttctatttttaacacagtgtatattagcaataaattaacactccccttctagcaccttttaagcaccagcaggggccaattctttttactatattgtcttcgtaagagcagccgatggatcacgctgtcacagaacgcaacgcagcaaaatagcccctgaaactggcattctcacagtcccatgctgcacatcttctggaagctactttgtggtgtgatattgctgttcccctgtttggggcagtgggaggaggggagattaacacaaatgatggtgacttgcaagggaaaactgctacatttttcttgacttttcagtatttagaaggagtgtgaaagaagtgatatgaccgaaaaaatctgaattaactcttcatttgccacatcttttgtcagaaatgtcactccatgccctactaaattgcaatcactgggtctcatatccttcattgtgggtactgatgatcaaaactaaaacttccttatctttctctcacaggtccaagcacccacaccacttcttacaagaccatttatttacatgtcagcgcctactcaggctgttgggagagttggaagttttctccctaaatattttaatttcaaagccactagagtaaagaggagttgatgagatttcaaaatcagatgtcttgagcatttcctgaacaggcagaataattccatgttaccaatcaagaatactacaggggttccaggtctgtccagaccatttt

SEQ ID NO: 207229 - DNA, 1000 bp, Homo Sapiens
gcaacagagtgagactgtctcaagaaaaaaaaaaaaagaaaaaaaaagaaaactttggagaaaatgtggtttcagaaagggtgagctgacctgtctcttcctgcatgcagcaagccataaggattcctctgggaggggtacactccccttatcaggggggtgaaaatatcccttatcaccagagactggaagttgggggctgcagtgcagtggacctgaacaactatacttcatgaagtaacctttattttcttttcctttttttttttttttgagacagaatctgtctcacccaggctggagtgcaatggcacaatctcggctcactgcaacctctgcctcccgggtttaagagattctcctgcctcagcctcccgcgtagctgggattacaggcatgcaccaacaggcctggctaatttttgtacttttagtagagatggggtttcaccattttggccaggctggtctcaaactcctgacctcagatgatccgcctgcctcggcctgccagagtgctgggattacaggtatgagccactgcacctggcgcccgaaatgacctttctattctgctggttgtataccctcccatacatctcccggtgactcccttagaaatttactgcccgtaaccagatcccttttgccctgttatttcttctcaaatgtattgttctttgtcgaaaaagtataaatgcatcttactttggccacttcttcagacttcactcttgtgaagatccctgtgtacatggaaaactaataaagcttatatgcttttatcttgctactctgccttgtgtcaatttggtctctagatatagctgagagcccacataagaggcacatgaggttggaggtgatctctcactctgctgcaaaacaaagccctaacccccaaatgtgttagtatctggagatggagtctttgggaagcgatccggtttagaggaagtcttgagggtgtggcccttataagaagagacatcagaaagctt

SEQ ID NO: 207230 - DNA, 1000 bp, Homo Sapiens
agtagctacccaccagatatgcatacatatatactccaaaaccaaaaacatgtgctagatgatccatagcggcagtatttgtaatacccccaaactggaaatgctcatatgtccatcaaaagcagagcatctacatcggggtatgtttacacaatggaacactatactgcaatgcaaatagatagtctagaactacatgccacagggtggatgcatctcatgatgctgagtgagaagtccaatgctgaagcagatacaccacatggatccattaaaaaacgtacaaaaggggccgggcgcggtggctcacgcctgtaatcccagcactttgggaggccgaggcaggcagatcacctgaggtcaggagttcaagaccagcctggccaacatggtgaaaccctggctctactaaagatacaaaaattagccggccatggtggtgcacacctgtagtcccagctactcaggaggctgaggcgggataatcacttgagctggggaggcggaggttgcagtgagtcaagatcacgccactgtactcccagcctgggcaacagagtaagactccatctcaaaaacaacaacaacaaactcatctgcttcctcagactgttctcctttctctagttctttattattattgttgttattattagtagtattattattattattttgagacaggttcttgctctgtcacccacactggagtgcagtggtgctatctcacctcactgcagcctcgacctcctgggctcaagcagtcttcccacctcagcctcctgagtagctgggactacaggcctgcgctgccacgctcagctaattgtgttaatttttttgtagagacggggtctatgctatgttacccaggctggtctcaaattcctgggctcaagggatcctcccacctcgccctcccaaagtgctgagattacaggcgtgagcccctgcacctggcctcttttctctatttcttatctcctgagtggcttcgcca

SEQ ID NO: 207231 - DNA, 1000 bp, Homo Sapiens
cacagtgcaatcaaactagaactcaggattaagaatctcactcaaaaccgctcaactacatggaaactgaacaacctgctcctgaatgactactgggtacataacgaaatgaaggcagaaataaagatgttctttgaaaccaacgagaacaaagacacaacataccagaatatctgggacacattcagagcagtgtgtagagggaaatttatagcactaaatgaccacaagagaaagcaggaaagatccaaaattgacaccctaacatcacaattaaaagaactagaaaagcaagagcaaacacattcaaactctagcagaaggcaagaaataactaaaatcagagcagaactgaaggaaatagagacacaaaaaacccttcaaaaaattaatgaatccaggagctggttttttgaaaggatcaacaaaattgatagaccactagcaagattaataaagaaaaaaagagagaagaatcaaatagacgcaatagaaaatgataaaggggatatcaccaccgatcccacagaaatacaaactaccatcagagattactacaaacacctctatgcaaataaactagaaaatctagaagaaatggataaattccttgacacatacactctcccaagactaaaccaggaagaagttgaatctctgaatagaccaataacaggagctgaaattgtggcaataatcaatagcttaccaaccaaaaagagtccaggaccagatggattcacagccgaattctaccagaggtacaaggaggagctggtaccattccttctgaaactattccaatcaatagaaacagagggaatcctccctaactcattttatgaggccagcatcatcctgataccaaagcctggcagagacacaaccaaaaaagagaattttagaccaatatccttgattaacattgatgcaaaaatcctcaataaaatactggcaaaccaaatccagcagcacatcaaaaagcttatccaccatgatc

SEQ ID NO: 207232 - DNA, 1000 bp, Homo Sapiens
ggccgccgcccctgcccccactttcgggaaacaccagccccggagcacagacgcatcacaccggcagaggattgccaaggtgccagtgggcgccaggcgctgccaggggagctgggagtccccgtgggccagcagtagtcataagtgaccactcagggggcccaagttatggtggccgcaggacagggcaggtgcccatgcctgggtctgactccagctgctgacctggagcttgggctgcctgccgcctcctgggcacagacccgagctgacctctggccttggggtccagtgaacgctaaaccacagtctcctcagggccttgacaaggttactgaggcggccacgcccccccacaggacccagtcggtgcaccaggaaaccggcatgtgtgtccaggtgtgggcctgcaccagatccaggcctcccccgccctgaggagtcccccagagtggctgcagggggcccaacctgccactcggaggacatgccactgggggtccgcacagctgtactgggccagggagccctgggagcaggagctgaagagcaggcggccgtcaggggtggcggtcaggccggtgacagctcctcggtggcacctgcagcacacacagggaccccgctggccctagccccgaagcccaggtaccatgggttccctcgacctccagccaaccagcctggccatggaagtccccatggggcagcaaagggtggggctccagccagcactggccatcctgcacatgacccccacctggccaccccagcttccaccgtggggtctccgtggggctggtggccagctgggcacttacgtgtgttccaccaggacctcagcggcctccaggctgaaggagcgcacggccccactgctaaagccacagaaaaaggttggccttgtggggtggaaggtgacagcgcacggggcgtcctctgatgatgtgaagtcgtatagctgtgggacaggggccgtgctgaggggagggcagggatc

SEQ ID NO: 207233 - DNA, 1000 bp, Homo Sapiens
tctcgcagaagagcccctgtgccggcatgtgctgcagttgttgccacgggatactgctgcctagcaacacgtcgcgggcccactggaggttctggggaaacaagaagtaggttgaaagtgagtgtgtgggctgctcagggcgcccacagggaaggcaggcggtcccctccttcctggctgcatggcaaaccacgatgagcagcagttcctgcagacatcgattccacagctccaggctgctctggccatgggctttgatcatcaggctgtgggatgcattttcagaactgatctctggcccagcaccactggtttaggagtgtagtctttgactcctcaaggtggagactgacagacccctggcctgaccaaccctacaaacctgccacatgtacccagtacccgccttctgtcagggggcccccacaagcccaaatagcagccctgacttatttgtcaggaatcagtagcgttccttattcacggccagtggtacagctgctttaggctcggagggctggactctggccacagtgcttaggtcagtgatctctgggcaaagagcctcttggtggaatccaggcccaggggagaatggtgtagggtaagagggtgagtgtgggcctggctgcctctgccttctctggggccttctcactggcccatagagcaggccttcccaccagctgcctggccagccactcctccctctctggtcttcaccacagcagccaagcaccttgcactggccatctcactccacctcaggaccatgctgtcctaaaggaaaagggctggcaatgggcagagctgggcttggcacctgggactgcacaatgccagaccctctaccctttccacggcacccactgtcccagccaatctgtcctcccctcccgctcaggtcccttgctcgcctttcccagcgctgggcgcaggccttcatcaccttgcactccagctgctccgaaagccctctcacttcttggcctgcaagctt

SEQ ID NO: 207234 - DNA, 1000 bp, Homo Sapiens
tggctttatagtgttcctgctgggcatgccagtgggtggagctgaaggctcaaaatggcaagggaggctgcacttcccagctctatttggaaatggccccttctgaggagggacttggggctttccctaaggctctgcactggaatagatgaagaaatccaagagcgaccctcgttcttcacacgaggagaagaaatggacacgtgattgaccattaggcgccaccagggccaaactatcttatggaaggaggaaaagaagcacagaaagggcatgaaattactcaagttcacacacgaggcagtggcagggccagacttcctcaactccaccgtgttctctatcagtccctcttcatgcctgattcacctgggaccaaaatcttccctccttcctgtgctgccccggacttgttctcagttctcacctcaccccaaggaagaatctgaatggcagtgcttaaaatgtctgtcctgaacattcactctcagccttgcgctccagcaccgtgtgctcctgccccccgccaatctcatgtggcctggaggaaagcagattttggacctgtcaccagctgtgtgactttgaaagcagcttcacctttctaagcctccgtttcctcattcatacaatgagcataataattatactgtatcatcttcataggatttgttttccctcctctgcccctgcatcccccaaattcctggatttggaagaagacatggacgtgtgtgcgtgtgtgtgtgtgtgtgtgtgtgtgtgtgtgtgtgaccaggcttttggggtcctttctttgaatgagtactaaagggaggaaaatccttcctgttggaaaagttgcagatataagcccagaaactccagaaatttggtcctggccctggtgagagagaaattctgagaagataaatctaagatgctgataaaaagagatgagagatggacagggagtaatttagaggatatctagtccttcactaaactttttcctgagatc

SEQ ID NO: 207235 - DNA, 1000 bp, Homo Sapiens
ttttttaaaaagaaatgcagctttgttttactcttcaatatcagccacctcagtttctgaagagtaatttaagtacagtgataaagagcaggagttctagagccagattacatagatttgatttctgcaaaactgccatttactagctgtgtgaccttggaaaaattacttaactgctctgtgtctcagtttcttcatctgtaaaatgggtataataacgacctcataagttattgtgaaagtaaatgaataatccaaaaagctaatagcacaaagtgcttgggaaatattaaccatcatcatcgtcattaccttatttttaatgacttataagtaatttatacagttaaattattttatcaatcaagatatataaaactattttcttagctgggcatggtggctcacgcctgtaatcccagcactttgggaggccgaggtgggcggatcacaaggtcaggagtttgagaccagcctgaccaatatggtgaaaccccatttctactaaaaaatacaaaaattagccaggcatgatggcgcgtgcctgtaatcccagctactcaggaggctgaggcaggagaattgcttgaacctgggaggcagaggttccagtgagctgggatcacaccactgcactccagcttgggtgacagagtgtgagactccatccaaaaaaaaaaaaaattattttttcaaagtggtatttttctaaaagtagtgcatttaatcttttcagttagtataatatgctgtcttctgtatttttattgtagtcatttagcttttcttagctttcaggagcattttattacatctctactacgtcagttaaggcagcctgagtggcattattaacagttttcctttttttttttttttttttaaatgttgcttaatgtagttttagggaattatactttttctaaaatttttttctgacataagtaccctctaacactgaaaggttgtcccctctcaactgcatgctgaatactggatc

SEQ ID NO: 207236 - DNA, 1000 bp, Homo Sapiens
gccccccaggtagtgactcattccctgaacattagtgatgagcaggctgccgctggagcctgtgtgcaagcctgggtttatgccctagctctgctgttctctaacagtgtggttcaggcctccctttcctcatccgtaaaatgaggggattggactgaagagtactttgagctttaacattttctaattctaagttgtcccagtcctcagggtgaagtgaatggcctcttctgaattgggagttggagcttgtgtaatagccatcaatacctgagagagaatagcttttgtttgtgtgtgcaaggccctgaggaggctgggtgggctgcagctgttcagcttcaattaaaaacatacacaaacctcctgctttgtttcggtttcaaaccttgaccatttgactgagtgtgtctgaattcctaagactccagtgtaggtgtggggaggcactactccacaggcttcattcaacccccttgcttttcaaatttcatttattgagggcaagagagattttgaagtcctggagatacaaggaaagaatgtaccttggctttaaaagccattggcaagcagcttcccgtgcccatttatccatccctagtcaagggcgtcttaaatgccaacatgggcttgtgagccctggtatttgggcaggcatttctaagtggcttaagagagaaaatgagtctgtcagttatgaagagtctgccaactgcctgtggtggtcttgaagcaacctcacttcctccaacaaaagcaggagtccccatggctaaaatcatgttctggaacctcaggcagctgtcctgtcacttcagggtgggatgtgtgcacaggccctaggtcctgaggctgcatctgtacctgcttggggcgggaataagttgatagcctccgggctgttggggtacacccagtaagcaagccatgaccagaaatgagttgcaattccactgagtgtggtgatggcctggagagcagggcacagagcaggatc

SEQ ID NO: 207237 - DNA, 1000 bp, Homo Sapiens
ttaaaaaatatttagcagaagtctttatttattgaacacctattagcttgggctgtggctttagaaaagccattggatctgttttactagtcagattgcttaatcagcatgccacacttgtcatacacattatattttcaatttttttaattataaaagtaattcatgtggtggggggcaggggatgggaatcaagctatactcttagctagagtgaaaaatgcatctccctttgtcccaaccattccttcattcctctcttccctccaaattgaagttttatttgttctcccagacctttttcttttttttttttttttttttgagacggagtctcgctctgtcgcccaggctggagtgcagtggcgcgatctcggctcactgcaagctccgcctcccgggttcacgccattctcctgcctcagcctcccgagtagctgggactacaggcgcctgctaccacgcccggctaattttttgtatttttttagtagagacggggtgtcaccgtgttagccaggatggtctcgatctcctgacctcgtgatccgcccgcctcggcctcccaaagtgctgggattacaggcgtgagccaccgcgcccggcctttctttacatttacaaacaaatatgggcttttattttcttaaacatcagttggaatatattgtacatattattctgtggtttactttttctcctaacagttttggaaatcattctatttcatttcatatatattttagcttgtattgtactcttgtgtagtatggatcatcagaattcatttaaccctagaattgacttaactgtaaggatggatgattgggtcatctccacattcttgtttagatcagctctatagtgagcattcttttaaagagctttgtgtataaacgtgaacggttgcattcttggaactagaattgcttgttcaaagggatgtatgttttggctgggcatggtggctcacactttgggaggccaaggcaggaggatc

SEQ ID NO: 207238 - DNA, 1000 bp, Homo Sapiens
ttctttacagccttgctactccaattgcagttggccagggggttaggagcataggcatcaacctgggagcttgttagaatgcagagtctcgggccacaccagtttaagaagctctgccaagtgccatgtggctatcgaaaccattagcacactgccagagacaggaagctggacaaataaatccagggagccacagcagcccagcccctacaccaactgcctgatcaggagaaggaatacatttcatcccatcactccatagctgccccaggttgccacccattcttctcaccaggatggggctggcttacttggctgtgaaattttaggttggtgtgagggtgcgctattcaacaggtttgcaaatatttgcgcacacaccgaaaggacaagaatggtgcaggtggaggcgatacaactggagtttgctctttgcaggttacaaatcaatttctgatcccttcccacccacccgccctcaacacacaccacctgtatcaacatgttagactctcgtgatgctgataacagcagtaatagcgcatagcaagaatactcaaaccacttcacaaacagcaaccatcctggaccctgttcagatcttcctcttggcaagaaagggagagtttaggtacttccacatctttgccctaatagccttatgttgtcatggcacatgatttgcctcccacctgagcccagcaagtgaatctgtgtgcagaagctgaaagggaagagagaaggaaagaagataaactaatgaagagtgggagacgagcttttcctctgcagtccagagagaagattaaaaggactactagtgaggcagatagacttgcttttttctcatctgccagatttgtgctgatggctgtgactccctgtattggatacttctgctccttaatcatgcgcagcaagaaccagaatgggcgacttcatttccgaagaggaactgaacggcgctgaggctctgggatgcattaagacagcccagatc

SEQ ID NO: 207239 - DNA, 1000 bp, Homo Sapiens
cttaataactcctacaacaattccaccgactcttagtaaccttatctataaaatagaaacaatagtaacaccaatctcataaagttactgtgaagattaaataaggcaaggtacaggaagtacatagcacaggatgcactcaatgaaaatggcccatcagacttgtgataaacattacatgtgattatatatgactgggtaaaccatataacacacttctcagcacatggaaaatgctcaatatgtggtatttattatttttaaaagggagggctagagttaccaaagataaatgtagtcacttcccaaattatctcagagacagcactgggaagagtatgtcatctcaccacaatgcagaaactaaatgaatgtgcctatagagttgctggactgttagaaatatttctctgagaccctcagcttataagtatcagtcacagtttctccctatctctgatgtacaggaccctgacatcctccatctactagtgtcagagaggaatataaatgatctgcattctgtaggggtggcaggaaagcttcctcttcactcactgaaggtttgttgaaaatgaactgacaaaaagcagattaataggagagaaatgcatacaaaatttatttaaagtgcatagcatggaggaatcacgggagaatgattactcaataacccaaggaggtccacatgcttatatacccttcttcataggggaaggggagagggagatgtagaaggaaatgattttcaggggaaatgaataagcccaaagaacaatggcctgagacaatggaaagatgaggggcaaaacttcactataaacgaagtttgtctcattatgcagatgaagttcccccaggtaatctctcagaaccaccctctgaagaatagggaaagaggatcagggagacagggaaaggtcagagagagaccttgaggctgcttctttagtttggcatgtgaaagtgccatattttgggtatcattttctgaacacca

SEQ ID NO: 207240 - DNA, 1000 bp, Homo Sapiens
gcccgacttggcctcccaaagtgcttgggattacaggtgtcagccaccatgtccagcctggggaaatttttaaaatgatttctgaaaggagaaataaggaaaaagtagctagaagactaatgaacttggtcccaattccaggaaagaatctagattatcaagaagattgcttttgagtacgtatggcagtaatcaataatcatagtttgctaacaagttttcatacattcccttcattgattggtagaaatactggcatagaagaacaatatagttgttgtactctactttaacaggccgtttgacaacttctctcttttggatgagatggaaatatattggctaaacattaaaacagttgtgtggattagtaactgacgattcctaggctgatcgtttcatattgaaaggaagctttagcggcatatgactagattatcctcagctctatcaagttcagcattcccatccgtgacgggatgggggaacacaaactgggaataagtagaataataggatcaacaagaacttggtggggtgactgtgaagttaaatatgatagaggttcattcatttaatagatatttatggagcatcttctatatgccatgctcataaagatatacgtaaggtcttaagctcaaattaaaaaatcaataaaaatttaaaggccaggcacggtggctcacgcctgtaatcccaatacttcgggaggccaaggcgggtggatcacgaggtcaggagttcgagatcagcctggccaatatggtaaaaccccgtctctactaaaaatacaaaaattagctgggtgtggtggtgcgtgcctgtagtcccagctactcaggaggctgaggcagaagaattgcttgaacccaggaggtggagcttgcagtgaggcgagatcacaccactgcactccagcctgggcgacagagtgaaactctatctaaaaataataataataaataggccgggtgcagtggttcacgcctgtaatccc

SEQ ID NO: 207241 - DNA, 1000 bp, Homo Sapiens
ggcttcatccctgggatgcaaggctggttcaatatatgcaaatcaataaatgtaatccagcatataaacagagccaaagacaaaaaccacatgagtatctcaatagatgcagaaaaagcctttgacaaaattcaacaacccttcatgctaaaaactctcaagaaattaggtattgatgggacgtatctcaaaataataagagctatctatgacaaacccacagccaatatcatactgaatgggcaaaaactggaagcattccctttgaaaactggcacaagacagggatgccctctctcaccactcctattcaacatagtgttggaagttctggccagggcaattaggcaggaaaaggaaataaagggtattcaattaggaaaagaggaagtcaaattgtccctgtttgcagacgacatgattgtttatctggaaaaccccattgtctcagcccaaaatctccttaagctgataagcaacttcagcaaagtctcaggatacaaaatcaatgtacaaaagtcacaagcatttttatacaccaacaacagacaaacagagagccaaatcatgagtgaactcccattcacaattgcttcaaagagaataaaatacctaggaatccaacttacaagggatgtgaaggacctcttcaaggagaactacaaaccactgctcaaggaaataaaagaggatacaaacaaatggaagaacattccatgctcatgggtaggaagaatcaatattgtgaaaatggccatactgcccaaggtaatttacagattcaatgccatccccatcaagctaccaatgactttcttcacagaattggaaaaaactactttaaagttcatatggaaccaaaaaagagcccgcatcaccaaggcaatcctaagccaaaagagcaaagcaggaggcatcacactacctgacttcaaactatactacaaggctacagtaaacaaaacagcatggtactggtaccaaaacagagatatagatc

SEQ ID NO: 207242 - DNA, 1000 bp, Homo Sapiens
ttgggcacagaagttcgatacttgggcacagtgagctgtgatcacaccaccgcacgccagcctgtgcgacagagggagacgctatatctaaatgaaaaaaataagaccttgtaggggtcattgtcaggaccaatggtgcccagttgcaggcagcactggttaggcccggttttggagaaactaaaaagccactccctccagagtcctgctttcccaggtgcctccctcctgagcggaagctctgggtggtccaaatgtggtaatagagatctgtggatttttttcaagtgtgttttctgttgcacgttaaattttttttttcagctttaaaatgtaaccttggtaagttgtttactcaagaaaattcttaatgagttttctttctttctttttgtctttttaacattttgggtgtggtagcaagtagaagcagattcatcctaaccaaatatttgcaaatatctgaacaaagctattctggccagggaaggaagactccacggaggaagtgggaattggatctggcttttgaaggaggggttcaattctcagaggactagatgaggaaggaaaaggcatgttccaaaaaggggcagggaattaaaagtttattttctgggtgactgggaacctctgagcccttgagcacgtgccttagatatgttagtttggcagccagcagtctgtgcatagagggtgataatggtgttggactcctctggcctgcacgtggcgagactcaaagtttccagacttcttttgggggcggtgtctgaattacagtctccggggctgcagaaagatgaactccatcagaagatcctcaaggtcttccccactccttcagtgcagacttcatacagagaaactgtctaggcgacacctgtgcaagaactggacacgacccaagctgcaaactgcccctgaccatcccggccttccccgttcgatcctggaggtgggggtgggaatggagcgcccagagcgggcgatcaagctt

SEQ ID NO: 207243 - DNA, 1000 bp, Homo Sapiens
gaaggcaaggaggagcaaagtcaagtcttacatggcagcaggcaagagagcttgtgcagggggaactcccatttataaaaccatcagctctactaattcactaccatgagaacagtatgggagaaaccacccccacgattcaattatccccacctgcccccctccatggacatgtggggattattacaattcaaggtgagatttagatgggacatagcaagaccatatcagaaggttaaaagtttgctaagagtagagatctcatgctaagttttcttatcacaatataaataaaataaatagatacctttgtcctaaaataaacaaactaaaacatgtgactctatgccatgcatacacatatataaagctttgaataaacaaaaacactgttattttactcacacacacgatgttgaaaaggcatgattatatgaaaagcatgcaggacatcatcagaagtttggcactgtgagagcacaggatgtaaaaggtaaggtctaagagaaatggggctggagaggtgagccaaaatcccattttagagcctgaattttagaaacccgtgggactaataaaaggtattatacagagagtgacagggttagattttgtctttggctttagtggtataattgaaaaactgtcccaggagtttaaaaaagaaaatacggggacctaactaaaaatggaggtaaaactgagagaatttgaagatcctctggaggtacaggatgagggatggtcttaggacaggctggctctcaaatttttaggggaacagccactggggatacctgagaggagtggaactggacaaaccaaagggaagagggacctttcatttttggacatctatggtatgcttgacattgcttctatctttcataccttcataacgatcctgcaaagtaagaattattatcttcttgggaggctgaggcaggtggatcacgaggtcgtgagttcaagaccagcctggccaagatggtgaaaccct

SEQ ID NO: 207244 - DNA, 1000 bp, Homo Sapiens
agaaataaagaaagaaagaaagacaggagtaggcgtcaggcttttctctttctttctttctttttctttctttgtctttctttccctcccttccttccttccttccttccttccttccttccttccttccttccttcctttccttccttcctttctttctctctctctctctctctttctttctttctttctttcttttcagatggagtcttgctcaattgcccaggctggagtgcagtggcatgatctcagctcactgcaacctctgcctcctagattcaagcaattctcctgcctcagcctcccgaggagctaggattacaggcgtgcaccaccatgcctggctaatttttgtaacttttagtagagatggggtttctccatgttggccaggctggtcttgacctcaggtgagccccccaacctcacctcccaaagtgctgggattacaggcatgagtcactgtgcccagccagtgtcaggctcttttcaacaagcagttcttatggaaactaagagtgacaactccgtcactcctgcaagaatggcaccaagccattcatgaagggtccaccccgaggatctaaacaactcataccaggtcccaccttcaacaatggggatcatagaccagacgcagtggcccacgcctgtaatcccagcgttttgggaggccgaggcaggtggctcacctgaggtcaggagtttgataccagcctgaccaacatggtgaaaccctgtctctactaaaaatacgaaaattagctgggccttgtggcttgggcctgtaatcccagctactcaggagactgaggcagcagaatctctttaacctgggaggcggaggcaacttctgtagacagccaaagacagaaaatcagacagtcatgtgccagcgtaatgttgttttggtgaagaataggccacatatactatggtggtcccctaaaattataatggagctaaaaaattcctatcacctagtgacgtcttgatgatc

SEQ ID NO: 207245 - DNA, 1000 bp, Homo Sapiens
ggatgtcagctgagtctctaaaatgagatttaaaatgatctccacctcctgaagttttagaacaagagaggcagtaagagctgagtgataagactttattgtcataaaactttatagacttggcctaacactgctgccttctgtatctgtgtccttctactcttctctgaagtttgggactgaattagctatagcctccaaggtggtataacttgaagaagtaaataataaagtggaatcagaacttcagtagttctgattcaaagaactggtctttggcacaagaatgtcttgagtttgactataatcatcactgctttctaaattagcttgaaattggcccattttgaaactagttttttttcttgtttttaatgtgtacatagtatccacaagctagaattgtctttaatcttaatagaaactccttttctttttgctctcaagtagttactagttataggaaatatgtcaccagaatactttgcctgtgctgagagttggatgtcaaagagcatccacactgcataaacattcttgatattatataatttacttaactactaaaaagggagaagctgttatcttagagcagcattcttggctttgtgtgtatggcttcctgattcttttgtttacattcttgaactaaaacatttaaatcttttacatcagcaagatttctccatatcactctgattttcttgttctttgtcatgtgaatttgccagacctctgcctactttgatattggcgcaggtctgcctttgctcttaaatatgtggttttggtttttgttaaaatcaccctatctgctaaagggagataggtgcatgtgcatgttgaagagaaaatgtagtttttacttctcaagtattttttgtggaaaaaaagtagatcctagaaggaccattttcctagaaaatgtgggcatgcttcagagatagtacacataggaggaagtctttttttgttggtttatcttctgttgtattatata

SEQ ID NO: 207246 - DNA, 1000 bp, Homo Sapiens
attactttaatgactaactatattttgaggaaggaacaagatagcctttagactaaatagactctactttttaatttgtggccaaatgcttgaaagagattaaaggaaaatgcaaagatatgtcaatataagaaaacaaaataaaataacaaaataagaaaacccttttattcctaaatttgatttataaatgtcaatatggactcatgatatattttcttttaaaaaaacataaatcaaggccgggcacagtggctcacgcctgtaatcgcagcactttgggaggccaaggcaggtggatcacctgaggtcaggagttcaagaccagcctgaccaatatggtgaaaccctgtctccactaaaaatacaaaaaaattagccagacatggtggcacacacttgtaagtccagctgtttgggaggctgaggcaggagaatcacttgaacctgggaggcagaagttgcagtgagctgagatcacgccactgcactccagcctgggtaacagagtgagactccatctcaaaaaaaaaaaaaaagaaagaaagaaaaaaagaaagaaaaagaaaaaaaaccataaatagaacaaatgagcaaacaaaatttatttcctagctctatctgctgaaaagtgttagaaacaaggaccaacccaggggcaataagcaacccttgggccaggactatgacctctaaatacaaatttcaactaaaaagagccagggttccctttaacaaaataaggcaggagtagcaatatgtgtattaactgatatggaatttgaggccaaatgtatgacagtacaaaacaggactttaatgacaaaaagatgaattttataaagaaaatcaaaagaaattgtatcaagaaaaataaaatgttataaagaatgtcatggccaggcacagtgactcatgcttgtgatcctttgggaggctgaggtgggtggattgcttcagctcaggagtttgagaccagcctggacaacaaagtgagatc

SEQ ID NO: 207247 - DNA, 1000 bp, Homo Sapiens
ggccaggcgaggtgggcggatcacctgaggtcgggagttcaagaccagcctgaccaacatggagaaaccccgtctctactaacaatacaaaattagctgggcgtggtggtgcatgcctataatctcagctatcgggaggctgaggcaggagaatcgcttgaaccctggaggcagaggttgcagtgagctgagattgcgccattgcactccagcctgggcaacaagagtgaaactctgtctcaaaaaaaaaaaaagactgtcctctgaagagcttatgttttagatgcaaagcctgctcccctagcttggagctcacaatattaatatctgccttgggcttattgcactatatagagcctgtatgggaaattggacatttctccagtattaccagtgatcaaggttcttatcatccgtttctttttttttttttttttttgagacagttttgttcttcttgtccaggctaccgtgcaatggcacaatctcggctcaccgcaacctccacctcccgggttaaagcgattctcctgcctcagcctcctgagtagctggacttacaggcgtgtaccgccacgcctggctacttttgtatttttagtagagatggggtttcaccatttggtcaggctggtctcgaactcctgacctcaggtgatctgcctgcctcgtcctccgaaagtgctgggattacaggtgtgagccaccgcacctggcccagttgggctcttttgactcctgatattgtctttccttatcgttcctggttccttatcagtctccaggctggctgctgttggagtgtgggtggccccctgcagaagacactctcagtagttgtgctccatggctttctgtgtagtgatgggaatttcagggccatttcagatgtgccctttgtattactagaataaagtgcacctatttggtattaactctaatttctacttgtaactcatgattctggaaaaggtttctaaaacttgcagacttgaagctt

SEQ ID NO: 207248 - DNA, 1000 bp, Homo Sapiens
tctcactcagtttaatggggaatgaatgcggaaaagtacagagctgtttgcaaatattctatgataggggctgtgggggcgggaagcatggggttggggggcggacccttcttgtgcctacctctactcagaccgtcccagaacatctgaccactgcttgacaccttgatgtgaacgtctaatacacatctcaaacaaaaccggaccaaacataactgaagctacacttttcaagttgttcaggctaaatgtctggaatgatccataacccttctctttctctcacacctcacattctaatccattggcaattcctactagctctactctttttttttttttttagatggcatcttgctttgtccccaggctggagtgcagtggcgcgatctcagctcactgcaacctctgcctcccaggttcaagtgattctcctgcctcagccccccaagtagctaggattacaggcatgtgcatcacacccagctaatttttgcgttttttgtagagacagggtttcaccatgttgaccaggctggtctcgaactcctgacctcaagtgatttgcctgcctcggcctcccaaagtgctgagattataggcatgagccacggcacccagccactagctctactcttaatatgtattagaatccaacccactcatcatgcccactgctgccattctggtcccagccaccctcttctctctccttctcatagtccctctgcttttgtctttgcccatgagtgatctgctctctgcccagcattcagagtggtcctgctagaaacgtaaggcagatcttgtcacactcctgcttaaaatcctcccatgctccccaccatgccaagaaaacaacaataaaaaaacccagtattattcccagtcctgtgaagcttgtcatcatctgcatctccccactctccccacaacctattttgatctcatgtccctgtattggttgttctttaaagatgccaggtggctaacatctgta

SEQ ID NO: 207249 - DNA, 1000 bp, Homo Sapiens
cggatcacatgaggtcaggagttcgagaccagcctgaccaacatggagaaaccccatctctactaaaagtacaaaattagccaggcttggtggcgcatgcctgtaatctcagctactagggaggccgaggcaggagaattgcttgaacctgggaggcggaggttgcggtgagccaagatcacgccattgcactccagcctgggcaacaagagcaaaactccacctcaaaaaaaaaaaaaaaagaagatgcccctgatttatcaaatgggaaaaccaagcttccaaatagcgtgtgctggcacctgagttacaaggcacggggttccaggagcagttccctgagctccctcccaggagaagcccatgtaagaggcaactcagtcccacatcttgatgggaattcctggttcaggatctgccagagagtttcagcttttctctggacaggcccccacgatccctgagcccctgatctgtggtcatctggcctttcgttggtcctcagcagctgaggggacacttccagcttcccagagtcttcctcaccatgggcccaaaagtggactttgtgtacacctccaggtttctatttcatgtcagactcttccaaacttccttccaaatttagtgaaaggccgggagtggtggctcacgcctgtaatcccaacactttgggaggctgagataagcagatcacttcaggtcaggagtttgagaccagcctggccaatgtggtcaaaccccatctctactaaaaatacaaaaattagctaggtgtggtggcgcatgactgtaatcccagttactctggaggctgaggcaggagaatcacttgaacccgggaggcggaggttgcagtgagccgagatcgtgccactacactccagcctgggcaacagagcaaggctctccatcttggaaaaaaaaaaaacaaaaaaacaaactaagtgaaactcttccagccataccctgtggtgctttaagaaatcaagacaagctt

SEQ ID NO: 207250 - DNA, 1000 bp, Homo Sapiens
agtttctgggatgaatgaacagcccccactgttttctatccttgaatcacttggttggagacgaaaagtcttgagagaaagggtctgattgactgagcttaggtgtgagcctgcttttggctgctcggggtgacaggaagtatctgccagaaagaaccttcaggaaccccttcagccttcttggtggcaggtcagattgtttccatttactgaacataatggaggaaaggaaattccacaaaatgaaatcggctgctattgtagaggaagaatgaatgctgagtccacttctgagagggacagttgtccagaagggactttctgaatatggccacgctttacatccattttattttcatggatacacatccacaggctgctcaggtccaaggagatggccacgccttatgttcctatctatcacaatcatttttacagggctggacacggaagtagatcacgatgctttgggcggcaagtaacaggaaaacttcaacttaactggcctaatcatcacagaaatgtaatctatgttctggtgaaggtggaggagtaattctgagatggaattctgagatggaacaaacacagggtggttgattcagtggccaagtaatgttatcaaggatccagattgattccgtctttctgctctgccattctaagcgtgtcagtcactggatggctgcagcagctctgggcttcaaatcctcacacaccactctccagaggcagaacaagggaagtactgtgtctttgtgtcccttttttttattttttgagacagagtctcactctgtcgcccaggctggagtgcagtggcgcaatctcggctcactgcaagctccaccttctgggttcacaccattctcctgcctcagcctcccgagtagctgggactacaggcgcccgccaccacgcccagctaattttttgtatttttagtagagacggggtttcaccatgttagccaggatggtcttgatctgacctcatgatc

SEQ ID NO: 207251 - DNA, 1000 bp, Homo Sapiens
gccttgctccacagactttacagtctctcagggggacaatgactgttgtaattgcctaattatagcttatcaaggaaaatgctacagtgagggtgggtgacagcttggagtggtgccataggaggcataagagggtaccttaccagtcttgagagccagagactcagagaagcctgaaagccttatctgttattgactgtgacatacaccgcctgacctagttatttgtgatttcacacaagccttcaaacttgatctaacccttgttgtctactggccattgtttttgccattatgtgttcctcaaatatctctttttacctttgtcgtatggcaaaatcttcacatacttccaggatctcatcccttcctactccaatcaaaagctacttgcctttcttctgtgttaataccacttacctgttccacacaaggacaattattatatgttgctttacaaggttttgcctgtgtacatcttatctctcccagttcttgaaatcttcatattccttgaaaaatacagcatataagagtgccttttacgtaaagaagctggtttagtacaattaggtgctgaatttttaaaaacatccttctttcatttatttgagaaaatttattggacaactgctataggagtttggaatactttagtgagtaaaacaaagatgccttgtgaaaattgcatttttgaagggtaagtgagtggaaagctagacaaaaaatacgcaaataaacaaaaacagaagagaaggaccatttctagtgtttctaactggtaggaacctggtttttcttagacatactcagaaataggaaacttttctactaattttttgttcaaagttcgcccctcagtcattggaaatgaaaccaattcaaaactacgtaaatatactattaaacataaaagcaatttcaaagtccaaattatgaccaaatattccctagtgctattttcaaatgtctggattaacaaatcacataagaagtgatc

SEQ ID NO: 207252 - DNA, 1000 bp, Homo Sapiens
aagaagagtaacatatatttgcatatatgagtgatacatatttgtcactattttcacatctgagctaggtattttacatgtgtgatgaaatttaatctattcaaaacactttacattgaatattattcacattttatagatgaggaaactgaggttcaaagagttaacttgcccacacttacacagccaatgagtggctgggccaggactgaagccagattctccaagcccaggaaccatgcttttttcaccacactccttaaaggagaggaattttactgagctcttgaaagatgatgcaggccagccacagtggctcacgcctgtaattccggcactttgggagaccaaagcgggtggatcacttgaggtcaggagttcaagaccagcctggccaacttggcgaaaccctgtctctacttaaaaatacaaaaattagccaggcgtggtgctgggcacctgtaatcccagctactcgggaggctgaggtgggagaatcacctgaacctgggaggcacaggttgcagtgagccaagattgtaccactgcactccagcctgggtgacagagcaagactccgtctcaaaaaaaaaaaaaaaagagatgatgcacatggattggcagagatggaaaaaagaggggctcatgcataagcacagaagtaggagtcagccagtcacgcaagaaataggaagcagactggcctgactagagtaaaatagaacattgggcggcaatgacaggagattaagggagagacagttggcagggcgcagtggctcacgcctgtaatcccagcactttgagaggccgaggcgggcggatcacaaggtcaggagatcgagaccatcctggctaacacggtgaaaccctgtctctactaaaaatacaaaaaattagccgggcttggtggcgggcgcctgtagtcccagctactcgggagactgaggcaggagaatggcgtgaacctgggaggtggagattgcagtgagtcgagatc

SEQ ID NO: 207253 - DNA, 1000 bp, Homo Sapiens
ccacaaagagttttacacattccttgttaatactctccacttttcactgactctttatcccattacactatggattctgtccccaggatcatcaattaacacatacaaattaaaactcttttgaaataccttccttgtgcaatcaaaaataacaaatggaaagcaaaatatactcatgctgagcaattgtgatacaaaatcagatcaagctctaaatgacatgcatccctgaactaatcaatggatttgggtagtagcctggacatatgaaaatcaactcagggaatcactgtcttctttcaccagcatgacccagtttagattctagatagacagggtaagcctacatgaattacagtttggatgaaagatagaaaattaggtctggacaaatggaaggtatttcatgtcaggatacactgagatattattttaggatagttagcttcagggaaactctaagattttgaattcatcagggaataaagacgcttggaaaatggtatctgcagattttgttggagctccccacagcatataaactgagaaaatgggtgtgtctgcttcagtgagtctgaaagagagtataaatgacaaataggcatatatggtaggtccctctattaagatgcgaatgtgtgtttgttctcctcatgtttcttcctttctcctatttcatgaggtagccaggtatttagagatgaaaccatgtcagaaaacaataccatatttcacttacaggtatatgcatatgtaataaaagtatagaaaaatgtcttgaaaacgtaaaacctaaattctgcatcatggtcacctgtgggaaagaaggcagctgaggtaataagagaagactttaaagtgtgtttgactcacctatgaaagttttatatgttgacatgaatatgtagaagtctgttgtattctataattttttgtgttactttaatatttcataacaaccactatttctctgagacttaattctgattttaaaaagatc

SEQ ID NO: 207254 - DNA, 1000 bp, Homo Sapiens; identical to SEQ ID NO: 114791

SEQ ID NO: 207255 - DNA, 1000 bp, Homo Sapiens
ttgctccttacgtgtcagaagcacctctgggctgtggtgcaggacctgtctcattaagaatcataccagcccttggaaggaaatattactacccctgttttgcagtggagaaaactgaggctcagagacgggaaatactgcctcgaatcatactgcatgcaacatgtcatagccagtatataatcccggggcccctgatgccacgttgcaattcttaactgctaagcctggtcagtggttaacttttgtccttaatcctgtctcttcccattcactctcctgagctcaaagccacaggaagaggctgcctggagtctttcaaccatgcctgttgaaagtagatggccaggcctggtgtggtggctcacgcctgtaatcccaacgctttggaaggctgaggtgggtggatcactgaggtcaggagttctagaccagtctggccaacttagcaaaaccatgtctctactaaatatacaaaaaaaaaaaaaaaaattagacaggcatggtggtgggtgcctgtaatcccagatacttgggaggctgagacaggagaactgcttgaacctgggaagcagaggctgcagtgagccaagatcgtgccattgcactccagcctgggtgacaagagtgaaattccatcgcaaggaaaaaataaaaaagaaagtagatggccactggtatgttgttttaggagaaatgtctgtttcaggtccttgtgattgggttgtctttttttgctactgagttgcatgaatttgttatttattttggatattaaccccttatctggagacctattttacagcaaagtgcctatagacaggtactagctagatactacagcatagtgcctatagctaataatattgtattgtacacttaaaatttgctcagagggtagatcttacactaaatgctcttaataatataaatgacacaggagaaaattttgggagatagtggatatacctaaggccttgatggtggtgatggcttcact

SEQ ID NO: 207256 - DNA, 1000 bp, Homo Sapiens
ccagagtttccattaccaatattatgaccaatgttaagcttagccaactttccatagatttgatgagaaattatattttcctgaaggcagaaccatggcacagtggaaagggcacatattttggactaaaaaacttagatttgaatctttgttcttccacgtactgcctatgtaagcactggttaggtcacttgaccttccttgaacaaaaaaagagctgaaagtatcagacacatagaacatcaaaaaatagtgtctgccactactaagccactctattagagccacttcattctccagaggccactgatctgtgggatccatctaagcacctggtttcttgtattctcatgcttgtcattcacaacggccttttcctattttcttcaaccactcactatcatgggctctccctagactttgttatcattaaaaattatagtaactcctttggaatttgattttaggtgtcttattttcacaacatcatcttctattattccagcggaattggtccaacattttcttttctaaaatatttttgaaaatattgagacttctaattaataaactttattattttcttatatacacatcagctccttccacgtcttcacttctctctatgtccagcataaatgtcatcatctgtcatgacaaccagcaccttggaaagactctcaactccaaaatactctcttcctccaatgtattccccttgcaaaaatcctattttctttaagctgtcatcccagaagctggatgttgctggacaaaaattacacaaacaggctgcctagttttagtttatttttatctaacatgaatttaaatcaatcaatgattgatctgtcactgacttagttttattttttgattgatttgaataggtagtacatgtacatggtacaaattttaaaagatacataaggatatatgacaaaaataagtcctcgttccaccctgtctagtggctcaatttttgcccgcagagaggatc

SEQ ID NO: 207257 - DNA, 1000 bp, Homo Sapiens
gtgtgttgtgtattttactgtttgtgaaaatgtttatgtctcgtataggctgccctgaggaacatataactcccttcaaccctcaccgtaactgagaaacagaagctcagggatgggaagaataagctcccaagtgctataccaatcagttatgtcagttctgggaaaacagtatcatgaagcccctaacatgaagtgaaaacagcctggaagggcaaagaattcacatgtctttcctgacaatctgttccttggcctgagtgaactgtccaaggagaactgcacaggtgctgtcctgggaagataacgaaaggtggcagcacatgaccactggtggtaaattgctttgcatatgctttctttcttgcattccttagggtctgggagttgctttggatgacagggtggcaataaagttgagagggcaattatttggtgagggagtttctgttcttggcattgtactagagtctaatctaaaagaaaatattaaattctccctaagagaagttgcactgtctctgaaccatctcatttctaacagcatcatgtgtaccggttaagaagcatgggctctggaacctgactgctggggattcaatcgtaactgtcagcgtttagctgtgagcccttgggcaagttacttaacttgtgctttggtgtcattttctgtaaaaggatgatgataacaatggtgtcccccttaccactctacacccaccatgttgccaacatttgaaagtcaaataagtattagcgaggataaaggaaaatgtgaactgtaatatcttggtctgttggtgggaatgtaaactgtttatgatgcccgaattacagaaattatgaactagttgagtgaaaaagttaatataggaaataaggcagcatatcctcatgctgtgaagcttaaataagttaatacctacagaatgcttaaaatagtgtttggcacatagaaaatgtgctgaataacctaaccttatcattattggtcttgatc

SEQ ID NO: 207258 - DNA, 1000 bp, Homo Sapiens
attattttgtggtaattgtcaaaattgattaatggaaatattctcattccatacttctacagattttttcccctatatgtgactgctctttgcacccattttgtacagactcattttcatgtacctatatacactataccctaaaatgctggtattcttaaacatttaatcctctagatgattttactatgttagttgcttaaatttctaccaattagctatttattctcaaagctatgtctgagtccaagacctctctacttagattcacactaagagctcaagctcaacatctctaaaataaactcaattctttcactctacctttgcccttcttcttgggttttctgtctctatgaattgcattacccagtttccaaagttataaattgatcatcatcatgaactagttgacaggctgaatctaacaagataaatttttagcagggataatcataaaatactgctctaggtttcctaaccccctagagaaaaaaacccagctatatatgtacacgatgcagtcagtgtgacttatctccaatacccaaaaatcaccttggtgcatttagattatttttaaattcaatatgcatcagtagtttgatgttgctgaggaatgagggaatacttccttaagctgcaccaacagaggaaaatcttaaagtgagagactggtaggtaaaatctgttcttaattttacatttgaatattattgtagatgctacattttggaagtttgttcccttgaaaggtcatgttaacatttaattgccattgtaacagtattaacatgtgggaacattaagaggtgatgattaggactcaagggctctgccctcatgaatggattaaggatattacatctagaataagtttgttttcaaggcagtaggtttgttataaaaggacaagttacccctttctctgggcccactccccatcttgctctctttttgtccttcccccatggggtgatacatcaagaaggccctgatc

SEQ ID NO: 207259 - DNA, 1000 bp, Homo Sapiens
tcagtaagagcgtgctggaaacagcccctctggcttggagcctccatttctccccaagcatctcggcctcccctcccagccacgggaagcagggtgcgagctcaggggggctccctctcttctgcacacgctcctgcctcctcatcccatcccggctctgctccagctcacaaggtcacctcgagcctcagtttccccccccttttttttttaagatacaacagccagagaacaccagacattaagaaatgcttctaggctgggcatggtggctcacgcctgtaatcccagcactttggcctcccaggccaaggtgcgaggatcatgaggtcaggagattgagactatcctggccaacatggtgaaaccccgtctctaccaaaaatacaaaaattagttgggtgtggtggtgtgtgcctgtaatcccagctactcaggaggctgaggcaggagaatcacttgaaccagggagtcagaggctgtggtgagccgagatcatgctactgcactccagcctggtgacagagcaagactctgtatcacaaaaaaaaaaagaaaaaaaaaagaaatgcttctaacatgagggacaaaacaacagaatagacaaaagcactccgaggaaacagcacagagaacagatgaaaacctaagaaccaaaacaaaaaagacatgaatatcctcaaagagatgagaagatccttgaaaggagggaacattcagaacccaagaacgagccctcggaaatttacaagagaatgcggcagcaactgtcacgatgtaagaaaagaactggaagctaaaagtgaagaaatcctccacaaagtagaacaaaaagacaagatgatgaaaaataggagtaaacagttaaggaaattagaagattaaatcaggaggtccaagcatccaattatccacaaagcagaagcagaaaaataggaggccgggtgcagtggctcatacctgtaatcacagtactttgggaagccaaggctggcggatc

SEQ ID NO: 207260 - DNA, 1000 bp, Homo Sapiens
gatgaggcaagtccatacaaaacagtgactttttctactactcatagctcgcaactccccttatagggaaaggctttgggtaggaaagaggaaaatactctttggctctaagacctacaaaaaaggcagaagagagtaaggcaactatcagtggtaaaagggaaaagggaatggctaacatatgtaacggaatgtaatctcttaggaaaagaatttaggagaagagtaaccttaactgccttcattttccccccacttacatttgtacgatttttctacaaagacctacccttgggaatgaggaattatgtactggagtttttttttttttttttttttaataaaggtgaaactaggaaatggcctgcaaattctggttttcctgtttgtgatgtcactcacaaacacctgctacagctttaagaagtcaagatgcttccttagaactatgagaaggtcacgcagtgctagttctaaggtgaacctggaatggatcttccagattggctgggatgtgctgtgattaggatttcctgacctacctcagtgctgaaggtgaggtcatagcctagtgtggagacatcattttccagcagataaaccagaccttggtagaagtggtaatcttcactctccatatctgtatatctagaaaaacacaattatacagggtcatggtttgcgagtgggggggaagaaggagcacaaggatgggacacaaaaagaccagacccccaggactgaagacagtcccaggactatgcctcatcctcacctgactgacttgcccaagatgtgtttgtaaaaggatcgagtaaagtagcactccagaagacggttgtcatatacagctttggccacaatgcgtccgacaaacttgaagtagctgaggtggttggggttgcagtgggaagatggattgatggtgtaggtgactcgatcaccaggtgaggtacggaacaaggcatacatagggttaaacatctctcgagagatgatc

SEQ ID NO: 207261 - DNA, 1000 bp, Homo Sapiens
aaaatacaaaaaattagtcaggcatggtggcgcatgcttgtaatcccagctactcgtgaggctgaggcaggagaatcccttgaacccgggaggaagaggctgcagtgggccaagatcgtgccattgcactccagcctggggggaaaaagatagaaataaatctcttgtttgtaagcccctccgctttaaggtgttttgttttcgcacctgaacggactaagggactaagggaccaggaatcatccaggcctcagcttcccaaagcactccccactccccagttcctacagggccccgaccccagccccagcacccgtcattcacattttttacttacaaaggaaactttgaaatggacacttcctgttactttcattcaatgaaaaaaatccccagcacttgaaggcaatcatacagaaagcctgcaacaacgcagagagtagactcttcaggtggtggtgcctgctttaggctggctctccccgggtcaaaagggacgtgataaagtgttaaagtgatgttaaggatcaagtgggcaccaactgcgactcccctcccaccccccgacttaacagatgtcaaggaaaacagaaggaagccgtttctctccaggacatgcagtgtctgctggagttttggaaaaatgctttctctcgagtcgctgcggggagctcccaggctggacccccccgcacaggtcctccgccatcgccctcccagcccccgcccccaatccccctcccagacccggtccccgcccccatcccccgccagacgtcgtccccacccccatccccctccaagccccgcccgggagggcgtcctgcccgctcattgggcctcccgccggctcatttgcatggtccgaggggggcggggctgacgtcgcgctgggaatgccctggccgagacactgaggcagggtagagagcgcttgcgggcgccgggcggagctgctgcggatcaggacccgagccgattcccgatcccgacccagatc

SEQ ID NO: 207262 - DNA, 1000 bp, Homo Sapiens
gcgtggtgactcatgcctgtaatcccagtgctttgggaggccaaggcgggtggatcacctgaggtcaggagttcaagaccagcctagccaacatggcaaaaccccatctctattaaaaatacaaaaattagctgggtggggttgtgcacacctgtaatcccagctactcgggaggctgagacaggagaatcgcttgaacccaggaggtggaggttgcagtgagccaagatcacaccactgcactccaggctgggtgacagagctagagtctgtctcaaaaaaaaaaaaaaggacattagggttcattgaattagcagaagactgcagaaacagcctgggcatggatgggagtctgagccactcagcagtctaggagccggaaaccccagtctagcagcaggaacagcctggtcaggcctctgccactgctgctaggccctgctgcccctgctccccctgctgtcactgcaggtgtgagcagcctctaacccctgctgtcatccttgtgactgtcacttcatattcaatgtctcaggatgcactacctgaattggggagaggtgactctttgaaagaaaacaagtgttattatgatggagaaatgcaaactgtgcaaccagaaaatgtgaaacatttgccctaacaagccagggtcagttgaaggagtcctgactagccacacttggtgtctaaggcccaatccttctcctcaccatgatgaaagatatcccttgtatctaatctctttctctttctctctctctttcttttttcttttcttttttctgagacggagtttcactcttgttgcccaggctggagtgcagtggcaccatctcggctcactgcaacctccgactatccggttcaagcgattttcttgcctcagcctcctgagtagctgggattacaggtgcgcaccaccaaacccgactaatttttttgttggggtttcgccatgttggccaggctggccttgaactcctgacctcaggtgatc

SEQ ID NO: 207263 - DNA, 1000 bp, Homo Sapiens
ccaactgtaaaatgtggatactatttcccagctgcttttcttgttgtgactatcaagagatggcactgtgttaatttatccattgattcaataaatactttttagcaccaagaatgagttaggactcagcagttctcagtccacactgttggaggtttctaaaatatactgaaacctgattcaatcccatgcttagcttggccgattaaatcagaatctctggggtggccctgggtgcccttaagggtcacaaagatgatctgatgtagactctgctctccaggaggttctgggcgtatttgccacggataatcctaatgtaaagtagaaagtgaaggacatgcagacagggagccctggaagtgcccgggtggtaagattgtctgtatttcacaaacaactggggtcaaagcaaggtgctgtgctatttatttatttttattttatttatttatttatttttgagacagagttttgctcttgttgcccaggctggagtgcaatggcgtgatctcacgctcaccggaacctccgcctccctggttcaagcaattctcctgcctcagcctcccgagtagctgggattacaggtgcctgccaccacacccagctaattttgtatttttagtagagatgaggtttctccatgttggtaaggctggtctcgaactcccaacttcaggtgatcctcccacctcgcctcccgaagtgctgggattacaagcgtgagccactgcgcctgcctgctatttatttatttatttatttttgagacggagtctccctcttattgcccaggctagagtgcagttgcagtggcatgatcttggctcactgcaacctccgtctcccatgttcaagcaattcttgtgccttagcctccccagtagctgggattacaggcttgtgccaccacgcccacctaatttttgtatttttattggagacaggtttcaccatgttggccaggatggtcttgaactcctgacctaaggtgatc

SEQ ID NO: 207264 - DNA, 1000 bp, Homo Sapiens
aaagtcaaacaatccagtgggaaaaatgggcaaaagatatgaaaagagaaatcacagtaaaggaaatcaatctccctataatcaaggaaatgcaaaataaaaagtacaacaatgaaaagtaataatagtgaactatcattaaatggcatcccacacatatacatatgtagactagttttagtggttacaataattagaagatatatatatatgtatatactatcttggataaatgttaataactatggtagggtaaaatcatacaaaaatgtaaaacaacataatattatctaagtaaaattttaaaatgtgcaaacgatactacataatgattgctgatacatctacaggtagtaaggtataaaaacaacaacaaaatacacaccaatttcaggtactaacatggagagaaaaaaggaaatggaattgcaggagaggattgtcttctattgtacccttcaaatattaatatatctgctatgtcttctttcttacaaagaaggtctttttttgtgtgtgtgtcagatggagtttcactctgccacctaggctgaagggcagtggtgtgatcttggctcactgcaacctccacactccaggttcaagcgattctcctgcttcagcctcccaagtagctgggattacaggcgcctgccaccaggccccgctaatttttgtgtttttagtggagatggggtttcaccatgttggccaggctggtctcaaactcctgacatcaagtgatccgcctgccttggcctcccaaagtgctgggattacaggtgtgagccaccgcgcccagcaacaaaaaattagatctaaagcgaatatgataagatactaaaccatgtaaaatatggctggtgatagtgtactattttctgttgtttgaaatattttacaatcacctcttttttaaatattagaaacataaagcatatgggttattaatatgtaattcttttttgtgagacaactgggaaaagccacttgtcagatc

SEQ ID NO: 207265 - DNA, 1000 bp, Homo Sapiens
gagatgagaaaatatcagagagtatctcataagagtaaatattgtcttgtaaaacttttgttccagtgtgtgtgtgtatgtgtgtgtgtgtatgtgtatatgtgtgaaatcatgatgtcacatgtattccttactatggctcatggtagaaagcatttgaaaagtactatacaccattgcctcaacaccctcatcaacataaattcctaaaaccaaaccaaccaagttactgttggtgtgacatttggtcctaccccaaggtcatacccaactcttaagtgtggaagtggctccaggctgccatttatttcatggaatggaacaagagaacataatcaaacaagaagacactgatcccagctgctgctcccagccagatccctgcgtaatactctgtacacttgtatttgcttcttttgggggtgaaggatggggtgtttttatgtatgcccattgatatggtttggctgtgtccccacccaaatctcatcttgaattgtaactcccacaattcccatgtgttgtgggaggaacctggtgagaggtgattaaattatgggggtgggtctttcctgcactgttctcatgatagtgaaagagtcttacaagatctgatggctttaaaaccgggagtttccctgctcagtctctcttgcctgttgtcatgtaaaatgtaccttttaccttccaccatgattgtgaggtatccccagcccacgtggaactacaagtccattaaacctctttttctctgtaatttactcagtcttatgtgtgtctttaccagcagcatgagaacagactaatacacccattaaaaggctttgtattgaattttggcttcataatactattttaatagtatgtaataatagtaataaatgcatacttattgtgtactttatatgcattatctcatttaattattcatagcaaccttctaagatagattctaacattattcccattttcagatggcaaaaccaagattcagaagatc

SEQ ID NO: 207266 - DNA, 1000 bp, Homo Sapiens
gaagcgctctggggcaccagatccaggctcccgcaagataaagcaggcctgaccgtgccgtgtgggttgtgagccagccgggggggttgatggtcagttcttgactgtcacagggtctttcgttgccatccgagcctttcttctatgcttctgtgcgttttatttgaaattatatgtaggggactgtgggattatgttgctttgccttcgtaattacattgcatacttatctaaaattaattgagcttatcatggacaagactctctctagcctttctgtgtatccagcttcctgtctggtggatttctcagtcatgtgtgacatctaggcgtgtgctcgctggcctccggagccacagaaggaaagtggacagagggagtccctcggcagtgctgagaggctgcccctttcctctgcatgtcccctgaggtttgttccgggggcttctaaagggtgacaggtgtgggaatgatgagcctggggtacagcacgtgccagagaggtcttgtgatgccagggccctacccgaagtgtggatgtggtgaaaagctgtcttaggagcctctgcgtggctgccccattaatatttacgtagcgtagcatcagaacgattatgcttgctgaagccaatcttgttattgactctacctgttaagaaatggagtaacctgctgccaggtactgttaccagcaaaggctgctaacctcagaaggggtttgagctgagtcctgctgtatatgttttaatgctgaaagtataagaggctgactgagtccaactggaaagtaaaaatgtgaacttcaagcttctaatttgttgaaaggatttagatttttaacatgaaatagcagtagcctttcctttaattaaatgccatgcaacattggctgcgggatcaatgatattgaaggaaaaaaacagtgtaattagaccttgtgaagtgactaacaaatgattagggctctctttcaagagtgggggtgggggctggtaccaga

SEQ ID NO: 207267 - DNA, 1000 bp, Homo Sapiens
gctgagaaagtcttggtggggggaggcagtaaaaaaaaaaaaaaaaagagttacgacttcacatacttttggtgaatctgaatgagtctccttttgatgcgaagtaggtggtataagagacttttcaaataatttaactgtccaccaacgtagccttctcttcaggcagtttgttttgcttttaaattatgagagggtaccaccctccatcctcggtgtgaatattctctaccagaatgcaggaaaaacgttacctgtgatatgtgatcttccttttcattttaatgggcacattgttgccactcagttctgaaatagagaatttctccatcttccacttcgttaactttgcacaatatattgaagaatatttaaaatactaaaactccaggtgactgtagacacctaccatataagaaagtgggaatgtcaaaataatgagatatccatgaagtgataatgtaagctctcttaggtttatttccttttttaaaaaagttgaatttagaccagagaaagcttgaacctgataaccaaattagcacacactgtagtcacaaataaaattctgaggaggtgttttggagttgaatttaaggggaattttaataaaaactgtctttatttcagtccagcaaagtagctttatgcaagcataagtgcctgaggagaaaaattatacaaagtataagagataaatagatacaaagttgatgtaatttctacttgcaatgtgtaacagggattatagtgtgccaaaattatggtgtcatagtgaatatatttagcataacttttataatatttgttcactctagaaaattaaggcaatactgaaaagtacaaataaaacaataaattgcctataaaaccattgcttgaatatagcttcattaacattttgatctatattattttagttatttttcctgaatttatttatttttttttttgagacgtttcactcttgttccccaggctggagtgcagtggcatgatc

SEQ ID NO: 207268 - DNA, 1000 bp, Homo Sapiens
gcaccacccagcagggctatttccaaattctaaatccccagaaaccatgagaaatagtgagtagttgttatttcgggcaaccaaattgtgggattatttgttatgcagcagtacttaactgatacatggctgaagattcctgctgtcttctctttatttggcataacaccccatttcttacacagggaatctgttctgaacccagatacccttttctgacagtggaaacttccaattattggccagttggtgcatgttgggctctgtgcttaaagctagtatggtacatacatgatttccttaatcttcttaacaaccacacaaagaagatagcattattttcattttacggatgagaaaactgaggctcagagtagtggaatgatgctcccaacttaaagatgggcccagtggcctcaaacctgagcattttccctgagctagtctgaactgagctagccagggggtcaggtcgtggtcttatccctggacattacaggcttctgggacaggtagccaggcaaagcagggtatgaggctgggttggaggcctggtctgaagagcaggtcagaggaggggagagtaattctgctacaaggggcttccttagcgccagtgacccaagatagattgacgatagccttccataccatcctgaccttctggaagtgtggagactgctgtcttaccctgctcagggaagactggtgtggcgccaatatactgtggatgcggcccccgtgaatgtgctgtctgcagctccctcttcatctgaggctaagcccaggtgctctcacagaggcccctgatgccccaaaacgtgccaggctctgcccatcaaagcagatagcatcatctcactaccccaaggctccatcttgcagcccattctcggtccaagcttccaatagataatgatacttcatttagaccagtttcctgttcattttaaaaagatttacttaacaattaagcatttattacctttctctttatgag

SEQ ID NO: 207269 - DNA, 1000 bp, Homo Sapiens
gacatgacagctcacactggtgagagccgtgttctcccagggcacacagggcaatgaggtgttccctttgtgttgtgtgtaccgtgccatcgttgcctgttacctgacaccccaaggggttggcacggggcaacttggggggaaatgaggctcccaaaagctggggcctgggcgggtccacgaggctgtaagaggccgaggccaggctggaacccggtttcccagctccactgttactccttccctgtctgcagtcacaggcttgctcccctagacagagggcaacgggagcagcagatggtccctgggattcctcagggtgcacatgaagcctgagcctcacattgctcctgtcctggcacaggaatgtcatccacgccagcgactccgtggagggggcccagcgggagatccagctgtggttccagagcagtgagctggtgagctgggcagacgggggccagcacagcagcatccacccagcctgaggctcaagctgcccttaccaccccatcccccacgcaggaccaactacctccgtcagcaagaacccaagcccacatccaaacctgcctgtcccaaaccacttacttccctgttcacctctgccccaccccagcccagaggagtttgagccaccaacttcagtgcctttctgtaccccaagccagcacaagattggaccaatcctttttgcaccaaagtgccggacaacctttgtggtgggggggggtcttcacattatcataacctctcctctaaaggggaggcattaaaattcactgtgcccagcacatgggtggtacactaattatgacttcccccagctctgaggtagaaatgacgcctttatgcaagttgtaaggagttgaacagtaaagaggaagttttgcacacccagttccataacgttgttggatgtatgagccaggcaggggtccagagaccaccagcctgcaatccggagaacccaagctaggcgcgagccggtgctgtgatc

SEQ ID NO: 207270 - DNA, 1000 bp, Homo Sapiens
gggtgggtgggtcatcatatggatgttgaggtcatccagaatagtggcaggggtggacctggagaggaagagagtgacccaggcctggcagaacagagcaggcagcacggccaggagtccacagatggcagtgatgggaagcgagggacggcagtgatatggaatggcaccggcttccagggaactggggttttgatggaggaagcaggagaaatactttggaattggtaacagggaacaaggaggacatcaatttagctctaggctctgcaatacttggggtatgggagaaaagatggcattttgggagtcctagagagatggggtccttggggaatggcaggtttcatctgaggcctgacctgaaagcaggtggacaacggtgaacagtatgtcaatgatcctctgcgggacccaaagcaacatggtcgaaggattggggagggtgcggggagcaggccagggagggacagtgcctgtgcaggaattcccactatatgctcttagcacctgtcacatccttatcaagctctaccctaattactggtgcactcgttttccctttagactgtacattttgtgttatagagagcatatctttttattccttgctgtagctgcagtttctagcacagatatgctagcacctactatgtgctcaaaaatgttggttgaatgggtgagagaatgctgagctcttcccagatgccatcacaatgccaggatagcagttagctgaggtttggggaggagggtgtatagatttagaggcttccccactcctcgctccccacgtttcttctcattctgactctagtgtagaagtcaagtccatcctatattttatctcagaagttttggcaaataacaaggcatgcaatattgactaagagcctccaggatcccacaggccccagtgggccccattaccagctatttggaagttgaggcagacagactgaattgggtcgttgaaggagtttgccagtttgtggtggga

SEQ ID NO: 207271 - DNA, 1000 bp, Homo Sapiens
tgctttggaggtgatgggactatcaataagaactctgttcacgcaagctgctgtggacctggtctcctgtgtccagcccagccttgggcctgcctcgcagctgtgaggatggctccaattcctgcctcctggcgggagactgaggctcaggggaatggtatcttgttcaagaccatttggcaactgagagggagagcagatgtcaggaggagctacacccacattccggggaggggccgctgctgggtggggggcacgtggggacctgcactcatgcaagcttctgctctgctgcacccaccagccccgtccttgcccgcacccttgcctgcttccctggctggctcccacttgcctcccgtgccaggtgcttctggggctcagcaggagaggaaaggggcagaggggcatagggtccctcgggtacggtgggggcaggcgggcgcacagcgctccggctctgagccaggcctgtgagggaaggggctgcaggctggcagggtgccgacttcccccatggctgctgtgagcccgcagagtcatccttggccccgtcccgcccttggggaagaatgggcccctctgtcctcaggccccttcgacgtgctgagcatccagacgtggcgaggagcccgaagggtgtggggtcccctctgcagggtcctgcttgttgcctgtttccggcgggcggggtgcacaatggggtctctaaggaccgtttcccgccactggccccattgtcactgtctccgccttcctcctcggcctttcagccgcataaagggccagtgaggtttgggacagccacagcccaaggctccgaggctaaaagcccctgggtgggggtgttccaggacacctggccctgtgtgagctgcctcctctcaccccaacccctcggatcctgggaaagagacagccatggctcaagggccagggacccctgggctgagccccagaaatggctttccattctcgcctgggccggggtgggggtgga

SEQ ID NO: 207272 - DNA, 1000 bp, Homo Sapiens
ttgccaatccagaagaaggttcctctgtcaggcaagttactatctatcactagttctgctgccagtattagtcaggcctggtatctaatcaatgccaggcttttctctgagaagggaatggggtatggctagagcagtgtagattccctcataacccctttctgctgttttcttatgatctaactgtggaatttttggggtcagtgattccaggtttttttttgttgttgttgtttgtttgtttttgagacagagtttcgctcttgttgcccaggctggagtgcaatggtgcaatcttggctcactgcaacctccgcctcctaggttcaagcaattctcctgcctcagcctcccgagtagctgggattacaggtgtgcaccaccacatccagctaactttttggattattagtagagatgggatttcaccatgttgccaggctggtcttgaactcctgacctcaggtgatgtgcccgcctcagcctcccaaagtgctaggattacaggtgttgagccaccacgcccggcctgattccacgttgtaaataatttgtaagtattcagtttctacatctttatcatctgctaagaattttaaaataatattctctgttcagctgtcaatgttgaaacccatatttagtattacaagcttttccctggttttagctttgcttggagttttttgacccatgaatgttatttctgtttgtcaataagaaatgtaagactggaatgttaataaatttcagtttagttctataatgtcaagaatttaaaaatttaaaaaattactgcaggaaaaagatagctataaaaagaaaaaaaaaaaaaggcccagggctgggcacggtgcctcacgcctataatcccagcactttgggaagccaaggtgggtggatcatgaggtcaggagttcaagaccagcctggccaacaggatgaaaccccgtctctactaaaaatacaaaaattagctgggcatggtggcacgtgcctg

SEQ ID NO: 207273 - DNA, 1000 bp, Homo Sapiens
tttatctctttgaggaaccagcttttcatttcattgaccttttgtgggttttttttttcagtccatatttcatttagttctgctctgatctttatttcttttcttctgctagttttgggtttggttttttcttggttttctggttcctcgaggtgcgttcttagattattaacttgtaatctttctcctttttgatgtaggaatttattgctgtgttcttcttagcactgcttttgctgtatcccacaggttttggtatgttgtgtttacattttcatttgtttcaaaaacatttttttaaatttctgtcttaatttcttcattgaccctattgtcattcaggagcatgttgtttaattgttgtgtatttgtaaggtttgtaaattttctcttggtattgatttctagttttattctgctgttgtctgagaaggcacttgatgtgatttcagttttaaaaaatttgttgagactttgttttgtggcttaacatatggtctgtcttggagaatgttccatatgctgatgaaaatattgtatattctgcagttgttggatagaatgttttgtaaatgtctgttaagttcatttggtctaaagtccagtttaagtccagtgtttctttgctgattctttgtctagatgatctgtctaatgctgtaagtggggtgttgaattttcacactattgtgttgcagtgtatctctttctttaggtctagtaatacttgttttatgactcttagtactccagtgtcgggtgcaaatatgtatttagaattgttatatattcttgctgaattggtctctttaatattatataacgactttcttagtcctttttttttttttttaactgtttttagatggttttttctcttgccatttttaggattcactcttcactttgacttcagacagtctgattataatgttgccatggtggagacctttttacactgtatttgtctggtgattgctgagcctctcatatctggatc

SEQ ID NO: 207274 - DNA, 1000 bp, Homo Sapiens
gagctcctcctgcccagaccataaaattagcagttaagcaaagactcatctctgacaaattttctctctaagctctatagtaatcagccctgcagtagtcagatgtgaagacatttcacaaatcttattataaataacacttaacataaagcaggccagacatgatagttcatgcctataatcccagcactttgagaggctgaggtaggaggactgcttgagcccaggagtgtaagacaagcctaggcaacatagcaacatcctgtctctacaagaaatcaaaaagtccgggagcggcggttcacacctgtaatcccagcactttggaaggccaagacaggcagatcagttgaggtcaggagttccagaccagcctggccaacatggtgaaaccccatctctactaaaaatacaaaaattagccgggcgtgctggcacgtgcctgtaatcccagctacttgggaggctgagtcaggagaattgcttgaacccgggaggcggaggttgcagtgaactgagatcatgccattgcactccagcctgggtgaagaagcgagactctgtctcaaaaaaaaaaaaaaaaaatcaaaaaaattagccaggtgtggtgacgtatgcctgtagtcccagttacttgagaggctgaggtgggaagattgcttgagcccagcagtttgaggctacagtgagctttgattgcaccactgcactccaatctgggcaacagagtgagacactgtctcaaaatataaaaaataaaattcttacataactacagaaagcctaagtattagcttgataccaggatatattgcaataaaccatgtaggaacaatagggttaaaaacatcaggcatcaaaggacctgggttcaaatcctagctttgctatttactgattctttaaccttgggtatttctatgcctccatttcctcaggtgtaaaatgagggtgacaatatctttcctcctgcctactttacaagtttgttgagatgatc

SEQ ID NO: 207275 - DNA, 1000 bp, Homo Sapiens
atgaacttgctggttgtggggggaccatgggggacccctggaggggggtgggctgcatggcatctggccgtgtaggggacgtgggaatagtgtccgggcagagggcgcagcctgcaacaaggcgcggaggcaggaacaccacagcatggggagtcctcaggggacctggtttttctttcatagaagcttcaggggccaaggccggagactgcactctccctcctccacccggcccagctgcgtccctgccagtggctcctcccacttcctccagttctagtttccaacaacagaggctgcagccacccagccccgaagcagggcccagcgagacagggcccaggtaagagacccctccccccggcctctctcggtggggcaggtggaggccctcggaataggctgcctcgcccctaaggggtcagaagtctccctgacctaggggctcgggtagaagggctgtgtgtgggtgaccgcccccccgccgtagaaaggggttccacaggcagatggatttgagaaatgttgcttatctgtctgaggcccatgagctcatctggggctcaggggaaaacccacagcgagctccacgggtcatgtgtctcccagactcaagtcccaggcacctagacactagggtggccgctgggcttggtggccaggtagaccctcaggaccaggaggacccggcctcataggaagaaactggaggagtgactttgccattcccacacacagtggggccttattctctctcttgcagccccaagcgtgacccagctgcagagaagctgagacggtgattcggactgactggactctggcctccaggtgtctgcacctcacactggacccacctggagactccacgggctcccggcagctccggctgcttgggtggatccgggtgcccgcaggggctgtgggagggccccggggcctgcactgctcccccgatggcctgctcttcctcacggccggggctgcaccctgtgtccac

SEQ ID NO: 207276 - DNA, 1000 bp, Homo Sapiens
gtcccaaccctctaatcctctctttcccatgaccagtccccatcctctagacgtttactactttggagattccaaggattttaggagctgtttgccagaaaacagtgaccaaatatacacttcacaatatcactaatggcctcaaattttccttaattttgactattttcccataaaaaaacaaataaacaaataattttttctttggtaccagagcatttttactttcctgctaggccaggtgacaaaactctcactcattttcaacctaaacaacacaacacccatcatgaactgtcatcctccatttctatattgcaattccaacataaagtgatgctactggcagaattttcagtctgttaggagcaagtactggtgaaaatgtggaacaagagctccacacacaccgctagcaggacgtcaacaattttacattactagtgaagatgaagatgtacctatcccatgagcagaactccactcctaggcataaaccccaaagaaccatgcctacctgaaacaggaaatacatgcaccctgagggtttaaggtgaggctcaggaatctgaggtatctgcactttttataggtccactggtgatgttacctcctcccctgcaggggtcttggactgaaggcttacaacctcaactcacatctgtttttggagtcaggtgcccccaaggctcatggctgcagccaggcaaagctgctcactggagaggggtaatggggaattgcacatccatcggagatgctcctccctggtcaaaggtaactattctgaggatctgggaaaatccagcacagtatcagcatgcttttgctcaccagctgcctgctcttccctcttggtcacccctagctgtctgagcaagatgtggctcaaaactcacctcacctagtgatgggcttgggtcggcattggcatcatcctcattttcaacacaaagacctaaagtgcccacccagccctggtgctgctatgaatgtgatc

SEQ ID NO: 207277 - DNA, 1000 bp, Homo Sapiens
atcatattacccaattttggattataaaatcttactcaagaagttacagtcttccacacagtgtatgataaagtatcaagtaaaggatacggttgattaaaaaatataaatgtaggttgggcgtggtgtctcatgcatgtaatcctagcactttgggaggctgaggtgggaggatcgcttgagctcaggagttcaaaaccagcctgagtaacatagtgagaccctgtctccacacacacacaaaatagctgggcaaggtggcaggcacttgtacttccatctacttgggaggctgaggtgggaggatcacttgagcctgggaggtggaagctgcagtgacctgagatcgcattactgcattccagcctggtcaacagagcaagaccctgcctccaaaaaaaaaaaaaaaactcaaaacaagatcttggccctaagaacaaagattagcagataaatatacatttatatatacatactttatatattactaattatatattatgtgcaaagaggaagcaaatgaaaatattaaataatcaggccagatgtgatggctcatgcctataatctcaacactttgggaggccaagaagggaggatcacttgagccaggagttccagaccagtctgggaaacatgagacctcatctctacaaaaaataaaaaatatggccaggcacagtggctcatgcctataatcccagcactttgggaggccgaggcgggcggatcacctgaggtcgggagttcgagaccatattacatattattagcaaataaatcttttatatgtatataaacatgtagttatttggtaatctttgtagggccaagatcttgttttgttttgtttgtttgaattgttaagttgtctttctttcatatgccacatccataatcaatgacctatgttttccagtcctagtttttataaagaacaaaaacctaaaaacattcatgaagtaatctatgtgcagagtccttctagacttttaagatc

SEQ ID NO: 207278 - DNA, 1000 bp, Homo Sapiens
aaagtacctgttggcattgtggggactaaactactttgactgtgtttccgtaatatgaacataatatataatcgttgctttcaatcattataagtttattgttctaggttctgtatttgcatgctgacatgatgtaattggttcagctcatttttttttgtttgttttcatgaagattcttccttggaagttagatttgtcattctctagtgagctattcagaaagcacagttgtattaggacagcaaattattcatgaaagtaatgattctggcaacctgacagaagggaaaaccaaatacccaaatgaataaatctgttttcccctttcccacaagttcaattcgtctctatcccacagaatccactgtaaggctacagaaggtgctgtccctgatcccagctggggaattccttggttctttccaacaattatggtttaccaaaattgtccttactctgtgctatgatctatgtcatcggtaacattgtgctttctcaaggaattgtctgcttatggacttgtctgcttactagacttagagctccttgaagacttgggtagcattttcttcatctcttcattctcagggctggtacattgtaaaggaaggctttacctaggggtgcccaggagcttaatttgcatgcccacctcaggaaacttgctatatgaggacagaccacaggtactgtttgcattagggtctcctgggctaactagagagagacattctggaactgatgataccgaataaagagttatttagatagagaacaatgacttgcaggataggaagagagatgtcttgggagatgggcagtgagtgccactaatataaaatgtcgtggtggctgggatgctggcttataattagggggatcagttttgagttgatcctagtatggtgttactttaatgcattctggcctaatctttgggactatgtcccggattctttgataaagaacgctgtgagataaagcattaaacctcctt

SEQ ID NO: 207279 - DNA, 1000 bp, Homo Sapiens
gccaccacgcccggcctaagagcatttttcccacactaaaagataacacagtccagctggcttgctttttaaccagagcattacagggtcacctgtttggaggaggaggactgaggtcagagcaggctcctgtcaactccaacgggacatttcacagtggccacaacaggctgacctctgtgtcctgtgtcctgctgactgtgtgtggaggcctcagaggggctctttcccccttgcacagagagagacagcactggctcatgagcctgcttttttctgcactaccttacctggaactcaagtttctgggacttcccatgctggggtagaggtgactttgatcctcctgaaaacagcccttcatgcccccacacccacatggaagaggaactgttccgtggtggtccgtatccaaagtcactagatcttggcctggcatagtggttcatgcctataaccccagtattttgggaggccgaggcggaaggatcacttgagcccaggagtttgagaccatcctgggcaacatggcaagaacccatctctataaaaacaacaacaacaaaacaacaagaagtcagtagatcttaaagcactagatcttaaaccctgtgatgggcaatttccttgtcaatttagcgaggctgtgatacccatgattcaaccaaacgcttgcctgggtgctactgtgaggtgcgttgtacatgtggtcagcactgatgatcactggctgtaagtcaaaggttctcctctgcgaggtgggtgggcctcatgcaatcggttgaaaggcctcaagagcagaaccgaggtttccctgaagaagaagaaatcctgcctggggactgcagtgtcagctcctccggggagcttccggcctgctggcctgccctctggatttcagacttgcctagccagcccccacaatcacgtaagccgattccttgaaataaacttaatctatatctccttctggttctgattctctggcagaactctgatc

SEQ ID NO: 207280 - DNA, 1000 bp, Homo Sapiens
ctccctggcaaacaattaccatcacacaaagccatactttttgtgcctcggcgagatcccagtcgagaactttgggatggtccgcgatctggcactgatggagcaatagctctaactggagtagacgaagcctatacgctagaagaatttcaacatcttctaccaaaaatgaaaggtaacaaatgggagcagaagtcacattacaaaccagattgggattaaaacctttcttgcctgtttagacaagtccttaattttgttatcgtagcaccaccatgaaaagaccatgagcaccatgaaagaaatgtaaagtctttttcagaagattgagcttctttaaagatttcatttatgcctggtgcattggctcacgcccgtaatcccagcactttgggaggccgaggcagacaggttccttgtggccaggagttcaagaccaacctggccaacatggcgaaaccccgtctctactaaaaatagaaaaattagccaggcatggtcgcaggcgcctgtaatcccagctactcaggtggctcaggcaggagaatcacttgagcccgggaggtggaggttgcagtgatccgagatcatgccactgcattccagcctaggcaacaaagcaagactgtcttaaaaaaaaaaaaagattcatttattcatttgcaggaggttacagtgagccagtgagctaagatcccgccactgcactccagcctaggcgacagagcaagactccatctcaaaaaaaataataaaatgaaagtatataatttaagagtttttggtatagtcatagaattgtgcaaccatcaccacaatgaattttagaacatttcaattaaaaaaaaactccatgttcactggattattcattaatggagactgttacctatcctagtttgaaatctcacagagaattttcttttaaagcaaaggataagccagacacagtggtgtacgtctgtagtccagctactggagaggctgaggtagaaggatc

SEQ ID NO: 207281 - DNA, 1000 bp, Homo Sapiens
ttcatttagattgtcttgcatcctcagttctttggtaggtttatttatttatttatttatttatttttgaggcagggtcttgctctgtcatccaggctggagtacagtggcacaatcacagctgcctgcagcctcagcctcctgggctcaagcaatcatcccaccttagcccctggaatagcttcacagctgggaccacagacatgtgacaccacgcccagctattttttttttttttttgagagatggtggtcttgctatgttgctctggctagtcttgaactcatgggctcaagcaatcctcctaccttggtctcccaaagtgctgggattatagacatgagccaccatgccttggcctctggtgagtttctttaaactatcattatatagcttgtctagatgtatcttgctgtaaaggtggaagtaatggtttcttgctactttttatatcctaataagaagcaagtgtctaaaagtggtcttaaaaattattaggtagctgaaattacacactattaattaagtacacacacacacacacacacacacacacacactccatttcctaatttctctttatttttttttcctactcagtcatccacagcactttctattgtccacctgtagttctcaattgctaatgatttttctttccaggggacagttggcaacatctggagacattttttattgttacagctggggagatggtgctattggagtccagtggtgtagagatcagggatgctactaaacatcgtatggtaagtaggaccgctctcaacaacaaaaaattatctggtccaaaatatcaatggttctgaggttaagaaactctgttctaagggaatatgaacaatcgcctgtagcagatacagtcattgtttttccaccaataaattctggtggctaccaagcaaatcaaaaagcaatagaagagaaaggaataatgtgtgtattgtctttctgatttcaggaaggcagtgtgtggatc

SEQ ID NO: 207282 - DNA, 1000 bp, Homo Sapiens
cccacagctttacttgcctgaggttgtagccccagttaatacaatggcaagacatttaacagtgagatccaggaaataagggctcagataaactctcacatatccatggccgactgggaaataacatacatactaggaggggaagcagggtaggggacagggcaggaagaaagtccagtgaaaatcaaaagccaaggaaacttgagaactggtggcaactttaaattcagtttccaataccagaaatcatggaagccttacaaatttaaggtatctaagcataaccaatgtggaaatcattggcttaccactaagctatgtagacataagccagactaaaaaattaaataaaaaaaaacctgagcagagacagcaggagtaatctttatttatagacaacatgatcctgtatttagaaaatcctaagtctctacaaaaagagctactagattaggtgaacttgtatcttaggaaggttgcaggatataaaatcaatattaagaaacaagtgtatttctaagtattaacaaacaacctgaaaattaagaacataattccattaacaacagcatcaaaaagaatacctaggagtaaatttaacaaaagaagtagaaattctataccccgaaactgcaaaatattatttaagaaaattagaacccggccgggcgtggtggctcacgcctgtaatcccagcactttgggaggccgaggcaggtggatcacgaggtcaggagatcgggaccatcctggctaacacagtgaaacctcatctctactaaaaatgcaaaaaattagccaggcgcggtggcgggcgcctgtagtcccagctactcgggaggctgaggcaggagaatggcgtaaacccgggaggcagagtctgcagtgagctgagatcacaccactgcactccagcctgggcgacagagcgagactccatctcaaaaaaaaaaaaaaaagaaaattagaacccaaataaatggagaaatatactatgatc

SEQ ID NO: 207283 - DNA, 1000 bp, Homo Sapiens
gactgcagccaggcatggcttaatctgacagttttattaaaaatgtaggcaagttcctcaagccggtatgactgtcagcttttatgtaggaatcctgcttaccaaggatctcaacttgctataaaacaatatcaccctggcagaaaattgttctcccaggtcaaagtccgggagtcagcagagttattcacttggaggatttttgttgttcttccctttgtgacgcatctgaacaaggaagtgattttgctgtgttttcttaaaatcttattgacatggttcacttgttctggaccaaattattctggtggtgaatgatcctaattcttccttgctgcttttctgtgtaccttgtcctctttttaaaattttattttgttttatggggtatggaaataattatttctcaaatcactagcaactccattgaaagttctgcgagagatggtagagaggttgaaattcaaaatctgtcctgccacacactgttctttccagtctttgcctttgaaattcttccagtacctaacttagatacgccctagcctatggcgtcttgttgaatttcccccatgttggaaattgagcgttttctgccccccattctcccagcacatgcaccaaacttctctccagctccctactcacctgacctaacaccccgcttgggacatggtctgtccttttatccctttttcccatgatcccttgcccttagcaaatatgcagcaaatatgtgctgggttaaagtgaatgtactctttattactaactctaatctcagtagtcagtctgtaaaacacctttgatctctgttggtttgtaaatgtctctggaatctagcctttctctgtggcagggcctttatcacctcttgtcccctgcttcagctcagcctccttgagagggatctttctgagacataaatatggtgacgaggccgggtgcagtggctcatgcctgttatcccagcactttgggaggccgaggcgggtggatc

SEQ ID NO: 207284 - DNA, 1000 bp, Homo Sapiens
ctgtctggctgggtggcaggaggggagaggtggggtcactgcgggtctgcagggctgcaggaggggagaggtgggttcactgcgggtctgcctggctgggcagcaggagaggaggtgggttcactgcgggtctgcctggctgggcagcaggagaggaggtgggttcactgcaggtctgtctggctgggcagcaggaggggagaggtggggtcactgcgggtctgcagggctgcaggaggggagaggtggggtcactgcaggtctgtctggctgggcagcaggagaggaggtgggttcactgcaggtctgtctgggcgggctgcaggagaggaggtggggtcactgcgggtctgtctgggcgggctgcaggagaggaggtgggttcactgcaggtctgtctggctgggcagcaggagaggaggtgggttcactgcaggtctgtctggctgggcagcaggaggggagaggtggggtcactgcgggtctgtctggctgggcagcaggaggggaggtgggttcactgcgggtctgcctggctgggcagcaggagaggaggtgggttcattgcgggtctgtctggccgggctgcaggacgtgcactcagactcagcccgtgtggtttccaaggcccgaaggacacaccaggccagatgcccccatcacacacagggctagggagcagcaactggggtccacggtggttccgccccaccccaccccgcagggccaccctccgagagcagtgctattgttggttctcgccatagaacctgggtttaggtttgggggcccaggggctgcctggtgggggggtggggtgatatggtttggttctgtgtcctcacacaaatctcatctcgaactgtaatccctgtgtcgagggagggaggtgattggatcatggaggagggtttccacatgctgttctcgtgatggtgagttctcacgggggctgctggtttataagtggcagctccccctccactctctcgcctcctgc

SEQ ID NO: 207285 - DNA, 1000 bp, Homo Sapiens
acagaattggtgtacatttagtgttagtaggtaatgcctatcttccaaagtggttgaaagaatttacactcctaccatcaatgaatgtgaattccagttgctctaaatactcatcaacatttgataattgtcagtcttaaattttagcccttttttttgtatgtatgtatgtgtgtagggctgccacattgtggttttaatttacatttctctgatgagtaatgatctttagcaccttctcatatatataatgcccatttgaatacctcttttttcaagtgcctgtgtcttttatctatttttttctctattgatttgtgagagttctttatatattctgaatataaagtcatttgtcaaatatatgtattgcaaatatcttctcccagcttgtggcttccctattaactttcttaatgatgtctttcaaagaagagtaattctttattctaatatagttcaatttactatcatatgagatatgaagtattctctctttatttccttcaaaagaacatgaataatattggtattatttcttctctaaaagaccagagttcaccaatgaagccatgtgggttgagagctttgtttgtggataggttttaaattataagttcaatttctttaatagatagaaatactactaagattttgacctttttttcttgtgacatttctggtaatttctgtttttctaagactgttcatttcattttggttatcaaatgttgggggataaagttggtcataatattttcttagtatccttttaaggcctgtaagatttgtaatgatgtttcttttctcatttatggcattgataatctgtgttttctttctcctccttgattgagcttgctaaatttatcaattgtgttaatctttcaaagaagcaaattttggctttggtagttttcacttttgtatgtcctgaggtgcaaacttatatggccaattttttttttctacaaaaaatgctttatttaaaaatatgatc

SEQ ID NO: 207286 - DNA, 1000 bp, Homo Sapiens
ttggtcttgctgtctcaggggtggggaggcagagaggtggaggaggtggaaggggaggcaggagggacaggcacattctgttacttttattgaaaaaggctacgtatgagtgggcctgcgcagttcaaacctgtattgttcaaactgtctacatgtttgaagtaataatggctgagacctttccaaaattggtgaaccaaaccacagatccaggatgctgagagaacaccaagcggaataaatttaaaaagaataaccttgttggtaaaaaaaaaaaaaaaaacaaaaacacctagggatgtcatgtatgtcacgttcaaactgcaaaaaaccaaagaccaagataaaatcttgaaagaagtcagagaaaaaagtaaaataagggactgctggcttgacagtttgtaagtatcttttatcactagtcttgagaacagaggtggtaatattttataatacctggagtctaatttgaatgggaaaacggtgtatctttaatatttttttcttctgctctaaggaagagagttagggggtcatatttaatattctgtaactgaaattaattatttcttccattatgaatgtggaagtaaaccagagtattagtagaagcaggacttttgactgtcaccaattagaaaatgcaagtatattaattatatcacatttgttgttgcaaatcttggaatacactgatcactgcttgaaaattattgtagttatcagactcactccctgatcttgtttaattttttttttttttttttttttcagacagggtctcactctgtcacccaggctagagtgcagtggtgcaatctcggctcactgcagcctccgcctcccgggttcaagcgattctccagcctcagcctcccaagtagctggaactacaggcacacacatgcctaattttttgttttgttttgtttttcagtagagtcagggtttcaccatgttggccaggcgggtcccaaactcctggcctcaagtgatc

SEQ ID NO: 207287 - DNA, 1000 bp, Homo Sapiens
ctgtgcttccgtgcacctgcagtactgcccgagccccaggctccggtgatggccaggtgcagaagcaggagccacctccatcccagcacctgagtgccggttccctcagcccaggccacgtctctgggcttcacttagctcccagattccacaccccatggcatggtgggggcagccagccctgaactggggtccagcctacagcttctccaggaataaaaagtacagccaccccaaaagggcctctgaggactagatcatgcagtcactgtgtttggggggatggtatgtttattgcatctccaccagcacccccagatccatggttaagagagctgaccggagcaggaacaggagactttgtcaccctctgactcctggtggccaggggcacagtgaaaagggtaggcagcttgcaggaagcaagccttatttgggcttttttttcccagcatgttgcttttgaaaactccagccagtcctctctttgcaccacagtgcagggcttccaaaatgactacacattgaaactgtgtgatcctagtaaaccacggggaaaatgacaattgttccataatctttaaaaacttttctttttttttttttttgagacagagactcgctctgtcacccaggctggagtgcagtggtgcgatctcagcccgctgcaacctccgcctcccgagttcaagcaattcttctgtctcagactcccgaggagctgagattataggtgcccaccaccacgcccagctaatttttgcatttttagtagatggggtgtcaccatgttggccaggctggtttcgaactttggacctcaggtgatctgcccaccttggcctcccaaagtgatgggattacaggcatgagctactacacctggccaaagcttgtcagaacattgaaagctgttgtactgttggtctattggttataaacataaccaacgtattttactgtttggttataaccatacagagaaatgaaaaagattgta

SEQ ID NO: 207288 - DNA, 1000 bp, Homo Sapiens
tatatgttcttctttaaccattatataacatcatcttttaaaattcccattttatgagaggtggagggaatgcccttactaacaatgctggcttgattataagtattacttcttagttatcaaatcaaatatttgtttatccagctagatattatcacatccatccttcactactgtagaaacttgttgcagcctctggagcgatgattttgacaatcctttaatttccagtgtcaacatttgtgtatgagtgtgtgtttctgcaaagatggttacttaaattaagtgtcaaagttttaacgtataaaatcttaaagctgttgctgggaacgcatgtcacaacatgatttaattatggcaaagcattcttataacagtggatttgaaccctattttgtgcctgtatgtacccgagagatataaaagattcccttttaagagtcacaatgctattactttttactaactgcttagttagaaaaatattcaaaaatattagtaagtgggactctgcctttagttaattaacattatatagtacattcaccttaagaagtaaaatcaccaccaaataattaaaaatgtaaagaatgaaatctttttgatctatgagatcataagaatcagctaaatacaatattcaattaggcttctcagaagtggattctttgtgagaataaaatgcggaatattagttccattggaattgagtttggggaattgccttatttctgtctttctatctgtatggaaaagcattcccaacatccgaaaagtcacccaatcccaggttttaaatacacctcagtagtataaaacataattggtcacagaggttttgaataggctgagaatattgaggtgatgatgtaagcttttcattgctgtcttgtctgacacatctatgtcagagtcatgcccagtaaataaaatgaataggatcagagatgtagatataaataataatgaagtaatcttcttcctaaaattttgcttgatc

SEQ ID NO: 207289 - DNA, 1000 bp, Homo Sapiens
gatttttattactgaaaatccattaagaaaaattgatagggtttatatatttttgatcagctgaacagataatagtgtcaatgtgtggaaaatttttcttaaaacttgtttttgtatagaccaggtgcggtggctcatgcctgtaatcccagcactttgggaggccaagacttgtggatcatttgaggtcaggagttcgagaccagcctggccaacatggcaaaacactgcctctgctaaaaatgcaaaaaaaaaaaaaaaaaaattagctagatatagtggtgcatgcctgtaatcacagctactcgggaggctgaggcacaagaatcacttgaacctaggaggcagaggttgcagtgagctgagatcacaccactgcactccagcctgggcgacagagcgagactgtctcaaaacaaaacaaaatttgttcatgtattattttgatccacttctctgtggcatttggtgcaataaatcttttaaatttatcttgagccattttttaaaagcataaaataaagttcttggcccgtccaaagctgtatctatctctagtataattgatctaaaattttaaataaccttttctggaccaacagtaatgcaaaactcttctccaataagggcacaaagaaaatggaaacacacctcagctaccacagaaggttaggccaaggttggcgagatggagcattcttctacattgccagtcacactacacagcccttgtaccaatcaaaggctgcccagacagaaaacttcatttccctcttggtcatttgcaggtgcctacagaacccaagggcattttccagaatatcaaagatcactcatctctcctgtttttatcagaagtaaccgatgagaagcataaaatcagtccttgaaagccaggtatctggcctgggagtcacagctaggctttagcactctgctaggaaacataaacaacttcatagaacagtttcatacaaacaatatcacataacatgtgatc

SEQ ID NO: 207290 - DNA, 1000 bp, Homo Sapiens
tgaagattaagatgaaaacattaaaacactttagtaaactaaaatattttaaatccagtgtatacaaaacaatttaaaatctgtttcatatacaaacaaatctgcatccaatctaagtgcccaaacacccccttagagattttgcacatacagaggtcaacaaaatgagcacagaaatacagaaacttttcctaaaatccccattcaagaaatacttaacacctcagaatggtcactcattttggccacgggaaccctgatatattttggttcactggatattcgaaacctcaatccactgttcaaatcccggcttgctttccacaactttctgccttcaacaagcactgggtggggcttcctagtccaaacaacaaatagggaaagacatacacaaagctcctttgtgaatgtatagatttaaaataaaatcctcaacagggctgtttcaacatggcttagtctttcatcagaaaatgggtcctctgatttttttaatctacctttcacatcatgcactggccaggtggaaaattactttatttagctctgctgcttctggtttagaagctaattttcactcctggagaagaattaacttctaaagccaataccctctgcctttatggcaaacattggataggcattgtttctaaatagtcccaactacttaaaacttaagtcagttaattccacccaagaaaaccaaaagggatgcaaactactcccagcaaagtaaccttaaaaaacaaaagcatactttactttcctccctctctctacttccttaaagagcaaggaaggcctgtaggctcagagaagccaaggaaacatctcctcctttacactccgaaatagaaattctcatactccttgttatctttagttttgaataaactagatctttaacattaagcttttctaaataagactgaagatcaaggattagggtaaaggaaagaatgtcctgaagtctcttctttgttgctatcacaatgga

SEQ ID NO: 207291 - DNA, 1000 bp, Homo Sapiens
gaccttccacgtcaccactcttaccacgttagccacttaccctcatgaatgtcacctcatggttgcaggacagctgctccagatgttacacttgtgttcacgactggaagaaggaggaagggaaggagcaggcaccaggacatctttgcttttattagaaggcaaaagctttcccaacagactttctttttttaatatttttttttagagacagggcttcactctgtcacccaggctggtgtggagtggtgtgatcatagctcactgcagcctcggactcctgagctcaagtgatcctcccgcctcagcctcctgagtatctgggactttagaaacatgccaccatgcccagctaaatttaaaaaaatttttttgtagagatggggtcttgctatattgccaaggctggtctcaaactactgggttcacgcaatcctactgccttggcttcccaaagtgctgggactacaggcgtgagccaccacacctggccctctcaacagacctttcattggccagaactgtgttacctggccatccttactttaaaggagaatgataaagcagttattcagcatttacagcctgtctgtagtggagataggcaagagagaagctcacatatttacagatgagacagctagtgtgctttctcattactcagcacaaacccaagtcctaggattcccgcacctgtgttatttcactatactactcagcctctctaaattctgccacaggaaagtatatgtcaaaaggaggacaactctcaaaaatatatagtaatgggggccgggggcagtggttcatgcgcctgtagttccagctacatgggaggctgaggcaggaggatcgtttgagcccaggagttcaagtttgatgctgcagtgagctatgatccggccactgcactctaacttgggttacaaattaagaccctgtctctgaaaaaaaaaaaaaaaagtatagcaatgggatacattctattaagaaatggatc

SEQ ID NO: 207292 - DNA, 1000 bp, Homo Sapiens
ctgggtgtggtggcaggcgcctgtaatcccagctactcaggaggctgaggcaggagaattgcttgaaccagggaggcagagattgcagtgagccaagattgcaccattgcactccagcctgggagacagagcaagactccatctgaaaaaaaaaaaaaaaaaaaaaaaaaaggcaagcaaggtcaagagtcaaaggagcagtgttgaagttgggagctttaagaaaaaggagttttgaaacagttatcttagcagataaatatgcatggtaaatggtaaacaagcggctgagcagctatgaagatccaggctagaacagtgatttttaactactcctttaaatcaaggactgtcttagaccgttttttgtcctgtatgatactttgtatcgaacaagcacacactaaatattgttgaattgatgctaattttttaaagtttgcttttgaatgagaggaaaagacaagagaaaaaaagaaaacaaggaaagtgaaagcaggagagtgtttcagctttcccagggcatgggaatctcagaagcactttgcttgtttaatgacctttaccaagtcaccttttcaatactggcttcatttcccaggcaaaacaggggaaataatctctgcctccttattgtcttccaagaatatcataagctcttagtaaaataatatttgcatactcttggttgccttatagacaagaaaatatttagtttcctcatttttatagatttgcttctcttctctaggctgtttattattatagattggttagcaaaagtttggcctgttgacattgatttctagacaatagaaggggaaataagaatatgagcaatgaaaatttgtgacaaaaataaaacagaaaaatgaaaggagaggatgtttgttactttcaacctaccagtcaatatcattgtctttaaatatctcttggaatttcatgcaattattctacctcatcagtacacttgaagttgcattttaatttcatgatc

SEQ ID NO: 207293 - DNA, 1000 bp, Homo Sapiens
agacaattttatagccgggtgtggtagctcactcctgtaattgcagcactttgggtggccaaggcgagtggatcacctgaggtcacgagtttgaaaccagcctggctaacatggcgaaaccccgtctttactaaaaatagaaaatttagctgtgcgtggtagtgggcgcctataatcccagctactggggaggttgaggcaggagaatcacttgaacctgggaggtggaggttgcattgagctgccatcgtaccattgcactctagcctgggggacagatggagacttcgtctaaaaaaaaaaaaattatatttgtcattatagataataaagcacaaatgaacatcttttttttttttttttttgagatggagtctcactctgtcacccaggctggagtgcagtggcatgatctcagctcactgcaacctccgcctcccaggttcaagtggttctcctgcctcagcctcccatgtagctgggattacaggcatctgccaccacacccagctaatttctctatttttagtagagatggggtttcaccatgttggtcaggctggtcttgaactcctgacctcaggtgatccacctgcctcggcctcccaaagtgctgggataagtgaacatctttgtatgtacagttttgtgcacttgtggtagtatttttttttttttaattgatcattcttgggtgtttctcgcagagggggatttggcagggtcataggacaatagtggagggaaggtcagcagataaacaagtgaacaaaggtctctggttttcctaggcagaggaccctgcagccttccgcagtgtttgtgtccctgggtacttgagattagggagtggtgatgactcttaacgagcatgctgccttcaggcatctgtttgacaaagcacatcttgcaccgcccttaatccatttaaccctgagtggacacagcacatgtttcagagagcacagggttgggggtaaggtcacagatcaacaggatc

SEQ ID NO: 207294 - DNA, 1000 bp, Homo Sapiens
gcatgtgtgtctcgctgcagggaggctgtgggttggggctggacctagacccgttcagccacaccctgtcactatgtgggtcacacacagctgggtggagacctcccggtgcgtggcccagggaggtgtctgggcgtggagtctgtggacagccacattgtaccactaggacaggggctgctgctgggcccacagggtgcacggaatggggtctgtgggaggatgggggcatcctagcccagggcagggaccccgtgggccccccaagatgagctgcgtcaggctgttgctttgcacactctgaggggcctgcctgagtgctgcatgggaagccagcagtgtggccgccctccccagaactcatccagggcaccagggtggacccatgagtcccgtcgggtcatgggcatcagcctcgccatcctggcctccagatacaacgatttgtcagattccctgaggtcaaagggaagcttcaagggttgccatccccgcctccctggcggtcctagacgggatgtcaggaggacgcagggccatcgctgctttttaaatgtcacagtgactgcagcgtctgctcctctgtggaaggagcttgctccgctaatgagggagttcctcctcatggccttcccctcacttctcttcaaaaagttgccctttattttaacattttttaagttttatttttttgagccagggtcgtgctctgttgcccacgctggagtgcagttgcaatcatagctcgctgcagcctcaaactcctgggctcaagtgatcttcctgcctcagcctcccaaatactgggactacaggtgggcgccaccacacccagcctctgccctttgtaagtgaagtcccccaggcaggttgaacctcttacaccttctgcccctgcctgatccccactccctaccccccacctccctgtcccctgtaatgagaaaggcaataagttttggagctttctggagttcctgcccctcctgaaaaggtggct

SEQ ID NO: 207295 - DNA, 1000 bp, Homo Sapiens
ttgttgttggacttttttaaagagctttggtgccggatgggcacggtggctcacgcctgtgatcccagcactttgggaggccgaggcgggcggatcacaaggtcaagagatcaagaccgttctgaccaacatggtgaaaccccgtctctactaaaaattcaaaaattagcttggcctggtggcatgcacctgtattcccagctactcagcaggctgaggcaggagaatcgcttgaacctggggaggcggaggttgcagtgagccgagtttgcaccactacactccagcctgggcgacagagtgagactccatctcaaaaaaataaaaataagagctttggtgcctacgtgcgtcacacagacagtttaacacataattcattatcagcaagcggtgactgcccaggttttgcctgtggggaaacagaaaggttttgactccagtctctgtcttctgaagagctggcagtcacaactgtggcagagcctggtgtgtggcagctgcgtgaggctctcctggactgctgtggaggaaggggccctctggcaccccaggagcagcctgcccctctgtctgcctctgcatttagacccttagcctccttgcagagccacctcctggtcattagcgttaaagctcttctctcctgatgtagttttcctcaccgttcagtaaatgggcctgctgcttgtgtttggaacagagatagaagctgtagctcccacgtgtgtgtggagctggtttgacttttaaaaaattgtagtaccaaaaactatgattttttgtgtgttatccacaccatcaaggctgtatcaccgagtatctgctcattctgaaagtgtgcatcctttctgaattgaaatgaaagagcaggagaaaccgtctgtgtccagcctgttagaggtgttacatttgccctaggtgggctgggcagaaggctgttctgctcgggagcaacagtgtccacacgtcagtttccagagcccgggtcgccaggatc

SEQ ID NO: 207296 - DNA, 1000 bp, Homo Sapiens
atgttgcccaggctggtctcaaattcctgggctcaagcgatcctcccatcttggtctcccaaagtgcagggattacaggcatgagccatcacacccagccaacatctgatcttttctagtggaatatttcaatgtcttgattctcaggaccacttttccaaaagataattaagagtagcttcatccatccaaccacacactcactcattatccacaacccatccatccatttatccactccatctttcgccatccatccacccattttatctaccattcatccacctacccacccatccatttacccatacacccatcatccacccatcatacacccaccatctatccatccatccacccacccatccatccacccatccatccatctgcccatcatccatgcatccattcatccatccactcacctatcattcatccatccatccatccatatgcccatcatccacgcattcatccatccatccactcatccatccatccactcatccatccacccacccacccatccatccacccactcattcagccactcatccattcagacatccatccatccatccacccatcatccatgcatccattcatccatccacccacctatcatccatccatccatccatccatccatccatccacaacttttatttcattgtatataattctcatttggaaagggaccaaaagggaacatctttggaaagttttccaaaggtaaattttcctttcttgtttcttccttgtccatttgtctgtgtccttggtagtcaacatgtaaccacagggcagccttggtaggtactttgctaaccaacatctgggtcgagcccatgggtctgggaggtggacaatggcggcccaaacggaggtttcatgccagcctcagggagtatgggatacttcctcccaggaaggacaggagatggccccggtataggccggccttaagacaggacaaggcagggaaccgcgactcgggatc

SEQ ID NO: 207297 - DNA, 1000 bp, Homo Sapiens
cggaggttgcagtgggccgagatcgcgccactgcactccagcctgggcgatggaacatgactctatctcaaaaaaaaaaagaaagaaaacaaaaacacccaaaattgaccatagatctaaaacgtgaaactataaaacttttaggaaaaacataggagaaaatctttgggatcttgggctaggcaaaaagttcttaggtttgataccaaaagcgtgagccataaaataaaatattgataaagggaacctcattaaaactaaaaacttttgctctgtgaaagaccctgttcagaggatgaaaagacaagctacagcctgagaaaaagcatttgcacaccccctgtctgacaaaggactggcgtgtagaatatagaaaagctctcaaaactcaacagtaagaaataaaaataagcaatccaatagaaaagtcagcaaaagatatgaagagacatttccatgaagggaatatacagaataaacacacaccatgatgtccatcatccttagccattatggaggtgcaaactaaaagtgcaacaagacatcacacctattcaaatgactcatatgaaaagcagtaacaccaccaaacactggcaaagacctggagaagctgggccattcatgcattgctggtgggaatgtaacatggtacagccattctggaaaacagcttggcagtttcttcaaaaactaaccatctgactaccatgggacccagcagttgtgcttctgggcattcatccccgagaaaaaaagacttttttttttttttgagatggagtttcgctcttgttgcccaggctggagtgcagtggtgcgagctcagctcactgcaacctctgcctcctggatttcggcgactcttctggctcggcctctggagtagctgggattacaggtgcccaccaccacacccggctaatttttttgtatttttagtagagatggggtttcaccatgttggccaggctggtctcaaactcctgacttcatgatc

SEQ ID NO: 207298 - DNA, 1000 bp, Homo Sapiens
agagcctcagtgggctccttaatacaatggagatgatcttccacaccaggcctcagtcagttctccagaccagagaggtgagagaaggcttagtaagttacagtctgcttcgaaaattggagctgtttcttttctttcccctgacgctcttgggagatccttggaggaactgcgtctccaaatagacatcttagcttggacttctggctatggcctcttggggtccaaattccccacaaatgaatgaaaataggatttctggactcttctttgcccagcagggcatttcagaatctgtttggattgagaaaaattaagaagctgttaaaatgcttatttttgcctcaagaaaattttgtgggatttcctgccccgcctccaacaaagtgggcagcccccaccccagacccccttctactcttagaattagggctgggaaggtagcagaacccccagggcttggctcagggttttcacgtgatttttaaaatgcaatgccgccttcagatgatctgcatacccaagacgtcagtgtcacggggagccgtgggtctgtgcttccccaaggctggatggccccaagagtcatcacttccaaagcctgggtttagaacccaacagaagcaggtcacaggacagcgagaagctgcccaacagaatctcattcgcttgttcacctgttcaaccattcattcattcattcattcattcagctgaccaaagtatctcgtgtgcccagggctgtgctgggagtgggacccttcacaggcagccaaatcaactcaacccctgtcctcacatggcatgcagtccagtggggagcaagtccaattgcacagccgtcttcctgtcctcagaggcccgccctccttgttctggaagaatgggatgtggaacacagatcctgctccgagcgcgggaaatcccagcgggccggccttgggaggattcggttcatcctgacccatctctgacctggtccaggacagcccacccctcc

SEQ ID NO: 207299 - DNA, 1000 bp, Homo Sapiens
cagtcacaactgtgttctagcaacaaaactgggtacagaggttcttcactcaccctgcctcatgctcctccctttctcctcctctcccaggcctgccctgtctccatgcaaaactgtcttcatttaactcacacacagtctcataccgactgacaggctctgcccagcccatatccaaagattgtaaatccttcccaccccctttccttgtttgtctgccccacaccgtggcatttggaatcagttcgcagagatgactacacagacagagctttgtcctgcacctcagggaagggcagtctggtagggctatgcccctttccacctgcccttgcaccctgcctccctttcagtgttgaatacatttccttgtatctttttatttcttaattttaattgagacagagtcttgggctcacttgggcagatcacttgggctcaagtgatcctcctgcctcaacctcctgagtagcaacaattacaagcatgtgtcaccacgcccagtgacttttccttatatttgcctttatggtgggagaggttgagccccagaaccatgtcccctgcctcctgtctttcaaacatttggctcaggatagggcagaattggaagtgagggcagggaatggtctggaatagcaaagacctcctgggttcacataaaggcatggagacaggaccttacccaagaacccaggcttaagattgacaattgggtacttgttctgtagccaccaccactggtctccttcctgaagttaactctcagtgccttattctatgatatcatgaatacaaggatgccagggtctttcttcactgctaaatgtgcctttgggtgactccttccctgaccctgtgtctctattttccccatctgtcaaaggaaacccagttatgaggtctactctatcaccacaaggaatggagagtacatcggggttatatcaggcttggtgtaggctgggagttttctccatagcttcattttctcaagatc

SEQ ID NO: 207300 - DNA, 1000 bp, Homo Sapiens
ataactgaccagagcatcaaggctggaccagaaatattaattgtatttggtcacagctcagcattgattgtggcacagagagggttggtagtttactaatagcacaaagtaggtaagtggaagagccagaatttgaacctaggttggaatcccaccaaagcctctattttatttgccatgctaccacagctctctgacattcatccaggaggtagaccactcacctggtaaagtttactggaaaaatctgatctctgtttattagtactaaaactgcctaaggattattatgcaaccttcaatgttcagccaagacaaagtgctactgagcaccagatcctacgacattaagccctaaaaattatgaaccccttcctttgaatatgtttatagcttgaggactcaaggcattctgagttgcaaaggaccaccgggattatccagcccaacttgctcagtttatagatgggaaaacctgaggtctgcagagggaaatatcttatccaaatttatggtatgaactgacacagagtacaggtgtcttgacttctagctctttttaattgcacaagcaatctatgaatacttctctcaaagaacttaaaatatatcagaaggctgaaatgcccttggccaccactgcagtcttaagcttccttctcagaaggatccatcatcttcagtttggtgtatatccttctctatctttttctatatgtatatatcataaacatatacatgtacttgtagcaaatatatagcatatttgtgagatttttaaaaacataaattatataattacatgtaatgcttttcataaatttttacaatatacttctttccctcagcaatacaccttggagatctttccttaccagtatgcataagttcatctcattctttgtaattcctgcacaagctgccatgctttatttaactatagtgtctttatttcacttttaggtgctttccagatatttgatattaacttgtcaagctt

SEQ ID NO: 207301 - DNA, 1000 bp, Homo Sapiens
ataggcccagctaaacccaacctaaattgcagaattattagcaaatgcatgattattgttttaagctactaaattttggggtggtttgttacgcagcaatagattactaaaacacatagtatctaggatatggtgagcattccaataaatgtttaattaaattgtaagagattagatgggtaatttgactagtcagccctcgtggtccttccaaccactgaaattctatggccctaataataccttggattatgccattattctctacctctgctaatgagtcacatctggatgcaatatagttgagtccttggactttgtgacacttaacacatatagagacagctacctggggtcactttattttttgacagtctctttcaaacctacttttttgcagtactgtggaatccacttagatattcacatatgaaaatcatacctcaaccgccatttactgtagaacacaagctgttttgagggaaagtaatggaagtatttgtgcttccaagacatttatactttccaacttattctttacccattttgcagcctttagaatttttctccagtttcttattagagagagaaagccatgatgaccatgctgcaaaaagtgagctaactaatccaaactataccatttggtaaagtttgaaatggcttagaatttcgagtgatctgcatgttggaagacttagcctttgaattgttaatcactttaccctttctttagtgctgtactatttacgatgagttaatcaattttccttatttgattactttgggaggggctcaatgctatgggtttataccagaatatttttaaaagacggagtatagtccaagcatctggttggtctttctgaggtcatgcatgaaagccaatattttaccattaatatggtttggctctgtgtctccatccaaatctcatcttgaattgtaatccgaattgcagtcgccacatgggagggacttggtgggaggtgattggatc

SEQ ID NO: 207302 - DNA, 1000 bp, Homo Sapiens
tgtttttttttgtttttttttttttttgctttttaacttgtatttttgctgtatagtttctgtgtgatttatgctttaaagaggttctgttttgatgtgttcccaggattagtttcaagatttagagctcttttagcagttcttgtcgtggtggcttggtaacagcaaattctctcagcattcgtttgtctgaaaacgactgtatctttccttcatatatgaagcttagttttgctggatacaaaattcttggctgataattgttttgtttgaggaggctgaagatagggccccaatcccttctagcttggagggtttctgctgagaaatctgctgttaatctgataggttttcctttataggttgcttggtgcttcgtctcacagctgttaagattttttccttcgtcttaactttggataatctgatgacaaagtgcctatgcaaagatctttttgtgatgaattttccaggtgttccttgtgcttttcgtatttggatgtctaggtctctagcaaggctggagaagtcttcctcaattattcccccaaatatgttttccaagcttttggaattctcttcttccacaggaatgccaattatccttaagtttggtcatttaacgtaatcccagacttcttggagactttgttcatattttcttattcttttttctttgtctttattggattgggttaattagaaggctttgtcttcaagctctgaatttctttattcaacttgttcaattctattgctgagactttctagagcatttcacatttctaaaagtgtgtccaaagttttctgaatttttgattgtttttttccttaagctatctatttctttgaatatttctcccttcacttctggtatcatttttttttttatttccttgcattgggcttcacctttctctggtccttccctgattagcttaataactaacctcctggattctttttcaggtaaatcaaggatttcttcttggtttggatc

SEQ ID NO: 207303 - DNA, 1000 bp, Homo Sapiens
caccatcttggccaggctggtcttgaactcctgactttgtgatccacccatcttggcctcccaaagtgttgggattacaggcgtgagccaccgtgcccagctgctgttggcttttttctttagcttttctagggatttagcattcatttctcttaactgctcagatcctcctattgctggggaaaggctgtttaaagaaccataaaagacacaatgattataaaaactaaatgacagccttcttctccaatgttggataatcagcaaattttaagcaaaagttaaaagtactcgaatttatggaataagtaaagagtttgataacaaaatacttttaacaagatagtgtagagctttacctgaagatagacagaggcagagagtggaaaaatgagggaaaggaaggagggacagactgagagaaatgagggctaactttgtgttgggcagcttacatatattatttcatttaaatttcacaagaattttgcaaggcaggtgtatttctatttattttacaatcaaaggaactgagtatctaaaagatggtccaatttgcccaaagtcaaacagctagaaagttgtggagctggattcacagcgcatctgtctggttgtaagcccatattctgcctgtaacgaaaggtgaacttcaaaatattgtaaagcagaggctgcaaataaatgatctttaggctgaatctggccctcagatgtactcagcctacagggcattaaaaaaaatttgagtcagcaatttcacttatgaatccaaattctgtcttcttttgaaaaagacacaacaaaacaaaacaaaaccagaagacctggcaatgctgagaggtggctgccactctggaagagggattcttccatttcctgttatcgaggcccaccactcacaggatgcgtttctttaccgagctagattcactcaattcttttttacctggcccctataagactccaagtcttaaaactttctctgtaccatatgatc

SEQ ID NO: 207304 - DNA, 1000 bp, Homo Sapiens
gatgaagaaattgctgccctcccccgggatagctgtcctgttagaatcagaaatcggtgtgttatgacgtcccgtccgcgtggtgtgaagcggcgctggaggcttagtcgtatagtcttccgtcacttagctgaccatgggcaactttctgggatccagcgagcgacatggtaaatgagctccagaacctattgagcttgcagggaagccaagcttgcagttccagcaagcaaagattttttttaatagaccaaaccctaatctctacaggggcccagtacagttgtttggcctacctgatgctatctctaaactacttttaaaatgaagacatttgggtgtttcatgtcagtgaattatcttttctcttggacttaacaaacatactgttcccatacatagtacaaagagtagcataataaatattttctgtgaatgttttttataccctccttttaagtttaatcttttagtaacatataggggtttttgtattaagagcattatttcataaaatgctatcttatacataatccaactaattgacatgtagctcatgtatggcagtttgtaatcctggactagctttgctgacctgcagagctccccttaactattattgttagataaacagattggatagcaaggctgctgttctggattatctaatgctccacttcttcttgtgatggctgaacaaaagaaccactaagtgttttcttgtccatccttaagggactttaaaacaaattatgcctctttaagtccttgaaagtctccatctaaagaggaaaagtttgttggaacagtatatattccctatttttatgtttatttaatccataacagaaatgagtaagggtagcacaaagttctcattcagtaactcaacagtgtgatcatcagcccagtgataaaaatatacatactgaatggaagtacctacttaacatcaggaaaatattcctggagaacttaataaatcaggaggtgaggggtg

SEQ ID NO: 207305 - DNA, 1000 bp, Homo Sapiens
tcccagcgtagaaccagtgccccacaagctggggcaagggtcaggatttctgcactcaatgtaagcttccatcccataaggggattgaggtagaagaagggagccccccatctcttggttgcacttgcctaaaacagcctttgctaggatgataaatgttgatgccctatcttttctggaaagagaactgtctaactagggtctgggaggagagggagccgtgtgttattggctctgtcagtctgaagtagaatttccatcccaatgagatgtgagaagtcagagatggagttgagttttgtttcatttttctactctagaatcctttcgtgaagcagagttttatttcaaataccagtctcttactcttcttactgagttttagtagatttccttgagtaatgtttcttcatttgctatatgctcttaggaccatttccagaaatttttaattataatattcaccaatttcattgagtggtaggtctgtggagctcctcacactgtcatgctagaagcaaaactccaggcagattgtttttaaagttttatcaagttacaagatgataactaatttaagaaaggaattcgagctgtacattgtcttagattcttagaaacattaaaaaaggctcttttttttatttcttatctccccaccaccaaaataaacaccctgctatacatttcagatttcctattaatggcatctctgcccttccatttgttcagtccaggtatcctagatttatccttgactcctcacttacctcacatttgacagcaaattctactaccttgaaagtatgtctagaatctgacctcttctccttgcctcctccattgccaccctgttccaagctgtctccctttctcatctgggttatttcttcatgcttctacccttgcctgtgcacagtatactctcattaggttaagtgatccttttgaacaaaaatcagattacatcatgtctctgctcagaactcttcagtggatc

SEQ ID NO: 207306 - DNA, 1000 bp, Homo Sapiens
gtgaattcatacatgcctaacccaggaaatgttaaggaaggcttttcaaatataagtagcagctacccaggcgaagaagaaggatagataatccaggcaatggcaagagtctgaaaagccattaaagtgagtgcaagtgtgtcttatttgaagagctgcccactatatacattcatgtttcaacatatctagagcatagggggcacagtccagtcaaatactttttttagcttatattttaggttcagaggtacctgtgaaggtttgttacataggtgaacttgtgtcatgatggattgttgtacagattatttcatcactcaggtactaagcccagcattcaatagttaccttttctgctcctctctgtcctcccagcctccacccttaactagacttcagtatctgttgttcccttctttgtgttcataggttatcatcatttagctcccacttataagtgagaacatctggtatttggctttctgttcctgcattagtttgctaagaataatggccttcagctccatccatgttcccacaaaagacaaatctcaatctttttatgactgcatagtattccatggtgtatatatgccacactttctttatacaatttgtcgttggtgggcatttaggttgactctatgtctttgctattgtgaacagtgctgcaataaacgtttgtgtgcatgggtctttatggtagaatgatttatattcctctgggtatatacccagaaatgggactggtaggtcaaatggtagttctgcttttagctctttgaggaataaacatagtactttccacaatggttgaactaatttacacttctaccaacagtatataagtgttgcttttctctacaaccttgccagcatctgttatttcaaagacttttctaagccatggtaagaaattttattctgaagacagtggcaggtggtaggcagttggagaggagaattgaaggattttaaaaagaagagtgctgtgatc

SEQ ID NO: 207307 - DNA, 1000 bp, Homo Sapiens
cagtgtagtgccgtgaagagtgcctagcagagaaggaacttggtaactattactaaatatgggagtgtaatgaataggaacatgatattaatactatgtgagcatgttcctattcattacactcctataaataagtgagaaaagcaaggtaccaaaaaaaaaaaaaaaaaaaaaagcctagctaaaagatccaaaaaaccctcgaacatgttcagtgattatttctggggtgtggatcctgtaccaggtgtccaagggcccctgtaccttgacttgagaaagttccttctggggagcagtgagcttcttgctaatcctgcccttggccttcaactcttccacggtcttgtaagagtatttgggcttcttcttgcttccacttgggtctttcctccactggctcagctccttctgaaactcctgaaccagaagaatacagtcagatgcagcaaggaacaaccactttttaccacaggtgaggtagctgagaccattagcagatgtcaccattcactgtcttagatttatttacaagctctatatgaaggaaggaaaggatgcacctgcaagacaccaaaactatctaatgatactccttgaccccattcgccctcttacaaataatgaggttcagaaggcaggtacaccagatgggagggagaaacaaaaataaagataaacgaaacaacatttattgagcatctactatgggcaggcactatactacttttaaatgtacctcatgtaaaacttagaaatgcaatgtaaaggattttttaagcacacaaaaccttgtttctaactttaaaatgaagataaataagcaggccctaactctcaaagcaaaggtgtctcttacaatcagggtctgcaaaacctttctagaggaggagctaaggcaagcttgtccaacccgcagcccaggacggctctgaatacggcctgtttacgaacacaaatttgtaaactttcttagtgtgacggtagtaaagtccagccc

SEQ ID NO: 207308 - DNA, 1000 bp, Homo Sapiens
ttctgcctataaaaacctgtaggaaaggcccaacgcagcacaccccacggcaacttagaagtttgttctgggcagttatccttactctcgctcaagtaaactctttaaagttatatttgtgcctcagcttctgcctgtaggtcaataagattcaacagctatatgcaaataagaggccagtagaggcccaggagggtcatggaaaccctggaagcttggcctcagagttggagttgagaggaccccagatgaggggatagtttaagcacagtggtttcgatgggtctggggtccatttcagctcagctggggcctgtttctttggattttagaaagccgtgcccaggtcctgccatgcctcctgtctgatgcaatctcgttattcttttctcgaagtccgccagtgtccagttttttttgcatgatcctcacgacatccctttgagagaaaaggaaggaaagacgagcccacttctcaggagactttagggaccttagggacacagcaagcgagtaggagtcccagggctggggtccaggttgcctctggagccggtgctgttccccaggagggcacggaaccacctccctctctgatctgctgccatctctcttgcctcacagttcccgtgggagccatgaagctgaacgagaggagtgtagcccactatgcactcagcgactccccagcggaccacatgggcttcctgcgcacctgggggggcccagggaccccaccgacccccagtggcactggccgaagatgctggtttgtcctcaagggcaacctgctattctcctttgagagtcgcgagggccgggccccactgagcctggtggtgctggaaggctgcacagtggaactggccgaggctcccgtgcccgaggagtttgcctttgccatctgctttgatgcccctggagtgcgcccacacctgctggccgcagaagggccggcggcccaggaggcctgggtgaaggtgctgtcccgggcaagctt

SEQ ID NO: 207309 - DNA, 1000 bp, Homo Sapiens
agcaccgggcatctttccagatctctcctctgattttaggcgggggctttggtgcacacacagagcatccacacgtgatcatttgggtttgttttccgtgcacggtactagaaatgggacgcagatgttctgctcattctgcagtgcgcgtcgggagaggacactgggttttgatcaggatgaggcccttgggattcagctcagacgtctctgcacctgtgcccaagtccaagcatggccacgggactgatgtcagggccggtatgtgacagtgtgtgtgggtggtgccacctcctgtccccctacctagagcagaggttcctccccagctcctgggacgattcacctcctcttgttactgcaaaattagccaggaaatgacaccttttttcaatctgcacttccctgattaatggtcagattggcagtttagcgtatttgtcatttaaacttcttcctctttatctgttcatatggtttaccattttctatggggtggattatgagtttcttggtgatttacagaagtcttcaaatagacttgttattaatctctggttatatacgcaaaaaacattttctccctaaatgtcatttttctttttaacattgctcaggttgattttggtcaaacaaaatttttcatttctatgaaatcagacaggccgggtgcggtggctcatgcctttaatcccagcactttgggtggccgaggcaggcagatcacgaggtcaggagatcgagaccatcctggctaacacagtgaaaccccgtctctactaaaaatacaaaaaattagctgggcgtggtggcgggcgcctgtagtcccagactacttcggaggctgaggcgggagaatagcgtgaacctgggaggcggagcttgcagtaagctgagatcacgccactgcactccagcctgggtgacagagcaagactctgtctcaaaagaaaaaaaaaaaaaaaaaaaagaacagcctgaccaacatggtgaaacccca

SEQ ID NO: 207310 - DNA, 1000 bp, Homo Sapiens
gccaacagtgaacaatcttaaaaagaaattttaaaaagttatcccatttacaatagccacaaataaaataaaatacctaagaattaacaaaagaaatgaagatctctacaatgaaaactatgaaacactgatgaaataatttgaaaaagaccaaaaaaaaaatgggaagctattccatgttcatggaattggaagaattaacattgttaaaatgtccacactacctaaagcaatctacagattcaatgcaatccctatcaaaataccaatgtcgttcttcaaagaatagaaatagaaaaaacaattctagaatttatatggaaccacaaaaaactcagaatagccaaaaccatcctaagcaaaaagaacaaaactgaaaaaatcacattaactgacttcaaattatactacagagctatagtaacccaaacatcatggtactgacataaaaacagacacatagaccaatggaacagaatagagaacccagaaaaaatccacacacctacagcgaacccattttcaacaaaagtgcaaacaagatacactggggaaaagacagcctctttaataaatggtgctgggaaaactagatgtctatatgcagaagaatgaaactagaccccctatctccagccatatacaaaaataaaataaaaatggattaaagtcttaaatctaagacctcaaactatgaaactactacaagaaaacatgggagaaaatctctaggacattggtctgggcaaaaatttcttgagcaatgccccacaaacataggcaatcaaagcaaaaacggacaaacaggatcatatcaagttaaaaaccttctgcacagcaaataaaacaatcaacaaagtgaagagacaacccacagaatgggagaaaatatttgcaaactaccaatctgacaagggattaataaccagaacacctaaggaactcaaacaactctacaggaagaaatctaataatccagctacaaaatgggcaaaagatc

SEQ ID NO: 207311 - DNA, 1000 bp, Homo Sapiens
tttatattcagtgaaattcttaatgttaagtacacagttatatcagtttgataaaggcatacacttgtgcaacccatatctctattaagaaacaaggcatcaccaccaccacagaaaacttcattgtgccaggtaattccttcattcctaaaagcaaccactgatctgatttctattaccgtgagttagtttttatttttcaagaactttttgtaaatgaaatcatacacagcatgtagcctttctatttgttttttttatctagcataatgcttctgagatttcttcatgctgtaacatatgttaattgctctttttttttttttttttgagacggagtctcactcttttcccaggctggagtgcagtggcccgatctcggctcactgcaacctctgcctcctgggttcatgccgttctcctgcctcagcctcctgagtagctggaggagtagctggagtaggtacaggcacccgtcaccatgcccggctaattttttgtatttttagtagagatggggtttcaccgtgttagccaggacggtctcgatctcctgacctcatgatccgcccacctcagcctcccaaagtggtgggattacaggcatgagccacagtgcccaacttccttttttttttttgagacagggtctcactttgtcacccaggctggagttcagtggcatgatctcagctcactgcagcctcaacctccctggctcaagccattttctcacctcagcctcccaaatagctgggactacaggcacaggccaccatgtctggctaatttttgtatttttttgtagagacagggtttcatcatgttgcccatgctagtcctgaattcctgggctcaagcaatccttctgccttgacctcccaaagtgttgggactacaagcttgagccatcatgctggaccactcatttctttttttattgctgaatgctatgaatatacctcagtttatctgttctcctgcaaatctgacgtatttg

SEQ ID NO: 207312 - DNA, 1000 bp, Homo Sapiens
tacagttcttaaacatgtattgattgctaacaactgctgtctttctcccagcttgccccaccaccagtctttgtgcataagcacaattttggacatagttatttgtacttatttatgcttttacaccttcttccttttataaagattttagctggtttatgacttgagttgaaacaaggaaaaaaagaggagacctgaaatggtctgtcccctgccaaccagaagcctcctgtggtatccaaacagaatagttgcctcagtctgtcagcacttctgtctttgaaggtggtttctgcttgaaaagtggtgactattagcatagcctggggataattgcctttttttcttctctcgggataccttttttttttttttttccagatactttcttgctcttgtcgactttgtttttccagaagatttagcctgtggttaaaatgtttcgggtccccacgtgaactctctgtgggattacccaattctggggtaccttcaccagatcaccagtgctaaagagggcaaaggatcttcttggttaatagaaaaggctgttttggaatgaatctcaaagtccagaaacatcgagacttttcttcaatacttttttctatttggggtagcaactttacctagtgtaggggagggaggggttagttgggagggcttgtgtttaaggggttcagaaacaggggatttaagtgtgtcttttgtgtttgcaaggcactaacaccactcccgtctgtatttaaatgctgtccccaggttacgactatggctatgtctgcgtggagttttcactcttggaagatgccatcggatgcatggaggccaaccaggttgctttatacttcggtcaaatgatgctggaaggatatatttttttatatatggggagggagggtttcaaatgattttactttggaaaggtacaagaagtctatctgtggagcatactgtattccaaccatcggttgtgaggaaaatctttaaaaaggctgga

SEQ ID NO: 207313 - DNA, 500 bp, Homo Sapiens
  misc_feature (435)..(435): n is a, c, g, or t
tttggctaatcaagaatttatgttctccagttctgaactactcaaccactgttgcagataataatattaatgtattgataataatctttaggataatttattaagaagcacctaataaacatgggctcacttaatcctctcaacaactctgtgaggattaacgtgttattaaacccactttatggaagtagaaaccaaggctcagtgaggtgaggattccttgcccaagatcacacagcttggcaggacacggcagaactaggatctgatcgtggcactctggcaccaataccaaagccttaattcactgtgcctgacaatggtcctttgcactgaaagttgaggcccgatgagggggcatcagagttgtgtgttcacaggggtcagatcagtaatggtgctatctgtcccttgtgggctggggatatgccttanccaggggtctaagctgttagaagctgactctgacaggccacaagggcatgggacaagctaaccct

SEQ ID NO: 207314 - DNA, 432 bp, Homo Sapiens
ttttccaagaaagtacaactttaatgcatctgcagccagttcttagaacaggacaaggtgattagcagataccaattctcatggcttttgtgtttcacaaaacattaaactgcagactgcatcttgaattatttcatcaaatgacaaacacatgatgtagaaggaaatgatgaatacttaaaatataattgacaagtaatacaaagaagacaggctagtaagcataaattttcactttgtggacttctttgtcatcacattccctctgtttgttgtagtaatagaacgtattgtcccttctctgaagtttcttcacatatcctgtctccggccaacgatctacccctgggtccggctctactgggttatcctcgttccgccgagcaggagaggccgggggcgcccgggagcttgcaggcgggcgtgggtgct

SEQ ID NO: 207315 - DNA, 452 bp, Homo Sapiens
tttaatcagaaaaagactgtattgcagatacactggttctctcaagatctttcctggctttcctggcagctaagactctcagaattcaacttcgccaggacagcaaacaatgttgttggtcagactatctgctatttcctccatctggctttctataacagagttagtgtttagacccttctcatcataggtcctctgaacaccttgctggatacagagtatgaattactaggtacatacatacatacatagattaaatatcaaaacagatcctggttaagagtcaagataagagcggctgagaacttaactcttggtcagcttatttatttgtgctaattcctacctgtgcatttagaatgttttcagatcccttttacgctactaaatctatctatggtatttctggaaattttttctctccatgttcttttccatgcaatcaagcagat

SEQ ID NO: 207316 - DNA, 481 bp, Homo Sapiens
tttctttctgcttctttttgtctttcttcagctaaccgaatatgctcttcattttttagcctttgctcctcctctttctctcttttcttttcctgttcctcttcatactcctgctgaattcgtgccctctgttctgcaagccgtctttcttctttttcttctgcaattctcagtctctctcgctctgcttcctctctttgtttcttttcctcaatctggaaacgaagaaaattcttgtataattcttgctgtttaatctgaagttcagttggaggctcaccaaatacatttccccgagcaaaaggagagctctgtgtttgcatatgacctgagcttttatttgcagcatcttctaggttctcagcatttgaagtggctaaatttgggtctagagatacaacagcccttttatcttcatatgttcttgcatctgggttatggtaggcatctatattttgtctgtgcatcctatacaaatcag

SEQ ID NO: 207317 - DNA, 479 bp, Homo Sapiens; identical to SEQ ID NO: 60823

SEQ ID NO: 207318 - DNA, 545 bp, Homo Sapiens
tttctactgaaacttattatttgccattaagaattgcaaactatactactaagaatgaacaacattctcttcattaagcctttttcaaaacacacgagacaaagctcccctttggtcaaggtgtcccacacattaccactgcagctcccagcacagcggcgcaccatgaactcggacgtggagcccaaggaatggagatcgcaccagccttccctgcttccccaccccaactacacccaagggagaaaggatacgaggaaatacactatgtcttcaatgcttggggggctgggggtgtcctctgctaccaggtgggccggtcagtgccgactgtccggcgcgcgtcctcggggatctctggctccccgacctacacaagcagcagcagcagcagcgagtcctgccaacgccgcagtagctgctcatgagaaaagtgcccacgctccccaagccctcctgtttacatttcctagtggggcaaagatactttcccaggacaggcagcagagcagcggggcagagtgcactctgggacccgggacagc

SEQ ID NO: 207319 - DNA, 576 bp, Homo Sapiens
ttttcttttttaaacctgagggcaaaaaggaatggataaagtagtgtaatggattgacaatcaggaagaacagaataactcagtttttttttctcctacaaggagatatggctggaccaaaataaaatgacatgaaattgcaaaaatgaaaagtaaaaaaaaaaaaaattattgtcaccttaaatgatttcaaggttgttagacccacacttctgtatcctagagagctgctggaggttgcaaatgctttctattaacaactgttgggaatttttgagaaaccatggagaatgtaaggtgacagaagactggaaatgagcaaacgtactgcagttttcaaatcattagctaatagctttagctatttttctaaaataaaacctcatgaaccaaacaaatgttagtactctgtatttgggggaaagatttaaatagctgtaaagaacaaaacagttatctgtttttaaacccattatttgaagaccctgaagacagtaagttgtttcaggactcaagttttatgctgataataactttatgttcattaaaccaggttggataggacctctgcttagc

SEQ ID NO: 207320 - DNA, 367 bp, Homo Sapiens
ttttatttttattcaaaatgcaccactttattttccttaccagacagccaagcattaagcacgttccagtcacgtgacttcttcagcgagcccccaggcttccactccacgggagtctgggagctcctggacagaggagtcctgagatttcaaatagtcaagccttctccccagccacaagttcctttgatgcttgggttactgaacacaaacgcaatggattgtttgtcttcaacataatccgtttctgttcctaaacgtgttggctgcgctttctttctgatgagcacgctgactctaatttgaacttcatcaaaatcttctttgtcgtcgtatgttctagagtataagaaaagccaatacggcc

SEQ ID NO: 207321 - DNA, 587 bp, Homo Sapiens; identical to SEQ ID NO: 53237
  misc_feature (561)..(561): n is a, c, g, or t

SEQ ID NO: 207322 - DNA, 687 bp, Homo Sapiens
  misc_feature (533)..(533): n is a, c, g, or t
  misc_feature (657)..(657): n is a, c, g, or t
tttgttttgttttctttcacagatttaataccgcgatctcagccaaactccggccgagaagttgagaaatgtcttcaccccctctcgacattcgttcgtgcttcttcgccttggctggagcgataggggcgagcaggggtggggccggctggtgctgctacgcagggccgtgccagcggcttaataagtgacataaaatgtctacacgcataagtaaccgtacttagggcttctgcaagggccaccagagcgcctaggtggcaagtgggcgccgtgtcacgggccgcgctgcaggcggctgcgcaagtcttccacgcagccgtccagccccatgcgctccagggccgcgtaaacggctccgaggcccgcgggctgctgctggcgccagcgcttgagcatctcgtactgctggtctcggaagcggccgatctccacctccacggcttcgatctctgcctcgcgcagccccagcgtgcgcacgaactccttccagcgccgcgctgggaccgcgtccatcacgtcgtagagctgcnggcccggctgcagcatcatggctggcgagccggctggggactctggcgagagtgtgggcgcagcagcggggccaagagctctgctggggcactgggccaggaccatgtcacctgcgggcagagncgccttctgggtctggggtagccaggggtt

SEQ ID NO: 207323 - DNA, 545 bp, Homo Sapiens
tttatgataattgcggagtttaatgaacaccttgcttcacttcggggtctcatctgggatttcggagtgaactgtgtccagaggctgccagtggcaattcatgagggagtcgtagagttcttcacttttcaccataaactcttggtttgattcctcaatattcaaatgaagatgtggatctgtaaccccaacactttgggaagctgagaccagtgaattgcttaaatctgggagtttgagatcagcctgggcaacatactgagacgtcacttctagtgggtcttcatcttggttttcagctagaggtgtggtttccatctttaatttcactcagcagcttcccaacaggggacacccagcatgatggcaggcagatggcacagggggtcacttaggcataaccagagttccagctgtgtgttcaggggtctcatgcgcagaaaaacagtcctttccatttccatccactgcacagccatagctgtagccagaaagaaggtaagagccgtgctgtcgcgcataccagttgccatagcggtaactct

SEQ ID NO: 207324 - DNA, 461 bp, Homo Sapiens
ttttttcctgtttttgagacagcatctcaccctgccacctaggctgcagtgcagaggtgtgattatagttcattgcagccttgacctcctggctcaaattatcctcccgcttcagcctcccgagtaatggggaccacaggcgtgcaccatcatgccctaatttttattttttaaagttttttcatagagacaaggtctcactatgtcacccaggctgctctcaaaactcttgggattgggagatcctcccacacttttgagaccataacaatcatgcttgtgatgtgccagtatgtgtccactctgcagatctctaaatactgaaaacacatgttccagattccagcttcagtgtctgcatttatggaaagaagtgtccctcaacctggtaagaacacagcaaaaggactaataagcagaaggctaagtgtcccagagtgaacaagcagttcctttttaac

SEQ ID NO: 207325 - DNA, 332 bp, Homo Sapiens
tttgttgggtagagatgagatctcagtgttgcccagactggtttcaaacttcaggcctcaagcgaggatcgcgccttggcctcccataatgttgggattacaggtgtcagccaccatgctgggctttcatatctttctttttcttctcaaaagtagcgtaaggggcagaaaaaaaatcagtggtatgggatatattatcaggtgctcagttatgggtctataccagtcatcagggagtcactaactaccagaaagtatctcctcttagagatactaagattcttcccatttactatgttttccttaactttcttcatatctaactttacctt

SEQ ID NO: 207326 - DNA, 454 bp, Homo Sapiens; identical to SEQ ID NO: 60409

SEQ ID NO: 207327 - DNA, 492 bp, Homo Sapiens; identical to SEQ ID NO: 61456

SEQ ID NO: 207328 - DNA, 552 bp, Homo Sapiens
ctagaagaaaactgagctcaactctgtgaaaatatattatgctttcatggctagctctagcagtcctaccgaactacctcagcaaacacaccaagtcattactgggaacaacatacatgtcttctgaattgcacaaaaacaccactggattaagaaccagaagacttgctgcctaaatcaactgtacaactctgaacagtaattgtcacagacagtctcagtttgaataatatccataatggtgaacgtaacatcgtaagaatcaacaagcactgagtgctccgcatgtacctgtctcacgtgcagtgacacatttaatctttgcatttcccctataaggtggggttatcatctttacagatgcagaaactgaggcacagagaggcttagaagcttcttcaaggttatatggctagtatcagataattatgaaagtccatcaagttcaaatgtttgtaattccacttgggagaaaggtgaataaatgccaaaattgtttatcagattttttaagaggttactccatggcgaatatactaagaaatgttctat

SEQ ID NO: 207329 - DNA, 540 bp, Homo Sapiens
tttggtggttgctattttatttaaaacttttaaagaagttgtttattgccaataattaaagagctcaaagggaagtcatttaaccatgagattgccaaatagaactctacaacagctgattcaacctttttaaaattttccctggggagagacttcactactatctctgctgatggactccatagttctcatactttacctgaaagttcttcctaacatctgatctcaacctttcttgccggggcattggcctgttttcccagccaagccttgtttttgtttttgaggaacgaacagcttttttgggtacagaccaggagtccatgggtcttgaggacctctgtgtatttatcagttttcttctccacattctttttggcctgtctccatagacttgtgagccccatgccttgtttaagggggaaaaatggcatttccctacaaattaaatgtaagaatccatagagaactggaccccattaaaaatatttggaattcacatggccacttgatcatattccgctggctcagacagagcag

SEQ ID NO: 207330 - DNA, 443 bp, Homo Sapiens
tgcgtggtttagattggacgactgattattggacagaatggcatcttgtcaacacctgcggtctcctgcattatcaggaagatcaaggcagctggtggaatcattctaacagccagccactgccctggaggaccagggggagagtttggagtgaagtttaatgttgccaatggaggtatgtggttcagtatatgccttaataatcacgatttctttcctcttatattattatagtctcacagtgaccctttgatgatagacaagcaaggtgcagaggacctagctcagaaaaatttagtgaggtgcccaaagtgatccaacaaagaagtggcatgatgggctcatgaacccatttgggtggtctcttggtcccctgtactcttcagcataaactattgaatagttgatgcttatctgatatggaaggactctgaattttaaca

SEQ ID NO: 207331 - DNA, 515 bp, Homo Sapiens
tttaaagaaataattgttttatcgtgcatcagactatgtcatgggacgtcacaatggcaaagagcctagtataaaaattggaggatggggtggggcagcagagtgggttagcagcatccagagctgggctttatccagccctaggcctcagggcatcacctttgccttgggacgagaggagagtggtttgggcaggatgtggaccctctggccaatttccaggccacggtgaggccaagagggggtgggctatgtaagggctgtgccagttccccctgggacagtttggagctgggcatgtccaaagaagctccttttcctgtggctgtggatttctttgatctctgcagcactggcggtggttggcctgggcagtggttcctagaatttggtctcattaacctaggtcgcaaccttcagaaccccaggaagatcagctttaggaactccctggcaggtgaaaagggcagttcccatcataccagcatccagcctggacctactgttccctggat

SEQ ID NO: 207332 - DNA, 536 bp, Homo Sapiens
ttttagtgaaagaagagatttattgcaaagcaaaaagtacactctcaagaaaggggagcttgggcatacccaagagagaataatgggttctggggtttcatcttgatgggtttctttaaccaaggagtggaatgttcacgaaaattcctgggtaaaggtggagatttcttggaactgtggtgccatttttacatcaaacactggtctcagaactgtcatggcactggcgggtgtgtgatttagtatgttaatgagcatataatgagggcctaggtaaaacctccatccaatccagcaccacgttgggtccactcagccttagccagcttggtccacaccctggtttttcagcgtcttaacagcccacagcctcaagtcatgtaaatctgctgcctagaatttgttatcctgtgaccaccctgtagtattcctgtctgaaatctacttgtaaatattcaaatggtctttcacttgggcattccaactttgcttacttcacagtgtttcctgcgtaatatataagaaaagatgatcca

SEQ ID NO: 207333 - DNA, 532 bp, Homo Sapiens
tttttttatttgcaaaataactgacaaggaattttattcaaaatacatagagttcctataacttggtaataaaaacgaacctaatttaaaaatacacactcaaagacatattaatggccaataaacacgagaacgtgttcattagtcagagaaatgcagactgaaaccacaagataccactacatgcccagaagtcacaatatttgtgtgcaaatgttcatagcagctttactcacacttgccaaaaactagaaaccaataaaatgttcactaacaggaaaacagattaacaaattatagtatattcatacaatcgagtcctactcagcaataaggactgttgaacctcaacaatgtttacgctgaaagaattacaaagctccagggaaggaaataaaaatgaaccctagtctatgatgaaaacatttgagcttggtggtggtgggagattgcttaattgcctgggtagagtaagctccttttgtcctggtaaggtgtgggcaaaggagaaccacttaccaaaattataact

SEQ ID NO: 207334 - DNA, 519 bp, Homo Sapiens
  misc_feature (13)..(60): n is a, c, g, or t
  misc_feature (62)..(63): n is a, c, g, or t
cggccgccaactnnnnnnnnnnnnnnnnnnnnnnnnnnnnnnnnnnnnnnnnnnnnnnnntnnattgataatatctttttaaaaaatgtttggtaatcccaactaatcattcaaaatgcaaactgtaaacacgacaacagcaaaagggtaacaattgagtgagtaagcagactgaacaggtgacagactgagcaagagtgtgggggggagcaacagagaatgtaagacaggtgcacaagtgtgctacagacagtgataatttgagtgtgtaagaattacatttggaccacagtgatttcaaggcaaccatttaggaaacctctgggccaaatactaaaacacaggaggaatggacgagccttctttgtgagcatgctcagcatgttggcatggaaacaaggaagcatagaagctctttagtcacaatgaatgtctaccatttctaagatgcaaagaaattttctttctggtccctgggtacatcatatattgtctttccatgcttttcttgaccccgga

SEQ ID NO: 207335 - DNA, 561 bp, Homo Sapiens; identical to SEQ ID NO: 59661

SEQ ID NO: 207336 - DNA, 211 bp, Homo Sapiens
tttgtagaaacaaagtctctccccgtcacccagactggtctcaaactcccgcgcccaagagatcctctcaccccggcctcccaaagcgctggaactacatcacgcctagttcttcatctctaaacatggtcaaattcatagtctcagggaaaggaaaaaacatttagcatttttcagaacagacaaggaattgccttcattttttatattc

SEQ ID NO: 207337 - DNA, 467 bp, Homo Sapiens
catttaggaagttaaagtagaaacactatttggaactcaaaagtcatttgaatggatcatcacattccctgacaatgccaaacaaaggagaatcactcctgagggtgaaatggttaaaggagaaaactggtttggaactcaaatgtcacttcaatgaatgatcacattatctgacaatgccaaaccgacaggcaggggagcctggcaggaggatgagagctacctggtgactcacctggctggaattaacatgtcataaaaaggcaactgccctctccttgcggtgggtaatcaaggcacccatttagaggcttgctggtcaaaatgaaccaactccagtgttccatgcttggagctcaacactaagtcagactgctctggccctggagccaaagccagtgaccgacccctgcccattacccatgtgactaggtgcctgccccgctcactttcggtaccgggtctct

SEQ ID NO: 207338 - DNA, 283 bp, Homo Sapiens
ctcttcttatctttcctctttttcttcttacactcctcacaggaaattcacagggtaaaaatctcacattcattcaggatatatctgccgtttattctggcatcttcatgaggccagactcctcgagagggttctcaagggcagtggcttcagctcactccttgatattttctttccatctcgccgaacaatatcaaaacctttgtttatcacggagaccaggaggaaatgctcaatatttgtatgtatagtcaacctcaggcaaatctcttcgccttggttc

SEQ ID NO: 207339 - DNA, 507 bp, Homo Sapiens; identical to SEQ ID NO: 58710

SEQ ID NO: 207340 - DNA, 542 bp, Homo Sapiens
tttcctaaagccaatctttaacatatatgcctttcatttacatcaggcaaaaaaacaaaaattagaaaacagtagtattaaggatagaatttagtttccaaccttaatacactttcctccatctaaatagtcacccaaaacctcatagttattatccattgatctaatagttgaataacttttggggggaataaaaaagatggattcatggtcaggaacctataagagttttcccagagttacttttttagcaaggctctcagaagaaggtaacaattggcagcttgtgcttgttaggagccaagcttccacttgggctgcagggagactcacaatagcatgaggcccccagcttgtctcaattccctcaagacttatgcattcttttttctctccctcaatctgcttagaggatgtttcttcttttcttacctgtgtgccctaggccagattaggaaactatttcctttgaagttttctgtacaaagccttatctgcaaagtttttccaaactaagtaagataaaggaaatggttcaatgt

SEQ ID NO: 207341 - DNA, 498 bp, Homo Sapiens; identical to SEQ ID NO: 153286

SEQ ID NO: 207342 - DNA, 543 bp, Homo Sapiens; identical to SEQ ID NO: 153301

SEQ ID NO: 207343 - DNA, 530 bp, Homo Sapiens
tttaagaagccccaaactgagtttattggggtatagaatgggggataataagtaactccagtatattcaggtaaagtctgatatagcttgggatatctaaaatataacaccagggctactctagggtcaaaagtccccaagagaaaacaggaaaagtagacatttctctcaaaaaagtcaggaaacaggacactgtaccaatgcttacaacctcatccatgttcccaatgacttccctgacttgtccattcttgcatcacttcaagtcatcaacatctttccattttttagcccaaattactggatgagaagaaagtctttttcagaagaataaggtggttctcattctttttctcagtgccatctggttccagtcaaaaggtaaacttctttacaaagaaaagtgttagcaactataagctctggaaagaccagcatcagggcctcttcccacccactaaatctaatttcctatctctagaagctactgtggctaaactcttagaaaccagttacattggctgggcatg

SEQ ID NO: 207344 - DNA, 525 bp, Homo Sapiens
  misc_feature (496)..(496): n is a, c, g, or t
tttttctataaatacctcttgtttttattattaagacaatgcagacataaaacacttcatactgtagtttctacattgcagccaaaccacttatcaatggccaataaattacttcactcctatgatagatacaaatgctcgattcaagttcaattaatagaatagtgtcaggatatcatgcagacagcttgcataaatactcgaggaataatagcataccttcagtagattctgtgatttttaagcatgaaaactttgtcttattccaaatttcaaaagatggaataaagaatgttttcatataaaatacatttggaacagttttccttcttaaaaaaaaaggcatctaacccacttgcaacatatactggcaattcatctttgtagttacaaaatcagatagatatatattctttttcatctcatgtgactgtatgtgaacatttcagtaattccaacaatatcaaacagctaaattcaaaatcatataatactntctaataagtgtatacgatatatatcttt

SEQ ID NO: 207345 - DNA, 593 bp, Homo Sapiens; identical to SEQ ID NO: 59937
  misc_feature (522)..(522): n is a, c, g, or t

SEQ ID NO: 207346 - DNA, 450 bp, Homo Sapiens
ttttaacaattgcaaaggtatttattgagaaatagtaaagatatacatatttttacaagcttttaatattaatttacatttcttttaaattatgtaggccccaataatctatactttactaatacataacagaaacccttgacattgtgagatgtccataatgctaccgtagttgggagtcaaagtgcaactttggctcatgatgcttaagtttgttttcaaaagaaatactaaatgccatattcactgagaatgtaggcttgtcataaacaaatgtgctttaaaaaaaacaacttcatataggagcatgctgttgacactattctgaatcttagctcattgcggactaaggagaaaacatttttagagacagttattacctacttgtcgtgtgcaaactgtatgattctaaaatatgtttttgcctctgaatttgatttacaaaatttt

SEQ ID NO: 207347 - DNA, 462 bp, Homo Sapiens
ttttttaaaagatactttttatttatttatttatttatttatttttatttttttagagaccatgtgcagtttaattgtggggaggctgaggaaagcagcattttcaccaaattggtgtaaaaataaaatggggtccacacgtgtacactggcagctacagtaaatttaaaaatctgagcagcaatttgaaccatttcttggaaaaacaaacactgacaaacactgagttggtgcctggcgcggcccgcagggttggaggccagctccgcatcatgggtgcagccccgcactgtgggcctgcatcccggggatcccatctcctcggggagtggccggtgaccttccacgcagtgggctgagccaggcctggttgaaagggggccgcagccaacaggcccggatggcctcccgcgcctgcaggggacatccaggaaatgggtgcagtgtgcgggacccgcatgc

SEQ ID NO: 207348 - DNA, 552 bp, Homo Sapiens
tttttgagacggagtctcactctgtcaccaggctggagtgcagtagtgcaatcttggctcactgaaacctctgcctcccaggcccaagcgattcctctgcctcagcctcatgagtagccgggattacaggcatgtgccaccatgcccggcctacataactaccttaaagctccgaataaagactgtcattgctcctggagggaactggcctttatacatatcacacatatatgactagacacatttaagaaaagtaacgtatgatattcagtagagagaagtgtaaggctatgtaaatctttcttcagacacacacatatgctctatcaagtaatgataactttttttttatccaatacattaaaacttttaccaagtgctgctgcctctaagccagtcattttagaaataaaaggaattcttaagttgaccctactctaaagaggtttgcacctttctttttgaaattgtttgtatattccaaactttttattatttttactcaactggaatgatttggcttcaatcacaccagacttatctctgaatgac

SEQ ID NO: 207349 - DNA, 509 bp, Homo Sapiens
tagagatgaggtctcgctacattgccagggcttggtcttgaactcctggcctcaagcaattttcctgcctgggcctcccaaagcactatgagtacaggcgggagccactgtgccccggcctgatttgctattctgtctagagcatgcatttgccagtgggttcctgggttggccagatgatctctaaatctgcaagagctctggaatctgacaacaatgactcccttcagactctaaaaaagtctgtgacctgacagttctgagccagggagtcccacccagccctctccacagagagggagtgggtccgaaatcaactgtgtgcagtggctatgcccaggccaggtttctctaagaggtcctctccaagttcaacctgggggaaggatgcctaccaggcactttcttacagctaccccgggtgctgggcggggaacctgaaccccacgccccaccaccccacgaagcccacctacctatcatcgtcgctgtctaggtgaccactgatg

SEQ ID NO: 207350 - DNA, 473 bp, Homo Sapiens; identical to SEQ ID NO: 60488

SEQ ID NO: 207351 - DNA, 569 bp, Homo Sapiens
tttttaatctaactgatgaggaaactgagactctgacaggtccagtcacatggccggaaatggcagagctagaatttgaacagggtcctgcctgtctccaaagcctggactctccaccaaaatgccttcccctctcccatactgcaatccaggcaggccactgtgggtgtagtgagtcccaaagctccgtaattacagggttcaactctgcctccagaataaccatgacaaaatttgtggaaatgttcacaacagctctttacttccaggttctgagatcagaaacggaagtttcaaaataccgaaagttcgtttatgttgaacatagtgcttaggctaaaagcaggaagtccaagaaagcctgatctcatgagattttttcagcccaatttggatccacatctgcacttctggattttccactgagtctaacctcagctgctctgctggtctcaccgagtctgcacctccagcatggggcacagataaataacacagtcgactgctattcactaagatttacccagggattggcctcttgaaaagtagtgagcttggacaggcagtag

SEQ ID NO: 207352 - DNA, 682 bp, Homo Sapiens
  misc_feature (514)..(514): n is a, c, g, or t
  misc_feature (647)..(647): n is a, c, g, or t
tttttttttttttgagaatttgcctctttattgataacataagtgcagaggagataagggtagcctgagcggcatgggcagcccaggtgtcagtggcaccagaaaaacccatatccaaactagctcctgaagaaggatggcattctagggctagtccacgacgatgtagacacagtcgtctgggtcagcacgtagttcattggcgagcattaattctctctgatgtcgcctacatctggcccttttattcttaaaccaaacccgcactttgtcttcagtcacacctaagttttcggcaagttcccttcttgtgggcacatcagggtattgagtgtgtcggaaaacactttccagctcctccacctgcaacagcgtgaacttcgtgcgccgagttcgtggctgcatgttctcgggctgcggaccctccatggccgcctgggccggctcctccggcgggggctgcggctgctgccgaggctcctggtttccaccgccgccctcgggatcatgccgncatcgggttcatgccgttctcgtggttcacaccgccctcaaggttcatattacccatgagggcctggagctccttggccaacatggccttctgcgcttgatgctgcccccagcctgaggtgtgggcttatttntacctggtatcactcaagcagtaaaacacggtgtc

SEQ ID NO: 207353 - DNA, 562 bp, Homo Sapiens
tcacaatttttttcacaattcatcagcttaactccatgcagcacttccaataaagattcatcactttcagcacatctaatgattattgtctcaattttatatcaagataataaactttctcataactagatgctttcatttcccctttttccacttgttttgttaaaataaggtaaaaagcaataaaattttccaaataatttttgaaatttttgccaaaagtggcaaagtcacagttctgtagcaggtgggggttacttggcaagacagcaacacaaacagcccaaaaaaggcattcatcaaatgatgttcgtaagtcaaaatccagtatataaatggcatttcagaggtgacacgtatagtattccatgtgccagttatttgaaaagtcaatgatataaaagccaagggctaccagtacctgtttactaaagagtacatattaaacacactaacatatgaaaaaccaagttcttaacttctgtattatactaggtatacaataaggagtattttattttgtacctactatttactctgaatggctgtttgttgttactgt

SEQ ID NO: 207354 - DNA, 519 bp, Homo Sapiens
tctctagtttactttatcgtaagaatacagtctatgatatatataaccacgcaatatgtgttgtttatgttattggtaaggcttctgtcaacagtaggctgttagtagttttgggggtcaaaagttatacacaaatttttggctgcataggcaggagtggttaagtttggtaaccccaaacaccaagttgttcaaggaccaactgtatttcaggcaaacatacattaagcccgcactaagggcaagatgtggttcctgtgcacactgtgggggaaaccaaggaaccacacaagaacttgctctcaaagggacttacaaatcaaaggcaacttcccctactcctcagcagccccaggcaatggtgagaccaaatgatctctctagaaccagccagcactatgtgcatggagagccagcatgctcctccacaccagatttgcttaactttgtgataagatgttgagtggaccggccaagctcatgaggtcccttcctgggccactgggtcatctgagaatg

SEQ ID NO: 207355 - DNA, 540 bp, Homo Sapiens
tgcgaggggcgcgggtgggggttgtgattatagtgcctctatgagctgcagaagacaccaaagaactagtcaaaatctaggctaatgcttccacacctacttaaatgacaccttacaaatattagtaaattgtaagtcagatattagcaatgtaaggaagacaggatgagcttagcttcagttaactgaaaggtctctttcttatcatacctggtatcttagttaaaattaggtagattattacccataaaagatactcactgatgtatcattaaagaaatgttctctaagaggtgtagccactttcactttcttgaatgtagaacaataggcttctagttgaaaaggcaaacaggtaaggaagacaaattactaccttatttgttttttatgtgagatcaagtatatataaagttcttggcatagttctgaggacatagtaaacactcaatagctgttaactgttaccactacttttaatacttgaacatttagtgttatttcattaaaattacttgaattctgaaagctactgataga

SEQ ID NO: 207356 - DNA, 457 bp, Homo Sapiens; identical to SEQ ID NO: 61890

SEQ ID NO: 207357 - DNA, 475 bp, Homo Sapiens
ttttttaattagttttgaatttatttgaattttatattgaatgagtgtttattggaataaataaataaaccgtacatcaaaccagtgatttcatggctattatttcttataaggcagagaaatttttaagaagtgagtttgtttagagtgaattaaacaaaaagattaaataaatactggtaaaggcgtatatggatactgccaaacagctgatggtgggcaaagagtgaagggggcaggctgccccggctgatgttgcatttgtgttagctaggtcattgcgagataaccaggtttgctctttagggaaagagctgatcctgggagcactggggagggagtcctgtgtgcttcccactgaaccacactgcccaggggcctctccgtggatcacagatgctctctcttgcatgaaacactaacggctttaagtttctggaagcccgacggatgtgaaaacaggaggagggaacag

SEQ ID NO: 207358 - DNA, 498 bp, Homo Sapiens
tgtttggtttattctgttgttagagatgtttttaggcctctgattctggcactttcttttttctttttttttttgagacggggtctccctctgtcagccaggctggtgtgcagtggtgcaatctcagctcactgcaacctccgcctcccgggttcaagcgattctcctgcctcagcctcctgatggcactacattttctgatctttgtaacagttacaaattactacaggatatcaagtaataatctattaagaatctagcacaatccccttcatgtagtgaacatgcaactacatggtgactataccttgtacagagactacatcaaacaagcacaaaagcagactgaaaatgaactaagacataagccaggaagactgagagaactctaaatcagatttccttttctgagcttgactcatctcctgattagaatctggacctcatctttagaataaaatgctttatcttgcattcaatgtgactaacataatagtg

SEQ ID NO: 207359 - DNA, 565 bp, Homo Sapiens; identical to SEQ ID NO: 55960
  misc_feature (540)..(540): n is a, c, g, or t
  misc_feature (559)..(559): n is a, c, g, or t

SEQ ID NO: 207360 - DNA, 705 bp, Homo Sapiens
  misc_feature (537)..(537): n is a, c, g, or t
tttttttttttattggatactcctgaagaagatgttccagcagaagttcgattactaggcaaggttacagactcaaatattctagagtgagcctcacttggagtaaatcttggagctctcagaagagggctccttttgtgcatatcaaaccttgttccagaatggagtggcgaaaacaatcgggctgaagcagcggtaccagatgcagaaaaaccagatgcaaagccaaagtcctcgggagttagtggagggggtcggaaattatcaaatattggtttgcgaataagaccttctttggcatactttgctgaggaaaagtattgtggctctgacctagaatgctttaaagaagtccacctaaatgtcggttctcgcaaaatagattttcgcttcccttgcataggagcagtggaagcaggcaaaaatggtgatgctaaggggattgttggaggcataagccaaggtgtgtggtcagagatactggaggctggctgcagtggtggcggtggagtcagcagaggtggaggtggagacgangaggtctgctgctggggggcactttgtagagttgataatcttttcgtcgttctagatccaaaacttctctccgacactgaataccttctgcttctcctatcattactctcatcttctggggactgggaaatgggcagtggacgatgaactatcagcgtatctcttccg

SEQ ID NO: 207361 - DNA, 457 bp, Homo Sapiens
tgtagagacagggtctcactatgttgcccaggatggtcacaagttacaaactcctgggctcaaacaatcctcatgccctggcttcccaaagtgttgggattacaggtgtaagccacctctctgggccaggaagctggttttaactcctcctgccttgctccataccatctttctctagggataggtgaaaggggtctgtctttcccagcttttgaaaatgtgccctatatgttcagctgcctctaaggggttcttctgaacaagaagtttgcaaaactggccagccagactcctggttcattttaaaagcctcatctcagaagacaaagccaagggactctcaagctcctcttcctttcatttcttcctcattcaggaggattaactggcatgcccccgtaaatcagagaccttaccttgccttctcgctcaccagccttcccagtttcccggcgcg

SEQ ID NO: 207362 - DNA, 500 bp, Homo Sapiens
ttcatgtatctgtggtttccaaatctatattcctaaattccaactcactcctagattccacttttaaatttccagcagccttacagacatcttcacacagatatccccctgggtacctcaaagttgacatgtccttaaccatatgatcttcccaccgtattcctacatgcttaatgacaccagtattcaggctgttagccattccagaaacctcagagccccttagaatccccctatcgccttccctttaccacagtctgacctgttctatagtctccatatctctcagtggccgccccttttcggtctcctcctaggccttattcaaagccccactgatctcttgcctgggatagtaaattgcatgataacttatctataggactgagcttctcattccatcttatccactgctttacaatagtaattccagttgagtcacaaacccttgaggatagtaatttcaattgagttgagcagagtagaattatgggagaatt

SEQ ID NO: 207363 - DNA, 1000 bp, Homo Sapiens
gagaacagccaaaataaattgttaagcagtgaagcatttctacaaagaaaaataagataactccaaaataaggggtcaattaaatgttattctaccttctagtttaaaaggactaaaagccgtccttaactttggagggaattaaatttatgctgtatctttagactgataagaattttgcttgggtatatattcccataggctttatttctaacttctattaatcttttttttaaaaaatttagaattcttaccaccttctattccatacagccaagcattcatggagaagcatcatgtcctggggtgaagatgtggtccatattcttcatgactaattcgtgagagaaatctgcccctgccatatacaggtgtggtatttagtcagcttccataaaaaggtctctaaacacctctagaaagaacttacgttaaattttggataaagtgaggcaatattccagaactttcaatatgttttacccagatcaaacctgagaaataagagagagcttatagaatcaccatgtctggaaaatcttcactggtgattaaaatcttaagaattttgagggagaaggaatattattttgattaaaaatttcacagataggaggagcaccaatggcatcctcctgataatcaacatcctaactccattcattatcatttactacatagttagggaattaccagcttgatcttatttttaattactaaatatcctttctaagtatatactcctaaatttgggatatgatgaccgcataaaatatgaaccacttgtcccatctattgtgagataagctaagtctcaattctttattgcttaacagtgttagcttccagtgggccagtgtggtaaatgtctgaaaacttctaaaacattctctatagaatgatcatattcttttataattttttgactttttgaagaagacgaagtaaaacagtcaaggtatgtataaagccattatagtagcctttatcaagggatctt

SEQ ID NO: 207364 - DNA, 401 bp, Homo Sapiens
  misc_feature (259)..(259): n is a, c, g, or t
  misc_feature (291)..(291): n is a, c, g, or t
  misc_feature (320)..(320): n is a, c, g, or t
  misc_feature (334)..(334): n is a, c, g, or t
  misc_feature (343)..(343): n is a, c, g, or t
  misc_feature (354)..(354): n is a, c, g, or t
  misc_feature (365)..(365): n is a, c, g, or t
  misc_feature (371)..(371): n is a, c, g, or t
  misc_feature (398)..(398): n is a, c, g, or t
tagatatgtgcgacaatcaccaattcacacatattattcagccctggcagacatttgcctctctagtaactaataacaaagaacaaacattcatgagtgctctgtgaatagtgttcccagtgctacacacacttttattcacagtaatactgtgagggtaggttgtaaggaggtaggtagtaagtttgtatctccatttcttcttttttttttttttttttgagacggaatctcactctactggagggcagtggcgcgntctcagcacactgcaacctccacctcccgggntcaagctattctcccgcctcaggtctccnaaggtagctggggnctacagggngcccgcccctngtgccgaattnttgggnctcggggggccaaatttccctataggngag

SEQ ID NO: 207365 - DNA, 438 bp, Homo Sapiens
  misc_feature (347)..(347): n is a, c, g, or t
  misc_feature (362)..(362): n is a, c, g, or t
gaaagatttgcctaaagtgttgatattgaactacgcctgtttacctttaatcttcttttcttcccttgcagtatctcatcagggttgcccccagatgggaactaagaatgaattttggtaacttcctagggatggttgcatgaccttgtttttttctatgtgttctttaagcagtgagttctaggatgtatattcaggggtatcatagtatgtttccccttttgtggaaaaagtaaaccccttctaggcatagactcagacacaagaaaacagctagtacgactgtttacatgatgtctgccttctactgagcagttgtcacctttcccattgcagtgttggccttnaacccatctgggtgnagttgccattggtgttaccaaattctttaaagacctttgtttgggactttgggccttttaaaagtgggccagttgc

SEQ ID NO: 207366 - DNA, 655 bp, Homo Sapiens
tgtcggaccgtgacagttcaggtatgaatttaccatgtgtaataagatttgagaactggttaaaggctttgccacattcttcacatttgtagggtttctctcctgtatgaattatcttatgtgtagtaaggtgtgaggactggttaaaggctttgccacattcttcacatttgtatggtttctctcgagcataatcttttttatattcagtaaggtttgagaattggttaaaagttctgtcacattcttgacatttgtagagtttctcacaagtataaattcttttatgtttagtaagctttgaagattggttaacagctttttcacattcttcacatttgcagaaattcaccttggtataatttctttcatgtcgagttaggtgtgaaagcatgcaaaatgatctgccgcattctttacatttgaaaggtttatttccatatgttttatcttatgtctatctgaatgtgaaaatttattaaagactttcacatatttatcacattgaaacattttgctctgcatagttggtaaacattggttagtccattataacctcccttgtgcaacttaattcatccacactttacagcttttaatgaaaattatctttcacattttcaatctctcagtgtcattttcaaagaaccttatg

SEQ ID NO: 207367 - DNA, 499 bp, Homo Sapiens; identical to SEQ ID NO: 47849

SEQ ID NO: 207368 - DNA, 489 bp, Homo Sapiens
gttagtccgtaccagggacgcctggtaccatcaagaatgacctaaagttgatagaaggcgtggatatcaaggagaaccttcaagaccagatccggcattggttcatcgaatgcagaaatttaaccgggacatttcctgactaccctgacgttgaagaaggagggtcagctattattttttctgacaaggaccatacaacaggttattgaggatatcatagcaaaccaagaggaagaagaaaaaaacaaaaagaagaagaagaaaaaggaaaaacaacccaagaaagccaaaaaacaaaagaaaggaacaaaggagaaaaataaggaagaagacgaaaaatggaaaatgtcaccaagtctttttcttcctgcaatgaaggaaggatgtaacgcatacaaagaaatcgggatgaaaaaagatgagtcttggaatttctctcaggactatgatccagaactgatcaaagaggagaaacgaaaagaattacag

SEQ ID NO: 207369 - DNA, 662 bp, Homo Sapiens
acctgagtcaaataaatactcagaggggccacctctgcacctcatttctctgcagtgcctttaacgctaggcaacgctgagtgttgcttcaatgtccatctaacttggcatctatttcatcttcgggcatcatcacttcagtcattttacacactgtttccagcaaggtatggtattcaaatgggagaactggggtaaaagactgcagaggtgagcctaggggtgggggcagggaaggagaaaccacacattagctagagaggttctgtttcttcataagataaggcactgacagaaaatttcttaggtaaaaggctgcataagaatttcttgtcatttacaaaaaaaaaaattgttgtcatccataaatggtccatatctaggctcagttaggtagaccctgaaaagttaagaactgatccctcaaagctacattgttaccagaaacaattctcattcattctgaggccttatggcacattagggaaagagagaggaaaacagtctggtcacaaaaaggcatcagacattgcttgtcatccactcatcaaagaaagtggaccgttcaacaagcatcatcagaaagaaagtgctggctcaaaattccaaattctcttgatgatagatgaccatgatgggtgtatctagactcaagtggtgtg

SEQ ID NO: 207370 - DNA, 390 bp, Homo Sapiens
  misc_feature (313)..(313): n is a, c, g, or t
  misc_feature (378)..(378): n is a, c, g, or t
gcagcacccgccttggagcccctttcccgcctgcgagggagacctggcgtctgcccgctgctcgcagagtcacgttgccggcgattcaaagggcgaggaaaggatgaggaagcgctttgtggtctgaggcagcccctctgtcatgtggtgctccctattcctcctcctcgtcttcctcgtcttccccctcctcctcgcgcccggcagcaccctcgctactcaggagttctgtccatcctcgttttgtgtggctgactcagttctcgagcccccttcctcccatgcagaaaggggacagtgtggcaacccgccnccaacctcttattcttggtgaatttaaaatggggggtttccagagtgggtgctggcacccagggngacatcacacag

SEQ ID NO: 207371 - DNA, 426 bp, Homo Sapiens
gccacggatcgtggagtctcctgagaataattgtccatgaaaaatacaaacacccatcacatgactatgatatttctcttgcagagctttctagccctgttccctacacaaatgcagtacatagagtttgtctccctgatgcatcctatgagtttcaaccaggtgatgtgatgtttgtgacaggatttggagcactgaaaaatgatggttacagtcaaaatcatcttcgacaagcacaggtgactctcatagacgctacaacttgcaatgaacctcaagcttacaatgacgccataactcctagaatgttatgtgctggctccttagaaggaaaaacagatgcatgccagggtgactctggaggaccactggttagttcagatgctagagatatctggtaccttgctggaatagtgagctggggag

SEQ ID NO: 207372 - DNA, 642 bp, Homo Sapiens
cgtcgaagtcattccgccccccggttactccacacagacccatgttaatgacctcatgctcgtagaagctcaatagccaggccaggctgtcatccatggtgaagaaagtcaggctgccctcccgctgcgaaccccctggaaccacctgtactgtctccggctggggcactaccacgagcccagatgtgacctttccctctgacctcatgtgcgttgatgtcaagctcatctccccccaggactgcacgaaggtttacaaggacttactggaaaattccatgctgtgcgctggcatccccgactccaagaaaaacgcctgcaatggtgactcagggggaccgttggtgtgcagaggtaccctgcaaggtctggtgtcctggggaactttcccttgcggccaacccaatgacccaggagtctacactcaagtgtgcaagttcaccaagtggataaatgacaccatgaaaaagcatcgctaacgccacactgagttaattaactgtgtgcttccaacagaaaatgcacaggagtgaggacgccgatgacctatgaagtcaaatttgactttacctttcctcaaagatatatttaaaccaacctcatgccctgttgatacaccaatcaaatgggtaaagaccgtcg

SEQ ID NO: 207373 - DNA, 717 bp, Homo Sapiens; identical to SEQ ID NO: 54431

SEQ ID NO: 207374 - DNA, 457 bp, Homo Sapiens
tgaggattacaggaacatgtatgagtatgctctcatgtagtttttatagtggcaggcaaccagaaacaatctggttgtttatcaaacacatggtcttttatgattttctgcttcttttcacattgttccctttgccctcttttcttcctggaaagttgagatcactcttcaggagcctactgaaaaaccacctgcatgtgggggaacataagagattcctgtagagaaggctgaataaatgtcagtcagaagaaagcaaagagagacaggagtgacgtcacagtgaattcagcaccacggacagctcacagcactccagcccgggcgacagagtgagactgcgcctgaaaaaaaaaaagttatgggaatgtttggatatcagaattcctggggaacattgggattcccagaatctctttcacatcagctgtaatgtgagtgtgggcatagagctgtc

SEQ ID NO: 207375 - DNA, 438 bp, Homo Sapiens
  misc_feature (326)..(326): n is a, c, g, or t
  misc_feature (374)..(374): n is a, c, g, or t
gttccctaattctgtaattggtattccggttgctcgtgggagccggaagtctggaattcagataactaaggtgtttctgtagttgtctgaattgttaggcatttgtaaaatataaaacagaaacttgttcaagcacaaccacatgctccaaacctaaatatgccagagagattttcgcaatagtcatctcttgtgttaagagtcactccattacaggaaaaagattcagaacgatttccatacaagaatcctcgtttttgtaggaagtttcccaagagccagggccagctgtgctccattattaggttaatgcttgatttgtaccntatttttatttttcatttctgaatttgaaataaaagttatggtaaccnaaattaaggacttgggcatagcttgcagtccaattcccacccccatatggaggatgcaagggtt

SEQ ID NO: 207376 - DNA, 345 bp, Homo Sapiens
  misc_feature (2)..(2): n is a, c, g, or t
  misc_feature (7)..(7): n is a, c, g, or t
  misc_feature (221)..(221): n is a, c, g, or t
  misc_feature (261)..(261): n is a, c, g, or t
  misc_feature (331)..(331): n is a, c, g, or t
antcttnattaactagagccaattcaatttatataatgatgggtcttattagtatgagacagtaagagttcattcacatcttcagtgaacatccaacaaacctgtgtcacatttaatgaatacaacattcatgtgtttgcagattgaatgttacattctaaaaactccacagttttcatgggaatccaggaatataaaaataaaaataaataaaataaaanctctacaggctaacacaggactaaatgtcccggcgagganctttgtattaaaaacctcggggggccggggcgcggtgggctcacatctggtaatcccggcactttggggnggggctgagggcgg

SEQ ID NO: 207377 - DNA, 457 bp, Homo Sapiens
  misc_feature (12)..(12): n is a, c, g, or t
  misc_feature (179)..(179): n is a, c, g, or t
  misc_feature (310)..(310): n is a, c, g, or t
  misc_feature (354)..(354): n is a, c, g, or t
  misc_feature (365)..(365): n is a, c, g, or t
  misc_feature (372)..(372): n is a, c, g, or t
  misc_feature (401)..(401): n is a, c, g, or t
ggaagctgaganaagtgacatctgcctctgaaatagttctgggaacgtcactggagggtgactgccaggttcactcatgccatcagccccgcctttgtgtcctcagtaatttttactctgagcataatcacagccctcgttgagaggagccactgtccctgttggtcttctttctagangtatctcttatatactgatatacagcagtgcatttacattgttaactgtaaaaatgacaccaacacatttagaaaggccaccagataaaataaagaaaaatgtatccctcaacgctgacatacttactggncttgcttttgggaacgttcttctttctgtcttcaggtgtctagnaactttagggngtagtangtggggctctgttgaggggactctgaagnactggttcacccccccgcccacacacacacacacatcccccggcacttgtgttgtg

SEQ ID NO: 207378 - DNA, 880 bp, Homo Sapiens; identical to SEQ ID NO: 48680

SEQ ID NO: 207379 - DNA, 988 bp, Homo Sapiens
ctgcactccaggcctgtgtggcagagccagaccctgtctcaaaaaaaaaggccttgggctgggcgaagtggctcactcacacctgtaatcccagcatttgggaggttgaggtgggcggatcacgaggtcaggagatcaagaccatcctggctaacatggtgaaaccccgtctctactaaaaatacaaaaaaaaattagctggtgtggtgacacgcacctgtagtcccaactactcagaaggctgaggcaggagaatcacttgaacccgggaggcggaggttgcagtgagccaagatcgcgtcattgcactccggcctggcgacagggagaataaaaaaaaaaaaaaccctttatggggtgacaggacaggactaagcctcagtgagccaggctggggaggtcatcatcggcccaatctttcttttcaaaaagggtcaaattggacttacttatctagggagaaagggggccctcctgcctaggtgagaaactagaagcggggcttcttcaccagataaaccgtctgggtacggtgatgcctggagactgggtagaggcaaccatgggctccagcagcataaatgcttcaggcaacaggcttgaaacacctttccagaatcccagttaacacctgaccgagcacagtggtgatgcctataatcccagcacttgggagcctgagttgtagatgaccctgcgcacaaggaagccccgttttacaaaaaatataggagcggcacaggggccacactgtatcggacatttggaagttagggaggggtaccgaggcaggatttacccagctggccagtggtgacacagtctaaatacaaattctgcgtgggcggcatatccctactggggtgtcaggcttgcgacgcagaaactggaggattcccgtgcccctggaggaaccttaaaaaaaaaaaacccctcgggagaagagttgtccttagtcgcataactatttatcaagtaaacgtacaat

SEQ ID NO: 207380 - DNA, 1000 bp, Homo Sapiens
agtcacatgtgaccagtgatgacacgggaatgtgtgagatggttctccattgatcatgatgttgacctagagaagattcatcctccttcaatgcctggagacagtgggtcagaaattcagggaagcaatggtgagactcagggctatgtatatgcccagtcagtcgatattacctcaagttgggacttatggtattagaagacgctggattccaatgagcccattcataagtttggcttcagtactttggccctggttgaaaagtactcatctcctggtctgacatccaaagagtcactctttgttcgaataaatgctgctcatggattctcccttattcaggtggacaacacaaaggttaccatgaaggacatcttactgacaggcagtgaagcgaagacacggatccagaaagtttcaggccctcagtaccgactggagaagcagagcagagcccaatgtcgcacgtagactggacagcacctcgggcgagccagagcgcatgggagtaactgcctggatccgcgagaccagatcaagggcacaacggggctaacggaggaggattcgcacagtggacatagccaagacacggatatgctaagcagccacaatacaaagtccatcgacagcaggcatgcaccaaaaactgcgccaccacaacgacagctaacagcatacgggaactccagaggaagaacaacggtacaagcatatagcccggacagcaaacagaacagcacgccaagcaaagctagcgacataaacacagacaccccaaaatcaacaagacagagcgaaaccgaagcacggataccggatcgtaacccagtgcggcacaaagcaaacgccccgagcgacgcaccaacataaaacgaccaacatatatacgcaaaacaagcacatagaaaccatgaacatgggcaaacgaccgaaataccgacgacaacaacgcccacagacaaaccatcaccgggaaagaagagaaggccccgagcga

SEQ ID NO: 207381 - DNA, 544 bp, Homo Sapiens
cccgcacgccgcgcgcacagagctctcagcgccgttcccagccacagcctcccgcgcctcgctcagctccaacatggcaaaaatctccagccctacagagactgagcggtgcatcgagtccctgattgctgtcttccagaagtatgctggaaaggatggttataactacactctctccaagacagagttcctaagcttcatgaatacagaactagctgccttcacaaagaaccagaaggaccctggtgtccttgaccgcatgatgaagaaactggacgccaacagtgatggtcagctagatttctcagaatttcttaatctgattggtggcctagctatggcttgccatgactccttcctcaaggctgtcccttcccagaagcggacctgaggaccccttggccctggccttcaaacccaccccctttccttccagcctttctgtcatcatctccacagcccacccatcccctgagcacactaaccacctcatgcaggccccaccttgccaatagtactaaagcaatgtcacttttttaaaaca

SEQ ID NO: 207382 - DNA, 481 bp, Homo Sapiens
  misc_feature (255)..(255): n is a, c, g, or t
  misc_feature (435)..(435): n is a, c, g, or t
  misc_feature (452)..(452): n is a, c, g, or t
ccccacccacaggaaaaataggagtcacaaaacgtggcttgtgctctccccgctggtttggtaaacagagttccacttggccagaaccacatcacctgcgtccaccctgtttcgtgctgcttccacacagctgggtgggcgtcagagaccacgtggcccacaacgctggaaagacccctgggactagagggtgaagggagctgggtgtggccaggcttgcgagtggcgcgccactgggtctgagacagggcagtntccagggccacatgggcgagtttcctcctctcctgagcccggtgggtctagagagccagacttcccgggcacatgggagcaccctccatcgcagctctgcattagccttcaacccccagcagtgatgggccagcatgggacattgatttcaggttccacgaaaaaggcagtgagggaggnttcaggtgggggaaggnacccacttagcccattgacccccaggttt

SEQ ID NO: 207383 - DNA, 553 bp, Homo Sapiens
ggcaattgtataccatttgaacccaagcagtttgaatatctttgttttttttactaggtgcatcatatagctttctggatgagtctgaggtttttatcaactatgataaggactggaaataggtgaaaagatatgaagggagagttattaagatcaattttcatattttgagtttgaatttcctatcgtatgtccaggtggaagtaactggttaaataattggaaagagagagaaaagggaattaaagaaattattgctataaagatactggttgataccataggaccacagacgcttgctcagtgggagagtaaaaaataaaagcaagacagtggcaaggatgaaagcagtacagaccactttccctcttgaaataaataaacacatgcaagcattgaaccttcaaacaacacaaaccccataaactcaagtatgtagtctctatttccgattatgccttttgtaactttttgttctacggtgagaaagattatttgcctggcctctcaaaaccattgccttattgtgaagaactgttctcccaaaactcta

SEQ ID NO: 207384 - DNA, 780 bp, Homo Sapiens
cttacaacctaggaagtagcaaacttcatgataagggattcttaagttttcaaagtgtaggagctctttcacagatacactcttggtgtagggggcctgtaagttttatcagatgttttacatttcatgctttaatctttgctggtagtctaaataaaataaatacacagtgttcaggattatctggatagccatcttaaataacagagtgttccgcatgaccacagcctctgcacttgtgcctctgatccatatgacaccaagaccaactatgcttttcatatgatttctccaattgggtcctgtgacctttcacagaattgttgaacatttcctatgagatctgtggaggacaaggtggagaacactggttcagagcagtgattttcaaggtgggatgggatggggtggagttgagtggagagatgcatgtagttagaaagaacacattcaaaatacccactgatttcataatacaaactccataaagtcaagcagcaaaatgattttagctaatgggcagtagcagataaccaactgtggattcatcattgtggagaaggagtctggataaaacatagttgaaaaacactggcttagaggtagagacatgccgacacatggagaacagtacagaaacgcatgccaaagaggacattgagggtcagtgagcgaatcctgggccagaacttgtcacagtcttctgaagaaccaaagagcacatccagaagaaaaccaagatggcccgtcaccttctgggccctgtgaattaagaggcag

SEQ ID NO: 207385 - DNA, 801 bp, Homo Sapiens
actaccatcctaagtgatatgaataaaaatagaaagaatccagtgtaagcgatgttgcagacaaaacattggggtgggaaatgagcaaaactgaaaatgcaattaacattcaaagaaatcttccaaaaggactgggagcttatcaggggatgggcatccccttgatgatgaagcgtgatcctcatccccaccaggatttcagggcagccactgaacatataccctgttgaccgtccctggaaagtctttcagcacagtctgacttaacatgtttgagatggggcaatatctggattataatacactttggaaatatagcgcagggtgaaagacggtaatagtgtgcatttgtgtgtgggttttctttttcaaaacggaagagagtgcaaattttaggggtgtgttttcctgattttaaacatgagaggtgatgtcaaagggatcaactgaaaagaaaagtttaaagtttttccctacgattttcttggcaataatacccgtgaaagcaagaaaataaaacaagaggtgtatatgtgactctctgatctcttgtccttttggaatctggaaagagacttttaaaaggtagttgggtttccacaaaggactgagtttctagaatagctacctggaaggcaggtggcagagtacggtctttgagcatatggtcaacggaggctcacactctatagccattttcccataatttaatgggtcctttttaaattttgaaacttttaaccagatctgggacaattctctccctttacttccttcttttttcctcttttagtccccttt

SEQ ID NO: 207386 - DNA, 986 bp, Homo Sapiens
taatatctaagtaattactactagttttctcataatgcaaaagaacaatactcttaacacctacctcatatatcactcaagagtataagttaaccacaaagaacctctccactttttcatcatgcatcttacattctaatgtccttacttgtccatagaaaagatcataaatgcccacctaatggaaaagaatctctcatacctttgatgcaacaattatcacatgctttcacaagtgaataagaatgaagaaacaccagaaaatgagtgttgaattacatcatttgctttcaaagtctgtaattttttcaagaaataaagtatacttagaatgtagttattactctgcaaaaaatcttttactcctcttaaatttatatacaaatactttttctatcaactttagttttagattattttctatactcagaactcttgacttagtatatctgcagtgtcagttccttatatatttctattataaattctgatatttacatagccctaatttggattaaatattttttcatttttagtgcatcttcaaaaatattcttcagtataaactctggtgttttctgatgtagtttttgaaaaagtgtttttccacatttattatatctgcaagacacttttccaatataagtgccctaatgttgaacaaagcttgagcactgcttcagagttttcctctagtacacaatgtgtaccatacacactttgattcacgttaaggtactacagcctctttaggtttggtaatgtgccctcttcactattaaatcctcttctttcctgtagaggggtatattgtcggaagaccttgaagtaattgccctattctggttattagttgaactctccggtgcttatgttgcgcaatatgtccttccgcgctggttatgttctactatggcttcttgccagggcaggttcgcaggcctgttggagcgggaaattatgtacaggggggcatccaacccggg

SEQ ID NO: 207387 - DNA, 1000 bp, Homo Sapiens
gaagaaataccacttgcaggagagggttgacaaagtaaagaagaaagtgaaagatgtggaggaaaagtcaaaagaattgttcagaaggtggaggaaaaaagcattgacctcattcagaagtgggaggagaagtcccgagaattcattggaagttttctggaaatgtttggtccggaaggagcactgaaacatatgctgaaagaggggaagggccggatgctgcaggccatcagcccgaagcagagccccagcagcagccctactcgcgagcgctccccctccccctctttccgatggcccttctccggcaagacttccccaacttgctccccagcaaatctctccaggcacaaggctgcagcctatgatatcagtgaggatgaagaagactaatgtttcctccctcctttcctgtcctccctttctgtcccattaccttcagaagctctctgttgaattccaaattggtgaccccaacactaaacctaaggacagctacaaaggaaagacaactggggaaagaagacctaggactgggggaaccaaacagctgtctgcaagtgacatcatcaaccacacgaaggagggggactgcaccttagaagctgctctgattccatttaccccgcccaagggcttggtttcactgtttatgttcacgtgatctcaccagggaatggtcttttcaaaaaaaaaaaaaccgggctcaattcgggggggaaaaggttgaagcgcaggtcaaatggtcccggcacttttttggcagaggtgaaacgcgaaccccaaagaggtgctaaagctaaccaagacttaatcgctaaaacaccacaacaacacagccaacacacacaaccacaagccaacaccccaaacacatacaactcaaacacacaagacacaacagacaacaaccacgcaaaaaaaaccacacaaacacccaaataacacataccaactaatacgaacagaaaacacaaaataagacagagaccacaccaca

SEQ ID NO: 207388 - DNA, 996 bp, Homo Sapiens
tgctactttgcatgagaagaattaaaagatagtctgaagcagtttttatagaaagaagacaaaagcagtcatgagtcatgctgtggtccagaaacctaatagcagatggccaactgggacactgaaatttctgtactgctactgcctatgtttctatcacaacaaatatcctgatccctcactgttaaggattcagaactgtcctccaagttttattggactggtccggttctaccctctttcttacttgcagttttcaagaataagtgtagaatgtgctgggaatggaatatcctgatatcagaagagaatggtagaacagcccagacttaacagtcttcacaagaaatacaatctctcaacacttttggtcagtgagtcaggtgatcctgggctataaaacctgggctgggctattttctggagtctcttaactgtgttgcaagtggggcacatgcaatcaaaattccatccttccaggcaacttctctgaacctcagggggaccacatcacactgaattttagacttctcatcttcgatccctttataagtaataaatcaacttatgtaaaaaaaaaaaaaaaacgagaaaagaaaaaaacgcggggacaaaaataaggagagaggaaaaagagaggggaaagaaaagggcaagggggaaaaagaggaaacacgacacaaacacacagggtacacacggtggaacaaacagcaggacaccacaatgaagagacagaaaaaaaggcgaacaccagataacagaatagagcacggcgaacgaaaaaaagaaacacacgaaaagaagacaaaaggagagcagagagaacaggaaagaaagagaacagagaggagaagaaagaaaaaagagaaaaagacaagacagaagaaaaaagaaagaacaagaagaagaaaaagaagggaagagaagaaaagaagaaaaagcgaaaaaaagagaagaagacaaaaaggaaagagaagaacaaaaaaacagaga

SEQ ID NO: 207389 - DNA, 918 bp, Homo Sapiens; identical to SEQ ID NO: 40003

SEQ ID NO: 207390 - DNA, 775 bp, Homo Sapiens; identical to SEQ ID NO: 51958

SEQ ID NO: 207391 - DNA, 1000 bp, Homo Sapiens
tgattaataattaaaactttcaaatattgcttgtataggaataaagacaaagtcatataaaaaaatggggaaaattaaacactactcacccatagtcctgagtattttaaagagccttcgtagagcattcaaaatcgggtaagaaaaatggggaaaaataaaattacttaatctttaaaaggaagacaagcgtatgctcacctaattggacttatataatcaggcttgctctagcttatccagaatcagagtacaggccgggcgcagtggctcatgcctgtaatcccagcactttgggaggccgaggtgggtggatcacctgaggtcaggagtttgagaccagcctgggcaacatggtgaaaccctgtctctactaaaaaaaaaatagaacacattagctgggcttggtggcgggcgcctgtaatcccagctactcgggaggctgagcgccggaggaatcgcttgaacccaggaggtggcaggttgcaggtgagctgagattgtgccactgcactccagcctgggcaacaagcagtgaaatctctgtctcaaaaaatacaatacatcaaactacatacacgaactcagagagtccaagtcaacgatattcttcagtcatgcagtcgtccgctacaccatgaatctttcactgtcgtcatctcgctctctctcggaagggactcttcgcaacgtggcctgcagctcctcacagccaccggggcggcagaatactctccgcacagaccgacgaactcctggttgccggagacgcacgttgatacaacccaataaaatactaccgctgaaaacgcttatggagagcaaagaccatcaactctctatcctcaagcaccctgacgaccaggtctcagcaatggacttccacgatcgagaccgactaacacaacagcacctttctgggaaccacgcaaaaaatgcgcttctgctacggagtatcgaggatagacatgccgcgatcgtcctaaaaccgcgcaaccgg

SEQ ID NO: 207392 - DNA, 938 bp, Homo Sapiens
gtgctgggataacaagtgttagccacaccactcagcgatggcaatgttttacaactggattgtggctgatggatgcacaattctgtaaatttactgaaaattcattgaatagtacacttaaagtgggcaaattttataatatgtaaactgaaccccaagctattttttaaaaatggggtttgactctctaacctcagagagttgctgtgaagattaaccgagataacatatgtaaggcaagctgcctggtacaaagcacctgataaataataacaatgatgacaatcagaatatgctgtaataatagattacgtaaatgtagaatagtgtagaataacaacaatttataccacttacgtagctctgaccataccacttcaacatttatcaacttaatttaaccccccaacaacgttatgaagcgggtacatcatcatcctcatttttaccgatggggagatggaggcactgagaagtaaagtaactttcccaaggatgcacagctagtaaacggtagagctaggatttgaatcctggaggacaaactgcagggtctgtgctcctagccatgacactacactgtctctcagtaaacatcagctacgtattgagttgctactttaacccaggccgggaaaaggctcacagatggctcccagagatcacgccggactcaaagctgagggttcaggagttgtccaggacgagtgtccagacagagggaattgctttcacagtgtgcggtagatacgcagattgggagactggtggagctggtcctggggcaaggtgtgcctggagcctaactgggtcggggtcggcaggcctgcttagctggtcggttatcctcttcgccgctttcggaccctccgcgggggtccgcgcggcgggcgagacctccactttaccctctcgaactcgcttcgctcgccgggacc

SEQ ID NO: 207393 - DNA, 1000 bp, Homo Sapiens
  misc_feature (1000)..(1000): n is a, c, g, or t
caattccagcaactttgggaggccgaggtgggcaagatcgcttgggtctagtagttggagaccagcctgggcaatgtggcaaaatctggtctctactaaaaatacaaaaaaattagtcgggcgtaatggtgcacacctgtagtccgagctactgtagtggtggtgggggaagagggggttgaagcaggaggatcacccgagccagggaggtggaggccgcagggagcactgatcgatcgtgccactgcactccagcctgggcgacagagaccctgtctcacctgtctcaaaacaaaaacaaaacccaggtacttaaagatacgcttatatgattgggaaaggtcttcaaggtcgtctagtttaaaccgacctcttccgaagctgtaaacttaatgacttaatccctttaactttgttaaatttcatatcacctggagttttctgtcacgctaaaagatatttccaaacaggtgtctgatatcctagcaatcaagtcacatttaaagatcaggaggaaaacaatgtaacagctttttaaatggcggccaggttactcaaaagtgtggatcaattcctgacaaaacctgaattaccatattaacaagatctagaatccagtagcagaaataacagagagcaagaataaacttctctaggtggccattcattcccaaggttttactgattgctaatctttcctgcagagctgaaggtcggacttcctttaaagagtcttaaaattccggtctcgcgccactaccatcagagggggtaggtcttagcgtaagcttgattgctaacaagtggattaggggctttaactgtaatgagggcgttgaatggccacgagattagctctggttgctgcgatgtttctatcgtaagctaattgtgctgtggggagttagctacgtgtgcttgagactgaaggcaacgtaagagagaggcagaaaggagatgcaaaggagtgcaggggaatctcccaattgtcgctcagggn

SEQ ID NO: 207394 - DNA, 749 bp, Homo Sapiens
ggacctgaaggccagtataaaacaaatattcctaacataggtatacaaaactcaacaacattaagagtacacacccttatcaatagcttatacaactttcttcttgacagaccaccaaataagtcaaaagagtcttaaaaagtatttcgaactgaaattttatggattactttctataacaaaaatggaatgacaatataaaacaatattaaaagctaacaagtttacaaatatatagtaaattaaaccacattctttagcatgcttttgttcaaaagttgaaatattgggaagatgtctatactgctcaatgtaatctacaagatttaatgcaatgttttctcaatttctcattgcatttttgaagacataaaaacagcaacccctaaagtatatggaatctcaagagacaataaagtacctaacaatcttcaaaaaaaggaacaatgttggaagcattatagtttctgattttaaaacatattacaaagctacagaattaaaacaatttgctacaagtataaaggtaaaaaaaaaaaggagactagtaaaatagaatgcagcacatatatatactttcacatatgtggtcatatgaagagtcattttcatacccataattattataccattgttactgaaagccaataggtaaaagcaatgcaaatttctgtcaccaaatcattcagtagatatgatctgaagtatagaaaatacttggccgggcactgtggctcatgcgtgtatcc

SEQ ID NO: 207395 - DNA, 999 bp, Homo Sapiens
aacaccacagcgctcggtgtattaaaaacacagcataattgtacaaggggaaacattttgttagtataatcttaccaataatgtaagagaggaaagactgccatactgaaatacattttgctgctgccaaagacggtcctattgtgaagaaatgagaaaaaaaatagcaagcgccagggccaattaagcatccctctccccgtttttctgaatacaacacagtgatcctcaccgtaacccctacacatgttaatggattgttagagtatcaaattattttcaatgtgctttcttgttgtataaacctttacctgcactttctatttaaggggcaaaaagggaatgtgagtgtaaaacacctgctcagtgtgtgtctgttggactttggagcaattcaacaaacaagcctgctctgtttaatctatttagtgagtgcaaggcttctaaatcttccccctcagctacctatataaaagacaagactgaaaaggacagccactcctggatggctggagaagcatttggatttagaccgggtttaattggcatatgaaaaagcaaaacgtcagctcttcagtcaggctctgagaagctctctttatgtgggggggacataggctaaaggccctgaggcaaagcctggggtcacttacattccagctactctcaatccaagtagcaatttccctccctcagaaaccgggtcattcaggagcttgggaggggagcttggggagggctctggagttgtgtttaaagcagtacatcttatattagacaggaatttctatgatgcttacgaacttgactcacatttttgcaggaccccttctggtctaatttccccaaactgagacagcccgggaaaaccaatgcgagaattttgggccagtgagacagggaactggttaaataccccggtcaccggctcctgattggggccccggaaattgctaattgtggccactgtaaaaggtgttccttccggccaattgcaca

SEQ ID NO: 207396 - DNA, 326 bp, Homo Sapiens
  misc_feature (223)..(223): n is a, c, g, or t
  misc_feature (247)..(248): n is a, c, g, or t
  misc_feature (250)..(250): n is a, c, g, or t
  misc_feature (318)..(318): n is a, c, g, or t
ataaattttaaaatattgatatggaaatatacacatattggttaaataatttcaacagtccaacagggtgcacagtgaaaataggtctccttcccatcccaggcccccaggggtaactataactgatgaacctcaaagacaaaagctatgatttctcccccacaaaatatttttgtaacagaccccaagtcaaggcctaagggtttgacatttcaaggcaaanttcttaaacctaaaaacagtgggnntntggatataaaggcaaaccgttaactggggttacactatcttatttccaaaatcccatggcaatttaantaccctaa

SEQ ID NO: 207397 - DNA, 355 bp, Homo Sapiens
  misc_feature (235)..(235): n is a, c, g, or t
ttctgcatggattacttttataagcagagaaaaaaacgttcagagtgtgaatttagctgaaatctgaatacatttaagaaacatgaaaaacgaatgccgtctgtggtcaggtcatggggctgagtacagaaaagacaaagttaaataagacgtccctcgctgccttcaacatgacaagtgccatgggaacagcaggagagggaggtgttctcggaggtcagataactatgtggangtgactttgttctcttctctccgtttgtgtccccgtctttctgcaccaggtaccgcttggctgcccagtaggagaaggaaggagtatcaggatttttggtgttgccccctgctagcatga

SEQ ID NO: 207398 - DNA, 415 bp, Homo Sapiens; identical to SEQ ID NO: 40746
  misc_feature (404)..(404): n is a, c, g, or t

SEQ ID NO: 207399 - DNA, 421 bp, Homo Sapiens; identical to SEQ ID NO: 58251

SEQ ID NO: 207400 - DNA, 378 bp, Homo Sapiens
  misc_feature (46)..(46): n is a, c, g, or t
  misc_feature (85)..(85): n is a, c, g, or t
  misc_feature (121)..(121): n is a, c, g, or t
  misc_feature (124)..(124): n is a, c, g, or t
  misc_feature (142)..(142): n is a, c, g, or t
  misc_feature (148)..(148): n is a, c, g, or t
  misc_feature (151)..(151): n is a, c, g, or t
  misc_feature (162)..(162): n is a, c, g, or t
  misc_feature (189)..(189): n is a, c, g, or t
  misc_feature (235)..(235): n is a, c, g, or t
  misc_feature (243)..(243): n is a, c, g, or t
  misc_feature (262)..(262): n is a, c, g, or t
  misc_feature (301)..(301): n is a, c, g, or t
  misc_feature (312)..(312): n is a, c, g, or t
  misc_feature (329)..(329): n is a, c, g, or t
cgaactcctcagctcaagcaatccacctgcctcagcctcccaaagngtgggtattataggcatgagctactgcacctagccatgnaatatttttaaaaagataaaacatagaagaaatttnctnaaattacagagaattganccaggnggnccaaaataganctactataactaatagtcattttagantaaaaacatatagggaaggacattttcaaagatacagatgaaattncctagganctgaaggaaatgggatttncagactgaaagggcccaccacacacagaggcacaatgantaaataaaganctacacatcgtgggcanttttcaggaacactgggtgccaaagagggggttctcaaagtcttcttgg

SEQ ID NO: 207401 - DNA, 245 bp, Homo Sapiens; identical to SEQ ID NO: 52619

SEQ ID NO: 207402 - DNA, 608 bp, Homo Sapiens; identical to SEQ ID NO: 41236
  misc_feature (482)..(482): n is a, c, g, or t

SEQ ID NO: 207403 - DNA, 501 bp, Homo Sapiens; identical to SEQ ID NO: 48564

SEQ ID NO: 207404 - DNA, 692 bp, Homo Sapiens; identical to SEQ ID NO: 40545

SEQ ID NO: 207405 - DNA, 800 bp, Homo Sapiens; identical to SEQ ID NO: 48502

SEQ ID NO: 207406 - DNA, 631 bp, Homo Sapiens
tcccagtcgagaactttgggatggtccgcgatctggcactgatggagcaatagctctaactggagtagacgaagcctatacgctagaagaatttcaacatcttctaccaaaaatgaaagctgagacgaacatggtttggtatgactggatgaggccctcacatgcacagcttcactctgactatatgcagcccctgactgaggccaaagccaagagcaagaacaaggttcggggtgttcagcagctgatacagcgcctccggctgatcaagtctcctgcagaaattgaacgaatgcagattgctgggaagctgacatcacaggatggggaaatggtgcttctggatggaggttgtgagtcttcctgctatgtgagtgacatcacacgtacgtggccagtcaatggcaggttcaccgcacctcaggcagaactctatgaagccgttctagagatccaaagagatcgtttggccctctgcttccctgggacaagcttggagaacatctacagcatgatgctgaccctgataggacagaagcttaaagacttggggatcatgaagaacattaaggaaaataatgccttcaaggctgtcgaaaatactgtcctcatcatgttgggcatacctcgg

SEQ ID NO: 207407 - DNA, 704 bp, Homo Sapiens
  misc_feature (477)..(477): n is a, c, g, or t
tccagactccagaatggtggaatcatcagcagcttccaccagtgcccctggaaaaactgcaagtaacagacctgcacatgtatcccctacatctaaaataaaagttggaaaaaatggaactttgatgttaagatgcactgatacaaaacttaaattttggtctcctacattaaaacaatatgagtctcttaaaatattgatttgttcttagtaagattacaagaggcttgatttttaattctgcaatgtttccttaacagccattctgaattacaaactaattcctatttctgccacattccttgctgagaactgtctagtcctggtttgggatttatcttaaaggtctagaaaggcaacattttacttcagcaaaacttgattctatattgttgtttttcttaatgtgtcaaaattgtttgttactaggatttcctatgttgttattaaatgtattcccctgatcaaggtcactgngctagaaaacaaagattctgtgttttaccaagattaattcccagtgcttcatggtgtctttattaggtttgactgttagggaaactgaagccttaaaagggtaaaagtttttccatccatgtaactttctgaggtctttagggtgtcactctgattaaatgagtagtatcttagaggactataactgtgaaggagatttaagtttggaaactttggaggtgctaaaa

SEQ ID NO: 207408 - DNA, 863 bp, Homo Sapiens; identical to SEQ ID NO: 52006

SEQ ID NO: 207409 - DNA, 853 bp, Homo Sapiens; identical to SEQ ID NO: 48501

SEQ ID NO: 207410 - DNA, 871 bp, Homo Sapiens
caggtcgtgataaactgtgccattcctaaagggttgaagtacaatcaagctacacagaccttccaccagtggcgagatgctagacaggtgtatggtctcaactttggcagcaaagaggatgccaatgtcttcgcaagtgccatgatgcatgccttagaagtgttaaattcacaggaaacagggccaacattgcctagacaaaactcacaactacctgctcaagttcaaaatggcccatcccaagaagaatggaaattcaaagaagacaactacaagaacagcaacggcaaaaggagctggagcgggaaaggctggagcgagaaagaatggaaagagaaaggttggagagagagaggttagaaagggaaaggctggagagggagcgactggaacaagaacagctggagagagagagacaagaacgggaacggcaggaacgcctggagcggcaggaacgcctggagcggcaggaacgcctggatcgggagaggcaagaaagacaagaacgagagaggctggagagactggaacgggagaggcaagaaagggagcgacaagagcagttagaaagggaacagctggaatgggagagagagcgcagaatatcaagtgctggtaagaagtttacaaactcttctgtgttctgtatctgagcttggatgatgtctctgtgcagtcattgtgtaaaatatttcacatttgagatgtttgggattaagccatacaatttgaaattatgataattatgcgcaattactattttaaaaaaaaaaaaaaaacgggggtcttgtgggggggaaaagaggtgaatggttgtgctggttcggaccattttgtaagggatgggggctagggggtaatgagacagtaa

SEQ ID NO: 207411 - DNA, 910 bp, Homo Sapiens
ttggcacgagggcgagcggcaggcttgcgggcgggtgggctggcgctcctgatccacctggaacacttttgcaaagacagacgcggttcctcctacttcagagcaagtctgggccagctgggatccgaccagaaaccgcaagcggaggagacgcaggagcgcaggctgagcgctaactgaaggcgcgacctgagcccggcgcctgctggggagctgcgcagccaggacagcggtcggcagcacagggcctgggcgcagggcccgccgtcaccacctcacgtcggaagccagcactgctgcccgccagccctgccgcctgccctcggacttcccaggcgcccagggtcctcccaacgcgcctgcacccacacccgcccctgagccacagtgaccttgcattccccgccccctgccacacctcctgcgtgcccgagtgtcacccttaaataccgtctacacccagagagggacgaatacacctctgaagacagggcaagactaatttcaatgggtcagaaggttcttgcaggcactgttttatttaagagtgcctatttactggcaggagtatttgtgtgggaggaagtaggctaagactgctgttgaacttgaagctaaacttgaatgccatttacaataacaattaaaaatatacttaagaacaccaaagaagaacagaagaaaaacttgcgagacgctagttctcctcggaaacggcggggagcagcattgaaaggcctcgggcccgctaagaggagtccagggtatgggttcgtggtgtcaacccaaatgcaaaaggcggcctttaacgatgggatttttgggctaatcatgggcggccagccgttcggactttggtttcagtaaagagtagaaaacttaggcggatgtcacggagaggttgaagccc

SEQ ID NO: 207412 - DNA, 414 bp, Homo Sapiens
  misc_feature (295)..(295): n is a, c, g, or t
  misc_feature (304)..(304): n is a, c, g, or t
  misc_feature (312)..(312): n is a, c, g, or t
  misc_feature (318)..(318): n is a, c, g, or t
  misc_feature (340)..(340): n is a, c, g, or t
  misc_feature (355)..(355): n is a, c, g, or t
  misc_feature (366)..(366): n is a, c, g, or t
  misc_feature (398)..(398): n is a, c, g, or t
aagtcagtaataacacctaaaacagaaatttcagttgtgataaggattagaaaccagataacaaagataaaggagcattcaacattttgaggtaaatggcattgaatgggtagtaatgcagattagaattttgggaatgagaaagaaaatatacacaatgtaaggctgctagaaatgaaaacaaggctaacatcatttttcatgtttttaaatgaagactgtctaaaactctctcacacaatgcagagggaagagaaatgttaggtttcctttgaagggaggaaaaagcttacanatatttacntggaatgnccggangggaggcttggggtatacggtntgggttgaggggggnaccctcctggnagggccggtaaaggccccggggaggttccgtnagggccggggtttccc

SEQ ID NO: 207413 - DNA, 336 bp, Homo Sapiens
  misc_feature (14)..(14): n is a, c, g, or t
  misc_feature (269)..(269): n is a, c, g, or t
  misc_feature (291)..(291): n is a, c, g, or t
  misc_feature (307)..(307): n is a, c, g, or t
  misc_feature (317)..(317): n is a, c, g, or t
ggcacgtgctggtnagtcccagctacttaggaggctgaggcaggagaatcgcttgaacccaggtggcggaggttgtagtgagctgagatcgcgccactgcactacagcctggtgagagagcgagaatctgtctcaaaaaaaataaaaaagggcagtagataaaaaaagtacaaacatgagtatcttgataaattctattctcaggctttcaggttcataatcctgttgatagatgacatgtagaaatagaagaatttgtaaatataggnatattcattgatgtttttaggnctggattctaagggtngtttttaccnctaatatcccaaatactgc

SEQ ID NO: 207414 - DNA, 1000 bp, Homo Sapiens
ctgatacctatagcaataaagggatatgaggattcagttcatttaaaaagcatcagcagtggtttttttcacagaccagttgttaaaaacaaaaacggaccatagacccaactaggttgaaaatgaaaatatgtgggtacaaggatttaagtatttctccagtcttctaaagttcatagacaaagccatagattggggccttgggataagggaaacaaaaataaataaaaactcagtgaaagtaaacataagctttcagattctatgggaaagtaaaatcagcctataagattatctggatgagattaatgtcatttttcttgcaaatcctggaccattcctgccagatatggctaaagggaactttaattttgtttagcgctctctccattcttaacaggagttcagtattttttcgttaatgtggaagagtttggctaagaacctctctatagtttgtaggtagtgagttagaaataggataatagaaccttggtttttctaatgtgctatctatacaaaaaacacaggtcattctgacctcagcagggtcatactggctggaggtgtagaaggaactggtgggtagttcatttacatttgacagcagatgccttaagagtgtatctatgggcagaggcaacctgtagtttccttcctccaacagagtccagtggcataagaacagtatagttggcctgcttttagggaggttggacttaccctgatcccccaattttaagatgttgagatttgtaaatgcattcagtttcttaaatgttaaaggtgaataaatgtgtatcttatagttcaggaaatatgcttagacatgtaagtcatatttgcctaaagagttactttttaggctgggcgtgatggctcacacctgtaaacccagtacgttgggaggctaaaatgggaggattgcttgagcccaagagtttgagaccagcctgggcaacaaaatgagaccccctctctacaaaaaaaaaaaaaaaaa

SEQ ID NO: 207415 - DNA, 310 bp, Homo Sapiens
  misc_feature (87)..(87): n is a, c, g, or t
  misc_feature (267)..(267): n is a, c, g, or t
atcaagaacacatggtcatcaagcatgtaagttaatactgtttaagaagcactcagcactgcgctactaacatctgtgatatgtttncatcttgacagtaacaactgatttaaaaactatatgaaaaaccaaatgagcactcagaagcccacactagaatgggcatgaaatggttagaagggggcaaggcagccaggacaagtggataatgatgtccacactttttcttgtttttgttttcttctcaggtaggccctaatgaagttnttttcattctgccataaggaatttaagagagcttgagctaagg

SEQ ID NO: 207416 - DNA, 423 bp, Homo Sapiens; identical to SEQ ID NO: 40804
  misc_feature (9)..(10): n is a, c, g, or t
  misc_feature (16)..(17): n is a, c, g, or t
  misc_feature (98)..(98): n is a, c, g, or t
  misc_feature (124)..(124): n is a, c, g, or t
  misc_feature (242)..(242): n is a, c, g, or t
  misc_feature (288)..(288): n is a, c, g, or t
  misc_feature (309)..(309): n is a, c, g, or t
  misc_feature (311)..(311): n is a, c, g, or t
  misc_feature (385)..(385): n is a, c, g, or t
  misc_feature (396)..(396): n is a, c, g, or t

SEQ ID NO: 207417 - DNA, 337 bp, Homo Sapiens
tatttatctgaaggctgcttacgattggctagggttaaatcttatttctgtctaacataaacatttaccagaaatgatccaagttaagtattacctatttttagttacaatccaacttgagtttcacttatatttgcagtttaagcaatgataaggctatttctaaggcctgggtagctttgtttgctcaggagttttcaggcccagtctccattttaattttgcattaacaaaggcaaaaagagaggaaacaggagagaagggacaaggcaggaagaaaaggagattgctgggattactcatctcaaattgggcagccttcagataaaatggggta

SEQ ID NO: 207418 - DNA, 410 bp, Homo Sapiens
  misc_feature (58)..(58): n is a, c, g, or t
  misc_feature (375)..(375): n is a, c, g, or t
  misc_feature (387)..(387): n is a, c, g, or t
  misc_feature (404)..(404): n is a, c, g, or t
taacttgctattgagaaagtttaacaaattgtttaacctgaaagacaaatttcctggnaaacaaccatttaacatcccctgtgtctttgcctcaaatccattaccaacaaggcagtcatcctttcaaaatgcaaatctgattatatcacacttgactagtttaaaatttgtcaacccttcctattaattttatgttgaggagcaaacttcttaacgtgacccatttatcatgtatcatccaaactggggacactctgaggagtgaaaagagagtgattaatttttataccagtaaaccgggggcagcccctaggaaaagggggttaggtgtgggctatcccacccacaggggccctacctttttcaaattccttncacattctcccncactgttttcccctccnggttcc

SEQ ID NO: 207419 - DNA, 274 bp, Homo Sapiens
  misc_feature (27)..(27): n is a, c, g, or t
  misc_feature (235)..(235): n is a, c, g, or t
ataattatttcttttattattttggancagttacaacatgataaaatgatatatacttaatatttgtcacatcatgtttattaaaccaatcaggcagtatgaaaagaaatagcctagtatttaaaaactatatatcaggataaaatgtatttctttgtcactagaaaaatatgttttaaatagattatgtctacttggaaaataattataaaaggcagccacagaaatatatttngtcatgtacagtagatatttaaataaatataacactaaa

SEQ ID NO: 207420 - DNA, 450 bp, Homo Sapiens
  misc_feature (397)..(397): n is a, c, g, or t
gtctttgtttagttattctcttctcctgtctctcctgcacgctcctccctttccacttctttcttctctcttcggtcctccccgtgggaacctaatgtatacgaaaatctagtggtgcctccagttgtattttcccatgaatgctttattgactttgcttcaagcctttcaaatggcatctggtgcttacctgtgagacatcccacctgacctgccagataaagacgattaaccctattttgaaactgagataaacctgggcttggaaaagtttacctaccccaaggtctcagcactaagtaatttaactaggactcgaacccgggcagcgactcctgactgcttaagacggcatgggtaaggaagcaggtccagaagtcgagagacctggggtgtngcaagttcctagggggatggctaaggaacgagagaagggggagcaagtgtctc

SEQ ID NO: 207421 - DNA, 375 bp, Homo Sapiens
  misc_feature (317)..(317): n is a, c, g, or t
  misc_feature (333)..(333): n is a, c, g, or t
  misc_feature (347)..(347): n is a, c, g, or t
  misc_feature (353)..(353): n is a, c, g, or t
acagagagttgggtttgcagcaacaggcattgtgcacacttcccacgtcagcacacagaagagtagaatggcatgtacttgagtttagatttagtaaaattaggacttttgcaggcgcagtggctcacgcctgtaatcccagcactttgggaggctgaggcaggtggttcacttgaggacgagttcaagaccagcctgggccaacataggcgaaaccctatctctacttaaaaatattaaaaaattaggctggggtgtgatgggtacatgcctgtaattccagctacttggggagggctgagggcaccagaatcccnttgaacccatgaggtnggaggtttgcagtnagcttnagatttgcgccactgcattcag

SEQ ID NO: 207422 - DNA, 449 bp, Homo Sapiens
tctagagcatccccacgttgacacttcaggggcaagcatgcttggtatagagctctagcttgtgtataccttaaactgtaacttgcaggtgtttttcagttgctgcactttttatttaatcttgctcagtcccagtaactatctcaaaggtaattgctggaatatgcattttgaaatacggtttaaaaaaaatctgtgtattgtttcatctaaaaagaaaagcactattggaaacactaaaaacgtgttaaactttgtagttattttgcattcctgtactttacaaactgtcatcacagcaaaaagtttaaaattaggtaatgaaatatttttgtaaataaataccgttaagctggtattttaaaaaaatgtattataaattaattaatgtttctggaaaatgttcatatatatgtatatgaatgtctctttatgctgaagtgtcaacg

SEQ ID NO: 207423 - DNA, 591 bp, Homo Sapiens; identical to SEQ ID NO: 52331
  misc_feature (402)..(402): n is a, c, g, or t

SEQ ID NO: 207424 - DNA, 412 bp, Homo Sapiens; identical to SEQ ID NO: 40177
  misc_feature (403)..(403): n is a, c, g, or t
  misc_feature (406)..(406): n is a, c, g, or t

SEQ ID NO: 207425 - DNA, 758 bp, Homo Sapiens; identical to SEQ ID NO: 59441

SEQ ID NO: 207426 - DNA, 750 bp, Homo Sapiens
  misc_feature (614)..(614): n is a, c, g, or t
  misc_feature (736)..(736): n is a, c, g, or t
cggctcaccacaacctccacctcccaggttcaagcaattctgcctcagcctcccgagtagctgagattacaggcatgcgccaccacgcccggctaattttgtgtttttagtagagtgagggtttctccatgttggtcaggttggtcttgaacttccgacctcagttgatctgcccgccttggcctcccaaagtactgggattacaggcataagccaccgcacctggcctggttgcccattctttatggtcgtttcttgatgatatgctaaccaaggagtggattaatcatgcctcccctttttggaccacatagggtctaaactgtcatggcacatttgtctgtcatggcactggtgggagtgtagcagtgaggacgaccagaggtcactctcgtcgccattttggttttggtgggttttggccagctcctttactgcaacctgttttatcagcaaggtctttaagacctgtattttgtgctgacctcctatctcatcctgtgacttagaatgccttaactgaccatctgggaatgcagcccaatagatttcaccctcattttgcccggctcctgtttaagatggagttgctctggttcacatgcctctaacanatccttttagtttttcatgcttgtcacatgtttacttctaaggtataatcatgtggtttactatattattaccgattagattattttgaactacttcaattttatttattttacctcatttncattcacttttttg

SEQ ID NO: 207427 - DNA, 647 bp, Homo Sapiens; identical to SEQ ID NO: 55814
  misc_feature (536)..(536): n is a, c, g, or t
  misc_feature (541)..(541): n is a, c, g, or t
  misc_feature (644)..(644): n is a, c, g, or t

SEQ ID NO: 207428 - DNA, 588 bp, Homo Sapiens
  misc_feature (565)..(567): n is a, c, g, or t
ctcctcttgccttaaatttcccagcatgttgaaggcaggtcataggaccataggcaaggaaggaaaattaatacttaattgagcacccactaggtatgcctgctctgtgaacataccctgtggagatccccatttttacagataatcaggttgaggtttagaggggtaacttatcctaataagtctcatagctagtaaaaggcagaaccaggcacaaaaatcaagcagggaaggaaccaaccaggattcacatgttgtataacactctaaagtctattctctccatgatataccctaaactgccttctatggaacaaaaaactagacaagtgctagaatatgcaacattcagttttattgaccccaggatgggacaaggaaaggaagccttccagaccagctcacttaaaggagacgggttaagtgagtcatctcatgactggggcaactgctaccaagccccaaacctcaacctgaccacctgatgtgttatctcttatcttagaccaggggttgccatctatattatattttttagatggagtctcacccttccccagtgggnnncttcctgagtccttcccgtgg

SEQ ID NO: 207429 - DNA, 709 bp, Homo Sapiens; identical to SEQ ID NO: 50784
  misc_feature (406)..(406): n is a, c, g, or t
  misc_feature (445)..(445): n is a, c, g, or t

SEQ ID NO: 207430 - DNA, 618 bp, Homo Sapiens; identical to SEQ ID NO: 49722
  misc_feature (522)..(522): n is a, c, g, or t
  misc_feature (604)..(604): n is a, c, g, or t
  misc_feature (607)..(607): n is a, c, g, or t
  misc_feature (609)..(609): n is a, c, g, or t

SEQ ID NO: 207431 - DNA, 358 bp, Homo Sapiens
aattttcggagttactctcattagccttgttcagagtctttgggggaaatttgagatttttgagattttttttaaaaactcaaatattttactagtttgcctgccattttatttcttttacaaagcagaagcatataccaatttatcacagtattttagtaaatactgcaacattcatccttaaatgttcaccaagaaaagcatctttgtagtagtgctggaaaactattcagaatatacagataatgctgttctttaattgcttacattgcttcttcccatagcacatatattatgagttgactggtcgattctgtacctggcccatcctttagtgttcttgtcatgtagcgtcctt

SEQ ID NO: 207432 - DNA, 743 bp, Homo Sapiens; identical to SEQ ID NO: 50862

SEQ ID NO: 207433 - DNA, 722 bp, Homo Sapiens
gagaccaccttgggcaacatagtgagatcccagctctacaaaaaaaaaaaaattagctgggactacaggtgtgtgccaccatgcccagctaatttttaattgttttgtagaaacaaagtccaggctggtcttgaactcctgggctcaagcatttctcctacctcggccttccaagggctaggattacaggcatgagccactgtgcttggtccagatgtattactttttatgtttggtattattctgccaaaccaatcatgttattgtttttaatcattgaatcattggatctttaaataggagtgagtatataataataaggctcttctgttttcaacatctgtgctgggtcatgcattagcattaattactacaatgattctgtggggtaagtgttgtcctcatagacaagaaagctgaggtttagaggttaaaatgacacattgggggtaaataacagacactatatgttggagttgggaatcagatccaagtttgactccaaacccacttttaccacattgcttttgatctaaacttctattttgcttacccctcacagctagtcatccatatcattgaagcgctcatgatttgatagattaacctttcatttttttaggtgactctagttagaaagtcttatttcacaatctgattgtttctttaacttaggatccaaacatgtccttaaagcaattttcatgtactcgtctctggct

SEQ ID NO: 207434 - DNA, 626 bp, Homo Sapiens
  misc_feature (430)..(430): n is a, c, g, or t
  misc_feature (551)..(551): n is a, c, g, or t
gggaattaaaggaattccccgtaagggctggacccagctcctttctgggcttgggtagtcaaatgtctgagctaccccaggtcctcatgtcagcagagtggcgcctgcctgtgctggcccatggaacggagacagcattgggctgactgtgggcatgaggagggataaggctgatttggaccccaggcttctgccctggacagcacttgtgtctgcagattatttaagtggcttttgatctgtaaataaaatcagtgcactgtgaatcacacccagcccctttccctgctgtgtggattaggtgtcaagacacctagttctttctggggccacccggctggcctcactgcttatattaaggctcctcccaactctcattttcctttggaaaacaagacttttttccccatggttaccgctgagatactgnggctgtagtagtataaaagctcacagttccttctgagtgctgaaaagagtgcatgagttgcttcgaaataaaagggtcaagcattcctacctgagacaggttaaaaaaaaaaactcgaggnggggcccggtacccaattcgccctatagtgagtcgtattacaattcactggccgtcgttttaccgtcgtgctggg

SEQ ID NO: 207435 - DNA, 692 bp, Homo Sapiens; identical to SEQ ID NO: 61061
  misc_feature (357)..(357): n is a, c, g, or t
  misc_feature (407)..(407): n is a, c, g, or t
  misc_feature (426)..(426): n is a, c, g, or t
  misc_feature (454)..(454): n is a, c, g, or t

SEQ ID NO: 207436 - DNA, 794 bp, Homo Sapiens
agatgaggtttcactttgttgcccaggctggtcttgaactcctgggctcaagcaaccctcttgcctccatctcccaaagtgctgggattataggcatcggccactgcacccagctacacacacttcttcaccaccactccagcaaagttctgaacagaaaattacctttaaagagtttctctgtgtcataaaaatacttggcaaaaggtattaataaaatctgacatacaagggatgtaatgacccttcaaaatcactattcttattgctcggaagcgatcaatacattggcttttaagatcaacatatttttgatattggtaaatcttacatccgtctctccttgatcaatcacatagaagttatccccttcatcacctaaaagagggtaaaaaagttagaagcatattccaaattaaagaaagaaattatcaaaattattacaaaacaataaacttattttacagtggtactgtgagagtgtgttacaaactaacacaatctttcaggggaaagaaaatcaagcaacatattttaaaagtcatagaattaatcaaaatttttttagtcatctcatggtgaagaatacctctgaaaaaaatttttaaaagctacatatgtgtaggtattaactgctatggcatttataacaagggacatttgaaacaactcaaatagttaataacaaattatcaggctgccacaaaatggaaaatatacccactcataaaagggccggaataattagaaaattaaaggggagattgcaaaaagtagaaccatgtaggcttata

SEQ ID NO: 207437 - DNA, 677 bp, Homo Sapiens
agtttaatttatttaaatctcggttaatccaagcttctaataacaaaaaactgcctcagtgacgtcataattctatagggcaatagttgccaaattcccctggtattatagccattcggccttggaaagattagccttcaaatttataatttttagtatattttgaaacgattgaagtggcttaagattgattagcttttctttgatcacattttctgcttcttagctaaagtaattttatttaaattgacatggcttaggttgtcatcattttctgctcttctagaatgatgtgtagagaaaacttgaagatactatcccttctttggcattcttctcttaatgctatgctattatttatcataatatgcatatatttagttgtatctggtatcattctaacactcataactaccattttagttaagtccaactttatatttgttacaatgcagtgttttgggaaaggtctattagtaattatttaagtattacatatttttatggaagtctttagaaggtgaagatcttactgagaaactattttctaaataaatttaattttcttttgtatttgtatcagatcatgcctactgtatgttagattttagactattttaaaagaaaccgtagattatataaaaatttttttgctgttttccaaaaaaaaaaaaaaa

SEQ ID NO: 207438 - DNA, 435 bp, Homo Sapiens
  misc_feature (304)..(304): n is a, c, g, or t
  misc_feature (318)..(318): n is a, c, g, or t
  misc_feature (422)..(422): n is a, c, g, or t
  misc_feature (431)..(431): n is a, c, g, or t
tccttaaggtaggttcccaggtatgatttttgagtcaaaggatatgagagttttttaatcttgaaatgtggttaaattgcttctcaaaaggatagtattactagtactgtttcactgtattcttttagattgggtattagtgctgttttctccttcccccaacttactaggcgagaaaggtacttcactgttgtggttttagagtgcatttctttatgtaacagttttttcatgaagagtaaaattgattataatgtcctaagacatggaactttaaaaaatgtgatattacttttaattaagncggccgcaagcttnattccctttagtggaggggttaatttttagcttgggcactgggccgttcgtttttagcaacgtccgtggactgggggaaaacccgggcctttaccccacttaantcggccttncagt

SEQ ID NO: 207439 - DNA, 801 bp, Homo Sapiens; identical to SEQ ID NO: 47586

SEQ ID NO: 207440 - DNA, 708 bp, Homo Sapiens
  misc_feature (584)..(584): n is a, c, g, or t
  misc_feature (662)..(662): n is a, c, g, or t
tttttggtattttttattatttatttattttagagataggttcttaccctgttgcccaggctggagtgcaatggcgtgaccatagctcactgcagccttgatcctcctgcctcagcatcctgagtagcttggactacaggcacccatggatcaccacgcctagctaatttttaaatttttgtcaaggcagtcttgctatgttgcccaagctggtcttgaactcctaggcccaagcagtcctcccattttggtcttacaggtgtgagccactgcacctggccctcatttttaaacatattgaatatttaatttagtcccctgaaaattattggttatgttctccaataccataagagtttcatagcatttaactcagaacccaaagaatgctaattgaacattatttatcagcaccctttaatataaagtaaattaaaaccattcattataactgaattggctctcaaaacctcgtgccgaattcctgcagccccggggatccactagttctagagcggccgccaccgcgggggagctccagcttttggtccctttagtgaggggtaaattcgagcttggcgtantcatgggcataggtggttctgtgtgaaaatggtatccggtcacaatttcacacaacatacgaacccggaacttaaagngaaaagccggggtggctaatgagtgagctacctacaattaatgggg

SEQ ID NO: 207441 - DNA, 812 bp, Homo Sapiens
  misc_feature (778)..(778): n is a, c, g, or t
  misc_feature (797)..(797): n is a, c, g, or t
ttttaaaaagtgattttatttctatatactagtaatgaatgtttgaaaatttaaaaaccactaccattgacaacagtagaaaatatataaaatatttggtataaatataaaatatgtccaggatctgtatgctgaaagtggaaaaaaaagcaagaccaaaataaatatacagctatatcatgtttgtggcctaaagacaaaatattgtgaggatgtaaattttcttcaaattcatctatagttctaactcaacagatatactagcagaattttttatagaaagcaacaattctaaaatttctggaaaagcaaagtagtaatcaacacgatttttgagacggacgaagttgtacacactatctaattttaagacttcctatgattaggaaagtgtggtatttgtgaatggataacaatggaacagaataggcagcccagaattagacccaaacaaatataatcaattgattttttgacagaagtgcaaaagcaatgcaataaaaaagaaacaatcttttcaacaaatggtactagaacaattagatagccatattttaaaaactgaaccttgacccataagctaaactttatacaaacctttattcaaaaagtatcatagatataaatggtaaacttaaaactataaaattcctggatgaaaataatatataatcttcatgacattgggttaagaccagtgttcttacattgcacatcaaaagttaaaaaattgattaagtggatttgatcaaaattaaaaatttttgctcaaaaaaancagtgttcaaagattgaanagaccagtcacagct

SEQ ID NO: 207442 - DNA, 693 bp, Homo Sapiens
  misc_feature (575)..(575): n is a, c, g, or t
  misc_feature (613)..(613): n is a, c, g, or t
accgagtcttattccgtcacccaggctggagtgcagtggtgcaatctcggctcactgcaacttgcgcctcccaggctcaagcaattctccggcctcagcctctggagtagctgggattacaggcatgtgccaccatgcccggctaatttttgtattttgtaaagactgggtttcaccaggttgcccaggctggtatcgaactcctgacctcaggtgatccgcctgccttggcctcccaaagtgctgggattacaggtgtgagccactgcgcccggccctttcgtcctatttccccagaaaagcacattccacttgctgatccctgagaaggagtgggcagccctactttctgggtctatttggtaacaggactccatcatcctgaccagtgtccctcccgctttccactccttgcacctcagactccctggcaaggttctggggccccctcttctccaaccttcacagggaaggtgaaaagcccctcagatgctaagcccaggccagatggaaagctgactcccaggccttcttcttgccccaggaatctgttgggatgacgtactttatgtggnctaacaccctaaagcagatgcttagctgggggaagagnctacaacaaggaacttgaggcagggctctgaggcgtaaggacccaggatagggtcccccaagaccggaaggttgttataa

SEQ ID NO: 207443 - DNA, 696 bp, Homo Sapiens; identical to SEQ ID NO: 61048
  misc_feature (597)..(597): n is a, c, g, or t

SEQ ID NO: 207444 - DNA, 648 bp, Homo Sapiens
  misc_feature (517)..(517): n is a, c, g, or t
gtcggccaggctggagtgcagtggcgtgatctcagctcactcatatattcaagagagattaccaaggtaaaataagacccggcaaactgagcagatttggctgggggaacattaaagagtcaaagatgatgatgtccatgctaaggtgtctctgagaggtggttggtacgatgaacagaaatatgaaaactagataagaagtgatgtgagagtagttctattttagtgatactaagtttgaagtaaactgatttttattaggcaattagaaacaaaggtcaagaacttaaaagagattcagccttgagagataactgagatcatctacgtacagatactagatggaatcatgaaaagtattagaggagatgaaaccacttagtgtgcagagaaggaagagaagagacagaacagaaccatgaagaaaattcaaggtttaaaagaaaaaagccagtgaagcagaatttgttaaagatgcaaaaacacttctagaagaaaacatttcagagaaactcanagggaaaaatactaaaatataaaaatgcacaagtctgacagtgaatacatggagattaacaatgtgaattaaggaaatcaaatttaaagctcacacttagagtgaccctgatttattcctgcctgggtttg

SEQ ID NO: 207445 - DNA, 565 bp, Homo Sapiens
attgaaaagacaaggtttcactcttgtcacccaggctggagtgcagtggcacaatcatgggtcagtgcagcctcaacctcccaagttcaagtgatcctcctaccttggcctcccgagtagctggaaccagaggtctacaacaccacatctggctaatttaaaaaaaaaaatttaatagagacagggtcgcaccatgttgcccaggctggtctcaaatttctgggctcaattaatccaacctcctcagcctcccaaagtgctgggaccacaggcgtgagccactgcacccaatcttcaaactcttcaacctcagaccccatgggagtgccctcctcacttctcacatggggtggatttttacggctcgcttcttcatcagaaatccccaactatggccatcctcagacactgcctgcggcctgcctgcagcactgccttgcgttactgcccgtcacagcttttgtacatactttgaagcggacctttctcttcatgttccagggcggatcctgtgtgatgaagccaccaagttcttcatgcactgtgtctgacaagaagtcaacaa

SEQ ID NO: 207446 - DNA, 692 bp, Homo Sapiens; identical to SEQ ID NO: 61478
  misc_feature (511)..(511): n is a, c, g, or t

SEQ ID NO: 207447 - DNA, 762 bp, Homo Sapiens
tttattcagataatttacaaaaattagattatgattttaaaggtggtatatctcttgtggagggaaatcttgctgaaattacagcttcttaggttaacagagaatgtgtcctgtttgtgcacctctctaaatgaaagaattaaggagaattatttcattattcatagtttggtttgtgggggtgaaagagggaatgagaaaaatcctaagacatccttggaacaatttaacacaaaatatacacatatatagatcctgagatgttacaacaaattaacaattatatagatcaacatgatccaaatagttttcaagacaccgttatggtgggtaaacagccattttacggcatgtgctccatggatgtccacatcatgccaggaaaaccatactctttgtctccaaatttgaaagctagtcatccagagcaggtggccagtcaacatctacagactcaacatccagctccagaatgtctgcagtcacattcatcagggacccaatgtttggcttggttctcccgaagtctccatgtacaaactctttaatgtaggtgccagcctgagttttcaagtggaggcggaatggtgctaatccacgtactgtgtctccatgaagtgaatgacgcgagctcgcacagccaggggcctttggtgaaggacgcgccaaggtgtttctggtcgatttttaagtccttatgcatttaagaaatcaatgcctttcttctggatcggtttattggcccaaataagcacttgaggg

SEQ ID NO: 207448 - DNA, 745 bp, Homo Sapiens
  misc_feature (609)..(609): n is a, c, g, or t
agacaaggcctcaccatgttgcccaggcttgtcttgaattcctggcactcaagagatcctcctgcctcagcctcccaaagggctgggattataggcatgaggctccgtgcccatcctcataacaaccttttaaggctcatattagacattaaaaattgaaagctcagagaggtgatatgactgacctagccctctgattctcttcccatgatttctagctgcctcttatacaaagcctccagtatggaccttgaacaaagtaggggcccaagaaaggttaatctttttccttccacagttttttaccttcttctccacttcatttgtaaaaaatcatgaattaaggttttcgttagccaagtggtattaggtagggcaaaggacagaaggaggaaacacagatgtggaagagaacaagttgcagaaagggagccgcctgccccttagaggagatctctccttccctgtcttcttcttctacttcctccaccgcattgttctcctctcatgatgcctgatcacctccagttcttggagaggctttccctttcaacaatcgggtgcggccttgtgggaagaaggatacctgggccaagttaacgtgctgtnaggcctgagcaggggccataactcccactggttgagctcctggttggtttttaaagatttgagctggaaaggtgtccaagcgagttacctttccaaaccgggaacctcgcaagttggtttgcgcgccccaggcctt

SEQ ID NO: 207449 - DNA, 698 bp, Homo Sapiens; identical to SEQ ID NO: 60869

SEQ ID NO: 207450 - DNA, 809 bp, Homo Sapiens; identical to SEQ ID NO: 59695

SEQ ID NO: 207451 - DNA, 680 bp, Homo Sapiens
  misc_feature (617)..(617): n is a, c, g, or t
atggagtcttgctctgactcccaagctggagtgcaatggtgcagtccaggattactgcaacctccacctcctgggttcaagcgattctcctgcctcagccttcccagcagcagggactataggcacgtgccaccacacctggataatttttttatttttagtagacacggggtttcaccatgttggccaggctgatctcaaacccctgacctcgtgttccacccgcctcagcctcccaaagtgttgggattacaggtgtgagccaccacacctggctgttccagatactgttctaagtactggggactcatcagtgaaaaaagcttcctacccttatgtacctttagataacattttacatagtaaacaataaataaataaatgctgtaaaaaaatttttaaatagcaagataagtgggggtacaattttttaaagggtggtcaaggtaaacctcattgacaaggtattagtgagcaaagacctaaaggatctatgggagctatccttggagatagctggaggaataacattcctgacaaagaaaacaaacaacacaaagggctcaaagagggaaggttaactgagaaacagtaaaaatgccaatgtggccagagtngaaccagagaggacaagaacttacgaggtgagctctgagacatagtaactgtgctactgagta

SEQ ID NO: 207452 - DNA, 739 bp, Homo Sapiens
ttaatagcaatatcataaaataaacacacatattaaaaaatcaagtatttagtttcggatattagaaataatatacataataaattcaacatactgatagtgctgcaagataagattttatttttcaaattacatattatgccaaccagcctgctttggactcagaggttcaaaaactttgcttttattacgaagaacatctggactgtagacacctctaacgaaaccaggttatacttggcatattgtgattgaagctgtgtgatcaacatcttaatgacctaactaaatcctctcataacagaaagaagttcaacaggcaaacatttccctccctaggatcctagttaccaaaactgtcacagtgtcaaaataaaaataattatttcctcctttttaacatcttattgtccttgaagcttatgtatggaggaagttaaaaaccaaaagagcaactttaagctatatgctaagtcagtgttaaatccacagactaatttttcgatatagtattcctggttctggtccttaaagagaaataaaggcattaaaccaactttttatatgtcaagaaaataattttgctattctttcataatcaaatctttcaatgatttctaagactgtttctacagcctgtgtgctagttcaggagacacactgattgtaaaaggacttgagaattaaactttaggctaaaaatttcattttcaaatgtatagatgtaaacagagccctg

SEQ ID NO: 207453 - DNA, 526 bp, Homo Sapiens
agttaaataaactgttagacaaaggtgatttaaaatgacaaaatatagtctctgagctcagtcataaaaaggaataagggattatgtaattggattatgtatttatttggtctaaacaaaaaagagctttattctctcatgtaagtgagtagtccggaggtcacgtgggcttcagataaggcctcatgaacagctggacgagacaatgaagacccagtgtctttctgtctcttcttagtctccatggtgacggctttattcttgggctgtcttgccagatgatcacaagatggctgccagacacaacctgagttatggatgtcctcattcacatttcctcagagaaaggaaacttctttcccagaagcccctggcaaagtcaccttgcattggcctgcattgggtgactatccctaagccaatctctggagctaggatgataggggtcactggttggtttaaacctcccaaggtctacccagagaattgcaatgatgttaatccctgccaacagcatgggtaggaa

SEQ ID NO: 207454 - DNA, 748 bp, Homo Sapiens
tatctcattttgctttattttttttttttgatcacaccaaggctcagtgccatttaatatgctattttgccattttagtttcctcttccacgaatttccatcattgttcattttcctctttggttgtctatttttaaatgaaaaagcaccaggattttagaaatatcttttttttttggtcaatcatatatgaccaaaatcaatatgaccaaaaaaatgaaaacattttttccttatctatatttttagattatttgtttataccagaatttgaaatttttctccatgctcagaatttcattttaaatatgttcgtgatattattgaagtcaccccccccactttatttgttttcatatatcatgagaagtcaaagaatcaaagcaatatattctcacagccatgcacattttctccctgtcttcagtcctgtgtctgtcactctcataatcctgtttcagcacctatgaaggcacttctgtggaatacttgattacagacccagccaatactttctacacttggatcctatatatatatatatataccatcccttaactatatgaaccacttgccccatagctatttgaaccccttgccccatagaaaatttcttttttcatatggcatgatcgcaaagctccccatggcactccatttcattgagggcttgccctctttgtcaaccctgggcgaagccccctaatgggtccaccttacctcttcccgaactgggagggaagcgggg

SEQ ID NO: 207455 - DNA, 678 bp, Homo Sapiens; identical to SEQ ID NO: 60326
  misc_feature (439)..(439): n is a, c, g, or t
  misc_feature (516)..(516): n is a, c, g, or t

SEQ ID NO: 207456 - DNA, 746 bp, Homo Sapiens; identical to SEQ ID NO: 59944

SEQ ID NO: 207457 - DNA, 578 bp, Homo Sapiens
tggccgactacgccctgctcatggacttcatccccctggacgacaagagatacaggtatgccttccacagctcggcctggctggtggcgggcaaggcagacccagccacacctggccgcgtgcacttccaccccgactcgccagccaagggtgcccagtggatgttttcagagtgtgtcctttgacaagctcaagctgaccaacaacctgctggatgacaatggccacatcattctcaactctatgcaccgctaccagccccgtttccacgtggtcttcgtggacccacgcaaggacagtgagcgctatgcccaggagaacttcaagtccttcatcttcacagagacccagttcacagcagtgacagcctatcagaaccacaggatcacccagctgaaaatcgccagcaacccttttgccaaaggctttagagagagtgacctggactcctggcctgtggccccacggcccctgctcagtgtcccagcccggagtcacagcagcctcagtccctgtgtgctgaagggtgccacagacagggagaaagacccaacaaagctcagcttcacctccagacc

SEQ ID NO: 207458 - DNA, 553 bp, Homo Sapiens; identical to SEQ ID NO: 44875

SEQ ID NO: 207459 - DNA, 958 bp, Homo Sapiens; identical to SEQ ID NO: 50094

SEQ ID NO: 207460 - DNA, 650 bp, Homo Sapiens; identical to SEQ ID NO: 58340

SEQ ID NO: 207461 - DNA, 635 bp, Homo Sapiens
caacaaaactggacggaacgcctcgatccacaccctgctggatgccttggagaggatggaagagagacatgcaaaagagaagattcaggacctcttggtggactctggaaagttcatctacttagaagatggcacaggctctgccgtgtccttggagtgaaagactctttttaccagaggtttcctcttaggtgttaggagttaatacatattaggttttttttttttttaacatgtttacaaagtaaattcttagccaggtgtagtggctcatgcctgtaatcccagcacttgtgggaggctgaggcgggtggatcacttgaggtcagaagttcaagaccagcctgaccaacatcgtgaaatgccgtctttacaaaaaattacaaaatttaccgggatgtgatggtgtgtgcatatattctcggctactcgggaggctgaggcaggagaatcacttgaacccacgaggcagtgacgctgagattgcaccacgtgactccagccggggacacagagcaagactctgtctcaagataaaactaaaataaccttgaaagaattattggcccgactgaggtcacatgccaaaggaaaatctggttctcccctgagctggcctccgggtgttcccttat

SEQ ID NO: 207462 - DNA, 686 bp, Homo Sapiens; identical to SEQ ID NO: 54799

SEQ ID NO: 207463 - DNA, 521 bp, Homo Sapiens; identical to SEQ ID NO: 52074

SEQ ID NO: 207464 - DNA, 520 bp, Homo Sapiens; identical to SEQ ID NO: 48277

SEQ ID NO: 207465 - DNA, 795 bp, Homo Sapiens; identical to SEQ ID NO: 50630

SEQ ID NO: 207466 - DNA, 774 bp, Homo Sapiens
gagttgctggaatgaagtagaggtgactctctctgtggtacacattgaatgtactatgtatgttcaagtattcaggcgccatgtcttatatactgaagaaagaaaaagtgaggcccaccttgctcttacaatgtttgcaattgttactgtattgaatacagtataatgactactatggcttcaatcttaaacctggaaacaaatatccctttttttccccttcatttcaccaagcctttacttaaaatcttcagtgtcttgtcaaatctagctctgtatcagatgctggaatattcctaacatttgacaaactggagttgaactaaaggctccacgggaaagtttctggtcttactagtgtgtatgagcaagatctgctaaaacttactccactgggtaaatggttgactgagtcaagaacaggataatatctcctgcatagttttcagtaatgtaagtgtggactagtgcatatttcagacaactgctctgcctgtgcaatgaaaaatagcctttaagggtttctttgcagactgatttcattggattggatactttaaatgcttgtggaaaaccattgattagcggattaaccattcactgtttgcgtgggattttctttggactaggaatttgtcttcaccatttccaaaaaaacacgaaacaacaaaaacacaccaaacaaacaacaagccaaacacataacaaacgaacagcgagaacaaacaacacagaaaggagatcaaaaagccaaaacatcaaaaatccaaaata

SEQ ID NO: 207467 - DNA, 836 bp, Homo Sapiens
ggagcagctgctgagcatgcggatggaggaccagagccagcgcaacatgcccctcagtgtggtgctcattcgggagaaagcccacagcccgttcgagaaccgcaagcaggagcagggcgagggcgcctagcccgagagcttcggggccggtcgagggtgattcgctggctttaaggcgcgccacagcttgagcagcatcggggccagcggcccaagaacgcagcgtgcaagaatccagcgttaatgcgcagggtgatcccggagggcggctacacactctggctggtgttcaccatgaataagctctggctggtgttcaccatgaataagcccaggttcctctgtaagcgcctgccgagaggacgttcattttcctgtggaagatgagtcggcccctgggtcaaagccgccggagacctcctgaccctattgctcggtggcaacgcagccggcgacttcaagctgaaggccctgctggggtacccctcggagaacccgtgtttcctcaagggctccttcaagcccaacctgcccttggtgtggtgctcgcacaagaaaagccttgggtacagcctggggtgacagagcgaagatcccgtctccaaaaaaaaaaaaaaaggcttgggttaaccattgaagcctcttcccaggagtgggttcctgggccttcttggtctaactgtgggaggggcgctgccccaattaagactttccttacaaggggtggcccctctctgggaaggactccccggcccctgtggtgtttgcacacaactgttgggtctttcccaatggaagggtggggaatctgtcttctggccccgctcccggtaaca

SEQ ID NO: 207468 - DNA, 761 bp, Homo Sapiens; identical to SEQ ID NO: 48274

SEQ ID NO: 207469 - DNA, 932 bp, Homo Sapiens
ttacttgaggtgaacgaagattgtcagttcatgacttgcaaactactagatggattaaggagttataaaagaaatctatcaaagtatttgttcttaatttttaaacttaaaaatgaaaggaaaaaaaattttttaaatgatccccagtactggtcagagcatgaggcatagtaaatatttttacacactgcttgtgggattagaaattggcacaacttgtgcagagggagtaatttggcagtgtattgagagtgttctatctcttgactcactaagcccgcttctgagagtcttaaaggaacaaaaggaagcgagagcaaaaaaatgtttacacaaaatgttttcattgattattaaagaatatattggtgggaggtgtgcactggatatttccaggaaggagtggctaagtaaattaaggtatgctcatttgacagaatatctattatatgactcaaaatggatgcatataataaccttaacatgggaagattattggttatcatagtaaattttttaaaaggaaaaatctaagatttgatagccttatgagctcacctctgtttaaatgtttatttatacgagattaaatggtgtaaaattaagatagaaaattagacaatagtcaatgtgttttctgaattctgtttacctagagctgactgtgggacggtggcaactagctggtgactgtgtcctaatggtgccgcatttttcagtgtgagtaagccctcacccattaatattatccccggggcacgtgttccaagggtggccggggccaaggttcaccggggcacaaacggcgctaggggttacacacctcttgagagcatatacacaagtgttttctgctgaccaattatacacagttggcgccgaacatctcgacggaaaacaaggtaatagggctttacacatattatcattcg

SEQ ID NO: 207470 - DNA, 725 bp, Homo Sapiens; identical to SEQ ID NO: 50246

SEQ ID NO: 207471 - DNA, 822 bp, Homo Sapiens
gctgctatagggcaaaagtcttccaagtaatgaatctaagagagaatggaatgtatgggaaaagaaagttactggaactaataggacacgctgtggctcatctgaagaaagctgatgaggccaatgataatctcttccgtgtctgttccattcttgccagcctccatgctctagcagatcagtatgaagaagcagagtattacttccaaaaggaattcagtaaagagcttactcctgtagcgaaacaactgctccatctgcggtatggcaagctttcagctgtaccaaatgaagtgtgaagacaaggccatccaccactttatagagggtgtaaaaataaaccagaaatcaagggagaaagaaaagatgaaagacaaactgcaaaaaattgccaataatgcgactttctaaaaactggagcagattctgaggctttgcatgtcttggcattccttcaggagctgaatgaaaaaatgcaacaagcagatgaagactctgagaggggtttggagtctggaagcctcatcccttcagcatcaagctggaatggggaatgaagaatagagatgtggtgcccactaggctactgctgaaagggagctgaaatttcctccacaagttggtattcaaaatatgtaatgactggtatgggcaaaaagattggactaaagacactggccatacccactggacagggttatgttaaacctgtatttgcttggtctgaaaagaacccaaggagttctggcaaagcgacagattgggggttcgtccagggctgcgctaaattattctcaatgatttgtctctttgcggaacttc

SEQ ID NO: 207472 - DNA, 1000 bp, Homo Sapiens
ttgccggtagagccttgcgacttgacggaaggtttcgatccctcggtacccccgaggacgcctcaggaatacctgaggcgggtccagatcgaagcagctcaatgtccagatgttgtggtagctcaaattgacccaaagaagttgaaaaggaagcaaagtgtgaatatttctctttcaggatgccaacccgcccctgaaggttattccccaacacttcaatggcaacagcaacaagtggcacagttttcaactgttcgacagaatgtgaacaaacatagaagtcactggaaatcacaacagttggatagtaatgtgacaatgccaaaatctgaagatgaagaaggctggaagaaattttgtctgggtgaaaagttatgtgctgacggggctgttggaccagccacaaatgaaagtcctggaatagattatgtacaaattggttttcctcccttgcttagtattgttagcagaatgaatcaggcaacagtaactagtgtcttggaatatctgagtaattggtttggagaaagagactttactccagaattgggaagatggctttatgctttattggcttgtcttgaaaagcctttgttacctgaggctcattcactgattcggcagcttgccagaaggtgctctgaagtgaggctcttagtggatagcaaagatgatgaccagggtcctggctttggcttcttcaatctggcttgggttagccaggtattttggaccaaagctgatttagctggatgagccactcttgactgttgcactgatcatcctacgggagttgaaagcaatgttctcctggagcgcggccttagcctgtggcgaacacatgcagctacgtaagcttcacacctctcctcagcctctttaggggcacatcttaaccgggccacgaaattatccacaaatagtgtgtctggatgttcaccaccgagatacaacacgcgtgtacaacgcacactcatcgtcactaaacgctgttcagtag

SEQ ID NO: 207473 - DNA, 568 bp, Homo Sapiens; identical to SEQ ID NO: 53908

SEQ ID NO: 207474 - DNA, 711 bp, Homo Sapiens; identical to SEQ ID NO: 40505

SEQ ID NO: 207475 - DNA, 707 bp, Homo Sapiens; identical to SEQ ID NO: 53266

SEQ ID NO: 207476 - DNA, 804 bp, Homo Sapiens
tgggcggacgcgtgggcggacgcgtgggcgaggccatctcctgggccgcctggcggccatcgtggctaaacaggtactgctgggccggaaggtggtggtcgtacgctgtgaaggcatcaacatttctggcaatttctacagaaacaagttgaagtacctggctttcctccgcaagcggatgaacaccaacccttcccgaggcccctaccacttccgggcccccagccgcatcttctggcggaccgtgcgaggtatgctgccccacaaaaccaagcgaggcccaggccgctctggaccgtctcaaggtgtttgacggcatcccaccgccctacgacaagaaaaagcggatggtggttcctgctgccctcaaggtcgtgcgtctgaagcctacaagaaagtttgcctatctggggcgcctggctcacgaggttggctggaagtaccaggcagtgacagccaccctggaggagaagaggaaagagaaagccaagatccactaccggaagaagaaacagctcatgaggctacggaaacaggccgagaagaacgtggagaagaaaattgacaaatacacagaggtcctcaagacccacggactcctggtctgagcccaataaagactgttaattcctcatgcgttgctgccttcctccattgttgccctggaatgtacgggacccaggggcagcagcagtccaggtgccacaggcagccctgggacataggaagctgggagcaggaagggtcttagtcactggcctccgaaagtgcgtgaaagcactcgggaatgtgcccgtgtcatta

SEQ ID NO: 207477 - DNA, 410 bp, Homo Sapiens
tcagcaacacctgttttactatttgttattaaactatcatctccaccttccttttgattagcaatttgtactaagaaacgaaacaatgttatttggtggtgtataattctacttttctagtagattactgtgtggaattctgtgaaaaatatttgagaaaaggcctgtattgcataaataaattctttgtatgttgtgaactttgatctctatttctcttgcaacagacttcaagtggtccctctttttttcctacacactcagctcttctctaaaagcaaggatttggaatgaacaattcagtttgacagaaaaagctgaataaaatggcatctgtaattgaattgttggaaatgcctgttttgctcctaaattttaaacatcatcacttaataaaaataatgattcac

SEQ ID NO: 207478 - DNA, 724 bp, Homo Sapiens
gctctcctcaaactaattgattattgaggtgtgtttcttttccttccctggtgatgtgcaaagagaatgaaaagggaaaaggggccaggaaggagatgttttttctccttcattcattcaacagctaatcttgagtaccaactgtgtacaaggcactaacctagatgcctgggacacataaagaacaagtagacaaagactcctacccttaatcattagttttattctagatgggggagagggtgacagataataaacaatagaattcataatatgaattcattggagagtacaagaaaggtgaactgtagggggaagagagcaaggtaagggggtgaaggagtgtggggagatgggattgcaatttcagaaatggtagtgttatgaactgaatgtgggtgtctcccccaaatttgtatgttcaagacctcactctaatgtggctgtatttggagatggggcctctaaggaagtaactaagatgaaatgggttcgtgaggatgggcactgattcaacaggattagtgttcttatgaggacagacaccagagttctccctctcactttcttcccacacgcatgcactgaggaaagtctgtgtgaggacacagcaaggaggctgcgtccacaagctgagaagagagcctcacaagagatggactcgactggagctcagtctggacttcagctcaagaacagagaaaactaatgtgtggtgttagcc

SEQ ID NO: 207479 - DNA, 907 bp, Homo Sapiens; identical to SEQ ID NO: 60033

SEQ ID NO: 207480 - DNA, 621 bp, Homo Sapiens
ccgaaaaaaaaaaatacctgtttggtatttaacttgggggtgggataaggtatagcccacttagtcagttgtgtctaagccacttgatgaaccagtcaatccagtcttcacctttaacaaatgctgatttcttcaagtgagcaaaatatctcttaaactttttcctattttctctataaagttgcttttttctgaattttttctttatgaggcttgatgggcagccctatcagcagacaatcattcattcacccaacaaatatttgagtatctgcttcaagccaggggcagtgctaagccctggaagtggtatcttctccttatccgggagtggggctacagtgttcattccagaagactcaagaaaatagcagatcatcacaaaagtaggttttacataaatgaggaggaatccacagggttgtgtatatgtgtgtgtattttaaattctgacataagttggagctttagggtagactgtgacataagagtagttggttttccaactcatgtaattgccggctgattttgtcttgaattatgataatgggtaacttctgttgaaacaattctgtattcatcttagcttggttgggatgcaataaaagttttgtactggta

SEQ ID NO: 207481 - DNA, 656 bp, Homo Sapiens
aaggaaaagagtatagtagcctgagaatcaggagatgggagttttagtcgtaggccttatgataattaccccgcggtggtgtgtagaaaagtatgtaaatttgctctgttttaagactttgaactacctcaagaagaggaatctaatacaatatttgtaatgtttccagagctctcagaatgaggatttttttgtaaataggtcagaagacgatggaactgtcctgggttagtatagtaatcttacagtaggatccttaggttgatgctgacttctgtttggggtatgtttatattttatgtggtgtttactttttttttttgacatagaaggatatagtgggagcagtgatacgctaacattcattacattctgcagtaatgaatctgtttaatggggtcagacacttttcagtagcatgacagtggggtcataggtgagctgtgaggggctaaatctgtgctctgatggtctcttcctgttggagtttggttggcgtgtatcattttgttctacattttgggaggggaaacattttccgttaaggaaggttgttgccagtggatttgactccaggggactagagtgtcgtggtgagggtggggaggggctgcagggtgatcatgggctactgagcctccaaaagagcatgtggg

SEQ ID NO: 207482 - DNA, 546 bp, Homo Sapiens
cagtttagtcacatttattgaataaagttagcaaatggatatctcttgaaaatgagagctccagggaattaaaaaatgtaaagttcccatttcctttctgtgttaacacagctaattatgatctttacttcacatgcaaaagtcaacagaacaactcagtatttcaccaaattataaacaagaattacgctagagaaatgaaaccctaaagagaaacggtcatataactaacctcagtcaagtagttctggcaattatttgaagtctgaggcttgaagtaggaattcttacgggcatttggggaatatattttcgttgagtcctatactagtaagattttcaacacaaggtgactctcgacctcgccttgcaggaagagtgctgagaaaatatttcacctgctctttctccataaagagctgatactgatcattgctattttcttattcgatttagttaatttttttaacatggaactgttagctttcaatgctgctgcaaaggcttccttatattcttctaactcagttgtaacctcttcataag

SEQ ID NO: 207483 - DNA, 552 bp, Homo Sapiens
gataactctaagattaggatttacaagcaagagcaagttaaaatagcagcactttttccagtcctggagagctctataagtgagaagggactctgtctggaggtcaaggtttgttctaccagacaaagacaagccagtaagcacagctccaaagctaaagttttaagttccttcaacattttcataaaaggtgttacaaaatccttaatacttccatcctctgcttaatagaggcaaaggacagggtctgtgggtgtctgtgtcttgagtgacagaatttggttatcaaaggacacatctgaaagtttaagaacaaaagggggattcctcagatgctgtttttaaggaacggtgcactattgtcttgattgtatctatgcaagagagaagcagagagagcgctgtattatttggcctgtgaccaaaaactgagacgaaataaaagttaaaaaataaacaaacagccaaacaaaaacaaatgacattaacaacaaatgtcagttttaagaaagacaaacaggttacaatgtagtttctgttcccttgctcctc

SEQ ID NO: 207484 - DNA, 575 bp, Homo Sapiens
tttgactttttaatgatattgaagtagtagttccctgaaaagagctactatgatcacatggcttggttaactgtttcttacaagtctgagcatgaatttaacacacacgaactatacactgacaaagacaggatgctcctgaaataaaatcacagcatcttattgcatatactacatcatccaaggtcaaaaccctttcatagagacatttaaaactataaccaagtaaaagagaaaatagatgcaaatttgcttttacaaaatttgaaaatcaaccaaaagagtaaggcacaagatgcagtcagctacaaagcacttcagagaacagcgctttgctctcaggtctgggacccaccccctgggcaaggccgcctggcagcaggcaggaaccaaacccctgccacctccactcactcccagggttcctctttgcaggatggtggggagcgcaggcaccaaggcaggaaggccagggcaggaagatgccccgcgtccttcactttccctcagtgtgagcacaccaagttccctctaaccaggagaacaggaccctatgcaccaaaagtcaagcatga

SEQ ID NO: 207485 - DNA, 244 bp, Homo Sapiens
ttttcattaaaacatgttaaaacattttattttggaagttttatagaaatttaacatttactgtctttctcttggtagttttatagtaattatataatataaagaaaacacaatgactattttagcctaggcccatgtaagatgtccctaaaatccctcaaatttaccccactgtgccatatagatatgtttacttactttcattttttttttttttttttttgagacagggtctcactctgtc

SEQ ID NO: 207486 - DNA, 751 bp, Homo Sapiens
ttttttttcaagtaaaactttacttatgtataactgaatgagttcttaaagacatttactaacaattttccacaaactaaaaatttataaaacaataaataaaatagactttaaaaaaaagcgtgtcacacagctgcttgttttttgtttgtttctttgtttgttttttagtagtgaaatggtgaaaaatcagacaatggtcacagagttcctcctactgggatttctcctgggcccaaggattcagatgctcctctttgggctcttctccctgttctatgtcttcaccctgctggggaatgggaccatcctggggctcatctcactggactccagactccacacccccatgtacttcttcctctcacacctggccgtcgtcaacatcgcctatgcctgcaacacagtgccccagatgctggtgaacctcctgcatccagccaagcccatctcctttgctggctgcatgacatagacctttctctttttgagttttgcacatactgaatgcctcctgttggtgctgatgtcctacgatcggtacgtggccatctgccaccctctccgatatttcatcatcatgacctggaaagtctgcatcactcttgccatcacttcctggacatgtggctccctcctggctatggtccatgtgagcctcatcctaagactgcccttttgtgggcctcgtgaaatcaaccacttcttctgtgaaaacctgtctgtccctcagctggcctgtgctgatacc

SEQ ID NO: 207487 - DNA, 680 bp, Homo Sapiens
  misc_feature (508)..(508): n is a, c, g, or t
  misc_feature (515)..(515): n is a, c, g, or t
  misc_feature (602)..(602): n is a, c, g, or t
  misc_feature (675)..(675): n is a, c, g, or t
tttttttttttcaatctttagatgcatttatttggagagaaacttgcaatgggatagtttccaactttcaacatccgagtaacggtctcatattctgggactctgctgccacccaatggctacaggcagtattgctgcttgttgtgtacacgctgatggcggctgaggctcgagtggcaccgaaaggctttctggcaacgttgacactgataaagtgtctcctgggtgtgaactctcaggtgctggttgagatgggcactgaggacaaaagctttgccacacacattacaggagtaaggcttctcccctgtgtgaattctctggtgctgtgttagatttgctttctgggcaaaggctttcccacattcaccacatctgtagggcttctccccagtgtgaactctccggtgaatagaaaggcatgagctctgggtgaaggctttcccgcattcctgacaaacataaggcttttctccagtgtgaattctctggtggcggacaagctcancactcangccgaaggccttcccgcagtaatcacatacatagggcttctcacctgagtgaattctctgatgcttagaaaggcatgagctctgacngaacgttgtcccacattcgttacacaccaacggcttctttctggcatgagttcactcatgctgaacaaagtangttct

SEQ ID NO: 207488 - DNA, 548 bp, Homo Sapiens
gaaagacagcacagactgttgctactgggcattttctgtgaatctcaaataactaacactaacaaaggaacatactttggggatgcagatctcaagccttacaggtaactgtaatggttgtaacattcacatcttaaaataaaatctcccaggaaaataatctggaattaattccaaccaattctaatgagaattgagagaacttatctctatctcatgatttcatattcttgatatgtgagctcagtaaaattactttaaaaatatgcaaattccatttccataagtcttttatactatcagccttgagacttgattcataaagaaatatttttctttttttttggacagccttgcatcatgatccattcatagggaagtgcagagtagattatttccatgaatagtatgcaaaaagaaaatttatgaaatccttcaagttattttcagtctggcatgggtctatttgttgttaacaatgttgccagtcataccaccactaaaactatgggaaactgggggtcacaaaaagaaaataacacaggtaa

SEQ ID NO: 207489 - DNA, 120 bp, Homo Sapiens; identical to SEQ ID NO: 55290

SEQ ID NO: 207490 - DNA, 523 bp, Homo Sapiens
tttttccaatttaataaaaacaacatttttattttttctgaatccactcacatctaattgagttacatttgactgtaaaccacacacaaaaacacatatatatgccatttttaaacagaaattctattttgcaatctgaaacagcgtgacgtggggcaaaggtctaggtcggtttcatcccattttgcatgaactgactgttgaccattgaacttgccaaagtaaatttctccatttacaaattaaagcattactcttaaaaaagcaatactgagaataaaattccttctcttcacgcaatcaaaatgactaagcttttactgtcagcaaatgtacacgtgacaaaagtcaaattaagcacttaaatatctaactaacacatgtagtaacatttactgcaagaaacaaatattaaggaagcagattcctgcttctcagcagtatttattaccaagcttggatctacttctactcctcgggattcaaggttcttccggactgtggttatttcatcacttgcaag

SEQ ID NO: 207491 - DNA, 551 bp, Homo Sapiens
ccaaatggttctttcttcctcaaaagctgcatggtttattcagtgccttcgagatctggcagagagggaggaatgagacacaggtgttatccagagagggtgaacttgcactttgtaaaggcagaccagtttgctcccagaaaatcaatatctgcttccaatttggaccctttccaataaaccataaactctcatgagtctttgggaacattactgtagggctaagttggtggacaaatatttggtttttaaagttattgcaatgaaagccttaaatagtgaagaaattttcattttgaaaatgcagactggctttagcatgaatgtcaacacagagcatttgtgtagcaatttacagtttctagaactggcaagattcattatcccattttaccctcaagaattctatgggaagttaagtcgtctttacacaaacatggagtctgaggtcattaggggataagaaatttagccaagttcacacagctatatagagggcacaactcataccccagctgtgtttaaaatagataatttatcatatatacatg

SEQ ID NO: 207492 - DNA, 597 bp, Homo Sapiens
atatactcctgacaagaaagagttaaggtgggtggtgtacttaagagaagaacacaatgaaaatatctgtgggatatgtgtggctgtgtgtctttacattgcatttacagttcttttaatagtacataaataaattgttcattgcactgtttagagtcatcacttccatgagtccggacctgatggtccttcagagcagctttgtatgtctcctctcatttactataattcacctgtaaactgtccttgactgttggagcccatatatcctatgtcaagaaggtcgctggcattgcgctggtggcctgctctcaacacctcggttttcctaggtccagtggatcccttagaagaagctgttcctgatgagctgtggccacctggagatgggaaactgggcttgctatagggcaccaaggcctcctcatctgtcattccttcccttcgatgaggcaatgctggttgttggtccatccgccctcccttgtgttttttagtgggccgaggcctctgactttgactcagggctgcactggtgttactgtcagtagaaaatgggctggtaggtcgaggtctttgagaggaggtaaagggctt

SEQ ID NO: 207493 - DNA, 661 bp, Homo Sapiens
  misc_feature (533)..(533): n is a, c, g, or t
gacaccagtacagtttattcacaaataaataaattcacattaggcagagcctcctgcttgcctcaaagtgtctagccctatgggtccctccatggagggaggggctgaaaagggccgccgcggtggggacggctctcacccgcaggaatgcccccgtcgggatcgcccgtgccctcttccaggaaaggcagtctgccaaggaaccacttcgaaggtgctgaggccaaaaagcctcggtgctcacagagacggcgtcagttgtcccttgtcacttgggctcctcaggcagccactccagaggcgagaggggcatccaggtctccaacagagccagcacgtcgcccggaaggagcggggacggtgggcttggctccatcgcctgcccttccgggcacgccgcctcggcgaacagcgcaggcgggtcgcgcggctcgggtgcagctcgggctccggggcaggcaggcggggatccccaggacgccccggcgcggacggtggataccaggcccaggccgcgcccctgcccctgcccntcagcctgcgtacgtgtctgcatctgcgcggggcaatcgtcggggcacatcgggcacccccgatgggactccgcgttaccgcgcttgcggcacccgcgcttgagactcttcttgctgtagcctagcac

SEQ ID NO: 207494 - DNA, 557 bp, Homo Sapiens
aactggtagcacattttattcacagagcaatgaaaattattcctataaattaatgtgagctgaacaaattcaccttccaatgtgcatacagaatagtggggatgtgaagacagcaaggtgggtgagacacaagttatgaagtaatgagtaccttctcctcgtggtttttactttaaaagcacatgctaagagctggatgcagtggctcacgcttgtactctcagcactttgggaggccaaggcgggcagatcacccgaggtcatgagttccagaccagcctggccaacatagtgaaaccccgtctccacttaaaacacaaaaaccagccgtgtgtggtggtgcgtgcctgtaatcccagctactcaggaggccgaggcacctgaatcgcctaaacccagcaggcagaggtcgcagtgatccaagatcgcagcactggactccagcctggacgacagagcgagactgaactttaatccttttcatacattctggtgactccatttccttgtcagtcatagtagagggtttaatcaaatagcacagcataagttcctta

SEQ ID NO: 207495 - DNA, 677 bp, Homo Sapiens; identical to SEQ ID NO: 40645

SEQ ID NO: 207496 - DNA, 815 bp, Homo Sapiens; identical to SEQ ID NO: 40007

SEQ ID NO: 207497 - DNA, 863 bp, Homo Sapiens; identical to SEQ ID NO: 53333
  misc_feature (863)..(863): n is a, c, g, or t

SEQ ID NO: 207498 - DNA, 425 bp, Homo Sapiens
  misc_feature (2)..(2): n is a, c, g, or t
  misc_feature (24)..(24): n is a, c, g, or t
  misc_feature (195)..(195): n is a, c, g, or t
  misc_feature (419)..(419): n is a, c, g, or t
tngttcaaactgaaagtcagtgancaaaagttaattttgaactctagctggttcaatagtaaatgtaacacaggcagtcaacaggttaggtaaatttgcaagtacaatgatcaccttggcagacagagactgtccagggttgcccaggaagaggctacgtgtggagacataagcatttctaactccatgtttctncctttccaacgtcatccagaagaaagagcctttatggcctcccatctctttcagctggaagcaatcctccctaatcctgcagcactgtgacgggatgtgggggatgtgccttgggagacaggcacgaaattcgagggatctaggaaaggactctgtcctccattacaaaccagtgagtcagcaggttatttttaaaaaaattaaattttgcaaaaagttttctnttcaaa

SEQ ID NO: 207499 - DNA, 431 bp, Homo Sapiens
  misc_feature (5)..(5): n is a, c, g, or t
  misc_feature (410)..(410): n is a, c, g, or t
aaagntgcaaatcttcagttaacttctactcattaatcaactggaaatatggatctccaagataaacttgttgctaagtttaacatattggtcagttggaagaaaagcaaatggtcatgaaaactcttctttgaaaaaagaaaaggggacaggtgtggttgctcatgcctgtaatcccagcactttaggaggccgaggtgggcagatcacctgaggtcaggagttcaagtctagcctggccaacatggtgaaaccccatctccaccaaaaatacaaaaattaggcggacatttggggcgcacgcttttaatcccagctcttagggaggctggggcaggagaatcacttgaacccgggaggcagaggttgcagtgagccaagatcacgccactgcactgcagcccagggtnacagagcaagagtccgtttca

SEQ ID NO: 207500 - DNA, 732 bp, Homo Sapiens; identical to SEQ ID NO: 44630

SEQ ID NO: 207501 - DNA, 891 bp, Homo Sapiens; identical to SEQ ID NO: 49027

SEQ ID NO: 207502 - DNA, 1000 bp, Homo Sapiens
ctcatgcaggcgtacaaggtctttaaggaggagaagtacttgaaagaggccatggagtgtagcgatgtgatttggcagcgaggtttgctgcggaagggctacgggatatgccatgggactgctggcaacggctattccttcctgtccctttaccgtctcacgcaggataagaagtacctctaccgagcttgcaagtttgcagagtggtgtctagattacggagcacacgggtgccgcattcctgacagaccctattcgctctttgaaggcatggctggcgctattcactttctctctgatgtcctgggaccagagacatcacggtttccagcatttgaacttgactcttcgaagagggattaaaaggtgcaaaaagacaactaaaatacccatttggaccaaaagccgccagattgcttagtgcctgacacagaaacaactgggaatcctgaaagagaagcagacaccgtcacaggcccctctggttagactagcatgagtgaccgaagccatccatcaacattttctaacagcaccctcatcaatatgaaatatgacttcttcacatacagattctctgtagtgtttgcatgtttcttggttgtcagtcgtctccaggtgttagctgtttcactgggaggccttctattctgaaggctagagttgccatgcttgatgtttggccgtgccctttctgcgcttccctgcttacgcggcgggttctgttcccttttggccccgtgggccacgggtcggtaacacgcggctaatctccgagcagattatgtcgggggcacacccctagggataaactttgtgacgcctcctaggcgggagccttccaattgaaatgtggaggggccacacaagagtcgagcgcacaccgcagtctacggcgcctagggcgcttaaatgacagcagacacagtactgagtagagagcacgcgccgtagacaaacgcgtggtcgctgggacgcagcaagaagaagtaggtacgaa

SEQ ID NO: 207503 - DNA, 406 bp, Homo Sapiens; identical to SEQ ID NO: 40895
  misc_feature (344)..(344): n is a, c, g, or t
  misc_feature (349)..(349): n is a, c, g, or t
  misc_feature (370)..(370): n is a, c, g, or t

SEQ ID NO: 207504 - DNA, 793 bp, Homo Sapiens; identical to SEQ ID NO: 55644

SEQ ID NO: 207505 - DNA, 549 bp, Homo Sapiens
acagtcttggacttgcttaaaggaacaatcagagaaagctgctagaaaatcttccagtgcaaccttagcttctggcccagcccagggtttgtctgagaaaggctcctccaagaagctggcttctcctacaagcagcaagaatacattgcgagggcctggtacaaagaagaaagccagagtggggccccacgtccgccagggcaagaggaggaagagcctgaaaagccacagtggcaggatgaggccatcagcagagcagaagcgagctggcagaagtctcccttgacctattggtcaaggtggccgacagggtgacgtgagagaggagagccacctcatcaaatgaaagtcactgctgaataaagaccttagaagtctgggaagccagggtagaggtggggcagggcggttttcctctccctgggaaatcttgctgtctactgaataaataaatgcaccttctctgtatgcagtgcttctgtgggagaccatatcccagattgctggtgcacctgggttatggtaagcactagtccatgagcctgcttg

SEQ ID NO: 207506 - DNA, 895 bp, Homo Sapiens; identical to SEQ ID NO: 46027

SEQ ID NO: 207507 - DNA, 1000 bp, Homo Sapiens
ctgccctgctgcagcccgactcagctcagcacccgtggcctggcacatggagccagtgcaaggaggggcaaggaccttctccaggtgcccattgccctcggggtcacggcccttgtggacctcactggcctcagctgttgttactgcaccccgtccccactgtttctcatctctaggtctttgcacatgctgtgtcctttaccagagagacacccctctcccgcttttccctgtttctctggccatccccttgtcctctctcagtctagcttcctccaggaagccctccctgattgctctagctgggtgagggacccgacctctgtgtccccacagggctctgtgcatgtccatcatagcagtggtaggctgtcacgcccgtgtctctttatctgcccacctcactcaatctactgggagttcttgaaggcaagagctcagtctcctccatttccatatccccagtttgtggcacaaaataagcaattattaaatattttggaataaatataactggtttttacagagcatatgattcatccatttaacaaatacttatagaaacttttactctatgccagacactattctagatgttgaggatacagcaaggaagaaaacagacgaaaatctctgccttcgtggggcatacagtctagttgagtgtgtgaaagggagactcaaagctataaatgctttaagaaaaatttgtggctgggtgcggtggctcacacctgtaatcccagcactttaggaggctgaggcgggtggatcacctgaggtcaggagttcatgaccagcctggccaacgtggcgaaaccccatctctactaaaaatacaaaaattagctgggtgtggtggtgggcgtctgtaatcccagctacttgggaggcttaggcaggagactcgcttgaacccaggagatggaggctgcagtgggccgagattgcgccattgcactccagcctggatgacaagagtgaaactctgtctcaagag

SEQ ID NO: 207508 - DNA, 1000 bp, Homo Sapiens
atgtttggcccacttggagctgtggctgacctatggggcccagacatgtagctggtgttttcacaaatagccctgaacctggatacccatgagcacactactactctcaagcagttgctggaagatcccatatcttatcccagccatgccccctagacgcagaaggcttggggcctcttttggcacgtgccatggcatgttcttggtaggtgatccagttgagaagttaaatcttctgcggtggttaagtcatgaggctagcacgtagaccagcgctgagggaagggttccaggatgagattggagcctcgcaataaggagactactgcaaggcattggatgatactccagtgttgtcctcgagaaagccgagtgtgtcccagctctttctggtcattgcacttacgcagagatgcaccttctgctgctgtcatgaggctgtggggattgtgggcagactctgaacacttcctgagctagaatccgggctgcaccctcgtcttccgcaggctctgccatccttccagatcccagtctcaccacacatctacaccagtgtcagctgggctgctgccccctccgccgcctgctctctctctccggtccggagccggtcgctaagcttcagcgagccccagcagccagcacctgcgatgaaatctcatctgatcgtcacttctccaccccgggcccagagtggtgccaggaaagcccgaggggaggctaagaagtgccgcaaggtgtatggcatcgagcaccgggaccagtggtgcacggcctgccggtggaagaaggcctgccagcgctttctggactgagctgtgctgcaggttctactctgttcctggccctgccggcagccactgacaagaggccagtgtgtcaccagccctcagcagaaaccgaaagagaaagaacggaaacacggagtttgggctctgttggctaaggtgtaacacttaaagcaattttctcccattgtgcgaacattttatttttt

SEQ ID NO: 207509 - DNA, 1000 bp, Homo Sapiens
tttttctgagactactttattaagaatcttttttgaacacctactagctaacaatacacattatgtaataaaacagtctcctcatagcacctcaagaatacaaagttgactataaattttcctcatatttgtattaacattatggtttatttctagcagtagatattgcatacctagtagatacaaaatgccaggtactgtggatgattacatttgagtccatgtggtttaggttctcaaccatttgcaactaacatttttgatatggtgaagtttggtccatcttgctctgttctctctggcatgtaatgggttggtaccagtgattttactcttcttgcgtgtgatataaatctattttaaatgaataatttttatctttgctttcttctccaagagaattattagaacaagttgcagaatttgaaaaagcagagattacatcttcaaacaaaaagcccatcttagatgtcacaaagccaaaacttgctccacttaatgaaggtggaacagcagaactcctaaacaaggtaatattattattttgagaaacggaaagtctctcatcctgtcctgtcattgcctagggtggagaaacagaagtggaaggtttgtttcaggtcctctgaggataattagtccattgcagtagttttacttgatggtaccccatgggccagaagagggcatacttaaccttctagagagcctgaagtagctcctgatcacaccttttcaaggtaaagtgaagagcatgaaattttggacagcgtttattgatggacatttaaagtttgtgatctgcggtaacaaggagaagggtttttaagtttataaaaattatttatcaattagccgggtgtggtggtacgtgcctatagtcagagctactcgggaggctgaggcaggagaattgcttgaacccgggaggtggaggttgcagtgagctgagatcacgccactgcactctagcctgggcgacagagcgagactccatctc

SEQ ID NO: 207510 - DNA, 1000 bp, Homo Sapiens
ctttcttctgacccctctgtcttaaacagggtagtgtggctgattttaggtcatgtgcctgatagcagtgcaagagaatatacaagaggtaattgggagataaaactctggtgcagttgttactgggggcactcatagtgtacacaggagaaaaatgtcatggaatgtttcattagctgcatccttggattagagaaaacacctttccagagcctccttcctcctgcccgttaggttacctgggcatcgactcccctgtctttgagatagtcagctccctgaggccaaggatgctggcttgagttggtttcttcacagcatttaacatagtgcctgacacataatagtctctctatttatgctaaataaatacaatcctcaagacttgacatcagctctggaatagtagagtgggaatgctgcagaaaagatccagagaggaaagaaggcaccgagatgttaaaatgcggcttgttgacagaatacttgggattgtccagtgctgctatttctatttttcacttttggcaggtatttattatttcactgataggagacatcaagttccagcattttaatcctgtacttgaaacctacatttacaagcacttcagcgccactttggcatatgtgtaagtatgatctgaaggaactacatgttgttggatctttggatttgtactcttaggactggattgttgagaaacgagacggacctattactattcagtaaatacgcctgttaaggcagaactcttattctaagcttccgggtggaaaaagggaaccatctaagtattctaactctggaaagggggctaagatcagggccttcattctggatcaggcgaaatttccttaaggatccagaataggccaggcgtggttgctcatacctgcaattccagcactttgtggggaggattgcttgaggccaggaattcaagaccagcctaggcaacataacaagaaccttattctttacaaaaaaaaaaaaaaa

SEQ ID NO: 207511 - DNA, 1000 bp, Homo Sapiens
gccctagctcatttggaacagagatgtttttctcagcctgcctgtttatttgaagttacacttgctctgattttctaatcaaaagatttcggagaattcatactcaccatctcccagaaattaaaagcttgccctggaggctgagcaaaacacaggaaattgatgaggataggagcaaagatccaggtagcttgcaatgatgggcttgggaagaggccaattaacctgtctctcttttgagcattcacgtacttgattttctccttgtggatctggaactgagaaaagccccctgggtgtgaagtgagaaaatctattaattccctttgattagcagtgaaacccccactctcggacagggcaggcaagatggaagcagctacagatagacagctgttctgtaggaggaaaatgctatgggcaggcaagttcaaggccattgtctagtcctggaggacatggaaccagtttgtctggggtacaagaaccttcctagtcaacgctcatggagatgaagtgagtaaattttgaccccaagtttcatgactgattcttgtttgggaataaatttctgaagacatactttaggttcaaggaaataaaaaatcactaactctaatgaggcacctaccagccaaagaacccagagagagccgggagagctgaccttagactgtcaggccgtttctttttaaaataagcgctacttcaggaggagaaaaccaaacaacacatgttcttacttataactgggagctgaatgatgagaacacatggatgcattgcagggaacaacacacactgggacttgtcggtagcggggtatgtgggaggacggagagcatcaggaaaaatagctaatggatgctgggcttaataccaaggtgatgggatgatctgtgcagtaaaccaccttggcacacagttacctgtgtaacaaacctatacatcctgcacaggtaccctgaaacttaaaggttgaagaaaaaaaaaaaaaaaa

SEQ ID NO: 207512 - DNA, 1000 bp, Homo Sapiens
gggacagggacacctacagcagggggttccatggtgtgctctttccccttggctggtcacaagtaactccggtgactgcagggccaaggtgcatgaagcaacaaagctgagtccagcccgtccttcagtcccacatgcagctgctgggacctctgggaagtcactgagacaaagccgcatggaggagcggggagatatctggctggccttgggagggttggccttggtaacctgtggggaggcgaattccaggcccctctgggtttcctcgtgggtccattctctcccccgagctctggcttgagcacctggctagagcccctctccagggagagctagggacccatgtccagcccaggaggaatggggggcactggggcatacattcttctttttctgcctcattctctgttcccctagaccgggagacaaaggactggatttgaatcctgtctttgcctttcaccagatataaggcattgggcaaggtattgaatctctccaagcctcagttttctcatctgtaaaatgggagtggctgggtgcagtggctcacacctgtaatcccagcactttgggaggtcgaggcggatggaccacctgaggtcgggagttcgagaccagcctggccaacgtggtgaaaccccgtctctactaaaaatacaaaaaattagccgagcgtcgtggcaggcacctgtaatcttagctactcgggaggctgaggcagaagaatcacttgaacctgggaagaggaggttttggtgagctgggatcgtgccactgcactccaaccttggtgacagagcaaaattccatctcaaaaaaaaacaaaactggtgtggtagtgtgcacttgtagtcccagctactcgggaggctgaggcaggaggatcacttgaacccaggaggttgaggctgcagtgagccaaagtcatgccactccacttcaacctgagtgacagagagagaccctgtctcaaaaataaaaaaaaaaaaaaaaa

SEQ ID NO: 207513 - DNA, 1000 bp, Homo Sapiens
gctgttctccactcctgacttctcccagcctcgagaattgataacacactcttctggatcccagcagtgtccagaagaagaccaaggacagaacagagactaggtttggtgagatgggacagattttgggaaagatcatgatgagccatcaaccgcagccccaggaagagcggagcccccagcagagcacctcagggtaccccccccaggaggtggtggatgatgaagtgtcgggaccatcaggtgaggggactggaggaagaagaggtggcataggattgactaagatgaaggaagggggccaggcgtggtggctcacccctgtaaccccaacactttgggaggctgaggcgggcagatcacctgaggtcaggagttcaagaccagcctggccaacatggtgaaaccccatctctactaaaagtacaaaaattagccaggcggtagtggtgtgtgcctataatcccagctacttgggaggctaagacaggagaatcacttgagcctgggaggaagaggttgcagtgagccgagatcgtgctactgcactccagtctgggtgacagagtgagatgctatctcaaaaaaaaaaaaaaaaaaaaaaaaaaaaaaaaaaggaagaaaaaaaagaagggtcagaggtcaggaaggagaacttggggagggtgtgtgggaagaatggagaaattcaggctgggtgcagtggctcacacttgtaatcccagcactttgggaagccaaggcaggcggatcacttgaggccaggagtttgagaccagcctggccaacatggtgaaaccctgtctctattaaaagtacaaaatggagctgggcattatggcaggcacctgtaatcccagctacctgagaggctgaggcaggagaataactggaatccgggagatgcatgttgcagtgagctgagattgcaccactacactccagcctgggtgacaaagcaagattctgtctcgaaacaaaaaaaaaaaaaaaaaaggcc

SEQ ID NO: 207514 - DNA, 1000 bp, Homo Sapiens
aaaaaaagtgagagaactgttctagatgctagattaaacataaaagagtttaggactacaatatgaattgcaatgcatgagcacctgtgtatctgaatttaggaagaaaaaatcgccataaaagacaatttggagacaactagatagatttaaatatggactggataccagatataatgagaaaattatcgttcatttttcatattttgaaatgttagtgtctttatgtacgagaatgcccttactattaggaaacagatgctcaagaacttaggccaggcacagtggctcatgcctataatctgaatacttgggaggctgaggcaggaggatcacttgagtctgagaccagcctgggcaacatggtaagatttctctctatagaaataaaattaaaattagccaggtgtggtggcatgtgcctatagttccagctacttgggaggctgaggtgggaggattagttgagcccagaagttcgaggctgcagtgagctatgattgcaccactgccctccagcctgggtgacatagtgagaccctgccttaaaatatatatagagagagagggtaagcatcatgacatctccttaccctgattaatctcaaactgttcagcaaaaaacatatatatatatatacacacatccgcataccttcgcatacacatatacacacacaaatagagaaagcaaatgcaggctgggcacggttgctcacacctataatcccaacactttgggaggccaaggcaggcagatcacctgagatcaggagttcgagaccagcctggccaacatggcaaaaccccgtctctactaaatatacaaaaaagttagctggatgtagtggcgggcgcctgtaatcccagctactcggggggctaaggcaggagaatcacttgaacccgagaggcgggggttgcagtgaacggagatggcgccactgcattccagcctgggtgacagagcgagatgattgtctcaaaaaaaaaaaaaaaa

SEQ ID NO: 207515 - DNA, 1000 bp, Homo Sapiens
atgtctgtagttgcatttggacaccattttgaaggaaccccttccacagaaaccagatgtgatttctgtttttctgtctggagaaagcacacatataatgaaaaggttgtataattattgcacttgtacagaagaatcttctcatgtaaatttaaatttcaataagttgctggattaaactttagcaagggaaaggaaattgtaaaacgtggtcttgtctttcattcacatgtttgtgttagtatgttaattatcctttttgggggcaggagaagtacaatgaagcataggccagcataaatgctacttatacaggaaccaataccagagccagactaggcttaggaaaccttaatggtacatttagatagataattgccatagcagtgaaacagtagaaacttattttttgtcagtgcaaagcaggtttactaattaccagtcccaagagaggactcccattgcatggggaatagcaaagatcatccttaggccaaccaccaaaaactcaaccaagggttttccagggttgcagacaagtcaagagagtggatatgatgcctcagtccgcaccatcattagctccagagggaaataggacaatgcgtgtttttagttccctagatatgtatttctatactttaatatttctgtgaatgggtgttgccatttggtgtaatcttttaggaaaacagattgtgtggctgggcgtggtggctcacgcctgtaatcccagcactttgggaggccaaggtgtgcggatcacctgaggtcagaagtttgggaccagcttagccaacatggtaaaaccccatctctactagaaatgcaaaagttagtcaggcatggtggcatgggcctgtaatcccagctgctcaggagactgaagcaggagaattgcttgaacctggaaggtggagattacagtgagctgagatcatgccattgcacttcagcctgtgtgacagagcgagactccatctcaaaaaaaaaaaaaaaa

SEQ ID NO: 207516 - DNA, 1000 bp, Homo Sapiens
agctagacagcccagtaggtactccccttagctgatgagtttaacaagctggaagccaggactcattggattcagggatatggatttacacccctttatagcggtggttctgaactggggatgatttattccccaagaacatttggcagtgtctggaatttatcataacttttatcataaatgcggaggtgctgctagcatctggtagggccagagatgctgctaaacatcctatacaacagagccccccacccatcacaacaaagaattatccagcccaaaatgatagtagtgctgatgttaagaaaacccagctttatggcaggattttaaaattctgccaagatccttcttctttttatcatctgtattaaaatttgggggtcttaaacattgcttcaacaatgggctactgattaaggctatctacaacgtagaatacgtcagaaaacctaatcactgtctttcaaactggattccttagggtgctagggcttcctcggggtagatagagctgagcaaacaggcgcaattctggggcactgtctccattctagccagagcacctctgcttttaacttgagcctgagtttttttagtaagacctgatttcctaaaaaggaaggagggagggaaagaggaaggaaggaagaaaaatgggaggaaaagaaggaggtagttatcatctttaaaaaagtttgaggccaggcgtggtggctcacgcctgtaatcccagcactttgggaggccaaggcgggcagatcacaaggtcaggagattgagaccatcctggctaacacggtgaaaccctgtctctactaaaactacaaaaaattagccaggcgtggtggcgggcgcctgtagtcccagctactcgggaggctgaggcaggagaatggtgtgaacctgggaggcggagcttgcagtgagctgagaccgcaccaccacactccagcctgggtgacagagcgagactctgtctcaaaaaaaaaaaaaaaaa

SEQ ID NO: 207517 - DNA, 1000 bp, Homo Sapiens
gaaatgaagctgagagcagagcgggtttctcggctttggtggatggcccttgggaaccagagcgggcataggaaggggttgccctgagtaccagtccccggccggtagctgcggggggtgtgcgggaggtgaagcctgctgagactgagaagccaagtcccgctaacgttgtgcccttcccaggagagggcctcgccgaggacggatggggctgggaacgggtgggcctatacatagtttctgcccgttattgtttatacctcttgaaaggatctgtgttgaatgggatttaattttaggacaagtaatgcatttacatggtacagaactccaattctaaaggtgcacaggagtacgtgcagaaaagttggtctcacagtctccaagtgtccttctctagaggcaactactcttcccagtttcttgtgaagccttctagaaataggctgtgcatgcatactatatatactatatattctctaccatacacgtgcgagtagcacacatgttgttttgcacatttttccgttttcatagtgtttcttattagaatgattgttctgagtcggtgcatataagactggcttacttgattttaattactgcttaggccaatgtacatacggttttatgaataaaaccattaacaagtacgtatggatttaaatgtttatgtagatttgaatgttttttaacctatttagacagtccctgttgatgaacatttgggttttcaatcagaaggtttgtgacagcaaagtcattggaataaatctttcttcttgatggagatgaaatatgtggctagtcttcgtgaggcagtcaccaattaatcaacttcagaaaaatagaaccaagcagaatactgaggaggggtgcgttacaggaaataaaaatgctatcagagggcaacccgctctggtccccttccacgctgcggaagctttgttcttttgctcttcacaataaatcttgctgctgctaaaaaaaaaaaaaaaaa

SEQ ID NO: 207518 - DNA, 1000 bp, Homo Sapiens
gcaacttcctttcctgcctgagcagccctgagcagacagtgctgtgtctttcatgatcatcatcacgtggcccaacagaccaggtctgcagacaagtccactgccaagcaagtctcggagcacagttctgggccccagagtcagcccagtccagcccagccccatcagggcctctggacagcctgagagcaaggcctcgtgctgtccctctccgaggaaggatttgcctcaggcctggttctgagaagtaaacagggtaatgttctgaagcagtggacttcaaaccaaacccccacaaaataaatgtttaaaactacatatctatttgcacatttttaagttgatatgaaaaatttctcatcataagtctaaatacttgtagaggatgtaatttccaacatactgtaaatattaacatttaaaaataaaactgttaatgtttctcttttaaatggatccaatggtatctaaataccacggcgattagagattcgccatcatccatttttaaattacataatcaagctcttctttaaccattggaaatttaacagtgttccttttttcctccacaaactctgatctccctcagagatgtttatactatcacagtgtattttatgcttgaaagccttatactgattatcctattatatactatagggccaaaaaatacaaaaatcaatgttttaattttttttaatttcctgtgatttcctgtgatcataaagctctgtcagaagttttctcctggactgaattattataacaattactataagtatacaattgatcaataagacagaaatatattgcaaaattgtataagaaataacctttaaaaataaacttaattaggccaggcgcagtggttcacgcctgtaatcccagcactttgggaggccgaggtgggcagatcacctgaggtcagcagttcaagaccagcctggtcaactggtgaaaccccatctctacttaaaaaaaaaaaaaaaaaaaaaaa

SEQ ID NO: 207519 - DNA, 1000 bp, Homo Sapiens
tcagtccagctctcaacaacctacagcaaaccctgaatattgtgacagttcagaaagaagtgatagacaccaatctcacaactctccgagatggtcttcatgggatacagagaggtcagcatcttcctaatccattgtactcggttggcttcttttgttgaacgttttagatacttatacctccctatctgtgtgtgcattaggtgatattgatgctatgatcagtagtgcaaagagcatggtcagaaaggccaacgacatcacagatgaggttctggatgggctcaaccccatccagacagatgtggaaagaattaaggacacctatgggaggacacagaacgaagacttcaaaaaggctctgactgatgcagataactcgggtatcaggcgatctctggccaggacatcttagccattctctccattgttatgtgttttggtccatttccattcttccctggtaaagtctgatctcagaaactaaaacattagaaaacagctccacctgatacaggatatattcaaagcgtatagatatcctgctagttggaaggaccagacaggatttttaatttttagaaaatacattgaaaatgctattggtttgcttttttacaaagtggagatatatgtttctaaatcatgaggcattgaattatgattgatattaagaatcagaaaacaggctgtgttttctgtgcgctgtggctcatgcctgtaatcccagcactttgggaggccgaggtgggtggatcacgaggtcaggagatcgagaccatcctggctaacatggtgaaatcctgtctctactaaaaatacaaaaaattagccaggcgtggtgatgggcgcctgtagtcccagctactcgggaggctgaggcaggagaatggcgtgatcctgggaggtggaggttgcagtgagctgaaattgcaccactgcactccagcctggacgacagagcgagactccatctcaaacaaaaaaaaaaaaaaaaaaa

SEQ ID NO: 207520 - DNA, 1000 bp, Homo Sapiens
gagtaattcacacagagctggctgtgtgggagactggagttctattattactcaaatcaatttccccatattcggggatcagagttttaaagataatttggcaggtaggggcttgggaagtggggagtgctgattggtcaggttggagatggaaacactgggggttgaagtgagatgttcttgttgtcttctgttcctgggtgggatggcagaactggttgagtcagattatgggactgggtagtgtcagctgatccattgactgcagggtctgcaaaatatctcaactactgatcttagtactgttatccccaggagcaatttggggaggttcaaactcttggagccaaaagctgcatgacccctaagccatcatttctaatcttgtagctaatttgttagtcctgcaaaggcagactggtccccagacaagaagggagtcttttcaggaaagggctattatcagttttgtttcagagtcaaaccataaactgaattccttgccaaggttagttccagcctacttccaggactgagcaaggacagctgaaaggttagaagcaagatggagtcagtcaagtctgatctctttcactgtcataatttcctcagttacagtttttgcaaaggtggtttcagtccttccctttgggtttaacagcaccttattcttaaggtgtgggctatgaagttgggaaagggccgtcagtcactctggctgctttctcctaactgggcgtagtgggggaaggtgttgaccacaaagtgagaggagtggaactgctttgcagctgtctgagtgtactcacgcaagccaggctgaggttccaaggcttcatgacaaaggtgttagtattctcatctatggttttagtacagcatttaagtggacatttaaatactgagttctaggataaggagtgcaaattccagttaagcattaatttggggcattgtggctcaccaaaatctaaattgcagaggaaaaaaaaaaaaaaaa

SEQ ID NO: 207521 - DNA, 1000 bp, Homo Sapiens
gcatctagcctcttttacttagcataaggtgtttgaaatcatccatattgttgcttgtatcagtagtctgctcctttttgtgctggataacattccattgtatagacataccaaaatttctttatccattcactaatttaggttgtttccagtttggggatatatatacacatatatatgtgtatatatataattatatatattattatatattatatttatatataatacatatatattaaaacatatataattatgtatatataatttatgtctaggattgctgggtcatatagtcataagtatatgtttaattttataagaaattaccaaactgttttccaaagtggttgtaccatcttgcttgttgccaacagcatatgagagttccagttgttccacatctttatcagtacttggtattgtcagctgctatttaaaaaaaatttagccattctaaaagttgtatcatgtctcattgtggtctgatttgcatttccttcgtaactactatgaacatcttttcatgtgcttatttgccatttgtgtatcttatttggtgaagtatctgttcaaatcttaaaagcccattttaaaatcagacttttcttattattgattataagagttctttctacattgtaatataaattctttatatgttttgcaaatatttcttcccaatcttttttgtgttgtttcattttcttaacaatgacagcacagctttgaaagtctttgaagggaatatcctaaaaggtactaaagtagaggttttaccagcctgggcaacacagtgaaacctggtctctacaaataataataaaataattagccaagtaaggtggtgcttgcctgtagtcccagccacttgggaagctgaggtgggagaattgcttgagcctgggcagttgaggctgcagtgagccatgattgtgccactgcattctagcctggggcaacaaagtgagactccagtctcaaaaaaaaaaaaaaaaaa

SEQ ID NO: 207522 - DNA, 1000 bp, Homo Sapiens
ccctccttcctttccttccttctctaaacagagtctaaggtaatgcccctctccagtttcttgggatagggaagggggtggaattacttctgactcacccttacccttatggtgtaccctttggggttctggctaaaatatatgtattgggaagtgggacgcagtggctcacgcctgtaatcccagcactttgggaggccaaggcgggtggatcacttgaggtcaagagttcaagaccagcctggccaacacccatctctactaaaaatgcaaaaattagcctggtgtggtggtgcatgcctgtaatcccagctactcaggagactgaggcatgagaatcgcttgaacccgggaggtggagagggtggtgagccaaaatcacgccactgcagtccagcctgggtgacagagcgagactctgtatcaaaaaacaaacaaataagtaaaatatatatattggggtccattagtttttccaccctgggtggactctgacctttgacttctgtcatccttgccccatgaagccatcggaactgcagctcgttttccgctttttcatcgccatttctttcagctgacaaatgctgtttacctcactggcttctcctttattcttaggttttggcctgacagttgctatttttttttttttttttttagctctttgatacttttaagaaaatggtttttaggccatgcacaggggctcatgcttgtaatcccagaactttgggagaccgaggtgggtgaattgcttgagctcaggagtttgagaccagcttggccaacatggtgaaaccccgtctcgattaaaaatacaaaaactagccgggcgtggtggcaggtgcctgtaatcccagctactccagaggctgaggcaggagaattgcttcaacccgggaggcaaaggtggcagtaagccgagatcgcaccactgcactccagcctgggcgacacagtgagactccatctcaataaaaaaaaaaaaaaaaaaaaa

SEQ ID NO: 207523 - DNA, 1000 bp, Homo Sapiens
atctgtgtgattcaaaaggggtagcgtattttaaaaataaggctttattatttctcttagttttagaagaatacatgctagcatcaaacataaatgatagcatagtatatgtaattttttgctttttgttatgctacatacattataacatctatatacatataaatagtgaattatagttttcaggagtttttttcacattataatttctcacatgtatatttggatgatctttccaggtcaatcataaaaagtcatacagattcttaattagctttatcatatagattcttatcccagtggcacattacaaacagtagatcaaaagaagatatgcgcaccacgagtgacaagaatgtcaccacaaagtataagaaataaatactcctggaggctggatgcggtggctcacaattgtaatttcagcaacttcgggaggctgaggtgggaggatctcttgagcccaggaatttgagatcagcctgggaaacatagggtgtttgtagaccccatctctacaaaaatttaaaaaattagccaggtgtggtggtgtgtgcctgcggttccacctactctggaagctaaggtgggaggtttgcttgagctcgggaggtcgaggctacagtgagccatcatcgtgccattgcactctaacctggaccctgtctcaaaagaaaaaaaaaatactgctggaaataaggccatagcacagtcagtgaaagaagtgagaactaggaaaactgttctttgagttgtgatagtctcagtactatgtagtgattcagaaaatgttaaaagtgatattggccactcttccttacttaagaagtaagggatggaaagaatcatcaaagtgttcttctaagctggacacagtagcatgggcttgtagtcctagctattggggaggctgaggcgagaggttcccttgagcccaggagctcaaggtcagcatgagcaaaatattgagacactttttcttaaaaaaaaaaaaaaaaaa

SEQ ID NO: 207524 - DNA, 1000 bp, Homo Sapiens
cagccaaaccatatcacctcctttcctagttgcttggtttggaagagttatgtaatctttttgagcttcaatttcctcatctataaaatagggaagatgctagttactctcttatagggtagttatgatttattttatgtgaaatgtttagaatggtccatgccatgatgcactgcagttggtttgtactggctcacaatgaccaatagtacaccttttttctgattctgccaatcttcccatcctcacatccagtgacatcatattggtagtttgaaattaattggccatggtgagaatatttacactacagatatttgcaaatactgtacaacaggggctagcttgccagcacaccgttggttagatgacatccgtaagttctgtataaatcttaacattattattactcagtaggtactcctgctcccttatggttttgagaagaccttcttctagttaaataaatcattttgaattaaaataacactgatgggactcttagcaatgttttacctcttgggaatcactgcctacatttgtggtctataaatctgaatccttaattcactcggattgatttttggctccgtgaaagcaggagcttttctcactgctgtagcccccacacatggcacaggcctgggacagagtaagcactcataagtatttgttaagtgaaaaaataaatgaatgaaagtatcccaaacacttgcattttcaaaaggttttgacatccacttccttttcttctcaaagctacgctttgagatggataggtcctattttacctctattgcatcgatgaagaaactgcaatgcaaagaagtgtctaattagtcatttgcttcctttcatcaaatatgtccattacaccagtgtttctcaaaatgtgttccatagatcataaatcctgaaggatgttaatagttattatgtgccaggggacccgtggatatataagtttggaaaatagtgaagtaaaaaaaaaaaaaaaaaa

SEQ ID NO: 207525 - DNA, 1000 bp, Homo Sapiens
tcttctcctcagccctgatatccgccaactgggtggctttgatgcctctgctgagggctctggtttcctgccagtctgggaggcgtgggatctcatgcgtgggaaaggtaatcaagcaataaaactaagcctgggtgtgagaggtggattaaagtgggcaaggaagaagcaggggagagggagggagccagctgtccagagtggccggaagaggcagaatgtgggctccatcctggctgggacctgtcagcccttgtgagaacttttagggcggtagtattatagtttggattttccccattcatcttctctccttcccctctcctaggttttagctgcccacagaatcctttgaggaggtgattcctggaaacctgtgttcactggatttagtagaaatccaccttgacttcctgttgaatatttgacatgtcctgacaagtgtttccctcccatccccgcaaccccgtcaccctgctttaacaaaaagcttcaaagttgagaccctttgctctgaggtagaagattttatatactcttatttttcagaaaagggcagaataatgcagtagttaggaacacagctctggggacagattgcctgggctcctattgcctctgctgctgattggctgtttgactctgatgagagatctctgtgtctcggtttcctcatctttaaaaagggctaatagctgagcatgctggctcatgcctataatcccagcactttgggaggctgaggtgggaggattgtttgagtccaggagtttgagaccagcctgggtaacatagtggaaccctgtctctacaaaagagtttttaaagattagctgggtggtgtggtatggcctgtggtcccagctactcagaagtctgaggtggaaggtttgcttgggcctagggggtcaaggctgcacaagccttggtgttgtgccactgtactccaatccgggcaacatagtgagaccttgtctaaaaaaaaaaaaaaaaaaaaaaa

SEQ ID NO: 207526 - DNA, 1000 bp, Homo Sapiens
cctccccgcctgtctgcctccccaagaagtctcttccagagctgatcgtgtcttggcttcggtttttggaagagccgagccaacacacatcgtatttgagatacagtgggtcggaagcggtacccagggattttctccagcttggacagcgagccctttgccctctctgggtggcagggtgcctccctctaaaatgagggggcgatgcttggcagtttctagaacctgttcagatcaaggcaacctgggagttagagttccgctagtcttgtctggcagtacagtcggtctctaaatatgcttttattgtaccttccccaccatctgggtgaagcatcagtaatgaaaatggagtggaggctgcattgaccttttccagtgtccacgcactatattttaactgggaagttgcatgtattttctatacttaatactttaaaagcttcttgggcctcttgagaggcttgtaagtgcagcccacgtgtgacttgagctgggaacgcaacttcagattgagaagtcccacttttataggacacagcatttaacagcagctgcgtccaagtcgtgtggcatttggcagcgtgtttccaagtggacctgtggtaatcactttgctcttggggaaccgtggccaagggctgccctgcctccaaagaggctcagcaagggaaggctagaagtcctgtgggctggccaggcatggtggctcacacctgtaatccctgcatttttgggtggcagaggtgcgtggatcacctgaggtcaggagttcgagaccagcctgaccaatatgatgaaaccccatctgtactaaaaatacaaaaattagctgggcatggtggtgtgcgtctgtaatcccagctacttgggagactgaggcaggagaatcacttgaacctgggaggcagaggttgcagtgagccgagatcatgctattacactccagcctgggcaacaagagtgaaactctgtctcaaaagaaaaaaaaaaaaaaaaa

SEQ ID NO: 207527 - DNA, 1000 bp, Homo Sapiens
gcctggcacagtggctcacacctgtaatcccaacattttggaaggctgaggcaggaggatcacttgagcccaggagtttgaggccagtctggaaaacatagtgagacctcatctctacaaaaaattttaaaaattggttgggcatcgtggcatgcacctttagttccagctactcaaaaggctgagacgggaggatcccttgagcccagaaattagagctatgatcgcgccactgcactccagcctgggccacagagcaagaccctgtctccaaacaatcacaaaacttccaatggatgccgaacgtataacttttttttttttttttctttcttggagtaaaataacttgatccttgatctttggctgtagctcctgagccatttgaggcactggggggtttgtgtgttgattacctatgaaggagcaagtgggctgtttccttctcccagcggcttcctttgaccccaaatccctgagagtctcgcccattttcttcttggcttcctccctttgatatgcccagccggctcctgccctacctggctgccaccaggacctgctggaggcggttgctgggaattatttggtgtcctgtttgaacctcgcttgccgtgctcccagatttcctgtttctcctgggcttgcctttcaggatttgcagaaccccttctcctttagaagtgtcaactggggctgggtgtggtggctcacgcctataatcccagcacttttgggaggccgaggcgggcggatcacctggggtcgggagttccaggccagcctgaccggcatggagaaaccccgtctctactaaaaatacaaagttagccaggtgtggtggtgcacgcttggaatcccagctactcgggaggctgaggcaggacagtcgcttgaacccgggaggcggaggttgcggtgagccgagattgcaccatggcactctagcctgggcaacaagaggaaaactctgtctcaaaaaaaaaaaaaaaaaaaaaaa

SEQ ID NO: 207528 - DNA, 1000 bp, Homo Sapiens
ctattgagtaagaaagactaatctcatttggttgtttttgtttttgtttttaactgtccctattttaaaatatttagatgctaattcttccttttggcagtttgcacctgagtttcaggtaggagatggaattggaatggatttaaaactatcaaaccatgttttcaatgctttaaaacaacatgcctactcagaagaacgtcgaagtgcccgcctacatgagaaaaaggagcattctacagcagtaaggatttatagatttttttttttcttttttactagaaagattcatattagaaaactttgggtaaagaaaaaaaaacttcatgtttgatattttttcatgagattggctttttaaatcaaagatgtaaataaatccagccactgtggtgcccgcctgtaatcccactactttgggatagcagatggagacaggaggattacttgagcctaggagtgcaagaacagcccaggcaacataatgatccccagctcacaaaaaaaattagctgggcatcatggcacacacctgtggtcccagctacccggggggctgaggtgggaggattggttgagcccaagaagttgaggctgcagtgaaccatgattgtgccactgtactgcagcctgggtgacagattgagaccctgccttaaaaaaaaaaaaaaaaaaaaaaatgtaaataagccaggtgaggtggctcccagcaccttgggaagccaaggtagaaggatcgcttgagcccaggagttcaagaccagcctgggcaacatagggagaccctgggagaccctgtctcagcaaaagttttaaaaaattagccgggcatgttggtgtgcacctttagtcccagctgctcaggaggctgaggtgggaggatcacttgaacccaggaatttgaagctgtagtgagccataatcatgtcactgcattccatcctggacaacagagtgagaccctgtctctctctctgtctctaaaaaaaaaaaaaaaaaa

SEQ ID NO: 207529 - DNA, 1000 bp, Homo Sapiens
acgaggcatataattttgtctttaaattcttatgagtgaattgtaagaacatgacttcataggaacctctgagacattacagtgttttaataacactttgctgctacatgcagtggttcatttttacttttattaattttttttttcagtgtgtggcagcaggtgccctgggcacctcagccctatctctagcttcatcctcctctgcctctgggaagccgcctggctccctccctccttagggcagaggctccagggggcatgtcttgtctgcgaagagtttacgaggtttcacccactccttcattcttgaacatgctttttctctgcttattaccctccctgtttcctcctgggctgccaacaacatattatattacctccatctgcaaccagagctgctaccaccactgtgcccgagcctgaattttcatagttatattaaaaaaaatcaagggtgcccacaagtgacagcagcttttatggaagccagtcttagcaagatggcagagcacccatttctccatgaggcccaggcttctcagagaagggcaagaactgtcttctgctttggccatcgtgatgacacattgaatgcctgaattcattcactcactcactcactcactcactcactcactcactcactcacctatgagttgttttcaatagatacttgtacgtgttaaaagacacacataggccgggcacggtggctcacacctgtaattcccagcactttgggaggccaaggtgggcggatcacctgacggcaggagtttgagaccagactggccaatatggtgaaaccccatctctactaaaaatacaaaattagctggggttgggtcacgtgcctgtaatccgcagctacttgggaggccgaggcaggagaatcacttgaacccaggaggcgggggttgcagtgagctgagattgcgccactgcactccagcctgggcaacaagagtgaaactccatctcaaaaaaaaaaaaaaaa

SEQ ID NO: 207530 - DNA, 1000 bp, Homo Sapiens
tggtagagttggcttcacaagcctagaaaccaggaagtgggggcagggcactcatgtttactgagcacctacccatgccaggcgctgtgctgggtaatttatgtgtcacttagtcctcaaaaactcactgagtcgttaattttttttaaccctcattttctgatgaggaaactgagtgtgtggtgaagtaacccaggattcagaccaggccccgctgatggcccagcctgtgctctcccctccctatgccacctgcgaccattcgcagtgatgaggaccttgtacaagggagccaggagttgtgggggcactctagggaaaccccaacttttcttgccttcaagcttcttgcagtttttagtctatttggaggcaaggataatgaccccagggaatgtttttctctcccctttctcccgcccccaggaacacaccacatttggtccacagaaggactgacttctgattttgtatattacgtggctgttatcaaggaaagtaaagatgataaatgatcttgagaatctattctggaatgtgtgataactttgacattgaatgaaaaaggcaaaaggaaatggaggcaattcatcagcaaatttgtacatgtcaggatggagtggtacatcaaaccgttgtccaaattgccaagaatattcaggcaaaagacttggagtgtttctttgattgatttaacaatgtattttttttggctgggcatggtggctcacgcctgtaatcccagcactttgggaggccgaggtgggcagatcacgaggtcaggagattgagaccatcctggctaacgtggtgaaaccccgtctctactaaaattacaaaaaattagccaggcttggtggtgggcacctatagtcccaggctgaggcaggagaatggtgtgaacccgggaggtggagcttgcggtgaaccgagatcgcgccactgcactccagcctgggcaacagagcgagactccgtctcaaaaaaaaaaaaaaaaaaa

SEQ ID NO: 207531 - DNA, 1000 bp, Homo Sapiens
gctgccctctggatgcaagtctgcttgtgctgtgctgtggctcagagttaaatttagataaaaatcagttaggagctaagaatattcccagctttcctgacaggttgtatccatcattatgggaggaaaaacaaggaactggctgcctggcgacagggagcgggccaggctgagtgtgaggtcaggcctcggctggaatctcacggacttgaaaggacagagacgtttcctgagatgtctgcggcagaatgtgggaggcttcagcctgaggaaagttcaagttggagagaaaggttgccagacctttgagtgacccacactgcttataacttctagaaggttcttttagggaaacctgcttagaatgaaaccctgaaacgtcctttgctgcctccttaacaacttgcattagagagtttcttcagccaaaaggcgaatgtctgttgagtggaaaggagaggacggagtcgatgttgtcccctgtgagatgtcatgtctcaggcagtatgctggacattcccgagacgccagctctgctcaggtgacttgtgtgccctgcccttgtaagcctcgaattactcatcgtgaaattgaggtcaagccactcattcacagacagggctgtggtaacaataaaatgaagggtgcttagcacattgaaaataactcaggcagtgttccattattgctatgggctgggcgtggtggctcacgcctataatcccagcactttaggaggccaaggtgggtgaatctcttgagcccatgagtttgagaccagcctgggcaacatggtgaaacttcatctgtacaaaaaataaaaaaattaggcaggcatagtggcacgtgcctgtggtcccagcaactagggaggatgaagtgggaggattgcttgagcctgggaggtcgaggctgcggtgagctgtgatagcaccattgcacaatctaaactgggccacagagcaagacctcgtctccaaaggaaaaaaaaaaaaaaaaa

SEQ ID NO: 207532 - DNA, 1000 bp, Homo Sapiens
gcgtggacacctgacccaggctgggccaatcacatcctctctcctgcaaacgtggaaatggcgcctccaagaccctgagccgtgccaaactggagattcttcaccttcgctctatgttgaaattgcccaggaattctgaaaacactgtctatgaaaagggtcaaactctaaaatatttagagatttattatgagccaaatatgagtgaccatggcccgtgacacagccctcaggaggtcctgagaacctgtgcccaaggtggtcctggcacagcttggttttatacattttagagaaccatgagacatcaatcaaatacatttaaatacattgggtcggtccagaaaggcgggacaactcaaaggtggggagagggatggaggggaaggggggacttccaggctacaggtgaatttaaacattttccggttgacaattggttgagtttgtctaaagaaagccctgggattcatagaaagggaatgttcaagttaagatacagattgtggagaccaaaattctttcaaagtcttatagtggctgcccttagagacgatagatgacaaacgtttcctattcagatcttagttaatctctttaggtcaggaagaaaaagacctagctatgttaataaagtttctttacagatgcaaattttcccccacaaagaacagctttgcagggccatttcaaaatatggcaaagaaacacgttttggggtaaaatattttgattttctactttgtctcttaatgttatgccagaatcaggttggaaagtaagccagagtcaggttggaaagtaagtcaccatatatagggttaaataaaactcatcgatgagaatttataatttgtagggcatgactccccagactccttagataggaatttgggcaagataaaaaaaaaaaattagaatttagtcctcaacacaccacacacacacacacacgtgcgcacgtgcagtggccaggcatggtaaaaaaaaaaaaaaaaaa

SEQ ID NO: 207533 - DNA, 1000 bp, Homo Sapiens
cccaagtgattaataaagcctgaacccaggggcatgtcagaacgcaccactggtttaaaggatgactgacatggtaaagtgtccaacgtcaacctgccctcggaattctttcactttcagtatcagtaggagaaatatacaattgtacatttcatagaaaagtaaacccagccccacacagttaacaaccaggtgaagcgggaacacaggacaattcaaagttttcggatcacaccatttcttggtcaaatattagtaccttcagcaaaagacctctaattaccacacacttttggttatggcaacagcctgctccttacttttgggagagaggagtactccacacccatggcctgaaaccaggatctccaaacccatcaaagagaaacatggatgggaaaccaaaccccccaagcttggaaagcatccagcaagctttaattcagggagagttcaatcgagatataattgcctctaattggccctcccacacgatctcacaacatacagctataatcagttccacaaagaatatgttatatttcttttctcccttgaaaagccagaatcctctcttgttaggtacttaccatcactgttttgatttttgtaaatataccgagacattaaaaaaggaagaatgaatgggtaaaagcaaagaagtagatggatttctttttttaaaataagcactgatccctatgaccttaatgataacccagtgcgattcaaatctgtaatggagactgatgtcgactcaggaaacctttctagtccagggcacatgtgatccaaaaaacacattcatctggtcggacattttccatactctgatttttatctttcttggcatgctcaactctcctttaataaagtcacaaccctttgtagccatggaacccaatcagacacggagcctgttactatgacttccctgcagatataaaaaaagacccagtgaccaaaagaccagctctttcttaaaaaaaaaaaaaaaaaa

SEQ ID NO: 207534 - DNA, 1000 bp, Homo Sapiens
aaacagtctgctcaaatgattttactatacttagactagaaaatggctcctcttctctctccctctggtccctatgtcccagtgctgtccctcatatgttacaattgttcgtgtatgtattttagaatattcacaggtaaatgatgcaaataatatatatataatgttaaatcatcctcaaactgggtgtatatgactttaggtaaaacagttccttactttaattgtctgttgaaagctttctgatctttctgataatactatacattttagtatatgtggcattgcttttgagggggggaatagccattttaacaaaaaaacttgtcacctatacctactatatagggcattttgctatgctgtatattgaaggctatattgtaatgatagaaactttcttaagtttgtatgacttctagaaagctgctttcagagtgaaaatctcctaggtcatttgttgaaaggttacttagactggatgtgtaatgttttttcttacatctcatgattgaaaccatgggaattgtgattcagagagaagtactgaaagtgaatgtctataaggtatcatctgagaagggttctggaatttagggttttgttgttgttacagagatgggatcttgatacgttgttcaggctggtctccaactcctggtctcaagtgagcctcgcatagctaaaagtggtgaagcttggacatgaatactggcccttcacttctctgctatcctgcctctcatagtctgcctctctcatagtaaataaatacagattatacttattatcaggccaaaattgtgaccacagtgtgggacattgggacttggttgcattgctctaaccagcaagaagcttgggtatcagctttgagaattattcccttctgtgtcacctcttgaatcaaatgtgtaccagtggtgcagcctccctaaacggatacagtatttcttcattctgcttacatatgactctttaaaaaaaaaaaaaaaaaaaa

SEQ ID NO: 207535 - DNA, 1000 bp, Homo Sapiens
ttgaattgttttccttgtttttcttgtagatgaatgttataattaaaatggaatgtgttgtgcataatattagaaaccagatggctttatataggatatgtgtgatccaaaaaattcaagtgaagttgttacatttgaataaattcactttattgaccagtattaaattgaacattgactgtcatagcctgtatatatatttgcatctagtgtggtatcatatgtgtacttaataaactgagtaaaattttaatatgtaaataaaccatagatagaaaaagagaattctttccatatcatccttactgatgagcagatttcacaacgttatctgaggataaataagaaaaaggtaaagcttttctataaacaacagatttcccccccaaacattgtacagtgtgtttttctttataactataagcttgctggtcttatctcagacatttaactcttcattgtatttttctgtgatagtctaagtgcttctgtagtagatacttttcaagtttgtttttaatattgtttgtaagaatctctgacaaaaatcaggcacttctaatatatattttaactagtaatagtaactttgtgaagttttcttttgaataaacaaaaacatttaaaagaggaaatttatcctaaataaaagatcataacatttgtgtttatattctaatgagattaagaaaagggtgtgcttgctgggcacggtggcttgtgcctgtactcccagcactttgggaggcccaggcgggtggatcacgaggtcacgagttcaagaccagcctgacgaacatggtgaagccccatctctactaaaaatggaaaaatcagccaggtgtggtggtgtgtgcctgtaattccagctactcaggaagctgaggcaggagaatcgcttgaacccgggaggcagaggttgcagtgagccgagatcacgccactgcattccagcctgggcaagagtgagactccatctcaaaaaaaaaaaaaaaaaaaa

SEQ ID NO: 207536 - DNA, 1000 bp, Homo Sapiens
tctgagtctccagtgtctattattccacactctgtatccacgtgtacacattacttagctcccacttataagtgagaacatgtggtattttaactttctttttctgagttatttcacttaagataatggcctccagttccatccatgttgctgcaaaagatattgtcagttctaagtgtgagttgtactgaggataccatcctaaagtggagataggaagttacttgcctcttggcaatgtattaccctttgtagcgtactccagctcaggaatttctaccctaaaccgttaaatgacattcactgttgtctgttgttttgtgtcatagcgtagctatttcatagtaaaactgtggctaagagagattgtttgcaatagtgcttcagtaagataaaggattgagtcagggaaaaaatgaatactgtttaattcatggaagatagggaaacgtagaagactcatgaaaaataatagacaagacagattttaagaaggtagaagagaaggatgacatcaaacaaataaaatatgtagaataagacagaagtaataggcaagtttatgttgttttacttgaatacatttagtgccaacataaacagattgctttttttttaatgctgtgctgcaatggaggatgatcactttgcatccagcctatagttttgtggttgatccgctaagttccctgatcgatgtacttaagcttaatagaaatgccctgtaatccaagcactttgggaagctgaggtgggtggatcacctgaagtcaggagtttgagaccagcctggccaacatggtgaaaccccgtctctactaaaaatacaaaaaatcagccgggcgtggtggcaggcacctgtaatcccagctacttgggaggctgaggcagtagactctcgtgaacccaggaagtggaggttgcagtcagccaaaatcacgccattgcactccagtctgggtgacaagagcaagactctgtctaaaaaaaaaaaaaaaaa

SEQ ID NO: 207537 - DNA, 1000 bp, Homo Sapiens
gatccaaatgtctccttgatggttcatgttggaagacttcaaggtcaaacacatgtacagggttaacatgactttatttttttcaccaagcctgcctcttatgtttgcctgtttgttccatctaaaactctacttttcctggattctttactttccagttgtcttgcatatgatcatccaaatgtcccaaaagtgcccatttctcttcttcaccactaccttggggtccatgccactagtgttttcttgcttgatctgttacagtgacctgactggtctttctgctttcactcctacacactcccccaaccctctgtgtgcaagagcagagcgagctttttaaaataaaagtcacatgccttaggtaatcctcccatgttccactatcttggctcattgaattcctgtcttcaggaatcttgtcctctgccttacctcaacctctcactctggtcttattcatttccagtaatcgaaccccctccctaattgtgtgtatccttctctctgaccatagctcctgtctttccagctcactttctgtagtatcccagatccagtaatccttggatcctactaggaccttcaagccactacagacaggctattacctccatgaccccaccaaagtatgccatgccctcctagtttacggtgtacctgacttagcagccacacctcaacctgggcccctggctgctccccatgtccctgacccactgagattagcaggtcacctaatccatcttccctgtctgctgggccagccaggacctccccttgaactccactgggcccttactggcctgcttgacagctccacttggatttctggtattcttctggcattctttctgacctttacccaccaaactgctcctctcacaatttctgccatttcagtttaatggcaactcttaattattagcatatcctgttggttctatgtttaaagtaaatccattggagtccagttactctggaaaaaaaaaaaaaaaaa

SEQ ID NO: 207538 - DNA, 1000 bp, Homo Sapiens
attatatttttacttttgggaaataattacactttgaatcgtttcatgattatttggctaacaaaacaggtgatttctgtgagtatatatatgtatatgtgcgtgtgtatatatgtgtgtgtgtgtgtgtgtatatgcatgtatgtgtttatttatttattttaccatggacatgcccttgatgaaaaagaaatactttgcttggttattcctccaagtggaaatttggacattaccctttgttcatggtggggaagatttttagttattccacatatcagaattatctacgtgaatagttagcacataattaggattaaaaagtaactagttgcagaaaactcattattttttctaattctaagaaagtagcttcattttgggtattagagaaaagctcaagagattcactgattaatatgtattgagcctgttacatagctgacaatgtgctagtgttttcacagtttctatctaacttacaaaataactgaaagaggaagaaaaatattctattccatatgtattagaaaactatcctttaagttctaaagttggcttatgatctcctgaattgcacaatatttatctgcaaaccttgaaactatttaatcagagacttctgaccccaaaatgccaacattactcttggtggtctttcaaggtaattcccccttgtttttagtgtatccattgaaacactaaatggaaatatttagtgccctgatgctaagggaatattccaactagcggcactgattccactccaggttattaattaaacagtagcaatcagcccatctgatctttaatattctattgctgctgactgatgcccagacatcagacattttgtaatctaatacaaaattgctctgtgcttaggactaaagaaaaacaacacataatttatactatgttttatctttattttcaagttccagaggatacgctggttgtgtctttcaatgattaacttaaaaaaaaaaaaaaaaaaaaa

SEQ ID NO: 207539 - DNA, 1000 bp, Homo Sapiens
tcctggcctcaagcaaccttccttccttggcctcccaaagtgctgggattacaggtatgagccaccatgcccagctggctttacttttttagtactcttatgagttgagttaagctgttatcatagttttagttcctaaattcttcaaatttaacttaatataaccacactgaaaagatatacctattcatttagtaaggtatctgttaaaatacatactttattttccagtacatgttaattttcagttacagagttgaagagttttataatttgaccgcagctttcttattggtgaataacaagtatgattttttttttcactttttaagggtatgtttttatatttgttttcttagaaatacgtgaactgttttcatctgtgttatactttacctgctgtttcaattaggagtacattgattgaaagtaacagaaacttatttggctaacttaagcacaaatggagttttttggttcacctagctgtaggggtagatcaagcactagttgcatcgggtccctgttctcaccatctcttgggtagactctctgcacatggtgaacatgatggtgagtatgacggtggccagtagcccaaggctcatcatactttgtaagactgcttcttcctcagtatctcgtgcaggcagcttgcagagggacccttaatgagcttgggtcatatgcccatcactgagtcaatcagtttagtcaagagaaatggactttgggaggctgaggtgggcgcatcatttgaggtcaggagttcgagaccagcctgagcaacatgatgaaacccccgtctgtactgaaatacaaaaaaattttagctaggcatggtggcacatgcctatagtcccagctacttgggaggctgagataggagaattgcttgaacctggaatgcagaggtttcagtgagctgagattgcgccattgcactctatcctgggcacagagcaagactccgtctcaaaaaaaaaaaaaaaaaaaaaaa

SEQ ID NO: 207540 - DNA, 1000 bp, Homo Sapiens
cctctaactcggtgcatttcctcaagccaacgtctattccactatcatggggaaattaatatagaaatttcctcctttgtatcatcaatttcagaggatgtatgttcccggctgatggccctcccctctatttgcataacagcaggtaaacaatactgccacctagtgggagctcaaggtgtgaccttcggagctcctcctcctgaccccgggacattatttctattactgttaatatttaaactaatgggcagttctgagctcagtgctcttcccagtgagtggatccacgtggattttcacgtctccttctcattctcttaaaacttggagttacaagtgtcagagaagctgttttgtgtacgcagaacgattggaacaggtgcagggagttttacctactttactttgacttttgctcacagcagtccaggtaggtaactggattcccgttttatacgtgaggaaacccaggctcagtaagattaagtaacttggaactttactgagcacctaacgtgcccaactacgtcctggactacctaggtagtatggggattgtggcctgttttcctctaagaatgcgctgtccagacacagtggcaaggcgtagttagctcctggccaacttgtagaggagaggagagacccttgcacactgcagtagtgcagcaagactgcttggatggaagaagtgggtctggagctaggattcgaaaggtggcatgggaagagaatgtttggcggatgaaggcacagaggcggcgctagtgctagggatgtccgggggcgaggaaagacttgctgatcttgggctgtgccaggtgttgtgggttgaggggtctgggatacagagcctgcgagagctaggttgagagctccagggagtcactgcgactacttccttgctccatttgtgaactgagaagtaagactcgtttgatggacgaaatttaaataatgcagaaatatattaaagtaaaaaaaaaaaaaaaaaaaa

SEQ ID NO: 207541 - DNA, 1000 bp, Homo Sapiens
tcactttccgcaggagaaacacacctcttgaggtcctctgtcacaaataggcagtgtttctggagaaagccaggaggcagattttagtgctgttcagcatctgtggtctctactttctggatctggtgcattatggagaccatgaaatgacatgaaatagctcagtgctgccagtggcggtgacagggacactagaggtgaaggagggcccttggggcaattccagcaggtgggtggtggctgaaggtccttgtcttctttctgcagagactggccacctgcttcattctttcaagaagcaccaaatccctacttcagtactttgcccactcgtcatgtcaggagcatgaaactcacgaggccttcatttacttttatcctgtaacaccttcaatttttcccacatcctcccttgattcgtggatggacaactatggaggccaatctggctgaggtgaagactgcttgagtctaaattcctctctcctcaaacccaattcaaactggcctgagcaaaatgaatgtattgatccataactgaaaagtccagaatgatcaggcatcaggcatggttgcatccaggggcccatgtattagaaccatctccttccagttctgggctctgcttgcctcccagttggttttactgcacagaggcttattcaagtccagagagatcttatctttccctacaagtctgtgaccttgattctgaacctgcatctatgggaagggcttgcagtgtctgagtgagcttggactgtgtaaactttcccacttctgaagctgggggtggggttcactccactaagctacatggctctagagtcagggggttgccccctaagtaactggcagtattgttaccagaaaaatcatgaatggacactgagcagaaaactcagcagatgtttatttcctggtctttaggatttgttgaagagttttttatttgtttgttttttaagaaagactcaaaaggaaaaaaaaaaaaaaaaaa

SEQ ID NO: 207542 - DNA, 1000 bp, Homo Sapiens
tggatggaataagcatacaaccgctctgtgtgcccccttctttcccctctgcagggtgtgagaatggaaaaagagaattacacttctgataacctaaatattcgctaacctgtggtggggatgcttattttggccttttaggcgcaaacttgtttctttaactgttagttttatggtgcccagggttaaactttaaagttggactgtttacatgcttgcgacatggtgaaccaaacggggaaagtaagataaaaacaggcttgataaaggccagccgacttctgccagtaggctaaaactcacagactctcagatatatacatacatatatggccaagatgtcttgctgttaaatggtctttaagagagcagaaaagcctttttaacaaatgcacctattgtagagtctttccaatagcctatacctttcaacttgtgaagataaataagaacatatggtttgtctcaacatgcttttaacaaaaaccagatgaacacatgtaaaacaattagagagttgtcttaggtaccctgaagttcttatacaggatatttgctcttcattcaacgtttattgactacctactgtgttccaggccaccagaccctgtgttagaggttagagatttaaaactctagtaacttatgtattataatctatacatgtcatttaaagacatagcatttttgggctgagtgcggtggcgcacgcctgtaatcccagcactttgggaggccgaggtgggtggatcatgagataaggagttcaagaccagcctggccaagatgctaaaaccccgtctctactgaaaatacaaaaattagctgggtgtggtggcatgcgcctgtggtcccagtcactcgggaggctgaggcgggagaagcgcttgaacccaggaggcggaggttgcagtgagccgagatcgccccactgcactccagcctgggagacagagcaagactctgtctcaaaaaaaaaaaaaaaaaaaaaaaaaaaaaa

SEQ ID NO: 207543 - DNA, 1000 bp, Homo Sapiens
actgtcagctttgtgtaccacaggctgggctgttaataactagtggtcgcagtacggtgttctttttctttccctttctttttttttttttcctatccttccttccctctttcctgccttcttttcattgttgttgcacaaatcatatagccttattccaatagttgctggaagaccaaatcagagatgtgggggattcagggactcgcgacatcttggagtatactagtggataaatgccacttcacccctgatgtggccgtttccctccaacacttgtctaaggagtgcagggactttggggtccaagcaatgtatcagtaaacttcagaatttttttcctaacatttaactctattctcagtctcaacacccgccacaaaaataatgtcactccaggcaaatttagtcgcttacggattctgagtcttattgtgattttgcctgagtggcaagcttttcaggcacgtgtacttaaaaatgtgatgtggtagaatttgcctccagctaggaatccacagacttgggtttgagctccacgtcccacagtcaccacgtgatcttcagaaaagaatcactgaactgcctgtgcctccatgcccccgtttgtcaagagggaggtggtaatacctgctgcggtttttatgtggatcgaatgggcctaaaactcatagaaacacagaatgcttctatgataagagaaaactccagccaggctcagtggctcacacctgtaatctcagcattttgggaggccgagatgggtggatcacctgaggccaggagtttgagaccagcctggccaacatggcaaaaccctatctctactaaaaatacaaaaattagccaggcgtggtggtgggcacctgtaatcccagctacttgggaggctaaggcatgagaatcacttgaacctgggaggcggaggttgcagtcagctgagatcgtaccactgcactccagcctggaggagactctttctcaaaaaaaaaaaaaaaaa

SEQ ID NO: 207544 - DNA, 1000 bp, Homo Sapiens
taatatacttcataaatttatagatagtgttaatgagtgattattaagtttgggattgctgtatataataaaacacctagacaatttaaagcgtgttaaatgttgactttttaaataaggaattttatagagagtaatttttttctggtactctactgtaatttgagatcgcaaagccagtcatccatagactgctagtataaatgaaacacctggatttgagccgtggttggtgaccgagatactgtagtacatcctttctatgtggaaggaagtgaaacctgttagagagtgggttgagtcgtagtgtctgtaaatgactgctcattggcatcattttcacaaataaggaaatgaagaagtagaagatagagcagtctgtcacctgtactgtgcaaagaatgccacttttgttgtacaaactccctcctggttctattcctgtcaacataaagcatcaggtttccaccactagatgaaaaggggaaggttctgttatctttctcctacatttaggaatttctcctttcttacatgtgaaagtgctgtactgtttcccagctcagttaaatgctgtttcccagctcagataaacctgttcttgacccatgttctctaccaccctgttcctctgccccttttcacagtcacgttcctgaaaagaattggcagccctggctgggtgctgggattacaggcgtgggccaccgcgcccggctgtgcgtctgcacattgcaaattcacttatttgttcttgattttcccagaattgttttattctgtaagggacagggtctcactctgtcacctaggctgaagtgcagtggcatgatcatagcctgctgtaatctctaactcctgggctcaagcaatccttctgccccagccactcaggaggctgaagcaaaagaatcgcttcaacccaggaggcagaggttgtttgcagtccagcctgggtgacagagcaagactccgtctcaagaaaaaaaaaaaaaaaaaa

SEQ ID NO: 207545 - DNA, 1000 bp, Homo Sapiens
aatttttttaaaagtagctgcgtgtagtggtctcaactactcaagaggctgaggtgggaggacggcttgagcctgggaggttgaggctgcagtgagccatgattgtgccacggcactccagcctgggtgacagatcgagattgtctcaaaaaaaaaaaaaaagttcttattttggttatgggcttatttgagaatcttaaaaaactgaattcctgctagataggaaaaggatatagtacattattttaaaaagagtactagaattggaatgaacctcaagagattaccttatgtaactccacatatacaaatgaggaattttatttttttattttttaaaattttatttatttattcatttattttttgagatggtgtgttaccctgtcatccaggctggagtgcagcggcaccatctcagctcactgcaacctccgctttctgggttcaagtgattttcctgcctctgcctcccgagtaactgggataacaggcatgcgccaccacacccgactaattttgtacttttagtagagatggggtttcaccatgttaatcaggctggtctcgaactcatgagctcaggtgatccatccgccttgacctcccaaagtgctgagattacaggcatgagccaccatgcccaaccattttttttttgtatttttagtagagatggggttttgccatgttggccaggctggtcctgacctcaagtgatcctcccacctcatgcctgtaatcccaacactttgggagactgagttgggaggatcgtttgagcccaggagctcaagatcagcttgggcaacaaagtgagaccctgtctctacaaaaatttttttaaaagtagctgcgtgtagtggtctcaactactcaagaggctgaggtgggaggacggcttgagcctgggaggttgaggctgcagtgagccatgattgtgccacggcactccagcctgggtgacagatcgagattgtctcaaaaaaaaaaaaaaaaa

SEQ ID NO: 207546 - DNA, 1000 bp, Homo Sapiens
gatggatgctggaggggatatgattgccgttagaagccttgttgatgctgatagattccgctgcttccatctggtgggggagaagagaactttctttggatgccggcactacacaacaggcctcaccctgatggacattctggacacagatggggacaagtggttagatgaactggattctgggctccaaggtcagtataaggtagatgacaggtggccagccaggaggccttgaccgtttgtactccatctccttctcaattccccattgttatcaaccaatcaacaacgaaactgtgggatttgtacacatccacacaccttaatttaagaaatgcacggaagagctgcatggtgggaggagagtgggagaagtggagatttatttccactggaaaccgttcctaaatggtcttccttttccattttttcccttgtaaaataatctgcttttaatttagcgagctcttctcatgtgtttatcatttaaatgaataagtaaatgagggcagtttgcttactggttaagaaaggatgcaggctttagggctggaagcacctggtttcaaagcctggctctgcctcttatcagctgcgtaacctttggacaagttgctttattgctctaagtttcagtttcctcctgtgtcaactctagaggactgttgtaagaatcaagtgagggatgggtgcggtggctcactcctgtaatcccagcactttgggaggccgaggtgggcggatcacgaggtcaggagatcgagaccatcctggctaacacagtgaaaccccgtctctacttaaaaaaaaaaaatacaaaaaattagccaggcgtggtggcatgcgcctgtagtcctggctactcaggaggctgaggcaagagaattgcttgaacccgggaggtgcaggttgccgtgagctgagatcacgccactgcactccagcctgggagacaaagcaagcctctgtctcaaaaaaaaaaaaaaaaaaaaaaaaaaaa

SEQ ID NO: 207547 - DNA, 1000 bp, Homo Sapiens
ttttcctctggttgatgttcactgtttttctggcatcttggtctgtacaggccaaagtgcctagaggcatgtctgatttaaaggtggtgttggtctctgctctttaagcatctattaacttgctattattatgcaaataagtgttgtattacacatactaatttatgcatggttagattatgcagatgcatcacaaacatggttattgaataataggatggggctcattctctctaccatctttataagcagttttaagcaaattctcctggtaccaatgtggacatttaaagaccctttactcaatgaaatgtctctttcgtattcttttgctttcatagttaaagccatcagataagtggaagagaaatcgtccaagttgttaggttcaagagtgttagtctcacttttcaaattcgtagacttttttgtttaaatgtaatcttttccttatagagaaaatctaaaatgcagttgcttggcatgaatgctggcatttagtgagattttagtgtatatagccttgctgcttagctctaggtaacccatcaaattaaaattacattttcaggatttatagctcattagaatatttatcttggtaagcttcttattctgtcagtaatttctaaacaattcagcttggccaatttgtgaaatcccctaaaattttgaaagtgaactcacaagccctatgcagtatatttctcaaacaaatcttagtagaaaacttataagccatccagtaaaaattccaaaggttgagaatgtagcaatattcttgagattcctaatgtctagagtagttaatcagtgagatttgatgggtgatgagtctaagaaatggattttgccatggccaggtgcagtggcttacgcctgtaatcccagcactttgggaggccgaggtgggcggatcacgaggtcaggagattgagaccatcctggctaacatggtgaaaccccgtctctactaaaaatacaaaaaaaaaaaaaaaaa

SEQ ID NO: 207548 - DNA, 1000 bp, Homo Sapiens
ccaatataatagggtagaatcattcatgaatgctcatgcaggtcagtctctgtttaacttcagttgtagaattgcttctttcttgaaagattattctttttttaatccagtcctaaactgtcatcagaaaatgttcatagaatatgaaaggccaattctacactgaccagaccataataaaaatattttcctattatttagtattgcggaaaaaagggaattagaatcagaacatcaagatatttgtcccatttctagcactaagtggtgatacaattttggccaagtcatcaagcttgtgtccacatatgtatcatagaacgcagtactctgactccaaaattaactatggtttcttttagcactagaaatctctgattcctctgtctgtctttagggtatattttcactgtggcttggaaatcataacttatgcatttatcgacacagttttcaatgcacatatgtaatttttcagagtaatacatataatatcagtgatatttacattgaaataacttttttaaagtaaaaattagataatgtgtattgggcaggttttgtatgctaaaaccatatataaataatcattttgaacaagagaacaaccagatcattactgaaaacaaattgtcagtttaattaacctacttaattacattatatttcaacatccttgaatgtggaagacattttaaaaaattaggccgggtgtggtggctcacgcctgtaatcccagcactttgggaggccgaggtggatggatcacgaggtcaggagatcgagaccactgtggctaacatggtgaaacctcatctctactaaaaatacaaaaattagccaggtggcaggcgtctgtagccccagctacttgggaggctgaggcaggagaatggcgtgaacctgggaggcggagcttgcagtgagctgagatcgtgccactgcactccagcctgggcgacagagcgagactctgtctcaaaaaaaaaaaaaaaaaaaa

SEQ ID NO: 207549 - DNA, 1000 bp, Homo Sapiens
caagcaattctctccctgcctcagcctcagcctcccaagtagctggtattacaggtgcctgccaccacacccagcttatttttatattatttagtagggatagggttttaccatattggccagccttgaactcctgacctcaggtgatttgcccgccttggcctcccaaactgctgggattacaggcgtgagccaccgcacccagcccacacccagctaattttttgtattttactaaaacagggtttcaccatgttgtccaggatggtcttaatctcctcaccttgtgatccacctacctcggcctcccaaagtgctgggattacaggcgtgagccactgcgcctggccagatatgttaacatagctccacacctacaggtcctcccctctgggccaagtttgaagaaacagattctcaccttggcttaaaggaccctagtggtttctacaaagatagtatttctgggtggacttggctcattttctgttcaaaagacccaagtctccccaagggcagacatgaaacagctaagcaaccaaacatctgggggctggttttctggattttggttgatctttttggacagaaaagcaccaacagcaaaagaaaaggcaagggggaataggtgaaggtgagccactgtcactacaacaactgagttcatccatgatgactaaggaatatcaggacattctagtttttgagaattcttcctttcagagtaaatgcttcttatatccttctggagaacagaactaaatccagaagctgtagtatcattaactttgcctagaaatctagaaatctcaacctcatatctgttcataactccttccctttctccaaagagaatacggaaggcaaagtccattttctgaatatggcatttttccttttctatttttttgagacagagttttgctcttgttgcccagactggagtgcagtggcacaatcttgactcaccgcaacctccgcctaaaaaaaaaaaaaaaaa

SEQ ID NO: 207550 - DNA, 1000 bp, Homo Sapiens
gcaccatcttgttttgtgctttagttatctaattgcttcgtgtgttggatttggcttcttaatcagattatgaaattctcggaaagagagagttatatactgtttattcttctacaatagctagcacagtgctagatacatataggtctagaatcaatcatttttaattattaaaattcatagtaataccttacaaacacttggcccgtaggattctatagttgctttgagattctaaagtacctcagtggactacaaaccttaagaaattgcctgactgacttgagtgatggaaatggtatattttgtgtagattttctcatatcaattcacagctttgttctaacaattattaaacttcattgggatatgcataaagtatgaaccataataaacaatcatgcacctcataacgatgttttggtcagctatggactgtatatgtgacagggatctcataaaattatactggagctgagaaattactactgcctagtgacatcatagcacaccaccttactcacgtgtttgtgatgatgctgttgtaaacatacctgccgcacttctggtcttataagagtatagcacatacaatcatgtatagtacatacttgacaatgatcataaatgtctgtgttacaagtttatgtatttactatgctatactttttattatttgagagagtacatcttccacttatttaaaaaaaaagttgattgtaaaacagcctcaggcaggtccttcaggaggtattccagaagaagacattgttatcatacaagatgatagctccatgcatgttattgaacctgaaaaccttccaataggacaagatgtggaggtgggacagtgatactgacaatcctggccgtgcgtaggcctaagctaatgtgtgagtttatgtcttaccttttaacaaaaaggtttttttaattaaaaaaaattaattaaaaaaggaaaaagtatatataataagactataaaaaaaaaaaaaaaaaa

SEQ ID NO: 207551 - DNA, 1000 bp, Homo Sapiens
cctggtctttgggaatataaaaaaaggggaactgtgtaaactgagaaaaggtgcagtaaacaccctgcaaataattctgcattcagcatatatattcttaacagagttgatagctataatgaattataaattttgagaattatagtagaggtatatactgacctagaaatgcctctgttcagggtgataaatatcttaaacatgagagatttgctggtcctcaggaagtaaatgttctctgtagcataggactctagttaagatgagtaaaaaagctgattgtagagctgtgatttcatttaggaaccccttttcttttttatttttttgagtaggttaattgcagcagtttcctcattttatttcttggtactttatcacccatcaaaattttaaaaaacttttccctaattggccaatgttcttatttttttctttcttttttcttaaccttgaaagcatcttgttttttttctgaccgaaaggtatctgccgctgattatttcagtcgctccaatcgtaggggaagtgttgtctctgaggtggatgatatcagtatcccagatttgtccagcgtgagtgtattgcatggggtggttggttatgttgtcccaggcttgtgactaacagctaatatgttagctattttataataaaagtgggaacttgatttattgtcttaagaaatatttgtttgggccgggcatggtggctcacacttgtaatcccagcactttgagagaccagaacaggcagatcacctgaggtcaggagttcgagaccagcctggccaacgtggtgaaactctgtctctattaaaaatacaaaaaaaattagctgggtgtgggggcgcacacctgtaatcccagctactctggaggctgaggcaggaatatcgcttgaacctaggaggtggaggttgcagtgagccgagaccacaccactgcactgtatcctgggcaacagagtgagactccatctcaaaaaaaaaaaaaaaaaa

SEQ ID NO: 207552 - DNA, 1000 bp, Homo Sapiens
aactaccttcaaaaatacaataaatataattattctagacttctttatgtatgtgtgtgttcctaatttaactgttgtgtaatcacttgatagtataaactgtatttttttagaataaactatttttaaacagctttattgaggaatagtttatgtacattaaactgtaggtatttgaagtgtatgaattgatatgttttgatgttatgtatatactcatgaaatcattaccacaatcaaataatagacgtataaattaccccctaaagcttctttttgtccatttgtaatccatcccctatcctgtccccaggaaaccactgatctgctttctgtcactacagtttgtattttctagaaattggtataagaggaatcgcacagtctgtactgtttggcttcatttacttagcttactgttttgaggttcattcacgttgttacatggcttagtagtatttttttctttttattactgagtggtatttcattctataatttgcttattcattgatttgttgatgggcatctggattatttccagttcgaggtcattacaaataaaatctctatggacatttgtgtactagtctttatgcttttatttcttatgcttttattctctttgataattaactatctgtggaatggctgagtcatatggtagatatatgtttaagtggtaagaaactgcccagctgggccaggcgcagtggctcatgcctgtaatcccagcactttgggaggtcgaggcgagcggatcacgaggtcaagagattgagaccacggtgaaaccccgtttctactaaaaatacaaaaaattagccgggcgtggtggtgggtgcctgtagtcccagctactcgggaggctgaggcaggagaatggcgtgaacctgggaggcggagcttgcagtgagccgagatcgtgccactgcactccagcctgggtgacaaatggggactccgtctcaaaaaaaaaaaaaaaaaaaaaaaaaaaaaa

SEQ ID NO: 207553 - DNA, 1000 bp, Homo Sapiens
gcacggaagccagtacacaatctaggtattagagcagtgcattgacagagaggctaccttccattttgtgcttccaagaggtggttgtaaataggaaagtgaaaattgttaaatgacaaaaattactttgaagtaaatttctctgcctgttttagaacttaactctagatgaagaatcagtatattttggggagcagtaatagtaagaccaaaaagcaacgtttttacagcagtgtcagaatatctatttgccaagtattatttccactttatggatggggcctaaaagccagatagtttgtttgacttgaaggtcactggttaatgagccttttattactacgtaggttttcaccggtgctgagcaagaaagcttacaaatctcctacctaaggcatgcttatatccgaaccattccaagatgaagaaaatgtacaatttaagcttttctggaagaaaggaaaacctcaacactttctgatctctctcagatcaatagcattttaaactaaatcttttatgcgaaaagttaattaaggcaactccaattcctttcttaacagaaatggttttacatcatcctccatgaagtaactaaccaaagacaggcccaccttcatctttctccttagtaagtttattgatcccagggctctttactcttacacgtccaattttaaaatgtacacgtggccgggcacagtggctcacgcctgtaatcctagcactttgtgaggccagggcgggcagatcatgaggtcaagagatcgagaccatcctggccaacatggtgaaaccctgtctctactaaaaataaaaaaattagctgagcgtggtggtgcgcggctgtaaccaaagctacttgggagtctgaggcaggagaatcacttgaacctgggaggtggaggttgcagtgagccgagatcacgccactgcactccagcctggcaacagagcaagactctatctcaaaaaaaaaaaaaaaaaaaaaaaaaaaaaa

SEQ ID NO: 207554 - DNA, 1000 bp, Homo Sapiens
tgtgtttaatgctagagatgagatattacgaattagcaactcaccttctaagttcttttccttaccagttaccttaaacatatccatttcccaaatagagaccattttctcatttccagggactttcaggagattaaaaggttaacatttacaatgctctgatttcaagactgcaaggcactatgtacaaaattcgtatgttgtttgagcactttttttaaagcctctatgttcaaaccttttggaatgaatttagttcctatggaaacttatcgctgctgtagatagtgcccttatccaagagaagaaaataaaatcaattcagagaatgattttataattgtataacatagcttgggaatggacattaggaatatgtgcagttgcgctcttcggctgttatactggttcatattagattgtgtttgaaaacaaccttgcaaatgtcaccatctgtccttcactttgaggccagaataggtaatagtggtttaacagaaatttcagtgggtactctttcttgcaacatcacaagtaataccttgtgaggaggcaggggatatgataaatattttggaagtaaaattagctttggtaggtggaggagagggagaaggaagaatgctgttgactcctgggaaagattggcattttgcaggctattcattcactagaattcgtgtagatgaacacaaaaaggaggcagctgaggcagatagactatttgaaagttaagtaatagtagtgtatgcttgaagtgataacttagcctatggtaaggatatgggaaactgaggaatgttaaaagtgaaaggtattttaaaacaggaactaacaatctcagtgacttcttgaaaataaagaattagccggtgctgtggcttatgccatatcctagtactttgggaggccaagaagggcagatcacttgagcccagaagtttgagaccagcctgggcaacatggtgaaaccccatctcagcaaaaaaaaaaaaaaaaa

SEQ ID NO: 207555 - DNA, 1000 bp, Homo Sapiens
gtttcggcagaaactctcagcttgctacactgaagaccattagcctttttgaaaactaacatcccttcactttattccagggttgcagataagctcccccggcccaacctcctgctactcaagcacttggtctatgtgctgcacctcatcagcaagaactctgaggtgaacaggatggactccagcaatctggccatctgcattggacccaacatgctcaccctggagaatgaccagagcctgtcatttgaagcccagaaggacctgaacaacaaggtttgttctgcttactgatgagaaatccccaacttatgatctcaccatctgtttgccaagtccaggcaataaaatgcttcagaatgtctccaactgactcagaatcacagtgaaaatataaaatgcaaaatgcttttgtcatagttccactctctcagatacatgtatctaatgaaactgaataaatccgtgtcttctgtcatctgtgagacagacgagtgctgcgagtatttacatcactctctcccgatataaaaaagcccttttgtttttgtgttttgtacaccacagtctatcagtctatcaatctgggaaactacttgcttaaatgaaaattttattaatactttaaatttttttaagttcttaaatttaaaatgcatgtctcaaaacaccaaggagtatctaactttaatgtatgtgattgttggcatggtggctcacgtctgaaatctcagcactttgggaggccgaggcaggcgaattgcctgagctcaggagtttgagaccagcctgggcaacatgacaaaaccccgtctccactaaaaatagaaaaaattagccaggcgtggtggcgggcgcccgtagtcccagctgctcggaaggctgaggcgggagaatcgcttgagcccgggaggcagaggttgcagtgagctgagatcgggctactgcactccagcctggtgacagagtgaaagcctgtctcaaaaaaaaaaaaaaaaaa

SEQ ID NO: 207556 - DNA, 1000 bp, Homo Sapiens
ccagtgctcaggggcatacacttggatcccagttgtgtgcccttggacacgttgcttaacctctctgtgcatcagttgggtgataatatctactcctggcacattttcagcgttggctgagttacatgtacagtgcttaggccacctgggggagagtaagagtgggatacgtgaggatgtggagtctgttgcatttctgtctgctgctggcatccttcttgtcttgttttgagttgctcgcctctgtctgctccctagggcgtagatttgaggaatattcctggttcttcccaggcagcaggggctcaggctgtgctggagtcagctaggctaaggggctggtctggcatccgcgttgtcctgtcacctccttggtgttttctccaggcctggatctgtgctgtgtgggcacctgtattcctccctcctgccctcactgattctccatacctttcttctcgagagtgccaagcccctcccatgtgttcttgttcatacctaggatcccgggaaggggctggggaagacggtgcccaggtgccctgggtaaacaaagccacctgactccacgggaatggagtgggtggaggggatctgaggtctgcattttgagtatctctggtctcagaggatgaagcatttggtgggggttgggggtggggggtagggtggaagaatctaaagtcttaaaagaaaatggcagttatttgtgggacagggctgtgttgagacttggcatgcttctttttaagagtcagtgttgtaatttaggtataagtgaagcagtactttgtattagtttcctgtaggcgctgtaacaaagcaccacaaactggttgacttaaaacaacagacatggccgggcacggtggctcacgactgtaatcccagcactttgggaggccgaggcgggcagatcacaaggtcaagagattgagaccatcctggctaacacggtgaaaccctgtctctactaaaaatacaaaaaaaaaaaaaaaaa

SEQ ID NO: 207557 - DNA, 1000 bp, Homo Sapiens
aacctgtcttccagcagggtctatgtgtgttcagcactactcccaagccctgtgaacatttgtttcttcactctatcttggagaccacgggttttgtttctaagctttcttgccctgggaaacaccagggtgtgtttcacactagctgcattttaaaatctctttgtattgaagtcaacagggaatgttcctgccttgtcctatttgtgggtctaatcttgccatcgggtcctcagttgcctcagcacttgccactcccacccactcagaagccagggctggccgaggtaacagggcgaggtgcccctggggctgagggcagggccttggggcacatctcccggctgctctctgacactcccaggcctgggtggactctggtgcttcggggtggaatgaggcccagggaggcccaggtaggcctggtctctctccccaaaggctctccaggcctgaggagtttctcagcaggctccatgaacaatgggggtggcctgtctgagggctgtgaaggtcagggatggtctgagctacaccagtgagtgcgctttggtttggtcagaggcaccaagcacagtctatccctggctagtgggccacggccacacctcggtttgtgtgccctggagtaggttccactgaggcccaggactatgttcacattccaccttggagagtaagtttaaataggtacatgtctaggctatcctacggacgcttctgaggttcctgatagagtgtgactcccatttcttttggttgaaatgtctataatagaacaataaaatccttgaactaaagattagcagccttttttagaagctgactcagaacaaaatggatttgggcccagcccagtggctcatccatccctgtcaaaacctttgtgccaggagctcagcctggctccccagccctgggcctgcaggagacctcagggcccactcagtgtccacgttattgggatcagggacactgatatgaaaaaaaaaaaaaaaaa

SEQ ID NO: 207558 - DNA, 1000 bp, Homo Sapiens
ttcaaaaacagagaaattatgcataaatatttttaaaggttttaaaaaatacatagttattcttaaaaataagaaagaaaagtctctttgggccagtaatagaaaagccactatgatggcaggggatcggggggtgctatgaatggatatgggcaattgggaccaggtttttttgcaatgatcctgtctgtgcatgaacccaggacccaagagcacaatacaaataggagctgggctaatctaacttatcccagcagtgtcacagccaggaataagctgcttgttcctgaccagaagtaaagaagaattggcagtcacaagcaagcgcaggaaaccactcaagataggacttggacccaaaatacttttgggctaaaaattcagaactgggctacctaggaggaaagaagacccagagctaccaacttaaggtctggttcaaggttggcacattatcagatttaagctgaggcaacttaaaactgccctatagatacaggtacttacattttttagttatcataaaaattgagcccccaaaacattacaaagaacccagtaaaacctaagatcatgaaaaagcagtcaagagaacccaacaaatgagagaatttatacctgagaaaagaagaacaatctggtgagagtttaaaaataagttaaaattctcaatatatgtacagaagaagttagattttacagaatgaagaacagataatgaaacaagaagagaaagctgtgagaaagaagcgtttagacatcttgaagtgaaaaatattataaatacaatattgaagtaaaagaacagttagactgcacatactttctatagcttaagagaaaattacagaattaggaaatagaactgagaaaatctttcagaatgcagtttagagagagttagaagaaaatgaaagagaaagatggacatgaaagatgacctgaggagctctaacatacatctgctaggagttgcaaaggagaaaaaaaaaaaaaaaaa

SEQ ID NO: 207559 - DNA, 1000 bp, Homo Sapiens
agactctagttttattgtactttggtatccagattgtgagcactttccctgtttttcatttgctgaaacactgtgtataaggtagggatttgtcctgaaagatgtgaagtcactctcctgttcaaactaggcctggtatcttttggtagagcagaggctttattttattaattaaatctgtgctttaggtgtactctggcctttttccagcagcctaaactgaaagcctatttttttttttttgaaagctgcattttaaggccatcaaatttcttcctaatctgtatcaaattgcctttaggtcctggatcctttgtctttattcctgtgtattgggcttaatttagtgacgtttatgtatttatcggtacaattcaaagggctgggagcattgtggtccacaggagaggccttcgctggctgcactggagagaggttttgggctctgctgggcagggtgtgaagaggagagcacaaagcgggccttcgggctcctgcatacggaaaatacatcaccatctcctgtcttttcagagcaaaatctggagcggcaggtgttacagacacaatgtagacgactggaggcccggcactacagcctcagcctgacggcagagcagctctcccacagcgtggcggtgagttgggaagggatggaaaccttcaaacacgcaaccttttgagtttgggttcagaaacacccatgcagataagtttcagagaggaaatgtgctcttaagagatcaaaatttggcggatcacgaggtcaggagatcgagaccatcccggctagaacggtgaaaccctgtctctactaaaaatacaaaaaattagccgggcgtagtggcgggcgcctgtagtcccagctacttgggaggctgaggcaggagaatggcgtgaacccgggaggcggagcttgcagtgagccgagattgcgccactgcactccagcctgggcgacagagcgagactccgtctcaaaaaaaaaaaaaaaaaaaaa

SEQ ID NO: 207560 - DNA, 1000 bp, Homo Sapiens
atgagaaatacaatctatttagtgaaatggaaaattgcaggacaagagagaaatgtaagtcccagatgtgcacagagcactttgctatggaaaccacagagaaggggcatccacctcagcctggctccaggttctaaatggagagactatgagcattttcagctgcactctcatagaagagaggaacaatccttcagaccaggggaagacagaaaaggagactggccagaagaacacctgggagggagcacagagctcttcattcccaggggttctttatagcatggacatttacagtgtaggtactgcccaaatgcccatccacaccagtgttagggactgaattttgtttatttcatttatcaagatataatagttttgagtcatcagttgtatttctatagcctataaaaagagcaccaggcaaggcagggcccaccaccgctgcaaccacacccagagtcttccccatgctgtactgtggactccacatcagacctgggaggcaggactcagtggatgaggctgtgttttgcatttctgagtacagtccacaaaatggtttgcttctgaaaaagcagtagtagtcttacatccaagattattcctaaaataaagtttcgacccacatatataatgaaattgaaactgcctacattggcaaagccagaaagagagtaaaaaagatggggtaggccagttgcggtggctcatgcctgtaatcccagtactttgggaggctgaggcgggtggatgacttgaggtcaggagttcaagaccagcctggccaacatagtgaaaccctgtctctaccaaaaatacaaaaattagctgggcatggtggcgtatgcctgtagtcccaactgcttgggaggctggggcaggaaaatcacttgaacccagaaggcagaggttgcagtgagcctagatcgcaccactgcactccagcctgggtgacagagcgagactgtctttaaaaaaaaaaaaaaaaaaaaaaaag

SEQ ID NO: 207561 - DNA, 1000 bp, Homo Sapiens
cagccttaagtctcttaaattgtgaataaaatgtaaatcttaaaaacaaaacttgagaaaggttcttggattctttggtggggttttttgttgttgttgttcgtttgtttgttttttggggtggatgctatctagctcttgtgtgtaatgtacatgagagtctcaaatgttgtactttaagtccttaggttgtatgttgaatttaaactgttacttgttacaaagcccttacctttaccttatgccttcaaaagctcatatttaaataaaatggctctcaaagtaacctaccttttgcacgttttttgcccaccttgattgtacatgtcaaagtcaagcaaactaaaagtgcttatttatataaagtatatgtacatccctgtgactgtccttaaatgcttattagatcattgaattgctgaatatagaataacaaatatggaagacaaaaaattttaatttgcttatttttattaatcatgtttaagagtttgaaagactgcaagagtaagtttgtaaaagaaatcaaagactttgttgttcattatagactggctatctccctatagtagccagagtttgctttttattagtttaagcccctaggcactgtagtatgttattcagcaatgtttatttttaattttttagggggaagctaaagagctactcaaaattcttgctaggttactgtttctaggtcagaaaggttatttttgtttgtttgtttcagacttgcaccataatgtgatttgagtaggtctttttttcttaacgtgtatatattttaaatcaatttttaatttttggaaagccaatacatccacatggtttaaaaatcccacagtgtgcaggcacctgtagtcccagctaccaggaggctgaggcaggagaatggcatgaacccaggaggcggagcttgcagtgagccaagattgtgccactgtactccagcctgggcgagagaatgagactccatctcaaaaaaaaaaaaaaaaaa

SEQ ID NO: 207562 - DNA, 1000 bp, Homo Sapiens
aggtgaacatagtagccatcttcagcatccttaaaaggcaaggagtgattttattctgtattactccagaaaatgaacctagaatacatgagggtcattaccaaggaaactgccaaggccaggtgcagtggcttacacctgtaatcccagcactttgggaggccaaggcaaaaggattgcttgagtgaaggagtttgagaccagcctgggcaacatggcaaaatcctgtctctataaaaaataccaaaattagttagtcatggtggcatgtgcctgtggtctcagctactcaggaggctgaggtgggaggatcacttgggtccaggaggtggaggctgcagtgagctatgattgtgccactgcactccagcctgggtggcagagtgagaccctgtctcaaaaataaactaagtgttgagggtgactttacacaatagaacaacatgcaaaaaatacttcacagcataagagtgaaggcagaaggaatatattttgtaaaatagaatggagctgagtgagaagctggtttgtgaagcacctgccatgaaatcctgtggccttgctggtggtagtctgcagggctgcctcaggtttcctagtggccagagaagggaaaggataagtcattgcatctgtgagagaaaataagccattagctcagaagaactttaaagatttctgcctgagagaataggaaaaatgtgtccaggcacggtggcccatgcctgttatcccagcacttggggaggctgaggcgggcagatcacaaggtcagtagatcgagaccagcctggccaatatggtgaaaccctgtctctactaaaaatacaaaaattagtcgggcgtggttgcgggcacatgtagtcctagctactcggaaggctgaggcaggagaattgcttgaacctgggaggcggaggttgcagtgagccgagatcacaccagtgcactccagcctgggcgacagagagagactccatctcaaaaaaaaaaaaaaaaa

SEQ ID NO: 207563 - DNA, 1000 bp, Homo Sapiens
tatttaagagatttttcaactaagaatataagaacatattgccataaaattttaaaatccctatattctagaggttctatctattttcagttgtatgctccttaaacttatctgtatttaggcttcccccaaaatgaattctaacagaaaaaaaaaacttcggtaaaaaaagaatccataaacactaaatattttaatacctttatttacctcctctctaacagaactaatcagcagcagataatatatttgttacgaagagaattaattttctagttaaacatgcacataaaaacataaaggtgacaatatttggcaatatatgacactaataaaggtaacatttattgggctatccactgggctaagcgcttgactcagatcacctcagttaatccttacagcaaacctataaagtaggtgctattcttatttccattttatagatgagcttataaatgaggaacctcattactgtaatttaatcttcaccaacccagaatttgagttcagtgtttactctggctattaaaaggttgaataagcaaattagaaattaaacgggatttcagaagatatatttaacctactagaaggtcgtacgttttaagacatactgaaaaacagatgctaactgcttccaacaggatgtgtttaggaagatcctgcctgacactataccacattaaaacacttgaagattcaaacttttactagttaaggttgagtgtcctctcactattatccccaatgactggtccaagttagtaaggtattattctacttctatgggtggtacagtatggtggatgtcagctgcggctcccaagttctatttccctcctaccctgacaaagtgtccagaactctacacacccccagcctccccacagcctggtgcaggagccagtctggtgcagaagccagcctgaggatgaactgacccagggaggaaggagtggagagattaaaaaaaaaaaaaaaaaaaaaaaaaaaaaaa

SEQ ID NO: 207564 - DNA, 1000 bp, Homo Sapiens
tcttgagattttatttatttattttttatgagacagagtctcactctgttgcccaggctggagtgcagtggcgcaatctcagctcagtgcaacctctgcctcccaagtttaagcaattctcctgcctcagcctccctagtagctgggatttcaggcaccaccacacccagctaattaagtctgagaattttaagttccaacttggccttccacagtgttgtcaaaataggaggaaagtgcactttgacctcttgattcatagatttaaaatatcctggcataaagggccttgtcccagatctcaagtgttagggaagcacttggtcattttcttccctttctggcatattagagaaaatgatgtgtacataaaatttcctcataattttcagcctcacaatttatactacggtaatgagcgctggtagcccagacaagtacatgactaggatcagaaacccgagtagaaagtaagtcagcagaagagcgagttcgcccgtgctgtgaaaggtttgttgttactgttttgtggagagggggtgaggtgggtgtgtgctggtatttcttacagagggtggtaacatccttaaaatgtatacatatataatattttctgacaagcatctggcattgtcatttgtgtcagattgtcatcattagatattttatttggaattgtttgtatgaaaaccaatcttcggcggggcgtgatggctcatgactgtaatttcagcactttgagaggcagaggcaggcagatcacttgaggtcaggagttcaagaccagcctggccaacatggtgaaaccccatctctactaaaactacaaaaaaactgttagccaggtgtggtggtgggtacccaaaatcccgactactcaggagctgaggtaggagaatcacttgaactcgggaggtggagtttgtagtgagctgagatcacaccactgcactccagcctgggaaacagagtgagactccattaaaaaaaaaaaaaaaaa

SEQ ID NO: 207565 - DNA, 1000 bp, Homo Sapiens
aatcaaatttatttttacacagattactccatgtaatatctgcaaatgttttaactatttattgtaggtaagtagttatcatcttttttagaagggaaactgaggcacagtgaaatacacaccccccacacacactgagtacactaactcagaggtaggtatgatagacagaagacctgtttgtatttcaaggaattatttgagtgcgagtaacaaaaaaaaaatctaactggtttaaaccaaaaggaaataattgactgatgtaaactgaaagttctggaaatagggctggtttctggtagtgggactcaaattatattatcagaattcagttcctctctacttctagactctctgtcttctgttctgactttattctcagattttgtgcaggggcaggatggctgccagcaagttcagggctatcatttcccaggtttgactgcagctgaaaatgtggctcccctctcatgaccctcccactggtctcattgtgccttgttggctccggttgggtcccagaaccaatcactctggctagggcaatagaatgctccttttggccatggctgaatcacccagacactgttggggtttgggtgtgggagaggacactgttggggttcgggtgtgggagaggacacctgcacctgcacagggactgaggctgaaaaggaaaatagaagcactcttccagaagggtgaagaaatgccgatagtccaaatcaaagtgataacaaagaagatgctcagttcagccttctctcatagcctacttcttgccttctagcctagagccacctgattgtcccttgaagctctgaaatttaaattgaaggataaatataaattgtgtgaaggaaggccctttacagtaaactgaataatgccccccaccccgaccccaaatatccaggccctaatccctggagcctgtgattatttccttatatggtataaaaaaaaaaaaaaaaaaaaaaaaaaaaaaaaaaaaaaaaaa

SEQ ID NO: 207566 - DNA, 1000 bp, Homo Sapiens
acggggaccaaaatttcatatgtggtggacactgggggataggggaaacctgaatggaactttaatcatgaaaatggaacaaaatgacaaaagcatgttcataattttaaagatatattaattctgacaaggaaattaagttgtttttgaagtgaaactgattttgtatcttacaataattttctcatttgatttttgcaacgtgatcatagaaggaagttttgcaaaaatatttgagggcttcatcagttttcagaaggcctcttgatattttgatattcacattcttttttataagtatctatcggtgatcacctcctcaactttccttttattgttaactggtctgagtctgtcacccacacttttcagagcttttgcttaaggtttgagcagttttctagcattatttatcaacttcatcaaatccaccaccatttgcaagatttgtgattattgcaattaagttgcattctatttgtgtcatttgtcatatgcttacagtataaccatagagactaacagaagaccagaatacagtgggcaggataaatacattggcttcaggtacttaagaagcaaagagggactaactttttataaatagctcattagtgaatgttttcacattgggatgactttcacttctctatataatttggtagctgcaaggacttggttaatgaatatgcaaataataaagacccccttttatttataatgcagatatgttttaataatgtacatgccctttgaacttagcatttacacttctcagaagtcttcagcctgagcaacatagctggggactcttgactctacattagccaggtgtggtggtgcatgccttgtagtcccagctgcttgggaggctgaggtgggaggatctcttgagcccaggagttcaaggctgcagtgagtcatggttgtgccactgcattccagcctgggtgacatagtgagaccctgtctcataaaaaaaaaaaaaaaaaaaaaaaaa

SEQ ID NO: 207567 - DNA, 1000 bp, Homo Sapiens
ggaagtgatttccaagcccattttcctagtgttattggaaaatttcaatttgtcagtttctcagcttggaaaagtcacctgaatgactcccacacctctacccactcatctccctgtcttgtggggggtatctgacctctagtactggtgccaggaaaggtgatagaacagtggttctcaattttgatttaattcatatgaactgtggctcgggcatcagattaaggcacatcaggtgattatggtgtacagccagggttgagggtcactgtcttcaaggaaacttctacacctcttacacagtggtttcacctgcagaaggaggcacctgtcctagactgctctagtgttcacaaccaatgataaatctgctgtgggtggagaatgcttgttgagccaaaagcctgcatccttcttgcttctgtcttgactgatctcatattccttcttgggcatagctcttggcaagcagtaaatcttcactctcccactgccgtcagccaagtgttcattttgtccaccacaaagataggtgtttttgggatttgataggttgcatgaaggaagcaaatagaccgtaaatgcagaatctctgtgtttacttggaaacaggctagtcattgacaacacctttaaggatagattttctttgaagataagttgctgggttatgaacatgctttaaaaagtgagcaccaaggccaggcgcagtgtcttgagcctgtaatcccagcactttgggaggccaagacgggcagatcacaaggtcgggagttcaagaccagaccagcctgaccagggtggtgaaaccccgtctctactaaaaaatacaaaaattagccgagtgtggcggtgcacgcctgtggtcccagctactcaggaggccgaggcagaagaatcgcttgaacccgggaggcggaggttgcagtgagctgagatcgcgctgctgcactccagcctgggcgacagagcgaaactctgtctaaaaaaaaaaaaaaaa

SEQ ID NO: 207568 - DNA, 1000 bp, Homo Sapiens
aattttaaaaattcagagtgctgggctaattttactacataagtagaatatacttagcagctattagtggcttctacactgaaatagaaccctgcagttatgaaaatcatacctgaaatttgagaaaagttgtttttgcacagtaatatagggtaaatgataactctggtagaaatagcctaaatgaagttcaataaatgctggacactatttgaggttgacttttggattttgttgtaagggttatctccagatctaagtgtaaactcagatcactccggtcttcctgaatcagacctatttttcatttgagacagatggaaccatcaagaatttttcccctttgactatgtcttggaagaacagggtgccattcctttcaggtgcatttaaacccaatccaagtagtcaaactgaagaatgcagagagcaatggctattacaggcctcaaagagtccgaatcctttgcaatggccatgaaccagtcttgccttttcagatgatctataagcctggaataggacagttttggaccatggtagggaacttggaaatgttagttggtctaaattcctggttatggaattaaaacaagttgtatctactttagttattaacttaatccagtatttttgttttggcttaatcctattagtgtcacattttacttttagaatatcttccactgttaccgggcgcactggctcacgcctgtaatcccagcactttgggaggccagggtgggcggatcacgaggtcaggagttcaagaccaccctgaccaacatggtgaaaccccgtctctactaaaaatacaaaaattagctgggtgtggtggcacatgcctgtaatcccagctactcaggaggctgaggcaggagaactgcttgaaccaggacctgggaggaggaggttgcagtgagccgagatcacaccattgttctccagcatgggcaacaagagtgaaactctgtctcaaaaaaaaaaaaaaaaaaaaaaa

SEQ ID NO: 207569 - DNA, 1000 bp, Homo Sapiens
atcccttttcctcatggctgccctgactctctgaagtggcttggggttctgggctgactgtgggggacacatggccatcttgagcatcacacagaccggcgggtcctgctgcagtcctgtccttcctgtagtcttcactccacagcctcactccacagtgagtgaccctcactggacaccctcactccacagcctgcaacctgaggatggggtgtccgcctgagcacagcatcgggggcctggccccagcagcgggtcctggatgtgctgagattgggctgcctgggttgacctcattgggaggaggtggggacggcaggtccagctgcgtactggggaccctgctgcaagccctggatgtggactcctgagtcagttctttgccttcctgtggtctttttccggcactcacatcgcccaccaaggcctgggtgggtgagaacagtgcccacaaggagaccctgagtaacagagactcacagcccatccaggtctctgggcaggaaattgaaggaatcatcacattttacagaggaggagactgcagctcagagtgggggaagtgtgtgcaccaggccacaggcaagtctgtccagagcactggtaggaatgagggaaactaggaatgaccactttaaaaagttagatgagaagaatttcaaggccgggcgcggtggctcacgcctgtaatcccagcactttgggaggcggagatgggcggatcacgaggtcagaagattgagaccatcctggctaacacggtgaaaccccgtctctactaaaaatacaaaaaattagccgggcgcggtggcggacgcctgtagtcccagctactcgggaggctgaggcaggagaatggcgtgaacccgggaggcggagcttgcagtgagccgcgatcgcgccactgcactccagcctgggggacagagcgagactccatctcaaacaacacacacacacacaaaacacccaaaaaaaaaaaaaaaaaaaaaaaaaaaaa

SEQ ID NO: 207570 - DNA, 1000 bp, Homo Sapiens
atgcggcctctccgtgttcctgagagcagcccccaatccccttgccagccttgcctccttcctgcccctgccccgggaaccccgtctggcccagtcccagcccaaatctgaggcagctgcctgaggacagccttgtactcacagcaacaccccggagagccagggcccagttggagggcagtctcctcctgattgccctaggagagcacagtcgggcggagggtccctctctggaactggcatttgatgtgtgctctggtgagaagaactttcccacggagcacagcctccagccactcctgtccccttccccaggacctttacaagtagattttccccagaactgtccttcatccccgcccctgaggtcctggagcacaaaggcgaaatgccaggccctggaggtggtggtgggctgagtggaggcccagctgtctggccccaccctttgtagctgcaggccacacccaccatgtgtggctgtcaagcatcatcccttagactcaaaagtttaccatgatacctgtgcccttatgttccttccactcaggaagctgccccagtaaatgactaggatgactaggcccctcaaaagccatgttcaggtggtgccttccacgctcatgtggcagagccaggcgcgcacacagccagcaccattgtgctgcaagctcctgactcccaggtggctgccactgctcctgcctacacatcctcacagccactgtctagcaggacacctgtttttcccagcccgttactcctgtagctctgaatggaaacagcagctcacatgtcacctctgtgtgacggactcggccccacccagacacacaggtgtggttgtcagcgagcacctcaggagaactgagaagctctttttcaccattctttccccaaatcagtcaaaacctttcacaacctggaaaatgttgaaagcaaccattcctatttttgtttgttttttattaaatcttgcacaaaaaaaaaaaaaaaaaaa

SEQ ID NO: 207571 - DNA, 1000 bp, Homo Sapiens
aagaagggggcagaaatggggtcatttgacccttcgtcttctcaaatcagaaactcattgtgtggctgtgcctttaaattaaccatttactttcatggagttacttcaattgctcttctaagacataaatgagatgcctgtttctttatattcttaccctgtgtagtacttgctggtggtggaaagccatgctacctccctgaattcccaggattgtgatgcaaggtctaatgcagtagttctccaagtgtggtctgtagaccttatggggtggggggtccctgagaccgtttcagggagttcacaggtcaaacaattttaataataaagctaacgtgttatttgatcttttcactgggctgacatttgcactgatggtgccaaagcaatgttatgtaaaactgctgatgttttgggcaccaaactggaacaaaaccttatattctttaccactaagcatctgccggttaaaaaaaaaaaaaagaagtttaccttaagaatgtccatccatgatgaagtggtaacaatttttattaaatctcaatcctgaaattcttaagtacttttttagatttctttttgatgttctgtgtgaagaaaaagtattcctactacatatcaaagtgagaaactgtgcttgtgctattgagttgcaagttaaactagccttttaaaaaatgaaacataatggacgatgtggtggctcacgcctgtaatctttgggaagctgaggcgggtggatcacgaggtctggagattgagaccatcctggccaacatggtgaaaccccgtctctactaaaaatacaaaaattagctgggcgtagtggtgcatgcctgtaatcccagctacttgagaggctgaggcaggagaatcgcttgaaccagggagtcggaggttgcagtgaatcaagatcacgccactgcactccagcctgacgacagagcgagactctctcaaaaattaataaataaataaataataaaaaaaaaaaaaaaaa

SEQ ID NO: 207572 - DNA, 1000 bp, Homo Sapiens
taaggttgactttcagcaaagcttgaaaaatagcatataataactgttcttatatatataatgtagaagaagcacaaaagagagaagacgactagttttaggaaactgctgatataaggattatatcattccaggtcaatctcgtatgttgaacacagagggaaaaattctaaataagagcaaacgaatccagcaggatattaaaataactacattgtcactaatgagccttacctaaggaatgcaaggatagtatgaagttttagaatctatcagtataggtctggcacagtggcccatgcctgtaatctcagcactttgggaagccaagacgggtggatcgcttgagcccaggagttcgagaccagcctggggaatgtggtgaaaccccgtctctacaaaaaatacaaaaattagccagtctcacaatgtggtctcaaaataaataagtaaaaatgtaaaaataaatctatcaatataattcatttattataggaaaaataatatcattagttcagtaggtacagaatcaatcattagtaagctcccacacttatttataatttaaaaaataaaaccaaacacctcttatcaaactagaaatgggaaaaaaaattgctgctggaacctaaaagcaaacgtcatattaagagtgaaataggcaagtctttccagtaaagttcaaaagaggtaagaatgcctgctatcacatctattatccaacattatatttcaatttttttgttaatataatacaagtaaaagaaatagataggcataaggatcaaaaaggcaaacaacaattttagtattttcaaaagttatgagtctatgtaaaaaaaaaagagaacatatatattttcagaactaaaaaaagcactcaaaaagtccaatgacttttagttctaaaaattttaaacacaaaatttacattttaaatacaaaacccacattttaaaaaaatttgtaagtttctataggccaaaaaaaaaaaaaaaaa

SEQ ID NO: 207573 - DNA, 1000 bp, Homo Sapiens
gttgttgatttttgagatgaagaacaactatctggccagggagagaaagagaaaatcggcttataagttagaatggtacagagtgctctgccttctcagattattttgtttccaagaatcactgattatatagctttttttttttaagtttaagcccatacccattctgcatatttcagagtgaaatgtcctttcgggacaatcttattaaatcactaatctgaaattttatgttccctagttggccatgccagtattttggttagggttttaggtgatttttatatccactgtaaacttggatataacttaccattaaccagatacttaaaaccagggtattttcctaaggtttaacattggaagtggtatgtgagctgagccttgaagggtgacaccaagttttttgacacgaaaaggttggatgagctagctaaagggcttgttttttatcctgtagggcaggagtggttgtagatgccctctcatgtgctgacatactgattgatggtggcttctaaggtctctcctgagtctagtaggaggcaggcttcctaactgtcatggacaccaggcaggcaggtaggggaatgaagcaagatttggcagcgcagctgctgtgagtttgctctccagtggcttggaaatgggaagtaaaggattctgatcttatgtgagaccattttcagactgtcctagtctgccctcacatatccctggaatggacacatacaggctggtcagggctttcttggggcactgaggtgggagaagctggaggcctgggcagggtagtggaactgagagtgagaagccccctacacttggatctcttgcgtatcacacgagactcatttattgatgactgcctagctggctcataatactgatggctgaatgggggtatgaaaactggtcctcaagagtatccagtcttattggaggaataatgcaaaaacaaacaaacaaaaaaggataaaataaaaaaaaaaaaaaaaaa

SEQ ID NO: 207574 - DNA, 1000 bp, Homo Sapiens
gtttcaggcgctccacggagcaggttgtttgtcagcagctaagtgccgtcagggttcccggctctggcgtccgtgggcggctacgggaagcgacaggagtcagtcctcgttcacttcccggctcgcgcgcctcactgctgtggtctccccaccctccccgcgccccgccttctgtgtctggggcgtccctggcggctctgctgggttttggacagggacccgccgctgatcgccacccagctcggcctcctgcacagcctctggagccttggaccgcgactggcttgctgtgggacgagcacagagggataaggacaaagaatgtgtcctgggtggatctggctgcctttgcccggaaggcggagtggggtgggaggtggtaggaaaatgggaaggaaagaaaagaaaggtgggccgacgtccacctggctgttccaggcctccaggtctaggagggagggcgctcggggctgggacttttcaggaccagggtggtcaccgcacaggccccgcctgcctggaccaagcgctggccttcccggggcgcccaggtccacggggtcaacgccagggttttctcagcttcctcgtctgcctcggatccaagtccagacagtgccagaagagacttgggggcgctgctttttgacagtacacacctctgtatgcaggtgaaacggtgggggaagggttcagtacgctggactgtgcccagcccaagctccccatccgttagtgataacttggactcgcagccactccgcgtcactcgccggttatcctgcgtgtgggtgttttctccaaattggacacttagggaacagtttaagcagtatggagcacaattctgtgcctattagatgctcttaaatacccgacttctcagggccctacactgactgatagtttgacctattggctgtaaacacaccagccagaaatacaaataaagttaaacaaagtcatgtcagccacttggaaaaaaaaaaaaaaaaaaaaa

SEQ ID NO: 207575 - DNA, 1000 bp, Homo Sapiens
ggggaatagaggaaagcaggtgtgtgttggggaggcctgactctgagcataccttcttatgtagttctgactgttagaacatgtgaatgtttcacatacttgaaaaagtaaataaactggacaagattttaaaaaagaagaatgcaaaacaagtaaattgaaatgtatttcaattgaataatgtgaccatgccttaggggataggagagggatagagaactaacactagtaacctttgaacttgacattttgaccctaaacccttaagctagggattataataactgtgaactaatattaaacttaagttggttggctggtttttcacagtggtttggattagtgattctgaaactatgtgtattctaggtttgagcaaatacggaaataaattgtggataatgggagccaagtttcatccctttggagagagaagttataaagatggaaagtagaatgccaaaagtcaaccctcagtgtgttggactgcgattggaagtatcagtatcaatggattgtttttaatgtatggatgtagaaatagatatagatgtgtctgtacacaggagtgcacgtttcccaattctgtctgctgagaaggtctagaagcagtgagaccccagcaacagtgagcacaactatcatccacatattagtttctaaatatcattctcactaataggaactccttggagaagtggctgattccagaacaggagcaggaaaagatgagcctagagcatcttgctgtgccggaaagtaaggaagtgcccaaagaatgatagggacacatcaaaggacacaggctgggattacaggcgggagccaccgtgcctggcctagaacaaaggaaatttttaagaaatctatacactgtttagcaatctttgctaatttgttattcatggataaaggttggggaggttgtgcattccagaaaggaaagagaaaaaaaattaaagtaaggccaaaatgtgaaaaaaaaaaaaaaaaaaaaaaa
